United States Patent Application Publication US 2026/0191920 A1 - sequence listing, part 15

SEQ ID NO: 68069 - protein, 337 aa, Legionella parisiensis
  REGION 1..337: note = tr|A0A1E5JP91|A0A1E5JP91_9GAMM S-adenosylmethionine:tRNA ribosyltransferase-isomerase; OS = Legionella parisiensis OX=45071 GN=queA PE=3 SV=1
MNKQDFYFDLPPELIAQYPLAHRSDSRLLLYNRQKDEYGHYQFREIADFLNPGDLLVMNDSKVIPARLYGHKTTGGKVELLVERITGEFTFLAHIKASKALKAGSIIKLEHNKEIEVLDREDDLFICKADIDVLQLLNGIGHIPLPPYITRNDEILDQDRYQTVYAKYEGSVAAPTAGLHFDEAVLSSLHSRGVAVAYLTLHVGAGTFRPVRCDNIEDHKMHSEQFTISPELCAAVHATKAAGNRVIAVGTTALRSLESAAQNGVLTACSRDTDIFIYPGYEFKICDGLMTNFHLPESTLLMLVSAFIGHKQAMKLYQEAIEKKYRFFSYGDTSLLL

SEQ ID NO: 68070 - protein, 337 aa, Legionella pneumophila
  REGION 1..337: note = sp|Q5ZU04|QUEA_LEGPH S-adenosylmethionine:tRNA ribosyltransferase-isomerase OS=Legionella pneumophila subsp. pneumophila (strain Philadelphia 1 / ATCC 33152 / DSM 75 13) OX=272624 GN=queA PE=3 SV=2
MNKQDFYFDLPSELIAQYPLANRSDSRLLIYNRQTEEYGHYQFREIADFLQPGDLLVMNDSKVIPARLYGHKATGGKVELLVERITGDFTFLAHIKASKSLKSNDLIYLDAGKRLEVLQRQDDLFLCKACENILDLLNDLGHIPLPPYIAREDESLDKERYQTVYAKCAGSVAAPTAGLHFDDAVLSSIRARGVNIAYVTLHVGAGTFRPVRCERIQDHKMHSEWFTVSPDLCTAVKAAKSMGNRVIAVGTTALRSLESAAMGGELIPCSRDTDIFIYPGYQFKVCDGLITNFHLPESTLVMLVSAFIGHQECMALYQEAIDKRYRFFSYGDASLLL

SEQ ID NO: 68071 - protein, 337 aa, Legionella pneumophila
  REGION 1..337: note = sp|A5IDI6|QUEA_LEGPC S-adenosylmethionine:tRNA ribosyltransferase-isomerase OS=Legionella pneumophila (strain Corby) OX=400673 GN=queA PE=3 SV=1
MNKQDFYFDLPSELIAQYPLANRSDSRLLIYNRQTEEYGHYQFREIADFLQPGDLLVMNDSKVIPARLYGHKATGGKVELLVERITGDFTFLAHIKASKSLKSNDFIYLDAGKRLEVLERQDDLFLCKASENILDLLNDLGHIPLPPYIAREDESLDKERYQTVYAKCAGSVAAPTAGLHFDDAVLSSIRARGVNIAYVTLHVGAGTFRPVRCERIQDHKMHSEWFTVSPDLCAAVKAAKSMGNRVIAVGTTALRSLESAAMGGELIPCSRDTDIFIYPGYQFKVCDGLITNFHLPESTLVMLVSAFIGHQECMALYQEAIDKRYRFFSYGDASLLL

SEQ ID NO: 68072 - protein, 337 aa, Legionella quateirensis
  REGION 1..337: note = tr|A0A378KZM2|A0A378KZM2_9GAMM S-adenosylmethionine:tRNA ribosyltransferase-isomerase; OS = Legionella quateirensis OX=45072 GN=queA PE=3 SV=1
MNKQDFYFDLPEELIAQYPLAQRSDSRLLTYNRQSGEYGHYQFREIADFLNPGDLLVMNDSKVIPARLYGHKLSGGKVELLVERITGPNTFLAHIKASKALKPGGIIQLEQGNQLEILDRNDDLFVCKSNCDALSLLNTLGHIPLPPYITRNDELLDEDRYQTVYAKHAGSVAAPTAGLHFDDAVISSLKSRGVNISYVTLHVGAGTFRPVRCDNIKDHKMHSEQFTLSPELCAAVHATKAAGNRVIAVGTTALRSLESAARDGELSPCSRDTDIFIYPGYQFKVCDGLMTNFHLPESTLLMLVSAFIGHQQAMDLYQEAIKKGYRFFSYGDTSLLL

SEQ ID NO: 68073 - protein, 337 aa, Legionella quinlivanii
  REGION 1..337: note = tr|A0A0W0XL87|A0A0W0XL87_9GAMM S-adenosylmethionine:tRNA ribosyltransferase-isomerase; OS = Legionella quinlivanii OX=45073 GN=queA PE=3 SV=1
MKKQDFYFELPQELIAQYPLPNRSDSRLLYYNRKQAAYQHQQFKNLPELLEPNDLLVLNNTKVIPARFFGTKSTGGKVEFLIERRMADNQFLAHIKASKTPKNRSLIQLEKAWQVEILDKLDDLYLCRSLGDLDCLLQEVGHIPLPLYITREDEQADEERYQTVYAKHEGSVAAPTAGLHFDEFVISQLQEKGIRLMNVTLHVGAGTFRPVRCDDIRDHKMHREQFEVSEAVCEAVNETRQRGGRVIAVGTTAMRTLESAASEGHLKACKGETDIFIYPGYQFKVCDGLITNFHLPESTLLMLVSAFLGREQTMALYEEAIARRYRFYSYGDATLLL

SEQ ID NO: 68074 - protein, 337 aa, Legionella quinlivanii
  REGION 1..337: note = tr|A0A364LJZ3|A0A364LJZ3_9GAMM S-adenosylmethionine:tRNA ribosyltransferase-isomerase; OS = Legionella quinlivanii OX=45073 GN=queA PE=3 SV=1
MKKQDFYFELPQELIAQYPLPNRSDSRLLYYNRKQAAYQHQQFKNLSELLAPDDLLVLNNTKVIPARFFGTKSTGGKVEFLIERRMADNQFLAHIKASKTPKNGSLIQLEKAWQVEVLDKLDDLYLCRSLGDLDCLLQEVGHIPLPLYITREDEQADEERYQTVYAKHEGSVAAPTAGLHFDEFVISQLQEKGIRLMDVTLHVGAGTFRPVRCDDIRDHKMHREQFEVSEAVCEAVSETRQRGGRVIAVGTTAMRTLESAARDGYLKACKGETDIFIYPGYQFKVCDGLITNFHLPESTLLMLVSAFLGREQTMALYEEAIARRYRFYSYGDATLLL

SEQ ID NO: 68075 - protein, 337 aa, Legionella rubrilucens
  REGION 1..337: note = tr|A0A0W0XRR4|A0A0W0XRR4_9GAMM S-adenosylmethionine:tRNA ribosyltransferase-isomerase; OS = Legionella rubrilucens OX=458 GN=queA PE=3 SV=1
MYKHDFYFDLPEELIAQYPLPGRSDSRLLVYHRDDEQYRHQQFKQLPDFLNEGDLLVMNNSKVIPARFFGKKPSGGQVEFLIERLKPDNQFIAHIKASKAPKAQMIIDLANGWQVQILAKQDDLYHCQTLGDLETMLADIGHIPLPPYITRHDEKADFERYQTIYARHKGSVAAPTAGLHFDDSLMERLQQKGVQIAYSTLHVGAGTFRPVRCEAIKDHKMHSEQLIISDALAEAVNRTRASGRRVIAVGTTALRSLESAVVDGRLQACVKETDIFIYPGYEFKICDGLITNFHLPESTLLMLVSAFIGHARAMDLYREAIAERYRFFSYGDASLLL

SEQ ID NO: 68076 - protein, 337 aa, Legionella sainthelensi
  REGION 1..337: note = tr|A0A0W0YCC0|A0A0W0YCC0_9GAMM S-adenosylmethionine:tRNA ribosyltransferase-isomerase; OS = Legionella sainthelensi OX=28087 GN=queA PE=3 SV=1
MNKEDFYFDLPPELIAQYPLANRSDSRLLVYDRKIGEYGHHQFREIADFLKSGDLLVMNDSKVIPARLYGHKTTGGKVELLVERITGELTFLAHIKASKALKAGSIIQLEQNKHIEILDRQDDLFVCKANTEVLELLNGVGHIPLPPYIARNDESLDIDRYQTIYAKYEGSVAAPTAGLHFDETVLANIRSRGIAVAYVTLHVGAGTFRPVRCDKIEDHKMHCEHFTISAELCAAIHATKAAGNRVIAVGTTALRSLESAVQNGALTPCSRDTDIFIYPGYEFKICDGLMTNFHLPESTLLMLVSAFIGHKQAMKLYHEAIEKKYRFFSYGDTSLLL

SEQ ID NO: 68077 - protein, 283 aa, Legionella sainthelensi
  REGION 1..283: note = tr|A0A3S4L5S6|A0A3S4L5S6_9GAMM S-adenosylmethionine:tRNA ribosyltransferase-isomerase; OS = Legionella sainthelensi OX=28087 GN=queA_1 PE=3 SV=1
MNKEDFYFDLPPELIAQYPLANRSDSRLLVYDRKIGEYGHHQFREIADFLKSGDLLVMNDSKVIPARLYGHKTTGGKVELLVERITGELTFLAHIKASKALKAGSMIQLEQNKYIEILDRQDDLFVCKANTEVLELLNGVGHIPLPPYIARNDESLDIDRYQTIYAKYEGSVAAPTAGLHFDETVLANIRSRGIAVAYVTLHVGAGTFRPVRCEKIEDHKMHCEHFTISAELCAAIHATKAAGNRVIAVGTTALRSLESAVQNGALTPCSRDTDIFIYPGYEF

SEQ ID NO: 68078 - protein, 337 aa, Legionella santicrucis
  REGION 1..337: note = tr|A0A0W0YFP9|A0A0W0YFP9_9GAMM S-adenosylmethionine:tRNA ribosyltransferase-isomerase; OS = Legionella santicrucis OX=45074 GN=queA PE=3 SV=1
MNKEDFYFNLPPELIAQYPLANRSDSRLLVYDRKIGEYSHHQFREIADFLKPGDLLVMNDSKVIPARLYGHKTTGGKVELLVERITGELTFLAHIKASKALKAGSIIQLEQNKHIEVLDRQDDLFVCKADMEVLELLNGVGHIPLPPYIARNDETLDKDRYQTIYAKYEGSVAAPTAGLHFDAAVLSHIRSRGISVAYVTLHVGAGTFRPVRCDNIADHKMHHEHFTISAELCAAIQATKVAGNRVIAVGTTALRSLESAAQNGVLTPCSRDTDIFIYPGYEFKICDGLMTNFHLPESTLLMLVSAFIGHTQAMKLYQEAIEKKYRFFSYGDTSLLL

SEQ ID NO: 68079 - protein, 337 aa, Legionella shakespearei
  REGION 1..337: note = tr|A0A0W0ZB93|A0A0W0ZB93_9GAMM S-adenosylmethionine:tRNA ribosyltransferase-isomerase; OS = Legionella shakespearei DSM 23087 OX=1122169 GN=queA; PE = 3 SV=1
MNKQDFYFDLPPELIAQYPLANRSDSRLLIYNREVREYGHYQFREIADFLNPGDLLVMNDSKVIPARLYGHKATGGKVELLVERITGEFTFLAHIKASKALKAGGIIHLDQGNQLVILERQDDLFVCQTQTEVLPLLNHLGHIPLPPYITRNDEQSDEDRYQTVYAKYEGSVAAPTAGLHFDESVLASLKSRGVNVAYVTLHVGAGTFRPVRTDDIKEHKMHSEQFTVSDELCAAVAATKAAGNRVIAIGTTALRSLESAARSGVLQACSGDTDIFIYPGYQFKVCDGLMTNFHLPESTLLMLVSAFIGHQEAMSLYQEAINQGYRFFSYGDTSLLL

SEQ ID NO: 68080 - protein, 242 aa, Legionella sp.
  REGION 1..242: note = tr|A0A1Q4CFH4|A0A1Q4CFH4_9GAMM S-adenosylmethionine:tRNA ribosyltransferase-isomerase (Fragment) OS=Legionella sp. 40-6 OX=1895903; GN = BGO90_03615 PE=3 SV=1
MNKQDFYFNLPEELIAQYPLPNRSDSRLLVYDRKTHEHKHHSFKSITDFLEPGDLLVLNNSKVIPARLFGQKMTGGKVELLVERIIDERKFLAHIKASKALQAGSIVLLEKGQQLEILGRDDDLFICQTQIPALELLHQAGHIPLPPYITRQDELMDVSRYQTVYAQDAGSVAAPTAGLHFDEEVLAKVQAKGVKIGYVTLHVGAGTFRPVRSEQITDHKMHKEFFTVDEALCQAVSETKAA

SEQ ID NO: 68081 - protein, 337 aa, Legionella sp.
  REGION 1..337: note = tr|A0A522EXS6|A0A522EXS6_9GAMM S-adenosylmethionine:tRNA ribosyltransferase-isomerase; OS = Legionella sp. OX=459 GN=queA PE=3 SV=1
MNRQDFYFDLPPELIAQFPLAQRSDSRLLTYNRQQGEYGHHQFRDIADFLNPGDLLVMNDSKVIPARLYGQKTTGGKVELLVERITGEFTFLAHIKASKALKAGGIIQLEKGQRLEILGRDDDLFICKASAEVLSLLDGLGHMPLPPYITRSDELLDEDRYQTIYAKYAGSVAAPTAGLHFDDTVLARLKSKGVNIAYITLHVGAGTFKPVRSDKITEHKMHSERFTISPELCAAVQATKAAGKRVIAVGTTSLRSLESAAVAGQLQACSRDTDIFIYPGYQFKICDGLMTNFHLPESTLLMLVSAFIGHQEAMNLYQEAINKKYRFFSYGDTSLLL

SEQ ID NO: 68082 - protein, 337 aa, Legionella spiritensis
  REGION 1..337: note = tr|A0A0W0Z9A3|A0A0W0Z9A3_LEGSP S-adenosylmethionine:tRNA ribosyltransferase-isomerase; OS = Legionella spiritensis OX=452 GN=queA PE=3 SV=1
MYKQDFYFDLPPELIAQHPLPERSDSRLLVYHRQGGHYEHQQFKNLVDFLNPGDLLVMNDSKVIPARFYGSKASGGRVEFLVERLQGERRFLSHIKASKAPKPDSIIHLEKGWHIRVLAKIEDLYQCEASGELNTMLDEIGHIPLPLYITRQDDEMDLKRYQTVYARHKGSVAAPTAGLHFDDALMQRLQEHGVRIAYATLHVGAGTFRPVRCDAIKDHKMHGEQLTISEELARIVNETKAAGHRVIAVGTTAMRSLESSMDNGCLLPGTRETNIFIYPGYQFKICDGLITNFHLPESTLLMLVAAFIGHPQALDLYREAILHRYRFFSYGDASLLL

SEQ ID NO: 68083 - protein, 337 aa, unidentified
  source 1..337: note = Legionella steelei
  REGION 1..337: note = tr|A0A0W0ZDP4|A0A0W0ZDP4_9GAMM S-adenosylmethionine:tRNA ribosyltransferase-isomerase; OS = Legionella steelei OX=947033 GN=queA PE=3 SV=1
MNKQDFYFDLPPELIAQYPLANRSDSRLLTYNRQKGEYGHYQFREIADFLNPGDLLVMNDSKVIPARLYGHKTTGGKVELLVERITGELTFLAHIKASKALKSGSIIKLDQNKEIEILDRQDDLFICKADMEVLKLLNGIGHIPLPPYITRNDETLDLDRYQTVYAKYEGSVAAPTAGLHFDESVLSSIQSRGVTVAYLTLHVGAGTFRPVRSDNIKDHKMHSERFTISPELCAAVHATKAAGNRVIAIGTTALRSLESAAQDGVLTACSRDTDIFIYPGYQFKICDGLMTNFHLPESTLLMLVSAFIGHERAMMLYQEAIEKRYRFFSYGDTSLLL

SEQ ID NO: 68084 - protein, 337 aa, Legionella steigerwaltii
  REGION 1..337: note = tr|A0A378LCJ2|A0A378LCJ2_9GAMM S-adenosylmethionine:tRNA ribosyltransferase-isomerase; OS = Legionella steigerwaltii OX=460 GN=queA PE=3 SV=1
MNKQDFYFDLPPELIAQYPLANRSDSRLLIYDRQKGEYGHYQFREIADFLNPGDLLVMNDSKVIPARLYGHKTTGGKVELLVERITGEFTFLAHIKASKALKSGSVIKLEQNKEIEILDRHDDLFMCRADMDVLNLLNGIGHIPLPPYITRTDETLDQDRYQTVYAKYEGSVAAPTAGLHFDESVLSSLNSRGVAVAYLTLHVGAGTFRPVRCDNIKDHKMHSEQFTISPELCAAVHATKAAGNRVIAVGTTALRSLESAVQDGMLTPCSRDTDIFIYPGYEFKICDGLMTNFHLPESTLLMLVSAFVGHQQAMMLYQEAIEKGYRFFSYGDTSLLL

SEQ ID NO: 68085 - protein, 337 aa, Legionella taurinensis
  REGION 1..337: note = tr|A0A3A5LGD7|A0A3A5LGD7_9GAMM S-adenosylmethionine:tRNA ribosyltransferase-isomerase; OS = Legionella taurinensis OX=70611 GN=queA PE=3 SV=1
MYKHDFYFHLPEELIAQYPLPGRSDSRLLVYRRGEEQYRHQQFKQLPDFLNDGDLLVMNNSKVIPARFFGRKPSGGQVEFLIERLKPDNQFLAHIKASKAPKAQMIIDLANGWQVQILAKQDDLYHCQTLGDLDTMLADIGHIPLPPYITRHDEKADFERYQTVYARHKGSVAAPTAGLHFDDSLMAQLQQKGVQIAYSTLHVGAGTFRPVRCEAIKDHKMHSEQLIISDALAEAVNRTRASGKRVIAVGTTALRSLESAVVDGQLQACVKETDIFIYPGYEFKICDGLITNFHLPESTLLMLVSAFIGHARAMDLYREAIAERYRFFSYGDASLLL

SEQ ID NO: 68086 - protein, 337 aa, Legionella tucsonensis
  REGION 1..337: note = tr|A0A0W0ZY27|A0A0W0ZY27_9GAMM S-adenosylmethionine:tRNA ribosyltransferase-isomerase; OS = Legionella tucsonensis OX=40335 GN=queA PE=3 SV=1
MNKQDFYFDLPPELIAQYPLSKRSDSRLLIYNRQKGECGHYQFREIADFLNPGDLLVMNDSKVIPARLYGHKNTGGKVELLVERITDEFTFLAHIKASKALKAGSIIKLEHNKEIEVLDRKDDLFICKANMDVLQLLNGIGHIPLPPYITRNDEILDQDRYQTVYAKYEGSVAAPTAGLHFDESVLSSLRSRGVAVAYLTLHVGAGTFRPVRCDNIKEHKMHSEQFTISPELCAAVHATKAAGNRVIAVGTTTLRSLESAAQDGVLTACSKDTDIFIYPGYEFKICDGLMTNFHLPESTLLMLVSAFIGHKQAMMLYQEAIEKRYRFFSYGDTSLLL

SEQ ID NO: 68087 - protein, 337 aa, Legionella wadsworthii
  REGION 1..337: note = tr|A0A378LPU3|A0A378LPU3_9GAMM S-adenosylmethionine:tRNA ribosyltransferase-isomerase; OS = Legionella wadsworthii OX=28088 GN=queA PE=3 SV=1
MNKQDFYFDLPQELIAQYPLPHRSDSRLLVYNRQNEGYGHYQFREIADFLNPGDLLVMNNSKVIPARLYGHKTTGGKVELLVERITSEYTFLAHIRASKALKPGSIIQLEQHKEIEILERQDDLFVCKADIQVLELLNGIGHIPLPPYINRNDENLDHDRYQTVYAKYEGSVAAPTAGLHFDEAVLKSIQARGVSVAYLTLHVGAGTFRPVRCDDIKDHKMHREHFTISPELCTAVQAAKASGNRVIAIGTTALRSLESAAQDGVLTACSRDTDIFIYPGYEFKICDGLMTNFHLPESTLLMLVSAFIGHKQAMALYQEAIEKKYRFFSYGDTSLLL

SEQ ID NO: 68088 - protein, 337 aa, Legionella waltersii
  REGION 1..337: note = tr|A0A0W1ANW4|A0A0W1ANW4_9GAMM S-adenosylmethionine:tRNA ribosyltransferase-isomerase; OS = Legionella waltersii OX=66969 GN=queA PE=3 SV=1
MNTHDFYFDLPPELIAQYPLDKRSDSRLLVYNRHQSSYGHHQFKDIADFLNSGDLLVMNNSRVIPARLYGSKSTGGKVELLVERIIDGDKILAHIKASKALKPGSLIHLDQGFELEVIDRQDDLFHCKSSAPILDLLNRIGHIPLPPYITRDDENLDKSRYQTVYAKYDGSVAAPTAGLHFDDQVLEKLAVKGVNVSYVTLHVGAGTFRPVRCEKIQDHKMHSEQFTISQELCDAVKVTKEAGNRVIAIGTTAMRSLESAAVSGELCPCSRDTDIFIYPGYEFRICDGLMTNFHLPESTLLMLVSAFIGHRQAMDLYQEAIDKKYRFFSYGDTSLLL

SEQ ID NO: 68089 - protein, 337 aa, Legionella worsleiensis
  REGION 1..337: note = tr|A0A0W1AIX6|A0A0W1AIX6_9GAMM S-adenosylmethionine:tRNA ribosyltransferase-isomerase; OS = Legionella worsleiensis OX=45076 GN=queA PE=3 SV=1
MNKHDFYFDLPEELIAQYPLPERSDSRLLIYNRQSGEYGHYQFREIADFLNPGDLLVMNDSKVIPARLYGHKLTGGKVELLVERITGPNTFLAHIKASKALKPGGIIQLEQGNQLEILDRDDDLFICKSSLETINLLNTVGHIPLPPYISRNDEAMDKDRYQTVYAKHEGSVAAPTAGLHFDDAVISSLHARGVNIAYVTLHVGAGTFRPVRCDDIKEHKMHSEQYTVTPELCAAVQATKAAGNRVIAIGTTAMRSLESAAKDGDLTPGTKDTDIFIYPGYQFRVCDGLMTNFHLPESTLLMLVSAFIGHQQAMDLYQEAINKRYRFFSYGDTSLLI

SEQ ID NO: 68090 - protein, 337 aa, unidentified
  source 1..337: note = Legionellaceae bacterium
  REGION 1..337: note = tr|A0A2E5Y6X2|A0A2E5Y6X2_9GAMM S-adenosylmethionine:tRNA ribosyltransferase-isomerase; OS = Legionellaceae bacterium OX=2026753 GN=queA PE=3 SV=1
MNTQDFDFDLPAELIAQYPLEERRASRLLYFNRQTKNHEHSSVASIANYLKPGDLLVMNDSKVIPARFFGKKETGGQVEFLVERLLDAHTFLAHIKASKALKPGMKVIINAKWQVEIIAKHDDLYHCRVSGYISELMDEVGHMPLPPYITRCDSAFDKTRYQTVYARYDGSVAAPTAGLHFDQALLTQLEEKGVELGYVTLHVGAGTFRPVRVETLAEHTMHAEQFTVSQALCTQIQATKARGGRVIAVGTTSMRSLESAAQNGELKACTKETRIFIYPGFKFQVCDGLLTNFHLPQSTLIMLVAAFIGQTQTKALYQTAINAGYRFFSYGDTSLLL

SEQ ID NO: 68091 - protein, 337 aa, unidentified
  source 1..337: note = Legionellales bacterium
  REGION 1..337: note = tr|A0A352C645|A0A352C645_9GAMM S-adenosylmethionine:tRNA ribosyltransferase-isomerase; OS = Legionellales bacterium OX=2026754 GN=queA PE=3 SV=1
MLRQDFNYELPEHLIAQFPVYPRHTARLLAYSRAQDSIQHHTQVLDIVDYFQAGDLLISNDTKVLPARFYAQKTSGGKVEVLMERMLSETTMLCHIRSSKSPKAGAEILVNEQWSLKVLGREHDLFHVEANGSIVKMLNEVGHMPLPPYIQRADEESDKTSYQTIFAKHEGSVAAPTAGLHFDEVLLKKLQDKQVDMASVTLHVGAGTFQPVRVDAIKDHVMHYEWYEVSPELLAKIKKTKAYGNRVIAVGTTSLRALESAARNDFAKLSGLTNLFITPGYEFQVIDGLMTNFHLPESTLLMLVSALIGHEPLMRVYQEAVSLSYRFFSYGDACLFI

SEQ ID NO: 68092 - protein, 345 aa, unidentified
  source 1..345: note = Legionellales bacterium
  REGION 1..345: note = tr|A0A2E0GWC0|A0A2E0GWC0_9GAMM S-adenosylmethionine:tRNA ribosyltransferase-isomerase; OS = Legionellales bacterium OX=2026754 GN=queA PE=3 SV=1
MTYTTADFDYALPSELIAQEPLIERSRSRMITIDATQQHFSDSDFQDIVDLVQPDDLIIFNDTRVFPARFSGRKITGGKVEGLVERIVDSQTAWVHLKCSKSPKVGSVLNLGADLSVVVEERDHDLFCLKIRGCQSPGWLAWLELHGDLPLPPYITRQPDQTDFQRYQTVFAQQVGAVAAPTAGLHFDNALLDQLQKKSIAMEYITLHVGAGTFQPVRVESLSEHVMHKEWITVSVSVCEAIESCRKRGGRVIAIGTTVLRALETAALSGQLAPFEGDTNLFITPGFKFNVVDSLLTNFHLPQSTLLMLVSAFGGYDLMRKAYRHAVDSQYRFFSYGDCMLVHRH

SEQ ID NO: 68093 - protein, 354 aa, unidentified
  source 1..354: note = Leisingera aquaemixtae
  REGION 1..354: note = tr|A0A0P1HBN8|A0A0P1HBN8_9RHOB S-adenosylmethionine:tRNA ribosyltransferase-isomerase; OS = Leisingera aquaemixtae OX=1396826 GN=queA PE=3 SV=1
MKLSDFDFDLPDALIATRPANPRSSARLLVAAGGNLHDGRVTDLVDWLQPGDRLVLNDTKVIPARLSGQRHRDSAQGLVSAKIEATLLEPRADGNWAALLKPLKKIREGEEIVFSEDLSATLEAIEDGQGHLRFNLSGTDFDAALAEAGAMPLPPYIAAKRAADEQDKTDYQTVWARNSGAVAAPTASLHFDAPLLEALKARGVEISYVTLHVGAGTFLPVKVEDVTTHRMHAEWGKVSEGAAADIAATKASGGRVIPVGTTALRLIESAAKDGQIHAWEGDTDIFIYPGFEFQVADALMTNFHLPKSTLLMLVSALMGQEEIRRIYDHAVRSGYRFFSYGDASLLIPAKADTP

SEQ ID NO: 68094 - protein, 361 aa, Leisingera methylohalidivorans
  REGION 1..361: note = tr|V9VT20|V9VT20_9RHOB S-adenosylmethionine:tRNA ribosyltransferase-isomerase OS=Leisingera methylohalidivorans DSM 14336 OX=999552 GN=queA PE=3 SV=1
MKLSDFDFDLPDDLIATRPASPRSAARLLVAAGGDLHDGQVTDLVRWLNPGDRLVLNDTKVIPARLSGLRHRDSAQGAVAARIEATLLEPRADGTWAALLKPLKKIKPGEEIVFSADLSATLEAVSEGQGHLRFNLSGTGFDAALAEAGAMPLPPYIAAKRAADEQDKTDYQTVWARNSGAVAAPTASLHFDAPLLAALKARGVEISYVTLHVGAGTFLPVKVEDVTTHRMHAEWGRVSEQAAAEIAATKAAGGRVIPVGTTALRLIESAAKDGQIHPWEGDTDIFIYPGFGFQVADALMTNFHLPKSTLLMLVSALMGQEEIRRIYDHAVGNRYRFFSYGDASLLIPAKADTLQKSGKKS

SEQ ID NO: 68095 - protein, 361 aa, Leisingera sp.
  REGION 1..361: note = tr|A0A0B4BXK6|A0A0B4BXK6_9RHOB S-adenosylmethionine:tRNA ribosyltransferase-isomerase; OS = Leisingera sp. ANG-Vp OX=1577896 GN=queA PE=3 SV=1
MKLSDFDFNLPDDLIATRPANPRSSARLLVASDGALHDGKVTDLVDWLQPGDRLVLNDTKVIPARLSGLRHRDSAQGPVSAKIEATLLEPRADGSWAALLKPLKKIKQGEEIVFSDDLSATLEDVSEGQGRLRFNLSGTDFDAALAEAGAMPLPPYIAAKRAADEQDKTDYQTVWARNSGAVAAPTASLHFDAPLLDALASRGVEISYVTLHVGAGTFLPVKVEDVTTHRMHAEWGKVSGEAAAEIAATKAAGGRVIPVGTTALRLIESAAKDGQIHPWEGDTDIFIYPGFEFQVADALMTNFHLPKSTLLMLVSALMGREEILQIYDHAVRSGYRFFSYGDASLLIPAKADTPQKNGANP

SEQ ID NO: 68096 - protein, 361 aa, Leisingera sp.
  REGION 1..361: note = tr|A0A481PLP1|A0A481PLP1_9RHOB S-adenosylmethionine:tRNA ribosyltransferase-isomerase; OS = Leisingera sp. NJS204 OX=2508307 GN=queA PE=3 SV=1
MKLSDFDFDLPDDLIATRPANPRSAARLLVAAGGELHDGQVTDLVQWLQPGDRLVLNDTKVIPARLSGLRHRDSAQGPVAAKIEATLLEPRADGSWAALLKPLKKIKPGEDIVFSDDLSATLETVSEGQGHLRFNLSGTDFDAALAEAGAMPLPPYIAAKRAADEQDKTDYQTVWARNTGAVAAPTASLHFDAPLLAALKARGVDVSYVTLHVGAGTFLPVKVEDVTTHRMHAEWGKVSAQAAAEITATKAAGKRVIPVGTTALRLIESAAKDGQIHAWEGDTDIFIYPGFGFQVADALMTNFHLPKSTLLMLVSALMGQEEIRRIYEHAVGNRYRFFSYGDASLLIPAKADTPQKSGANS

SEQ ID NO: 68097 - protein, 356 aa, unidentified
  source 1..356: note = Lelliottia amnigena
  REGION 1..356: note = tr|A0A3S5XXY1|A0A3S5XXY1_LELAM S-adenosylmethionine:tRNA ribosyltransferase-isomerase; OS = Lelliottia amnigena OX=61646 GN=queA PE=3 SV=1
MRVADFSFELPESLIAHYPQPERSGCRLLSLDGPTGALTHGTFTDLLDKLNPGDLLVFNNTRVIPARLFGRKASGGKIEVLVERMLDDKRILAHIRASKAPKPGAELLLGDDESINATMVARHDALFEVEFNDERPVLDILNAIGHMPLPPYIDRPDEDADRELYQTVYSQKPGAVAAPTAGLHFDEPLLERLREKGIEMAFVTLHVGAGTFQPVRVDTIEDHIMHSEYAEVPQDVVDAVLAAKARGNRVIAVGTTSVRSLESAAQAAKKDLIEPFFGDTQIFIFPGYQYTVIDALVTNFHLPESTLIMLVSAFAGYQNTMNAYKAAVEQNYRFFSYGDAMFITYNPQALNERVGE

SEQ ID NO: 68098 - protein, 356 aa, unidentified
  source 1..356: note = Lelliottia amnigena
  REGION 1..356: note = tr|A0A1A9F7Q4|A0A1A9F7Q4_LELAM S-adenosylmethionine:tRNA ribosyltransferase-isomerase; OS = Lelliottia amnigena OX=61646 GN=queA PE=3 SV=1
MRVADFSFELPESLIAHYPMPERSSCRLLSLDGPTGALTHGTFTDLLDKLNPGDLLVFNNTRVIPARLFGRKASGGKIEVLVERMLDDKRILAHIRASKAPKPGAELLLGDDESIKATMTARHDALFEVAFNDERTVLDILNAIGHMPLPPYIDRPDEDADRELYQTVYSQKPGAVAAPTAGLHFDDPLLAALREKGVEMAFVTLHVGAGTFQPVRVDSIEDHIMHSEYAEVPQDVVDAVLAAKARGSRVIAVGTTSVRSLESAAQAATSDLIEPFFGDTQIFIYPGYQYKVIDALVTNFHLPESTLIMLVSAFAGYQHTMAAYKSAVEQKYRFFSYGDAMFITYNPQALNERVGE

SEQ ID NO: 68099 - protein, 356 aa, unidentified
  source 1..356: note = Lelliottia nimipressuralis
  REGION 1..356: note = tr|A0A4Y8IWZ6|A0A4Y8IWZ6_9ENTR S-adenosylmethionine:tRNA ribosyltransferase-isomerase; OS = Lelliottia nimipressuralis OX=69220 GN=queA PE=3 SV=1
MRVADFSFELPESLIAHYPMPERSSCRLLSLDGPTGELTHGTFTDLLDKLNPGDLLVFNNTRVIPARLFGRKASGGKIEVLVERMLDDKRILAHIRASKAPKPGAELLLGDDESIKATMTARHDALFEVEFNDERTVLDILNAIGHMPLPPYIERPDEEADRELYQTVYSQKPGAVAAPTAGLHFDEPLLEKLRAKGIEMAFVTLHVGAGTFQPVRVDSIEDHIMHSEYAEVPQDVVDAVLAAKARGSRVIAVGTTSVRSLESAAQAAKNDLIEPFFGDTQIFIYPGYQYKVIDALVTNFHLPESTLIMLVSAFAGYQHTMNAYKSAVEQKYRFFSYGDAMFITYNPLALNERVGE

SEQ ID NO: 68100 - protein, 356 aa, unidentified
  source 1..356: note = Lelliottia nimipressuralis
  REGION 1..356: note = tr|A0A4V1LIF6|A0A4V1LIF6_9ENTR S-adenosylmethionine:tRNA ribosyltransferase-isomerase; OS = Lelliottia nimipressuralis OX=69220 GN=queA PE=3 SV=1
MRVADFSFELPESLIAHYPQPERSGCRLLSLDGPTGALTHGTFTDLLDKLNPGDLLVFNNTRVIPARLFGRKASGGKIEVLVERMLDDKRILAHIRASKAPKPGAELLLGDDESINATMTARHGALFEVEFNDERPVLDILNAIGHMPLPPYIDRPDEDADRELYQTVYSEKPGAVAAPTAGLHFDEPLLEKLREKGIEMAFVTLHVGAGTFQPVRVDSIEDHIMHSEYAEVPQGVVDAVLAAKARNNRVIAVGTTSVRSLESAAQAAKTDLIEPFFGDTQIFIYPGYQYKVIDALVTNFHLPESTLIMLVSAFAGYQHTMNAYKAAVEQNYRFFSYGDAMFITYNPQALNERVGD

SEQ ID NO: 68101 - protein, 356 aa, unidentified
  source 1..356: note = Lelliottia sp.
  REGION 1..356: note = tr|A0A2S5C3W5|A0A2S5C3W5_9ENTR S-adenosylmethionine:tRNA ribosyltransferase-isomerase; OS = Lelliottia sp. 7254-16 OX=2080842 GN=queA PE=3 SV=1
MRVADFSFELPESLIAHYPQPERSGCRLLSLDGPTGALTHGTFTDLLDKLNPGDLLVFNNTRVIPARLFGRKASGGKIEVLVERMLDDKRILAHIRASKAPKPGAELLLGDDESINATMTARHGALFEVEFNDERPVLDILNAIGHMPLPPYIDRPDEDADRELYQTVYSEKPGAVAAPTAGLHFDEPLLEKLREKGIEMAFVTLHVGAGTFQPVRVDSIEDHIMHSEYAEVPQEVVDAVLAAKARNSRVIAVGTTSVRSLESAAQAAKTDLIEPFFGDTQIFIYPGYQYKVIDALVTNFHLPESTLIMLVSAFAGYQNTMNAYKAAVEQNYRFFSYGDAMFITYNPSAIQERVGE

SEQ ID NO: 68102 - protein, 354 aa, Leminorella grimontii
  REGION 1..354: note = tr|A0A085HHL8|A0A085HHL8_9GAMM S-adenosylmethionine:tRNA ribosyltransferase-isomerase; OS = Leminorella grimontii ATCC 33999 = DSM 5078 OX=1005999; GN = queA PE=3 SV=1
MRVSDFSFELPESLIARYPQEQRSACRLLGLNGESGELSDGVFTDVLDKLEAGDLLVFNNTRVIPARLFGRKASGGKIEMLVERVLDDHRVLAHVRASKAPKPGAQLLLGDDESIPATMVARHDALFEVRFDDGRDVLAILNAAGHMPLPPYIDRPDEEADRELYQTVYSEKPGAVAAPTAGLHFDEPLLEALRQKGVEMAFVTLHVGAGTFQPVRVDDVKEHVMHSEYAEVPQDVVDAVLACKARGNRVIAVGTTSVRSLESAAQASGEGVLQPFFNDTAIFIYPGYRFRVIDALITNFHLPESTLIMLVSAFAGYANTMKAYRQAVEKQYRFFSYGDAMFITRNPQAINEIP

SEQ ID NO: 68103 - protein, 354 aa, Leminorella grimontii; identical to SEQ ID NO: 68102
  REGION 1..354: note = tr|A0A485AHI7|A0A485AHI7_9GAMM S-adenosylmethionine:tRNA ribosyltransferase-isomerase; OS = Leminorella grimontii OX=82981 GN=queA PE=3 SV=1

SEQ ID NO: 68104 - protein, 358 aa, Leminorella richardii
  REGION 1..358: note = tr|A0A2X4V972|A0A2X4V972_9GAMM S-adenosylmethionine:tRNA ribosyltransferase-isomerase; OS = Leminorella richardii OX=158841 GN=queA PE=3 SV=1
MRVSDFSFELPESLIAHYPQEKRSACRLLSLNGESGELSDGVFTDILDKLEEGDLLVFNNTRVIPARLFGRKASGGKIEMLVERVLDDRRVLAHVRASKAPKPGTELLLGDDESIPATMVARHDALFEVQFNDGRDVLTILNAAGHMPLPPYIDRPDEDADRELYQTVYSEKPGAVAAPTAGLHFDEPLLDALRRKGVETAFVTLHVGAGTFQPVRVDDVKEHIMHSEYAEVPQDVVDAVLACKARGNRVIAVGTTSVRSLESAAQASGEGELKPFFDDTAIFIYPGYRFKVIDALITNFHLPESTLIMLVSAFAGYSNTMKAYRWAVDKQYRFFSYGDAMFITQNLQAVDEVINKNC

SEQ ID NO: 68105 - protein, 342 aa, unidentified
  source 1..342: note = Lentibacillus amyloliquefaciens
  REGION 1..342: note = tr|A0A0U4E4J6|A0A0U4E4J6_9BACI S-adenosylmethionine:tRNA ribosyltransferase-isomerase; OS = Lentibacillus amyloliquefaciens OX=1472767 GN=queA PE=3; SV = 1
MNIDEFDFDLPDDLIAQTPLKNRDASRLLVLHRTEQEIEHKQFTDIKRYLKKGDCLVLNDTRVLPARLYGIKEDTGANVEVLLLHQQGKDLWEVLVKPAKKVKKGTVINFGDGKIRATCTGLKDHGGRILQLAYEGIFYEILNELGQMPLPPYIKEQLSEKERYQTVYASEEGSAAAPTAGLHFTNELLDEIKAMGVSIEFITLHVGLGTFRPVSADKIEEHKMHAEFYHMSGKTAEKLKTVKENGGRIISVGTTSTRTLETIVRDNNGNFAESSGWTDIFIYPPYEFQAIDGLITNFHLPKSTLIMMVSAFANRESIMNAYQEAVNERYRFFSFGDAMLIL

SEQ ID NO: 68106 - protein, 342 aa, Lentibacillus halodurans
  REGION 1..342: note = tr|A0A1I0UYL9|A0A1I0UYL9_9BACI S-adenosylmethionine:tRNA ribosyltransferase-isomerase; OS = Lentibacillus halodurans OX=237679 GN=queA PE=3 SV=1
MKPEEFDFDLPDELIAQTPLKNRTASRLLVLHRDTQEVKHKQFSDIKSYLKKGDCLVLNDTRVLPARLYGIKDDTGAKVEVLLLHQQEKDTWEVLVKPAKKVKIGTVIVFGDGKIRATCTGLKEHGGRILQLEYEGIFYELLEELGEMPLPPYIKEQLPEKERYQTVYAKEEGSAAAPTAGLHFTNELLDEIRAMGVTIEFITLHVGLGTFRPVSVEKIEEHKMHAEFYQMSKKTADTLSSVKENGGRIISVGTTSTRTLETIVRDNNGKFTESSGWTDIFIYPPYEFQAVDGLITNFHLPKSTLIMMVSAFAGRENIMNAYQEAVDKRYRFFSFGDAMLIL

SEQ ID NO: 68107 - protein, 341 aa, Lentibacillus persicus
  REGION 1..341: note = tr|A0A1I1TGA8|A0A1I1TGA8_9BACI S-adenosylmethionine:tRNA ribosyltransferase-isomerase; OS = Lentibacillus persicus OX=640948 GN=queA PE=3 SV=1
MNIEDFDFDLPEELIAQTPLKDRDASRLLVLHRTTEEIEHKQFTDIKRYLKKGDCLVLNNTRVLPARLYGIKEDTGAKVEVLLLHQQGEDLWEVLAKPAKKVREGTVLSFGNGKIRATCTGFKDHGGRMLKLEYEGIFYEILNELGQMPLPPYIKEQLEEKERYQTVYAREEGSAAAPTAGLHFTNELLDEIKAMGVSIEFITLHVGLGTFRPVSADKVEDHKMHAEFYHMSRETADNLKAVKENGGRVISVGTTSTRTLETIVRDNGGFTESSGWTDIFIYPPYAFQAIDGLVTNFHLPKSTLVMMVSAFATRENIMNAYQSAVKERYRFFSFGDAMLIL

SEQ ID NO: 68108 - protein, 345 aa, Lentibacillus salicampi
  REGION 1..345: note = tr|A0A4Y9ADX3|A0A4Y9ADX3_9BACI S-adenosylmethionine:tRNA ribosyltransferase-isomerase; OS = Lentibacillus salicampi OX=175306 GN=queA PE=3 SV=1
MNIEDFDFNLPEELIAQTPLKNRAASRLLVLHPDTGEVAHKQFPDIKNYLKKGDCLVLNDTRVLPARLYGIKEGTGAKVEVLLLHQQEKDTWEVLMKPAKKIKIGTVIVFGDGKIRATCTGIKDHGGRVLQMEYEGIFYEILNELGEMPLPPYIKEQLPEKERYQTVYAREEGSAAAPTAGLHFTNELLDEIRAMGVTIEFITLHVGLGTFRPVSADKIEDHQMHAEFYQMSEETADALTSVREHGGRIITVGTTSTRTLETIARDHDGQFVKSSGWTDIFIYPPYKFQAIDGLITNFHLPKSTLIMMVSALAGRGNILKAYNEAVQERYRFFSFGDAMLILSRM

SEQ ID NO: 68109 - protein, 342 aa, Lentibacillus sp.
  REGION 1..342: note = tr|A0A549YLS1|A0A549YLS1_9BACI S-adenosylmethionine:tRNA ribosyltransferase-isomerase; OS = Lentibacillus sp. NKC851-2 OX=2584959 GN=queA PE=3 SV=1
MNTEDFDFDLPEELIAQTPLKNRAASRLLVLDRDKDSLRHKRFSDITGYLQEGDCLVLNDTRVLPARLYGIKQDTGAKVEVLLLHQREEDTWEVLVKPAKKVKPGTVIQFGGGKIHATCTEMLDHGGRILRLEYDGILYEILDELGEMPLPPYIKEQLPEKERYQTVYAKEEGSAAAPTAGLHFTNELLDKIKSMGVTIVFITLHVGLGTFRPVSVESVDDHTMHAEFYHMSKEAANTLANVRANNGRIIAVGTTSTRTLETIARDNHGDFRETSGWTDIFIYPPYRFQAIDGLITNFHLPKSTLIMMVSAFAGKDRIMNAYREAVEQRYRFFSFGDAMLIL

SEQ ID NO: 68110 - protein, 342 aa, Lentibacillus sp.
  REGION 1..342: note = tr|A0A4Q3XC09|A0A4Q3XC09_9BACI S-adenosylmethionine:tRNA ribosyltransferase-isomerase; OS = Lentibacillus sp. SSKP1-9 OX=2510307 GN=queA PE=3 SV=1
MNTEDFDFDLPEELIAQTPLKNRDASRLLVLDRDRDSVEHKQFTDIKDYLQKGDCLVLNDTRVLPARLYGIKEDTGAKAEVLLLHQQEEDTWEVLAKPAKKIKEGTVLLFGGGKIRATCTEIKDHGGRMLQLEYDGILYEILDELGEMPLPPYIKEQLPEKERYQTVYAKEEGSAAAPTAGLHFTNALLDEIREMGVTITFITLHVGLGTFRPVSVDAIDDHTMHAEFYHMSQETADTLANVRANNGRIIAVGTTSTRTLETIARDNNGQFNESSGWTDIFIYPPYNFQAIDGLITNFHLPKSTLIMMISAFAGRERILNAYKEAVHERYRFFSFGDAMLIL

SEQ ID NO: 68111 - protein, 353 aa, Lentibacter algarum
  REGION 1..353: note = tr|A0A1H3KKM3|A0A1H3KKM3_9RHOB S-adenosylmethionine:tRNA ribosyltransferase-isomerase; OS = Lentibacter algarum OX=576131 GN=queA PE=3 SV=1
MKLSDFDFDLPEALIATRPARPRSSARLLVAQGASLGAPIKDASVIDLTRWLGAGDRLVINDTKVIPARLFGTRERLGETGLTQSSMEVTLLSPTASGGWSALIKPLRKIRDGEEIAFAAGLRATLVSRSDGQAELAFNLEGDAFEAALNEAGAMPLPPYIAAKRAADEQDKTDYQTVFARQTGAVAAPTASLHFDEALLAALAAAGVAFSYVTLHVGAGTFLPVKVEDVTTHKMHAEWGEVTPEAAAEIAATKAAGGRVIPVGTTALRLIESAAKPTGQIAPWQGETDIFIYPGFEFKVADGLMTNFHLPKSTLMMLISALMGQERVMEIYKHAIDTQYRFFSYGDSSLLLP

SEQ ID NO: 68112 - protein, 405 aa, unidentified
  source 1..405: note = Lentimicrobiaceae bacterium
  REGION 1..405: note = tr|A0A2E2XZC4|A0A2E2XZC4_9BACT S-adenosylmethionine:tRNA ribosyltransferase-isomerase; OS = Lentimicrobiaceae bacterium OX=2026756 GN=CMF58_05240; PE = 3 SV=1
MIVHPGKLKIEEYDYNLNDAQIAKYPLVERDSSKLLYLDGGIPKNKRFKQLTELIPSDSLLLFNKTKVVNARINFKKITGAIIEVFCLEPVEPVNDFQLALQQNSPVVWKCLVGNAKRWKSGLLELAIQVEGRSICLIARKKLKLSNEYLIEFSWNDNEITFSQIINAIGMIPIPPYLNRKAEESDNKRYQTIYAEDEGSVAAPTAGLHFTESIFNALKIKGIEVDSITLHVGAGTFKPVVSPEVDGHEMHVEKIVVQVKTLEHLLEKINSDIIPVGTTSMRTLESLYWMAIKLLQGDTSFSVGQWDAYKLNNYKLSNREAIEVLLSYFRENDLSEIHGETRLMIAPGYKFKFATGLITNFHQPKSTLLLLVSALVGDDWKRAYEFALEHEYRFLSYGDSCFFKV

SEQ ID NO: 68113 - protein, 349 aa, unidentified
  source 1..349: note = Lentimicrobiaceae bacterium
  REGION 1..349: note = tr|A0A2E2XWR3|A0A2E2XWR3_9BACT S-adenosylmethionine:tRNA ribosyltransferase-isomerase; OS = Lentimicrobiaceae bacterium OX=2026756 GN=queA PE=3 SV=1
MKLSQFKFDLPTELIASHPSKNRDESKLMVLNRKDGTIEHRSFKDILDYFDEGDVFVINNTRVFPARLYGEKEKTGAKIEVFLLRELNQESRLWDVLVDPARKIRIGNKLYFGDDESLVAEVIDNTTSRGRTLRFLFDGSYDEFKQTLQSLGETPLPKIHQRPVEEIDDERYQTIYAKHEGAIAAPTAGLHFSREIMKRLEIQGINFAEVTLHTGLGNFRAIEVEDLSKHKVDSEEMFINQGNANIINGAKTKKKKICAVGTTSMKALETAVSITGLVKPYSGWTNKFINPPYSFRTADAMITNFHLPMSPMMMMASAYMGHDFLKEVYATAIKKKYKFFTYGDAMLII

SEQ ID NO: 68114 - protein, 351 aa, unidentified
  source 1..351: note = Lentimicrobium saccharophilum
  REGION 1..351: note = tr|A0A0S7C459|A0A0S7C459_9BACT S-adenosylmethionine:tRNA ribosyltransferase-isomerase; OS = Lentimicrobium saccharophilum OX=1678841 GN=queA PE=3; SV = 1
MKLSQFRYQLPNDLIAKQPVDNRDKSRLMVLNRKTKTIEHRMFTDILEYFGDGDAFIINDTKVFPALLTGEKEKTGAKITVFLLRELNAEARLWDVLVDPARKIRIGNKLYFGDDDSLVAEVIDNTTSRGRTLRFLFDGPYDEFKKTIESLGKTPLPEELQAIREILPEDKDWYQTIYASKEGAVAAPTAGLHFSRELMKRLELKGASFASVTLHAGVGNFRAIDVEDLTKHKMDSEELIIDEEAVRIVNKAKENRKQVCVVGTTTMKAVESSVTISGMLKPYKGWSNKFIFPPYEFSIPTCMVTNFHLPQSPMLMMTAAFADFDFLMKAYKEAINEKYRFFTYGDAMLIL

SEQ ID NO: 68115 - protein, 404 aa, unidentified
  source 1..404: note = Lentimicrobium saccharophilum
  REGION 1..404: note = tr|A0A0S7C396|A0A0S7C396_9BACT S-adenosylmethionine:tRNA ribosyltransferase-isomerase; OS = Lentimicrobium saccharophilum OX=1678841 GN=queA PE=3; SV = 1
MLPEYININDYDYPLPGERIARFPLEQRDATRLLVFRDGTPADSLFSLLDQHIPEKSLFVFNNTRVIRARLIFRKVSGSRIEIFCLQPLGGYGQTGGITTWKCLVGNAKRWKSGPLEMTVDTGMGEVTLSAHKGEKAGDAFEITFGWDKPEMPFEQVLEFAGKVPLPPYLNREPVESDTERYQTIYAEFNGSVAAPTAGLHFTPAVLEKLESRHCSFEYLTLHVGAGTFKPVSVEDARQHAMHEEELIIERQSILRLLQHSGGNIIPVGTTSMRSLESLYWLGIQLINGKDPGEEFFIDQWEPYQSEVSIPPAEALQAIYDYLTARRMNSISGFTRIMIAPGYRFRMSDALVTNFHQPRSTLLLLVAAFIGEGWKKAYMFALEHGYRFLSYGDSCLFFPEKEEG

SEQ ID NO: 68116 - protein, 345 aa, Lentisphaera araneosa
  REGION 1..345: note = tr|A6DMI8|A6DMI8_9BACT S-adenosylmethionine:tRNA ribosyltransferase-isomerase OS=Lentisphaera araneosa HTCC2155 OX=313628 GN=queA PE=3 SV=1
MSTQLSDYNFNLPEELIAQRPPAQRQQSRMMVIDRQKSSREIVPFENFPSFLKPGDLIVRNNTKVIPARLFGTKKDSGGKVQALLCEERKTGLWQAMLKPGRRLRAGTEVLIENSATEYFTVTEKLADGTYLIQFSNPDVLHILDQFGHIPLPPYMNREDDAEDRKRYQTVFADQPGAVAAPTAGLHFTDEVFAECAKNGADFADVTLHTGIGTFQPVSCEDLSEHQMHSEFYELNSVTAEKIRQAKKNGGRIIAIGTTSVRTLETCADPKNFISSGQGKTQIFLYPPKQPQVTDCLLTNFHLPKSTLLMLISTFFPREEVLKAYEQAIEEKMRFFSYGDCMLIV

SEQ ID NO: 68117 - protein, 349 aa, unidentified
  source 1..349: note = Lentisphaerae bacterium
  REGION 1..349: note = tr|A0A1G0Z2H5|A0A1G0Z2H5_9BACT S-adenosylmethionine:tRNA ribosyltransferase-isomerase; OS = Lentisphaerae bacterium GWF2_44_16 OX=1798571 GN=queA; PE = 3 SV=1
MRTELFDYTLPDELIAQYPKPRRGNSRMLVMDRKSGNCEIHSFSEFPSFLPADACMVFNDTKVINARIYGVKLSSGHAVIEILLISKLAATEWKCLLKPGRRVKQGTVIGMRALDGTVSDKDVFTVKDRTGEGEFIIEFSNPDTDYLLREYGHVPLPPYIKRKDEFSDIQNYQTLFAEKPGAVAAPTAGLHFTRDILDELKTKGILTTNVTLHVGPGTFKPVSVENITEHKMHSESYSLSEKSASLINDTRRKGGKIIAVGTTSVRVLESCADENGLVKASSSETNIFLYPPYKPKSVDMLLTNFHLPQSTLLMLVCTFADREKVLAAYQFAIKEKFMFYSYGDCMLLK

SEQ ID NO: 68118 - protein, 343 aa, unidentified
  source 1..343: note = Lentisphaerae bacterium
  REGION 1..343: note = tr|A0A1V6FP74|A0A1V6FP74_9BACT S-adenosylmethionine:tRNA ribosyltransferase-isomerase; OS = Lentisphaerae bacterium ADurb.Bin082 OX=1852899 GN=queA; PE = 3 SV=1
MKVSDFYYDLPEELIAQHPASHRSDSEMLVLERRSGAFSRHGFIEFPQYLRSGDCLVINDTRVLCARLWGHRAQTGGRVQAFLLAPTADGTWTCLLRPGRRLPPGARVELEAAAGSFVVTRKNQDGTFQVRFDVEDVFALMERAGQIPLPPYIDREPLPEDRERYQTVYASTPGAVAAPTAGLHFTSEMLAGLEARGVKIARLTLHVGAGTFKPVSVERVEDHLMHAENYCFSAANAELINSTRQEGGRIICVGTTTVRVLETCFDPASGMVKPGSGQTSIFLHPPHRSRVADGLLTNFHLPQSTLLMLVCTFADHAHVMKAYDFAVRSRMRFYSYGDCMLLI

SEQ ID NO: 68119 - protein, 91 aa, unidentified
  source 1..91: note = Lentisphaerales bacterium
  REGION 1..91: note = tr|A0A524N2E1|A0A524N2E1_9BACT S-adenosylmethionine:tRNA ribosyltransferase-isomerase (Fragment) OS=Lentisphaerales bacterium OX=2448604; GN = E4H02_02560 PE=3 SV=1
MEMKTAEFDYNLPANLIAQHPLEDRAAARMMVLRRDTGSIEHRCVRELPCFLQSGDLLVVNDTRVIPARILGKRTDAGGKVALLLLEQCGP

SEQ ID NO: 68120 - protein, 221 aa, unidentified
  source 1..221: note = Lentisphaerales bacterium
  REGION 1..221: note = tr|A0A524MZQ4|A0A524MZQ4_9BACT S-adenosylmethionine:tRNA ribosyltransferase-isomerase (Fragment) OS=Lentisphaerales bacterium OX=2448604 GN=queA; PE = 3 SV=1
EGRTTVRLECRETLVDVLEEVGLTPLPPYIKRPDGPEPADRERYQTVYATNPGAVAAPTAGLHMTTDLLDQLAARGVARTAITLHVGPGTFRPVTAELVEEHVMESERSEVSPETAEKVNRTREEGGRVIAVGTTTVRTLESAAADGGMVRTFSGRTDLFIRPPYAFKAVDCMLTNFHLPKSTLLMMISAFAGRDLIMKAYHEAVEAGYRFYSYGDCMLIL

SEQ ID NO: 68121 - protein, 342 aa, unidentified
  source 1..342: note = Lentisphaeria bacterium
  REGION 1..342: note = tr|A0A3D3JSW9|A0A3D3JSW9_9BACT S-adenosylmethionine:tRNA ribosyltransferase-isomerase; OS = Lentisphaeria bacterium OX=2053569 GN=queA PE=3 SV=1
MNVSDFDYELPEELIAQVPAPERRASRMLVMSRTTGDCEVRKFAEFAEYLRPGDCLVLNDTRVIPARIFGTKIPTGGAVEALLTTPIRDGVWQAMLKPGSRLPDGSRVAITGSDAEFEVTGRDTAGTFEITFSTTAVPELLQTCGHMPLPPYIRRADAAADATRYQTVYNAVPGAVAAPTAGLHFDETMLEQIEAMGVAITRLTLHVGIGTFQPVTVERLEDHVMHTEQYELGAEAAACINQRRAAGGRVIAVGTTSVRVLETCTADDGDTQPGAGATGIFLYPPYTPRSVDVLLTNFHLPRSTLLMLVSTFAKHEHVWAAYQRAIAERMRFYSYGDCMLLV

SEQ ID NO: 68122 - protein, 350 aa, unidentified
  source 1..350: note = Lentisphaeria bacterium
  REGION 1..350: note = tr|A0A3D1V040|A0A3D1V040_9BACT S-adenosylmethionine:tRNA ribosyltransferase-isomerase; OS = Lentisphaeria bacterium OX=2053569 GN=queA PE=3 SV=1
MRTSDFDYELPEELIAQHPPEHRGDSRMLVLDPATGSMKIVPFREFPDYFNAGDLIAVNNTKVIKARLFAKKESGAKIEIMLLAPVTDTRWSCLLKPAKRVAPGTVLRLLDPALNVSEKSVRLVSKDIDGNCIVEFLESDVERTLAQCGHMPLPPYIRRTADYAPDAERYQTVYAKTPGAVAAPTAGLHFTKEILAALSGKGVKEAELTLHVGQGTFKPVTVENIEEHPMHSEHFILTEATAGLLNDTRRAGGRIAAIGTTSLRALESCVREDGYFEAVETDTSIFIYPPCKVKSIDMLLTNFHLPKSTLLMLVSAFAGHELVMEAYRYAVKERMRFFSYGDCMLILNKI

SEQ ID NO: 68123 - protein, 316 aa, Lentzea sp.
  REGION 1..316: note = tr|A0A563F2T5|A0A563F2T5_9PSEU S-adenosylmethionine:tRNA ribosyltransferase-isomerase; OS = Lentzea sp. FXJ1.1311 OX=2591470 GN=FKR81_02635 PE=3; SV = 1
MITFALPPGSSAIAPTSPRDSVRLLVARPSGLSHHRFRDLPLAPGDLLVVNTSATLPAALGRVHVSTWLDDGSWVVEVRLPDGPDLSCSPGQVISLPDGHFLRLVEPHLGSPRLWRAVVTPSVAPVAFLRAHGRPIRYSYLAGSYPLSEYQTVYADAPGSAEMPSAGRPFTSRLLVRLMTRGVTVAPLVLHTGVSSPESHEPPMPERYSVPLPTTRLLEATRLAGGRVVAVGTTVVRALESTLEYGLSGWTNLVLGPDRPAQLVTGLITGLHAPEASHLGLLEAVAGTSLVAAAYDEAVRERYLWHEFGDSMLFLP

SEQ ID NO: 68124 - protein, 340 aa, Leptolinea tardivitalis
  REGION 1..340: note = tr|A0A0P6XQA0|A0A0P6XQA0_9CHLR S-adenosylmethionine:tRNA ribosyltransferase-isomerase; OS = Leptolinea tardivitalis OX=229920 GN=queA PE=3 SV=1
MKTSDFDYHLPPERIAQTPLEPRHSSRLLVLDRSKPDLTHTTFWNIADYLHPGDLLVVNRTRVIPARIYAQKETGGKVEILLLKRTDDSTWEALVGGKRLIPGKTLYLPNGTTKVDILADLGASRRLVRFSEPVEAYLEKTGEMPLPPYIHERLNDPNRYQTVYADQPGSAAAPTAGLHFTPELLDRLKGMGIGLAEVTLHVGLDTFAPVTEENADEHVIHTEWCEVTPETASQINTAKAAGGRIIAVGTTSVRTLESAAQSAHSGEVVTPYQGSTGLFILPGYTFKAVDAMVTNFHLPRSSLIMLVSAFAGRERILSTYQTAVEMKYRFFSFGDAMLIL

SEQ ID NO: 68125 - protein, 379 aa, unidentified
  source 1..379: note = Leptolyngbya antarctica
  REGION 1..379: note = tr|A0A2W4VKW1|A0A2W4VKW1_9CYAN S-adenosylmethionine:tRNA ribosyltransferase-isomerase; OS = Leptolyngbya antarctica OX=268115 GN=queA PE=3 SV=1
MREDQRLTPESQPESQPESQPESQPSSPEHSLSAYQYFLPPEKIAQTPVTPRDASRLLVVDGPTTHRHQRFCDLPTLLQPGDLLVLNNTRVIPARLQGHKPGGAQVEVFLLEDQGDHHWLALVRPGRRLKPGTTVHFGPNPDQPDLVAQVLATDPDTNGRVVKFEPQGGESLFALFERLGEVPLPPYITDTAASPDQYQTVYADTPGAVAAPTAGLHFTPELFERLEAMGVRRSHITLHVGVGTFRPVEADNILDHKMHGEWIDVSAETVAQINATQAQGGRVIAVGTTVVRALEGAAQGGELQPWQGKVNLFIYPGYQYRVVDGLITNFHLPGSSLLMLVSALIGRERLLELYEEAIAQDYRFYSFGDAMVILPAASQ

SEQ ID NO: 68126 - protein, 357 aa, unidentified
  source 1..357: note = Leptolyngbya boryana
  REGION 1..357: note = tr|A0A1Z4JJN4|A0A1Z4JJN4_LEPBY S-adenosylmethionine:tRNA ribosyltransferase-isomerase; OS = Leptolyngbya boryana NIES-2135 OX=1973484 GN=queA PE=3; SV = 1
MEADQLLSAYDYHLPEDRIAQNPAEPRDSARLLVLKTLTEHCHQVFHDLVEILQPGDLLVLNNTQVIPARLHGHKSTGTEVEILLLEEQQQNQWLSLVKPGRRLKPGNQITFTPRSQTDIKLNAQILASDPETRGRILQFEVSDGRSLLEVIDHFGEVPLPPYIHDTEAEADRYQTVYADRLGAVAAPTAGLHFTPELLERLEQKGIDRAFVTLHVGVGTFRPVEVENITEHQMHGEWIEVSPETVEKIRETKAKGGRVIAVGTTVVRSLEGASQSGQLEPYCGKTNLFIYPGYQWRVVDGMITNFHLPKSSLLMLVSALIGRERLLSVYQDAIDNQYRFYSFGDAMLILPEAKLRN

SEQ ID NO: 68127 - protein, 378 aa, unidentified
  source 1..378: note = Leptolyngbya foveolarum
  REGION 1..378: note = tr|A0A2W4W4Y5|A0A2W4W4Y5_9CYAN S-adenosylmethionine:tRNA ribosyltransferase-isomerase; OS = Leptolyngbya foveolarum OX=47253 GN=queA PE=3 SV=1
MTSDPLDLKSHSTPQSDSQLSAYQYELPAVLIAQNPVTPRDSARLLVVNRHHHQHRHFYDLSDLLRPHDLLILNNTRVIPARLFGKKQSGGVAEVLLIEPKESEATGERRSQRWLALVKPGRRLQPGSVVIFGSPDNPVMRAYIETRDDATNGRIVRLEAQGEHAETPIEELIDQLGQVPLPPYITKSESLPAQYQTVFAERKGAIAAPTAGLHFTQRLLSELSDKGIQTAEITLHVGIGTFRPVEVKDIKTHQMHEERIEVSPETVEKIRQTKAKGGRVIALGTTSTRALEGAAAACGELQPFNGRTNIFIYPGYQWKVIDGLITNFHLPESSLLMMVSALIGRERLMAIYEDAIAQKYRFYSFGDAMLILPEAAIE

SEQ ID NO: 68128 - protein, 376 aa, unidentified
  source 1..376: note = Leptolyngbya frigida
  REGION 1..376: note = tr|A0A2T1DST2|A0A2T1DST2_9CYAN S-adenosylmethionine:tRNA ribosyltransferase-isomerase; OS = Leptolyngbya frigida ULC18 OX=2107698 GN=queA PE=3 SV=1
MSDRLLAAYDYVLPEALIAQTPCVPRDGARLLVVKDQVQHGHAIVRTLPDLLREGDLLVLNNTRVIPARLYGHKLGGMPVEVLLLEPQAGGDRAAGTTHCWLALVKPGKRLKPGATIVFSGQDAKESTSDRVLSATVMAIDAATGGRILQFDVPAGTLLDEWINQLGQMPLPPYITQTEAHPDQYQTVYADRPGAVAAPTAGLHFTPELLQRLQAQGIEQAFVTLHVGVGTFRPVEAETITDHTMHAEWIEVPPETVAKIQQTKAKGGRIIAVGTTVVRSLESAVQSGMIQPFCGKSNLFIYPGYQWQVVDGLMTNFHLPKSSLMMLVSALIGRQRLLALYQIAIAEQYRFYSFGDAMLILPEAREERDERLKDEG

SEQ ID NO: 68129 - protein, 378 aa, Leptolyngbya sp.
  REGION 1..378: note = tr|K9F1J8|K9F1J8_9CYAN S-adenosylmethionine:tRNA ribosyltransferase-isomerase OS=Leptolyngbya sp. PCC 7375; OX = 102129 GN=queA PE=3 SV=1
MSPSNSRQPSHSQDLINQQQANSDYSLMAYQYELPPSLIAQEPVIPRDHSRLMVISSNSDHQHAYFKDLPKFLCSGDLLVINNTRVIPARMYGYKPSGAKVEVLLLEPRTPPHQWLALVKPGRRLKPGSSIYFGPDLENPLLTARVEDCDLDTNGRLLTFETTTDTPIDNLMDAFGEVPLPPYITDSHAEPDQYQTIYAQNPGAVAAPTAGLHFTPEVFQALEEKGVQRAEVTLHVGLGTFRPVESEAITDHKMHAEWVHLPQSTVDLIKETKARGNHVFAVGTTTTRTLEGVVNQEGSLKAYQGAVNLFIYPGYQWQVVDGLITNFHLPGSSLLMLVSALVGRQRLMDLYQDAIKQAYRFYSFGDAMVILPDVYRLT

SEQ ID NO: 68130 - protein, 356 aa, Leptolyngbya sp.
  REGION 1..356: note = tr|A0A0S3UDK6|A0A0S3UDK6_9CYAN S-adenosylmethionine:tRNA ribosyltransferase-isomerase; OS = Leptolyngbya sp. NIES-3755 OX=1752064 GN=queA PE=3 SV=1
MEADQLLSAYDYHLPPDRIAQNPATPRDSARLLVIETQTQHHHQVFRELDEILRPGDLLVLNNTQVIPARLHGHKTTGTEVEILLLEEHQQNQWLALVKPGRRLKPGNQIVFKPQSETEVELTAAILASDPETRGRILQFEASNGRSLLEVIDHFGEVPLPPYIQETEAEADRYQTVYADRMGAVAAPTAGLHFTPELLDRLEQRGVDRAFITLHVGVGTFRPVEVEDITQHQMHGEWIEVSPETVEKIRETKAKGGRVIAVGTTVVRSLEGASQSGALEPYCGKTNLFIYPGYEWKTVDGMVTNFHLPKSSLLMLVSALIGRERLLALYQEAIENEYRFYSFGDAMLILPEARLN

SEQ ID NO: 68131 - protein, 345 aa, unidentified
  source 1..345: note = Leptolyngbya valderiana
  REGION 1..345: note = tr|A0A166TPN7|A0A166TPN7_9CYAN S-adenosylmethionine:tRNA ribosyltransferase-isomerase; OS = Leptolyngbya valderiana BDU 20041 OX=322866 GN=queA; PE = 3 SV=1
MKVSDFTFDLPEHLIAQEPLPERSASRLLHLIREPAGLVDRVFSELPSLLNPGDLLVFNNTRVIPARLHARKPSGGRVEVMIERLTGPRMATVQLRANRKPAPGTRLLVGEPDGSEGQLELELIEREGEFWRVEVLAGPDWPELLERVGHMPLPPYIQREDTAADRERYQTVYGQVPGAVAAPTAGLHFDEKILSELDDRGVQRGWCTLHVGAGTFQPVRVEDIKDHEMHAEWLQVDQTLVDQIRRTRAEGGRVIAVGTTAVRSLETAAAEGAVAPYTGDSRLFIYPGFEFKVVDGLITNFHLPGSTLMMLVSALAGRDRIMAAYQHAIDQEYRFFSYGDSMFID

SEQ ID NO: 68132 - protein, 382 aa, unidentified
  source 1..382: note = Leptolyngbya valderiana
  REGION 1..382: note = tr|A0A162MPH4|A0A162MPH4_9CYAN S-adenosylmethionine:tRNA ribosyltransferase-isomerase; OS = Leptolyngbya valderiana BDU 20041 OX=322866 GN=queA; PE = 3 SV=1
MMPPRNITALREGDMLRTRDLEYHLPRELIATTPAEPRDSARLLVVRGQAEPEHATFRDLPAFLDRGDRVVVNTSRVIPARLVGRRDDTGGKVEGLFLAFGPKIGQWLCMVKARRFRAGARITLHGRDGSPSPHAIELIERSGEIPGAWVVALAGSDRDDPDQFKAASMAVLADVGHVPLPPYIRSARREGGQADEWGEDVDRYQTVYADPASSGSVAAPTAGLHFTPSVLQALSKLGVVRRDVTLHVGAGTFREVETEIVEDHPMHRELCFASADVISDLGAARRKGSRVIAVGTTAARTLEASAAIAGEWIETDLLITPGFKWQLVNGLITNFHLPRSTLMAMVAALLPGGLEQLQAVYAAAIAARYRFYSYGDAMLVLP

SEQ ID NO: 68133 - protein, 362 aa, Leptonema illini
  REGION 1..362: note = tr|H2CLI9|H2CLI9_9LEPT S-adenosylmethionine:tRNA ribosyltransferase-isomerase OS=Leptonema illini DSM 21528; OX = 929563 GN=queA PE=3 SV=1
MDLHPFHFELPDELIARYPVTPPDSARLLHLTAHGAPSHHIFRELPDLLRDGDVLVFNRTKVSRRRLFLKRESGAQIEVLFLEQLEHPSIWRCMARKAGRLKTGEILVQGDVSFEVVGREGPLTVLAARSENQYAWETDEDAEHFFETSGQPPIPPYLNRPAEKIDYDRYQTIFAQKTGSVAAPTAGLHFTPELMRRLEQRYEIAYVDLTIGYGTFAPLQEEHFAAKRLHTERFVIPPETAKLLSSIGVGDTERSDRRHSAEATRRRCVAVGTTTLRALESALRQKGQIQAGSYETDIFLHPPDRIESCQALITNFHLPASSLFLLVCAFGGTERLRQAYAIAIENRYRFYSYGDAMLLEAP

SEQ ID NO: 68134 - protein, 345 aa, unidentified
  source 1..345: note = Leptospira adleri
  REGION 1..345: note = tr|A0A2M9YLJ2|A0A2M9YLJ2_9LEPT S-adenosylmethionine:tRNA ribosyltransferase-isomerase; OS = Leptospira adleri OX=2023186 GN=queA PE=3 SV=1
MLFSDLEEFEFELPEDRIARYPVRNRDESRLMLVEVGSEKIHIEEAFKNIVSYLREGDVLIGNHTKVSKRRVYLKNPLRTHEAMFLESKDGLWRCKIRNSRKLKKGDRLQDVKTGLRFFQVEGKEEEFVFLRSDKELQEEDFQTIGEIPIPPYLKREANSEDEIRYQTLFAKTPGSVAAPTAGLHFSESLFQILKEKKIQICTLELTVGYGTFQPLTEENFQNKKLHREEFFLEEASASILNLAKKEGRRIISIGTTTLRALESTFDPKTKTFRFGRGATELFLQPDDKLQSCEGLITNFHLPGSSLLLLVSAFAGKKLILQAYQKAIQGEFRFYSYGDAMLILK

SEQ ID NO: 68135 - protein, 345 aa, unidentified
  source 1..345: note = Leptospira adleri
  REGION 1..345: note = tr|A0A5F2CNQ3|A0A5F2CNQ3_9LEPT S-adenosylmethionine:tRNA ribosyltransferase-isomerase; OS = Leptospira adleri OX=2023186 GN=queA PE=3 SV=1
MLFSDLEEFEFELPENRIARYPAKNRDESRLMVVEVGSEKIHIEEAFKNIVSYLREGDVLIGNHTKVSKRRVYLKNPLRTHETMFLESKDGLWRCKIRNSRKLKKGDRLQDLKTGLRFFQVEGKEEEFVFLRSDKELQEEDFQTIGEIPIPPYLKREANSEDEIRYQTLFAKTPGSVAAPTAGLHFSESLFQILKEKKIQTCTLELTVGYGTFQPLTEENFQNKKLHREEFFLEEASASILNLAKKEGRRIISIGTTTLRALESTFDPKTKTFRSGRGATELFLQPDDKLQSCEGLITNFHLPGSSLLLLVSAFAGKKLILQAYQKAIQGEFRFYSYGDAMLILK

SEQ ID NO: 68136 - protein, 347 aa, Leptospira alexanderi
  REGION 1..347: note = tr|V6HXM6|V6HXM6_9LEPT S-adenosylmethionine:tRNA ribosyltransferase-isomerase OS=Leptospira alexanderi serovar Manhao 3 str. L 60 OX=1049759 GN=queA PE=3 SV=1
MLFEDLKEFEFTLSEERIARYPAVNRDESRLMILDVNVGNIFSEPSFKNLVSYLKEGDVLVANHTKVSKRRVYLKTQTRTHETMFLEEKELLWKCKVRNSKKLKVGTKLSDEKTQCISFTVEKKEGEFVFLKPERTLQEEDFQRIGEIPIPPYFKRNPDSKDEIRYQTLFAKTPGSVAAPTAGLHFSESIFQTLKEKKIQFCTLELKVGYGTFQPLTEENFQNQKLHREEFFLEESSTEILNLAKKEGRRIFSIGTTTLRALESAYDYATNSFRSGRGATELFIQPEDRLKSCECLITNFHLPGSSLLLLVSAFAGKELISKAYQKAIQEKFRFYSYGDAMLILGKR

SEQ ID NO: 68137 - protein, 349 aa, unidentified
  source 1..349: note = Leptospira alstonii
  REGION 1..349: note = tr|M6CY88|M6CY88_9LEPT S-adenosylmethionine:tRNA ribosyltransferase-isomerase OS=Leptospira alstonii serovar Sichuan str. 79601 OX=1218565 GN=queA PE=3 SV=1
MLYEDLKEFEFLLPEERIARYPAINRDESRLMILDASTGKIWNEPSFKNLVSYLKEGDVLIANHTKVSKRRVYLKTLERIHEAIFLEEKELLWRCKIRNSRKLKVGEKLSDEKTRTVSFTVEKKEGEFVFLKPEHSLQEKDFQQIGEIPIPPYLKRDADSKDEIRYQTLFAKTPGSVAAPTAGLHFSEIIFETLKEKKIQLCTLELKVGYGTFQPLTEENFQNQKLHREEFFLEESSAEILNLAKKEGRRIFSIGTTTLRALESAYDRTTDSFRSGRGATELFIQPEDRLKSCEGLITNFHLPGSSLLLLVSAFAGKELILNAYQKAIREEFRFYSYGDAMLILGKRST

SEQ ID NO: 68138 - protein, 349 aa, unidentified; identical to SEQ ID NO: 68137
  source 1..349: note = Leptospira alstonii
  REGION 1..349: note = tr|T0FLY2|T0FLY2_9LEPT S-adenosylmethionine:tRNA ribosyltransferase-isomerase OS=Leptospira alstonii serovar Pingchang str. 80-412 OX=1218564 GN=queA PE=3 SV=1

SEQ ID NO: 68139 - protein, 351 aa, unidentified
  source 1..351: note = Leptospira andrefontaineae
  REGION 1..351: note = tr|A0A4R9H6S6|A0A4R9H6S6_9LEPT S-adenosylmethionine:tRNA ribosyltransferase-isomerase; OS = Leptospira andrefontaineae OX=2484976 GN=queA PE=3 SV=1
MEFQDLSDFDFELSEDQIAKFPAAKRDKSRLLVLGRTQDFLQEETEFSEMLKYLQEGDVLVANATRVSKRRVFLTTKTGRRHEAMFLSELEPGIWKTLTRNSKKLKLGDIVSDEATGRFLFSVGRKEEEFTIFQSETPLDENSFETIGRTPIPPYFKRESTSEDDVRYQTVYSQNLGSVAAPTAGLHFTPELLEELKKRNIEFLKLELKVGYGTFQSLNEDHFANKKLHEEEFDLPLETKNVLDFAKKNGKRIISVGTTTLRALESAYDPNTNTFKSGEGKTRLFLQPEDSILSCEGLITNFHLPQSSLLLLVSAFAEKEKILKAYKFAIKQNFRFFSYGDSMLILDPEKV

SEQ ID NO: 68140 - protein, 348 aa, unidentified
  source 1..348: note = Leptospira bandrabouensis
  REGION 1..348: note = tr|A0A4Z1B0B3|A0A4Z1B0B3_9LEPT S-adenosylmethionine:tRNA ribosyltransferase-isomerase; OS = Leptospira bandrabouensis OX=2484903 GN=queA PE=3 SV=1
MDFLQEYDFHLPDEQIAKFPLENRDESRLLVVNIGQSKFWEAPLFRDILALVRPGDVFVYNETKVSARRVYLQVESGRIHESIFLESLDPSDRSWLCILKNRAKLKLGEKLFPVGFENYQFSYQGPKEELSILFSESPISDSDFGIFGNIPIPPYLKRNVTEEDKVRYQTIFANRSGSVAAPTAGLHFTEELKENVLKNGAEFVPVELQIGYGTFRPLTPEQWETKTLHREKYFVSESTASKLNGARKEGRRIIAVGTTTLRVLETVFDSQLKKYKVGSSQTDIFLSPGDNIQSVQGLITNFHLPKSSLLLLVSAFANTKLVLDAYQYALQNRFRFYSYGDSMFLFQK

SEQ ID NO: 68141 - protein, 348 aa, unidentified
  source 1..348: note = Leptospira barantonii
  REGION 1..348: note = tr|A0A5F2BHQ1|A0A5F2BHQ1_9LEPT S-adenosylmethionine:tRNA ribosyltransferase-isomerase; OS = Leptospira barantonii OX=2023184 GN=queA PE=3 SV=1
MLFEDLKEFEFILPEERIARYPAPDRDESRLMVLDVNSGNIVSEPSFKNIVSYLKEGDVLVANHTKVSKRRVYLKTELRIHEAMFLEEHNGIWKCKIRNSKKLKDGTRLSDEKTRRITFAVEKKEEEFVFLKPERPLQEEDFEQIGEIPIPPYLKREANSEDEIRYQTLFAKTPGSIAAPTAGLHFSEKLFATLKEKSITLCTLELKVGYGTFQPLTEENFQNQRLHREEFFLGKESVEILNLAKKEKRRIVSIGTTTLRALESAYDRSTNSFQEGWGATELFIRPDDRLYSCEGLITNFHLPGSSLLLLVSAFAGKDLILKAYQKAIREEFRFYSYGDAMLVLGKKE

SEQ ID NO: 68142 - protein, 348 aa, unidentified
  source 1..348: note = Leptospira barantonii
  REGION 1..348: note = tr|A0A2M9Z0L3|A0A2M9Z0L3_9LEPT S-adenosylmethionine:tRNA ribosyltransferase-isomerase; OS = Leptospira barantonii OX=2023184 GN=queA PE=3 SV=1
MLFEDLKEFEFLLPEERIARYPAPDRDESKLMVLDVNSGNIVSEPSFKNIVSYLKEGDVLVANHTKVSKRRVYLKTELRVHEAMFLEEHNGIWKCKIRNSKKLKDGTRLTDEKTRRITFAVEKKEEEFVFLKPERPLQEEDFDQIGEIPIPPYLKREANSEDEIRYQTLFAKTPGSIAAPTAGLHFSENIFATLKEKKIALCTLELKVGYGTFQPLTEENFQNQKLHREEFFLGKESVEILNLAKKEKRRIVSIGTTTLRALESAYDRSTNSFQEGWGATELFIRPEDRLYSCEGLITNFHLPGSSLLLLVSAFAGKDLILKAYQKAIREEFRFYSYGDAMLVLGKKE

SEQ ID NO: 68143 - protein, 346 aa, Leptospira biflexa
  REGION 1..346: note = tr|B0SUA1|B0SUA1_LEPBP S-adenosylmethionine:tRNA ribosyltransferase-isomerase OS=Leptospira biflexa serovar Patoc (strain Patoc 1 / ATCC 23582 / Paris) OX=456481 GN= queA PE=3 SV=1
MDFLNEFDFHLPEEQIARFPAKNRDESRLLLVDRANETFKEAPFFRDIRNWLKPGDVLVYNETKVSYRRVYLQVESGRIHEAIFLDTLEDNANIWSCILKNRAKLRLGENLWPVGFKEFPFVYESKDNELSLLRSERTITDLDFEVFGTIPIPPYLKRKAIEDDKFRYQTIFAKKSGSVAAPTAGLHFTDSLKLELIQLGIQFVPVNLQVGYGTFRPLTTEQWQTKTLHKERYEITDESASQLNSAKKEGRRIIAVGTTSLRVLETVFDSQQQKFKVGLGQTDIFLSPGDNIESVHGLITNFHLPKSSLLLLVSAFANSRLVMNAYQYALQNQFRFYSYGDSMFLF

SEQ ID NO: 68144 - protein, 346 aa, Leptospira biflexa
  REGION 1..346: note = tr|A0A5F2CAF6|A0A5F2CAF6_LEPBI S-adenosylmethionine:tRNA ribosyltransferase-isomerase; OS = Leptospira biflexa OX=172 GN=queA PE=3 SV=1
MDFLNEFDFHLPEEQIARFPAKNRDESRLLLVDRANETFKEAPFFRDIRNWLQPGDVLVYNETKVSYRRVYLQVESGRIHEAIFLETLEDNANIWSCILKNRAKLRLGENLWPVGFQEFPFVYEGKDNELSLLRSERTITDLDFEVFGTIPIPPYLKRKAIEDDKFRYQTIFAKKSGSVAAPTAGLHFTDSLKLELIQLGIQFVPVNLQVGYGTFRPLTTEQWQTKTLHKERYEITDESASQLNSAKKEGRRIIAVGTTSLRVLETVFDSQQQKFKVGLSQTDIFLSPGDNIESVHGLITNFHLPKSSLLLLVSAFANSRLVMNAYQYALQNQFRFYSYGDSMFLF

SEQ ID NO: 68145 - protein, 347 aa, Leptospira borgpetersenii
  REGION 1..347: note = tr|A0A0E3AYT5|A0A0E3AYT5_LEPBO S-adenosylmethionine:tRNA ribosyltransferase-isomerase; OS = Leptospira borgpetersenii serovar Ballum OX=280505; GN = queA PE=3 SV=1
MLFEDLKEFEFTLSEERIARYPAANRDESRLMVLDVNVGNIFSESSFKNLVSYLKEGDVLVANHTKVSKRRVYLKTQIRTHETMFLEEKELLWKCKIRNSKKLKAGTKLSDEKTQRISFTVEKKEGEFVFLKPEQTLQEEDFQQIGEIPIPPYFKRNPDPKDEIRYQTLFAKTPGSVAAPTAGLHFSESIFQTLKEKKIRFCTLELKVGYGTFQPLTEENFQNQKLHREEFFLEKSSTEILNLAKKEGRRIFSIGTTTLRALESAYDYATNSFRSGRGTTELFIQPEDRLKSCECLITNFHLPSSSLLLLVSAFAGKELVLKAYQKAIQEKFRFYSYGDAMLILGKR

SEQ ID NO: 68146 - protein, 164 aa, Leptospira borgpetersenii
  REGION 1..164: note = tr|M6W021|M6W021_LEPBO S-adenosylmethionine:tRNA ribosyltransferase-isomerase OS=Leptospira borgpetersenii serovar Pomona str. 200901868 OX=1192866 GN=LEP1GSC133_348 4 PE=3 SV=1
MHFSESIFQTLKEKKVRFCTLELKVGYGTFQPLTEENFQNQKLHREEFFLEKSSTEILNLAKKEGRRIFSIGTTTLRALESAYDYATNSFRSGRGTTELFIQPEDRLKSCECLITNFHLPSSSLLLLVSAFAGKELVLKAYQKAIQEKFRFYSYGDAMLILGKR

SEQ ID NO: 68147 - protein, 346 aa, unidentified
  source 1..346: note = Leptospira bourretii
  REGION 1..346: note = tr|A0A4R9IQF9|A0A4R9IQF9_9LEPT S-adenosylmethionine:tRNA ribosyltransferase-isomerase; OS = Leptospira bourretii OX=2484962 GN=queA PE=3 SV=1
MDFLNEFDFHLPEEQIAKFPLENRDESRLLVVDRAQSKFWEAPLFRDITTLVRPGDIFVYNETKVSYRRVFLQVESGRIHESIFLEPQDNQNQTWLCILKNRAKLKLGDRLSPVGFPNYQFVYQGPKEELSFLGSELTISDSDFEIFGNIPIPPYLKRNVTEEDKLRYQTIFANRSGSVAAPTAGLHFTEELKNTFRTLGAEFLPVELQIGYGTFRPLTTEQWQTKTLHSEKYLVSESTATKLNDARKEGRRIIAVGTTTLRVLETVFDSQLQKYKVGSSQTDIFLSPGDKIDSVQGLITNFHLPKSSLLLLVSAFATTQLVLDSYRYALKNGFRFYSYGDSMFLF

SEQ ID NO: 68148 - protein, 346 aa, unidentified
  source 1..346: note = Leptospira bouyouniensis
  REGION 1..346: note = tr|A0A4R9HM55|A0A4R9HM55_9LEPT S-adenosylmethionine:tRNA ribosyltransferase-isomerase; OS = Leptospira bouyouniensis OX=2484911 GN=queA PE=3 SV=1
MDFLNQFDFHLPDEQIARFPAKNRDESRLLIVNRANETFLEAPFFRDIRNWLRPGDVLVYNETKVSYRRVYLQVDSGRIHEAIFLETIDNDPSSWACILKNRAKLKLGEILSPVGFAEFQFVYEGKLDELSRLRSIRLVRDEDFEVFGTIPIPPYLKRKVIEEDKNRYQTIFAKKSGSVAAPTAGLHFTDSLRAELVQFGIEFVPVNLQVGYGTFRPLTAEQWHTKTLHKEKYEITEESSIRLNTAKKEGRRIIAIGTTSLRVLETVFDSQQQKYKVGVSQTDIFLSPGDNIQSVQGLITNFHLPKSSLLLLVSAFANSRLVMNSYQYALQNHFRFYSYGDSMFLF

SEQ ID NO: 68149 - protein, 346 aa, unidentified
  source 1..346: note = Leptospira brenneri
  REGION 1..346: note = tr|A0A2M9XYH6|A0A2M9XYH6_9LEPT S-adenosylmethionine:tRNA ribosyltransferase-isomerase; OS = Leptospira brenneri OX=2023182 GN=queA PE=3 SV=1
MDFLQEYDFHLPEEQIAKFPLESRDQSRLLLVDRIQSKFWEAPLFRDITALIKPGDVFVYNETKVSYRRVYLQVESGRIHESIFLEPEDKLGKTWLCILKNRAKLKLDGKLFPVGYPEFEFSYQGAREELSILSSNRSISDSDFEIFGNIPIPPYLKRNVTEEDKTRYQTIFANRSGSVAAPTAGLHFTETLKEEIRKKGAEFFPVELQIGYGTFRPLTAEQWQTKTLHKENYLVPGSTATKLNEARTEGRRIIAVGTTSLRVLESVFDSQLKTYKEGVGQTDIFLSPGDRIESAQGLITNFHLPKSSLLLLVSAFANTRLVMSSYQYALENGFRFYSYGDSMFLF

SEQ ID NO: 68150 - protein, 367 aa, Leptospira broomii
  REGION 1..367: note = tr|T0FEJ0|T0FEJ0_9LEPT S-adenosylmethionine:tRNA ribosyltransferase-isomerase OS=Leptospira broomii serovar Hurstbridge str. 5399 OX=1049789 GN=queA PE=3 SV=1
MPFDPERKIGFLQVSSVFSGTMEIQDLSEFSFDLPEDRIAKHPLSRRDESRLLVLDRKEDTLLEEVSFASIRKHLKKGDVLIANAARVSKRRVYLKTISGRKHEALFLSQGKDNIWKALIRNSKKLKEGTSLRSEESDSFEFIVLNKEEEFTFLKCTSDFHEEDFESIGKIPIPPYFKRESSEEDSIRYQTVYAKNLGSVAAPTAGLHFTPELLSEIGNAGIDFVELELRVGYGTFQPLSREHFFEKKLHEESYFISAEVSEVLNSAKEAGRRIISVGTTTLRALESSYDRQTGQFRAGEGTTRLFLQPGDRISSCDGLITNFHLPESSLLLLVCAFAGKERVLAAYRYAVEKEFRFFSYGDAMLLL

SEQ ID NO: 68151 - protein, 346 aa, unidentified
  source 1..346: note = Leptospira congkakensis
  REGION 1..346: note = tr|A0A4Z1A9Z1|A0A4Z1A9Z1_9LEPT S-adenosylmethionine:tRNA ribosyltransferase-isomerase; OS = Leptospira congkakensis OX=2484932 GN=queA PE=3 SV=1
MDFLQEYDFHLPEEQIAKFPLEKRDESRLLVVDRSQSKFWEAPLFRDITNLVRPGDVFVYNETKVSYRRVYLQVESGRIHESIFLEPEDETGNVWLCILKNRAKLKLADKLFPVGFREFEFSYKGAKEELSVLSSERSISDFDFEIFGNIPIPPYLKRNVTEEDKVRYQTIFANRSGSVAAPTAGLHFTDQLKKTLGSRGVEFLPVELQIGYGTFRPLTTEQWQTKTLHKENYSVPASTATKLNEARKENRRVIAVGTTTLRVLESVFDSQLKTYKVGVGQTDIFLSPGDDIQSVQGLITNFHLPKSSLLLLVSAFATTQLVLDSYRYALKNGFRFYSYGDSMFLF

SEQ ID NO: 68152 - protein, 352 aa, unidentified
  source 1..352: note = Leptospira dzianensis
  REGION 1..352: note = tr|A0A5F2BN34|A0A5F2BN34_9LEPT S-adenosylmethionine:tRNA ribosyltransferase-isomerase; OS = Leptospira dzianensis OX=2484905 GN=queA PE=3 SV=1
MLFEDLKEFEFDLPEERIARYPAAHRDESKLMILDVDSGEIKSEPSFKNIVSYLREGDVLVANHTKVSKRRVYLKTPLRVHEAMFLEEKEQLWKCKIRNSKKLKLGEELKDNRTQKLGFTVAKKEEEFVFLKPQRSLTEEDFQTIGEIPIPPYLKRDADAQDEIRYQTLFAKTPGSVAAPTAGLHFSEELFETLRQKKIQLCTLELKVGYGTFQPLTEENFQNQKLHREEFFLEETSVELLNAAKQEGRRILSIGTTTLRALESAYEPNTKTFRAGPGATELFIRPDDNLQSCEGLITNFHLPGSSLLLLVSAFAGKKLILDAYQKAIQEKFRFYSYGDAMLILERKKSVSK

SEQ ID NO: 68153 - protein, 352 aa, unidentified
  source 1..352: note = Leptospira dzianensis
  REGION 1..352: note = tr|A0A5F2E6R7|A0A5F2E6R7_9LEPT S-adenosylmethionine:tRNA ribosyltransferase-isomerase; OS = Leptospira dzianensis OX=2484905 GN=queA PE=3 SV=1
MLFEDLKEFEFDLPEERIARYPAAHRDESKLMILDVDSGEIKSEPSFKNIVSYLREGDVLVANHTKVSKRRVYLKTPLRVHEAMFLEEKEQLWKCKIRNSKKLKLGEELKDNRTQKLGFTVAKKEEEFVFLKPQRSLTEEDFQTIGEIPIPPYLKRDADAQDEIRYQTLFAKTPGSVAAPTAGLHFSEELFETLRQKKIQLCTLELKVGYGTFQPLTEENFQNQKLHREEFFLEETSVELLNAAKQEGRRILSIGTTTLRALESAYEPNRKTFRAGPGATELFIRPDDNLQSCEGLITNFHLPGSSLLLLVSAFAGKKLILDAYQKAIQEKFRFYSYGDAMLILGRKKSVSK

SEQ ID NO: 68154 - protein, 351 aa, unidentified
  source 1..351: note = Leptospira dzoumogneensis
  REGION 1..351: note = tr|A0A4Z1AP51|A0A4Z1AP51_9LEPT S-adenosylmethionine:tRNA ribosyltransferase-isomerase; OS = Leptospira dzoumogneensis OX=2484904 GN=queA PE=3 SV=1
MEFQDLSDFDFELPEDQIAKFPAEKRDKSRLLVLGRTRGFLKEETEFSKILNYLREGDILVANATRVSKRRVFLVTKTGRRHEAMFLSETEPGIWKTLTRNSKKLKLGDKVSDEATGKFLFTVGRKEEEFTIFQTETTLDENSFEIIGRTPIPPYFKRESTSEDDIRYQTVYSKNLGSVAAPTAGLHFTPELLQELKNRNIEFLKLELKVGYGTFQSLNEDHFADKKLHEEEFDLPSETADLLNSAKKNGKRIISVGTTTLRALESAYDPNSKTFRSGEGKTRLFLQPEDSILSCEGLITNFHLPQSSLLLLVSAFSEKEKILNAYKFAIEHKFRFFSYGDSMLILDPEKV

SEQ ID NO: 68155 - protein, 346 aa, unidentified
  source 1..346: note = Leptospira ellinghausenii
  REGION 1..346: note = tr|A0A2P2DI19|A0A2P2DI19_9LEPT S-adenosylmethionine:tRNA ribosyltransferase-isomerase; OS = Leptospira ellinghausenii OX=1917822 GN=queA PE=3 SV=1
MDFLEEFDFHLPEEQIARFPAKNRDESRLLLVDKSKETFWEAPHFRNIGQWLRPGDVLVFNDTKVSYRRVFLQVESGRIHESIFLETVDDSSLVWTCILKNRAKLKLGDSLWPVGFPNFRFRYDGKEEELSLLVSDKEISDSDFEIFGTIPIPPYLKRKVNEEDKIRYQTIFAKKSGSVAAPTAGLHFTDSLKEELVQQGIEFVPVNLQVGYGTFRPLTAEQWQTKTLHKEKYEITEETASRLNTAKKEGRRIIAIGTTSLRVLETVFDSQQQKYKVGLGQTDIFLSPGDNIKSVQGLITNFHLPKSSLLLLVSAFANSRLVMNVYRYALQNHFRFYSYGDSMFLF

SEQ ID NO: 68156 - protein, 375 aa, unidentified
  source 1..375: note = Leptospira elllisii
  REGION 1..375: note = tr|A0A2N0BD09|A0A2N0BD09_9LEPT S-adenosylmethionine:tRNA ribosyltransferase-isomerase; OS = Leptospira elllisii OX=2023197 GN=queA PE=3 SV=1
  VARIANT 369..371: note = Xaa can be any naturally occurring amino acid
MLFSDLNKFEFDLPEDKIARYPAAQRDESRLMVLDSGSNSIRIEPSFKNILGYLREGDVLIANHTKVSKRRVYLSAKDRIHETMFLETENGIWKCKIRNSKKIKTGDVLLDRKTNSYSLTAIDKKEEFVFLKPESPLKEEDFDRIGEIPIPPYLKREANSEDEIRYQTLFAKTPGSIAAPTAGLHFSKRIFDELERKKIELYTLELSVGYGTFQPLTEENFLRKKLHREEFFLEETTAAALTKAKKEKRRIVSIGTTTLRALESSFLPETNSFQEGKGSTELFIQPEDVLRSCEGLITNFHLPGSSLLLLVSAFAGKGLLLDAYRKAISENFRFYSYGDAMLILRAEVIRLITKYDGSRTRPRVQSETXXXEVSD

SEQ ID NO: 68157 - protein, 350 aa, unidentified
  source 1..350: note = Leptospira elllisii
  REGION 1..350: note = tr|A0A2N0BPY9|A0A2N0BPY9_9LEPT S-adenosylmethionine:tRNA ribosyltransferase-isomerase; OS = Leptospira elllisii OX=2023197 GN=queA PE=3 SV=1
MLFSDLNKFEFDLPEDKIARYPAAQRDESRLMVLDSGSNSIRIEPSFKNILGYLREGDVLIANHTKVSKRRVYLSAKDRIHETMFLETENGIWKCKIRNSKKIKTGDVLLDRKTNSYSLTAIDKKEEFVFLKPESPLKEEDFDRIGEIPIPPYLKREANSEDEIRYQTLFAKTPGSIAAPTAGLHFSKRIFDELERKKIELYTLELSVGYGTFQPLTEENFLRKKLHREEFFLEETTAAALTKAKKEKRRIVSIGTTTLRALESSFLPETNSFQEGKGSTELFIQPEDVLRSCEGLITNFHLPGSSLLLLVSAFAGKGLLLDAYRKAISENFRFYSYGDAMLILRAEVSD

SEQ ID NO: 68158 - protein, 367 aa, Leptospira fainei
  REGION 1..367: note = tr|S3UQR2|S3UQR2_9LEPT S-adenosylmethionine:tRNA ribosyltransferase-isomerase OS=Leptospira fainei serovar Hurstbridge str. BUT 6 OX=1193011 GN=queA PE=3 SV=1
MRFDPKRKIGFPQVSPVFSGTMEIQDLSEFSFDLPEDQIAKHPSSRRDGSRLLVLDRKRNALLEEVSFTSVRKYLKKGDVLIANAARVSKRRVYLKTISGRRHESLFLSRGEGNIWKTLIRNSKKLREGTSLRSEESDSFEFIVLHKKEEFTFLKCKPDFREEDFEIIGKIPIPPYFKRESSEEDSIRYQTVYAKNLGSVAAPTAGLHFTPELLSEIRNAGIDFVELELRVGYGTFQPLSPEHFREKKLHEESYFISSEVSEVLNSAKKTGRRIISVGTTTLRALESLYDPEAERFRAGEGTTRLFLQPGDRISSCDGLITNFHLPESSLLLLVCAFAGKEQVLSAYRHAVRKGFRFFSYGDAMLLL

SEQ ID NO: 68159 - protein, 350 aa, unidentified
  source 1..350: note = Leptospira fletcheri
  REGION 1..350: note = tr|A0A4R9GB83|A0A4R9GB83_9LEPT S-adenosylmethionine:tRNA ribosyltransferase-isomerase; OS = Leptospira fletcheri OX=2484981 GN=queA PE=3 SV=1
MEIGDLSEYSFNLPEDLIAKVPASDRDGSRLLVLSSPDGVLKEEPFFSEILKYLKEGDVLVANSTRVARRRVFLRTPSGRRHEALFLDPSGRPNEWRALVRNSKKLKSGTVLQDEISGRFSFTVTGREEEFTYLTASPDFMEIDFETIGRIPIPPYFKRESSEEDSVRYQTVYSKILGSVAAPTAGLHFTPELLERIRTLGVEFAELELRVGYGTFSTLTATQFREKKLHEEFFSISSEVAETLRLAKKQGRRIISVGTTTLRALEAAYDSKTRSFLSGESSTRLFLQPGDPILSCDCLITNFHLPESSLLLLVCAFAGKDAVLNAYRYALQNGFRFYSYGDAMLLLNRL

SEQ ID NO: 68160 - protein, 350 aa, unidentified
  source 1..350: note = Leptospira fluminis
  REGION 1..350: note = tr|A0A4V3JEN7|A0A4V3JEN7_9LEPT S-adenosylmethionine:tRNA ribosyltransferase-isomerase; OS = Leptospira fluminis OX=2484979 GN=queA PE=3 SV=1
MEIGDLSEYSFNLPEESIAKVPAVNRDGSRLLVLSSTDGVLKEEPFFTEILKYLKEGDVLVANSTRVARRRVFLRTLSGRRHEALFLDPSERRNEWKALVRNSKKLKPGTVLQDEMSGRFQFTVTGREEEITLLATPPDFREIDFETIGRIPIPPYFKRESSEEDSVRYQTVYAKTLGSVAAPTAGLHFTPELLEQVRRLGVEFVELELRVGYGTFSTLTAKQFREKKLHEEFFSISSEVAETLNLAKKQGRRIISVGTTTLRALEASFDSGTRSFLSGESSTRLFLQPGDPILSCDCLITNFHLPESSLLLLVCAFAGKDAVLNAYRYALRNGFRFYSYGDAMLLLNRL

SEQ ID NO: 68161 - protein, 350 aa, unidentified
  source 1..350: note = Leptospira gomenensis
  REGION 1..350: note = tr|A0A5F1YAR5|A0A5F1YAR5_9LEPT S-adenosylmethionine:tRNA ribosyltransferase-isomerase; OS = Leptospira gomenensis OX=2484974 GN=queA PE=3 SV=1
MLFSDLQEFEFDLPEDNIARFPASQRDESRLMVVDAGSGSIRIEPAFKNILGHLREGDVLVANHTKVSKRRVYLSRNDRIHESMFLEAENGVWKCKIRNSKKIKTGDVLLDHKTKSIRFTTIDKREEFVFVRPESFLSEEDFDRIGEIPIPPYLKREANSEDEIRYQTLFAKTPGSIAAPTAGLHFSERIFEELKLKKIGLYTLELSVGYGTFQPLTEENFLRKKLHREEFFLDDTTAEALTKAKREKRRIVSIGTTTLRALESCFHSEINSFQSGKGNTELFIQPEDVLKSCEGLITNFHLPGSSLLLLVSAFAGKRLLLDAYQKAISENFRFYSYGDAMLILRPEVSD

SEQ ID NO: 68162 - protein, 351 aa, unidentified
  source 1..351: note = Leptospira haakeii
  REGION 1..351: note = tr|A0A2N0BVQ8|A0A2N0BVQ8_9LEPT S-adenosylmethionine:tRNA ribosyltransferase-isomerase; OS = Leptospira haakeii OX=2023198 GN=queA PE=3 SV=1
MEFQDLSDFDFELPEDQIAKFPAAKRDKSRLLVLGRTQNFLKEETEFSKILGYLKEGDVLVANATRVSKRRVFLITKTGRRHEAMFLSETEPGVWKTLTRNSKKLKLGDTVSDEETGKYLFSVGRKEEEFTFFQAETPLNENSFEIIGRTPIPPYFKRESTSEDDVRYQTVYSKNLGSVAAPTAGLHFTSELLEELKNRNIEFLKLELKVGYGTFQSLNEDHFTNKKLHEEEFELPLETKNILDSAKKDGKRIISVGTTTLRALESAYDPKTKTFKSGEGKTRLFLQPEDSILSCEGLITNFHLPQSSLLLLVSAFAEKEKILNAYKFAVEQKFRFFSYGDSMLILDPEKI

SEQ ID NO: 68163 - protein, 346 aa, unidentified
  source 1..346: note = Leptospira harrisiae
  REGION 1..346: note = tr|A0A2N0AG71|A0A2N0AG71_9LEPT S-adenosylmethionine:tRNA ribosyltransferase-isomerase; OS = Leptospira harrisiae OX=2023189 GN=queA PE=3 SV=1
MDFLNEYDFHLPEERIAKFPLENRDESRLLVVDRTQSKFWEAPLFRDITPLIQAGDVFVYNETKVSYRRVFLQVESGRIHESIFLEPDDDENQRWLCILKNRAKLRLGESLSPVGFPNYQFIYQGPKEELSFLNSNLPISDSDFEIFGNIPIPPYLKRNVTEEDKVRYQTIFANRSGSVAAPTAGLHFTEELKDNLKKLGAEFLPVELQIGYGTFRPLTAEQWQTKTLHREKYLVSESTATKLNDARKEGRRIIAVGTTTLRVLETVFDSQLQKYKVGSSQTDIFLSPGDRIQSVQGLITNFHLPKSSLLLLVSAFATTQLVLDSYQYALKNGFRFYSYGDSMFLF

SEQ ID NO: 68164 - protein, 351 aa, unidentified
  source 1..351: note = Leptospira hartskeerlii
  REGION 1..351: note = tr|A0A2M9XAV0|A0A2M9XAV0_9LEPT S-adenosylmethionine:tRNA ribosyltransferase-isomerase; OS = Leptospira hartskeerlii OX=2023177 GN=queA PE=3 SV=1
MEFQDLSDFDFELPEEQIAKFPAAKRDKSRLLVLGRTQNFLKEESEFSKILNYLREGDVLVANATRVSKRRVFLITKTGRRHEAMFLSESEPGTWKTLTRNSKKLKLGDIVSDEATGKFLFSVERKEEEFTIFRSETQLDENSFEIIGRTPIPPYFKRESTSEDDIRYQTVYSKNLGSVAAPTAGLHFTPELLEELKNRNIEFLKLELKVGYGTFQSLNEDHFTNKKLHEEEFDLPIETKNVLDSAKKNGKRIISVGTTTLRALESAYDPNTKTFQSGEGKTRLFLQPEDSILSCEGLITNFHLPQSSLLLLVSAFAEKEKILRAYKFAIEQNFRFFSYGDSMLILDPEKV

SEQ ID NO: 68165 - protein, 347 aa, unidentified
  source 1..347: note = Leptospira idonii
  REGION 1..347: note = tr|A0A4R9M127|A0A4R9M127_9LEPT S-adenosylmethionine:tRNA ribosyltransferase-isomerase; OS = Leptospira idonii OX=1193500 GN=queA PE=3 SV=1
MLDFLSEYDFPLPESQIAKFPSEKRDESRLLILDRKNDALKEHSRFRDIIDYLHPGDVLVYNETKVSYRRVFLKSEKGRIHESVFLEFLDKEGKDWLCILKNRRKLKLGERLVPEGYDSPVFIYSGSKEDLSILKTNRPVSEDEFFVWGNIPIPPYLKRKAEKSDQERYQTIFANNPGSVAAPTAGLHFTEALKKTLEEKGVIFVPVLLQIGYGTFQPLQEEQIRTKKLHKEKYIMSDVTSAILNQAVREKRRVIAVGTTSLRVLESVFDPQSQIYKSGDGEADIFLSPGDTIHSIQGLITNFHLPQSSLLLLVNCFGGKSLVMRSYRYALEKNFRFYSYGDVMFLF

SEQ ID NO: 68166 - protein, 347 aa, unidentified
  source 1..347: note = Leptospira ilyithenensis
  REGION 1..347: note = tr|A0A4R9LXV5|A0A4R9LXV5_9LEPT S-adenosylmethionine:tRNA ribosyltransferase-isomerase; OS = Leptospira ilyithenensis OX=2484901 GN=queA PE=3 SV=1
MDEFLNDYDFFLPESQIAKYPAENRDESRLLVLNREKDTISEHSQFKEIEDYLKEGDVLVYNETKVSKRRVYLSTESGRIHESVFLETRDYHSKEWICILKNRKKLRLGDILFPEGYKEILFRYQGDSEDLSILVSENSIYDSDFSQWGNIPIPPYLKRKAEKSDEDRYQTIFAANPGSVAAPTAGLHFSLELRKNLESKGIVFVPIILQIGYGTFQPLQQEQFQLKKLHKESYELSEISAKILNQAVAEKRRVISIGTTTLRVLESVFDFKSQIYKAEKGETDIFLSPGDQIHSSQGLITNFHLPKSSLLLLVNCFGGNNLVMRSYHYALERNFRFYSYGDAMFLF

SEQ ID NO: 68167 - protein, 367 aa, Leptospira inadai
  REGION 1..367: note = tr|V6HBE3|V6HBE3_9LEPT S-adenosylmethionine:tRNA ribosyltransferase-isomerase OS=Leptospira inadai serovar Lyme str. 10 OX=1049790 GN=queA PE=3 SV=1
MPSEPERKIGFLQVSSVFFGTMEIQDLSEFSFDLPENQIAKHPSSRRDESRLLVLDRKEDTLLEEVSFASVRNHLKKGDVLIANTARVSKRRVYLKTISGRRHEALFLSGGNDNIWKALIRNSKKLKEGTPLVAEESASLEFIVLNKEEEFTFLKCTSDFREEDFESIGKIPIPPYFKRESSEEDSIRYQTVYAKNLGSVAAPTAGLHFTTELLSEIRNAGIDFVELELRVGYGTFQPLSQEHFREKKLHEESYFISTEVSEILNSAKEAGRRIVSVGTTTLRALESSYDPQTRRFRAGEDTTRLFLQPGDRISSCDGLITNFHLPESSLLLLVCAFAGKERVLSAYRYAVKNGFRFFSYGDAMLLL

SEQ ID NO: 68168 - protein, 193 aa, Leptospira interrogans
  REGION 1..193: note = tr|M3DRI3|M3DRI3_LEPIR S-adenosylmethionine:tRNA ribosyltransferase-isomerase OS=Leptospira interrogans serovar Lora str. TE 1992 OX=1193028 GN=LEP1GSC067_2173; PE = 3SV=1
MSEERIARYPVANRDESRLMVLDVNTGTISSEPSFKNVISYLKEGDLLVANHTKVSKRRVYLRSKTKARIHEAMFLEEKESLWKCKIRNSKKLKMGEQLCDEKTKQILFTIERKEEEFVFLKPKHSLQEEDFQQIGEIPIPPYLKRNADSEDEIRYQTLFAKTPGSVAAPTAGLHFSENIFKTLKEKKYNSAL

SEQ ID NO: 68169 - protein, 222 aa, Leptospira interrogans
  REGION 1..222: note = tr|N1ULM8|N1ULM8_LEPIR S-adenosylmethionine:tRNA ribosyltransferase-isomerase OS=Leptospira interrogans serovar Australis str. 200703203 OX=1085541; GN = LEP1GSC115_180 4 PE=3 SV=1
MSEERIARYPVANRDESRLMVLDVNTGTISSEPSFKNVISYLKEGDLLVANHTKVSKRRVYLRSKTKARIHEAMFLEEKESLWKCKIRNSKKLKMGEQLCDEKTKQILFTIERKEEEFVFLKPKHSLQEEDFQQIGEIPIPPYLKRNADSEDEIRYQTLFAKTPGSVAAPTAGLHFSENIFKTLKEKKIQFCTLELKVGYGTFQPLTEENFQNQKLHREDFF

SEQ ID NO: 68170 - protein, 346 aa, unidentified
  source 1..346: note = Leptospira jelokensis
  REGION 1..346: note = tr|A0A4Z1A4C0|A0A4Z1A4C0_9LEPT S-adenosylmethionine:tRNA ribosyltransferase-isomerase; OS = Leptospira jelokensis OX=2484931 GN=queA PE=3 SV=1
MDFLNEFDFHLPEEQIARFPAKNRDESRLVLVDKTTEKFWEAPFFRDIREWVRPGDVFVYNETKVSYRRVYLQVESGRIHESIFLEAEGDGSRIWTCILKNRAKLKLGEVLAPVGFPTFSFRYEGKNEELSILVSDKTVTDSDFEIFGTIPIPPYLKRNVTEEDKVRYQTIFAKKSGSVAAPTAGLHFTESLRAELEKTGAEFLPVELQVGYGTFRPLTAEQWQTKTLHKERYEITEGTASRLDGARREGRRVIAIGTTTLRVLETVFDSQQQKYKVGVGQTDIFLSPGDKIESVQGLITNFHLPKSTLLLLVSAFANSRLVMDVYRYALQNKFRFYSYGDSMFLF

SEQ ID NO: 68171 - protein, 351 aa, unidentified
  source 1..351: note = Leptospira johnsonii
  REGION 1..351: note = tr|A0A2P2D7L4|A0A2P2D7L4_9LEPT S-adenosylmethionine:tRNA ribosyltransferase-isomerase; OS = Leptospira johnsonii OX=1917820 GN=queA PE=3 SV=1
MEFQDLSDFDFELPEDQIAKFPAAKRDKSRLLVLGRTQDFLKEETEFSKIIGYLREGDVLVANATRVSKRRVFLITKTGRRHEAMFLSETEPGVWKTLTRNSKKLKLGDIVSDEISGKFQFSVGGKEEEFTIFRSETPLDENSFELIGRTPIPPYFKRESTSEDDVRYQTVYSKNLGSVAAPTAGLHFTPELLEELKNRKIEFLKLELKVGYGTFQSLNEDHFANKKLHEEEFDLPSETKNVLDFAKKNGKRIISVGTTTLRALESAYDPNTKTFRAGEGKTRLFLQPEDSILSCEGLITNFHLPQSSLLLLVSAFAEKEKILKAYKFAIEQKFRFFSYGDSMLILDPEKV

SEQ ID NO: 68172 - protein, 346 aa, unidentified
  source 1..346: note = Leptospira kanakyensis
  REGION 1..346: note = tr|A0A4R9HWX3|A0A4R9HWX3_9LEPT S-adenosylmethionine:tRNA ribosyltransferase-isomerase; OS = Leptospira kanakyensis OX=2484968 GN=queA PE=3 SV=1
MDFLQEYDFHLPEEQIAKFPMENRDESRLLVVDKTESKFWEAPLFKDITTLVRPGDIFVYNETKVSYRRVYLQVESGRIHESIFLEAEDETNHQWLCILKNRAKLKLGDKLFPVGFKEFEFFYQGAKEELSILHSERSISDSDFEIFGNIPIPPYLKRNVTEEDKVRYQTIFANRSGSVAAPTAGLHFTEPLKEKLRSLGAEFLPVELQIGYGTFRPLTTEQWQTKTLHKENYSVSGPTATRLNDARKEGRRIISVGTTTLRVLESVFDSQLKTYKVGVGQTDIFLSPGDNIQSVQGLITNFHLPKSSLLLLVSAFANTRLVMSSYHYALKNGFRFYSYGDSMFLF

SEQ ID NO: 68173 - protein, 346 aa, unidentified
  source 1..346: note = Leptospira kemamanensis
  REGION 1..346: note = tr|A0A4R9JSH4|A0A4R9JSH4_9LEPT S-adenosylmethionine:tRNA ribosyltransferase-isomerase; OS = Leptospira kemamanensis OX=2484942 GN=queA PE=3 SV=1
MDFLNEFDFHLPEEQIARFPAKNRDESRLLLVDKTNDRFWEAPFFRDIKEWVKPGDVFVYNETKVSYRRVYLQVPSGRIHESIFLEAEDGESRIWTCILKNRAKLRLGEILSPVGFPNFSFRYEGKKDELSVLVSLESVTDNDFEIFGTIPIPPYLKRKVTEEDKVRYQTIFAKKSGSVAAPTAGLHFTDSLKMELQSIGAEFLPVELQVGYGTFRPLTAEQWQTKTLHKEKYEISEGTANRLNTARKEGRRIIAIGTTSLRVLETVFDSQQQKYKVGLGQTDIFLSPGDTINSVQGLITNFHLPKSSLLLLVSAFAKSRLVMNAYQYALQNQFRFYSYGDSMFLF

SEQ ID NO: 68174 - protein, 350 aa, Leptospira kirschneri
  REGION 1..350: note = tr|M6FBP1|M6FBP1_9LEPT S-adenosylmethionine:tRNA ribosyltransferase-isomerase OS=Leptospira kirschneri serovar Bulgarica str. Nikolaevo OX=1240687 GN=queA PE=3; SV = 1
MLFKDLKEFEFVLSEERIARYPVANRDESRLMVLDVNTGEISSEPSFKNVISYLKEGDLLVANHTKVSKRRVYLRSKTRIHEAMFLEEKESLWKCKIRNSKKLKMGERLCDEKTKQVLFTIEKKKEEFVFLKPERPLQEEDFQQIGEIPIPPYLKRNADSEDEIRYQTLFAKTPGSVAAPTAGLHFSENIFKILKEKKIQFCTLELKVGYGTFQPLTEENFQNQKLHREEFFLEESGAQMLNLAKKERRRIFSIGTTTLRALESAYDPVTDTFRSGPGVTELFILPEDRLQSCQGLITNFHLPGSSLLLLVSAFAGKELILKAYQKAIQEKFRFYSYGDAMLILGIELIP

SEQ ID NO: 68175 - protein, 350 aa, Leptospira kirschneri; identical to SEQ ID NO: 68174
  REGION 1..350: note = tr|M6IRN9|M6IRN9_9LEPT S-adenosylmethionine:tRNA ribosyltransferase-isomerase OS=Leptospira kirschneri serovar Bim str. 1051 OX=1049941 GN=queA PE=3 SV=1

SEQ ID NO: 68176 - protein, 348 aa, Leptospira kmetyi
  REGION 1..348: note = tr|A0A5F1XMP5|A0A5F1XMP5_9LEPT S-adenosylmethionine:tRNA ribosyltransferase-isomerase; OS = Leptospira kmetyi OX=408139 GN=queA PE=3 SV=1
MLFEDLKEFEFILPEERIARYPAPDRDESRLMVLDVRSGNILSEPSFKNIVSYLKEGDVLVANHTKVSKRRVYLKTELRVHEAMFLEEHNGIWKCKIRNSKKLKDGTRLTDEKTRRITFAVEKKEEEFVFLKPERPLTEEDFEQIGEIPIPPYLKREANSEDEIRYQTLFAKTPGSIAAPTAGLHFSEKLFATLREKKITLCTLELKVGYGTFQPLTEENFQNQKLHREEFFLGKESVEILNRAKQEKRRIVSIGTTTLRALESAYDRSTNSFQEGWGATELFIRPDDLLYSCEGLITNFHLPGSSLLLLVSAFAGKDLILKAYQKAIREEFRFYSYGDAMLILGKKG

SEQ ID NO: 68177 - protein, 348 aa, Leptospira kmetyi
  REGION 1..348: note = tr|A0A2M9XR74|A0A2M9XR74_9LEPT S-adenosylmethionine:tRNA ribosyltransferase-isomerase; OS = Leptospira kmetyi OX=408139 GN=queA PE=3 SV=1
MLFEDLKEFEFILPEERIARYPAPDRDESRLMVLDVRSGNILSEPSFKNIVSYLKEGDVLVANHTKVSKRRVYLKTELRVHEAMFLEEHNGIWKCKIRNSKKLKDGTRLTDEKTRRITFAVEKKEEEFVFLKPERPLTEEDFEQIGEIPIPPYLKREANSEDEIRYQTLFAKTPGSIAAPTAGLHFSEKLFATLREKKITLCTLELKVGYGTFQPLTEENFQNQKLHREEFFLGKESVEILNQAKQEQRRIVSIGTTTLRALESAYDRSTNSFQEGWGATELFIRPDDLLYSCEGLITNFHLPGSSLLLLVSAFAGKDLILKAYQKAIREEFRFYSYGDAMLILGKKG

SEQ ID NO: 68178 - protein, 347 aa, unidentified
  source 1..347: note = Leptospira kobayashii
  REGION 1..347: note = tr|A0A2P2DUA4|A0A2P2DUA4_9LEPT S-adenosylmethionine:tRNA ribosyltransferase-isomerase; OS = Leptospira kobayashii OX=1917830 GN=queA PE=3 SV=1
MDEFLKDYDFLLPESQIAKYPAENRDESRLLVLNREKDTITEHSRFKEIADYFIEGDVLVYNETKVSKRRVYLSARSGRIHESVFLETRDPDSKEWICILKNRKKLKLGDALHPEGYEDIRFRYQGDSADLSILVADKSLDDSDFSQWGNIPIPPYLKRKAEKSDEDRYQTIFATNPGSVAAPTAGLHFSEKLRQMLEVKGIIFVPIILQIGYGTFQPLQEEQLLKKKLHTESYELSEATAKILNEARAEKRRVISIGTTTLRVLESVFDFKSQIYKAGKGETDIFLSPGDQIHSSQGLVTNFHLPKSSLLLLVNCFGGNNLVMRSYRYALERNFRFYSYGDAMFLF

SEQ ID NO: 68179 - protein, 351 aa, unidentified
  source 1..351: note = Leptospira koniamboensis
  REGION 1..351: note = tr|A0A4R9J475|A0A4R9J475_9LEPT S-adenosylmethionine:tRNA ribosyltransferase-isomerase; OS = Leptospira koniamboensis OX=2484950 GN=queA PE=3 SV=1
MEFQDLSDFDFELPEDQIAKFPAAKRDKSRLLVLGRTQNFLKEETEFSKILNYLQEGDVLVANATRVSKRRVFLTTKTGRRHEAMFLSEIEPGLWKTLTRNSKKLKIGDSISDETTGKFLFSVVRKEEEFTIFQSGIPLDENSFETIGRTPIPPYFKRESTSEDDVRYQTVYSKNLGSVAAPTAGLHFTPELLEELKKRNIEFLNLELKVGYGTFQSLNEDHFTNKKLHEEEFDLPLETKNVLDSAKKNGKRIISVGTTTLRALESAYDPNTKTFRSGEGKTRLFLQPEDSILSCEGLITNFHLPQSSLLLLVSAFSEKEKILKAYKFAIEQNFRFFSYGDSMLILDPEKI

SEQ ID NO: 68180 - protein, 347 aa, unidentified
  source 1..347: note = Leptospira langatensis
  REGION 1..347: note = tr|A0A5F1ZRV2|A0A5F1ZRV2_9LEPT S-adenosylmethionine:tRNA ribosyltransferase-isomerase; OS = Leptospira langatensis OX=2484983 GN=queA PE=3 SV=1
MKFKDLSEFDFELPDEQIAKFPASKRDKSRLLVLGRTKDFLTEEPEFTGILKYLKEGDVLVANHTRVSKRRVFLVTSSGRRHESLFLSELEPGIWKTLLRNSKKLRTGDRIFDEESRSFVFSVVGKQEEFTLLKAESQFDEMSFEKIGRIPIPPYFKRESSFEDDIRYQTVYSKNLGSVAAPTAGLHFTPELIGELQKKGVQFLDLELKVGYGTFQPLTEEHFSQKQLHEEFFLLPERTAQALNQAKKEKRRIISVGTTTLRALEASYQEKKEFKAGEGTTKLFLQPGDPILSCEGLITNFHLPESSLLLLVSAFSEKKRLMDAYRYAVQKGFRFFSYGDSMLILDP

SEQ ID NO: 68181 - protein, 346 aa, unidentified
  source 1..346: note = Leptospira levettii
  REGION 1..346: note = tr|A0A5F2AM25|A0A5F2AM25_9LEPT S-adenosylmethionine:tRNA ribosyltransferase-isomerase; OS = Leptospira levettii OX=2023178 GN=queA PE=3 SV=1
MDFLEEFDFHLPEEQIARFPAKNRDESRLLLVDQSKESFWEAPHFRNIGQWLLPGDVLVFNDTKVSYRRVFLQVESGRIHESIFLETVDDSSFVWTCILKNRAKLKLGDILCPVGFPIFQFRYDGKEEELSLLVSDKEISDSDFEIFGTIPIPPYLKRKVIEEDKIRYQTIFAKKSGSVAAPTAGLHFTDTLKEELVKQGIEFLPVNLQVGYGTFRPLTAEQWQTKTLHKEKYEITEETANRLNRAKKEGRRIIAIGTTSLRVLETVFDSQQQKYKVGLGQTDIFLSPGDNIKSVQGLITNFHLPKSSLLLLVSAFANSRLVMNVYRYALQNHFRFYSYGDSMFLF

SEQ ID NO: 68182 - protein, 346 aa, unidentified
  source 1..346: note = Leptospira levettii
  REGION 1..346: note = tr|A0A2N0AV88|A0A2N0AV88_9LEPT S-adenosylmethionine:tRNA ribosyltransferase-isomerase; OS = Leptospira levettii OX=2023178 GN=queA PE=3 SV=1
MDFLEEFDFHLPEEQIARFPAKNRDESRLLLVDQSKESFWEAPHFRNIGQWLLPGDVLVFNDTKVSYRRVFLQVESGRIHESIFLETVDDSSFVWTCILKNRAKLKLGDILCPVGFPNFQFRYDGKEEELSLLVSDKEISDSDFEIFGTIPIPPYLKRKVIEEDKIRYQTIFAKKSGSVAAPTAGLHFTDTLKEELVKQGIEFVPVNLQVGYGTFRPLTAEQWQTKTLHKEKYEITEETANRLNRAKKEGRRIIAIGTTSLRVLETVFDSQQQKYKVGLGQTDIFLSPGDNIKSVQGLITNFHLPKSSLLLLVSAFANSRLVMNVYRYALQNHFRFYSYGDSMFLF

SEQ ID NO: 68183 - protein, 356 aa, Leptospira licerasiae
  REGION 1..356: note = tr|A0A5F2DU03|A0A5F2DU03_9LEPT S-adenosylmethionine:tRNA ribosyltransferase-isomerase; OS = Leptospira licerasiae OX=447106 GN=queA PE=3 SV=1
MEFQDLSDFDFELPEDQIAKFPAAKRDKSRLLVLGRTREFLKEETEFSKILNYLIEGDVLVANATRVSKRRVFLVTETGRRHEAMFLSETEPRVWKTLTRNSKKLKLGDTVSDEATGNFLFTVERKEEEFTFFRAEIQLDENSFELIGRTPIPPYFKRESTTEDDVRYQTVYSKNLGSVAAPTAGLHFTPELLEELKNRNIEFLKLELKVGYGTFQSLNEDHFTNKKLHEEEFDLPSQTAELLNLAKKNGKRIISVGTTTLRALESAYDPNTKTFRSGEGKTRLFLQPEDSILSCEGLITNFHLPKSSLLLLVSAFAEKEKILKAYEFAIARNFRFFSYGDSMLILDPEKFPLLLI

SEQ ID NO: 68184 - protein, 356 aa, Leptospira licerasiae
  REGION 1..356: note = tr|I0XQV6|I0XQV6_9LEPT S-adenosylmethionine:tRNA ribosyltransferase-isomerase OS=Leptospira licerasiae serovar Varillal str. VAR 010 OX=1049972 GN=queA PE=3 SV=1
MEFQDLSDFDFELPEDQIAKFPAAKRDKSRLLVLGRTREFLKEETEFSKILNYLIEGDVLVANATRVSKRRVFLVTETGRRHEAMFLSETEPRVWKTLTRNSKKLKLGDTVSDEATGNFLFTVERKEEEFTFFRAEIQLDENSFELIGRTPIPPYFKRESTTEDDVRYQTVYSKNLGSVAAPTAGLHFTPELLEELKNRNIEFLKLELKVGYGTFQSLSEDHFTNKKLHEEEFDLPSQTAELLNLAKKNGKRIISVGTTTLRALESAYDPDTKTFRSGEGKTRLFLQPEDSILSCEGLITNFHLPKSSLLLLVSAFAEKEKILKAYEFAIARNFRFFSYGDSMLILDPEKFPPLLI

SEQ ID NO: 68185 - protein, 346 aa, unidentified; identical to SEQ ID NO: 68182
  source 1..346: note = Leptospira macculloughii
  REGION 1..346: note = tr|A0A2N0C2L5|A0A2N0C2L5_9LEPT S-adenosylmethionine:tRNA ribosyltransferase-isomerase; OS = Leptospira macculloughii OX=2023202 GN=queA PE=3 SV=1

SEQ ID NO: 68186 - protein, 346 aa, unidentified
  source 1..346: note = Leptospira macculloughii
  REGION 1..346: note = tr|A0A2N0C897|A0A2N0C897_9LEPT S-adenosylmethionine:tRNA ribosyltransferase-isomerase; OS = Leptospira macculloughii OX=2023202 GN=queA PE=3 SV=1
MDFLNEYDFDLPEEQIAKFPLKNRDESRLLVVDRDQSKFWEAPLFRDITSLVRPGDIFVYNETKVSYRRVFLQVESGRIHESIFLEPVDIQNHTWLCILKNRAKLRLGDKLSPVGFPNYQFVYQGPNEELSILKSELSISDSDFEIFGNIPIPPYLKRNVTEEDKVRYQTIFANRSGSVAAPTAGLHFTEDLKDTFRTLGAEFLPVELQIGYGTFRPLTTEQWQTKTLHREKYLVSEFTATKLNDARKEGRRIIAVGTTTLRVLETVFDSQLQKYKVGSSQTDIFLSPGDKIDSVQGLITNFHLPKSSLLLLVSAFATTQLVLDSYRYALKNGFRFYSYGDSMFLF

SEQ ID NO: 68187 - protein, 347 aa, unidentified
  source 1..347: note = Leptospira mayottensis
  REGION 1..347: note = tr|A0A5F2EKC8|A0A5F2EKC8_9LEPT S-adenosylmethionine:tRNA ribosyltransferase-isomerase; OS = Leptospira mayottensis OX=1137606 GN=queA PE=3 SV=1
MLFKDLKEFEFTLSEERIARYPAANRDESRLMVLDVNAGNIFSEPSFKNLVSYLKEGDVLVANHTKVSKRRVYLKTQIRTHETMFLEEKELLWKCKIRNSKKLKVGTKLSDEKTQRISFTVEKKEGEFVFLKSEQTLQEEDFQQIGEIPIPPYFKRNPDSKDEIRYQTLFAKTPGSVAAPTAGLHFSESIFQTLKEKKIQFCTLELKVGYGTFQPLTEENFQNQKLHREEFFLEESSTKILNLAKKEGRRIFSIGTTTLRALESAYNYATNSFRSGRGTTELFIQPEDRLKSCECLITNFHLPGSSLLLLVSAFAGKELILKAYQKAIQEKFRFYSYGDAMLILGKR

SEQ ID NO: 68188 - protein, 347 aa, unidentified; identical to SEQ ID NO: 68187
  source 1..347: note = Leptospira mayottensis
  REGION 1..347: note = tr|A0A3Q9DY95|A0A3Q9DY95_9LEPT S-adenosylmethionine:tRNA ribosyltransferase-isomerase; OS = Leptospira mayottensis 200901116 OX=1192864 GN=queA; PE = 3 SV=1

SEQ ID NO: 68189 - protein, 346 aa, Leptospira meyeri
  REGION 1..346: note = tr|A0A4R8MLQ9|A0A4R8MLQ9_LEPME S-adenosylmethionine:tRNA ribosyltransferase-isomerase; OS = Leptospira meyeri OX=29508 GN=queA PE=3 SV=1
MDFLNEYDFDLPEEQIAKFPLKNRDESRLLVVDRIQSKFWEAPLFRDITSLVRPGDIFVYNETKVSYRRVFLQVESGRIHESIFLEPEDIQNQTWLCILKNRAKLRLGDRLSPVGFPNYQFVYQGPNEELSILKSEISISDSDFEIFGNIPIPPYLKRKVTEEDKVRYQTIFANRSGSVAAPTAGLHFTEDLKDTFRTLGAEFLPVELQIGYGTFRPLTTEQWQTKTLHREKYLVPESTATKLNDARKEGRRIIAVGTTTLRVLETVFDSQLQKYKVGSSQTDIFLSPGDKIDSVQGLITNFHLPKSSLLLLVSAFATTQLVLDSYRYALKNGFRFYSYGDSMFLF

SEQ ID NO: 68190 - protein, 346 aa, Leptospira meyeri; identical to SEQ ID NO: 68186
  REGION 1..346: note = tr|A0A5F2CSM9|A0A5F2CSM9_LEPME S-adenosylmethionine:tRNA ribosyltransferase-isomerase; OS = Leptospira meyeri OX=29508 GN=queA PE=3 SV=1

SEQ ID NO: 68191 - protein, 348 aa, unidentified
  source 1..348: note = Leptospira montravelensis
  REGION 1..348: note = tr|A0A4Z0ZQJ8|A0A4Z0ZQJ8_9LEPT S-adenosylmethionine:tRNA ribosyltransferase-isomerase; OS = Leptospira montravelensis OX=2484961 GN=queA PE=3 SV=1
MDFLQEFDFNLPDEQIAKFPLENRDQSRLLVVNIGQSKFWEAPLFRDIQSLVRPGDVFVYNETKVSSRRVYLQVESGRIHESIFLESLDPSEKSWLCILKNRAKLKLGEKLFPVGFNDYQFSYQGPKEELSILFSEIPISDSDFGIFGNIPIPPYLKRNVTEEDKIRYQTIFANRSGSVAAPTAGLHFTEELKENLNKKGAEFVPVELQIGYGTFRPLTPEQWESKTLHREKYFVSESTASKLNGARKEGRRIIAVGTTTLRVLETVFDSQLKKYKVGSSQTDIFLSPGDNIQSVQGLITNFHLPKSSLLLLVSAFANTQLVLDAYQYALQNGFRFYSYGDSMFLFQK

SEQ ID NO: 68192 - protein, 346 aa, unidentified
  source 1..346: note = Leptospira mtsangambouensis
  REGION 1..346: note = tr|A0A5F2DJ78|A0A5F2DJ78_9LEPT S-adenosylmethionine:tRNA ribosyltransferase-isomerase; OS = Leptospira mtsangambouensis OX=2484912 GN=queA PE=3 SV=1
MDFLNEYDFHLPEEQIAKFPLENRDESRLLVVDRAQLKYWEAPLFRDITTLVRPGDIFVYNETKVSYRRVFLQVESGRIHESIFLEPQDTQNQTWLCILKNRAKLKLGDRLSPVGFPNYQFVYHGPEEELSFLGSELSISDSDFEIFGNIPIPPYLKRNVTEEDKVRYQTIFANRSGSVAAPTAGLHFTEELKNTFRTLGAEFLPVELQIGYGTFRPLTTEQWQTKTLHREKYLVSESTATKLNDARKEGRRIIAVGTTTLRVLETVFDSQLQKYKVGSSQTDIFLSPGDKIDSVQGLITNFHLPKSSLLLLVSAFATTQLVLDSYRYALKNGFRFYSYGDSMFLF

SEQ ID NO: 68193 - protein, 351 aa, unidentified
  source 1..351: note = Leptospira neocaledonica
  REGION 1..351: note = tr|A0A2M9ZWH5|A0A2M9ZWH5_9LEPT S-adenosylmethionine:tRNA ribosyltransferase-isomerase; OS = Leptospira neocaledonica OX=2023192 GN=queA PE=3 SV=1
MEFQDLSDFDFELPEDQIAKFPAVQRDKSRLLVLGRTQDFLKEETEFSKILDYLREGDVLVANATRVSKRRVFLVTKTERRHEAMFLSEIEPGVWKTLIRNSKKLKLGDILSDEASGKFQLSVERKEEEFTILRSETPLDENSFETIGRTPIPPYFKRESNSEDDVRYQTVYSKNLGSVAAPTAGLHFTPELLEELKNRKIEFLKLELKVGYGTFQSLSEDHFANKKLHEEEFDLPSETTELLNSAKKNGKRIISVGTTTLRALESAYDPNDKTFRAGEGKTRLFLQPEDSILSCEGLITNFHLPQSSLLLLVSAFAEKEKILKAYKFAIEQKFRFFSYGDSMLILDPEKV

SEQ ID NO: 68194 - protein, 350 aa, Leptospira noguchii
  REGION 1..350: note = tr|A0A540UEM9|A0A540UEM9_9LEPT S-adenosylmethionine:tRNA ribosyltransferase-isomerase; OS = Leptospira noguchii OX=28182 GN=queA PE=3 SV=1
MLFKDLKEFEFILSEERIARYPVANRDESRLMVLDVNTGEISSEPSFKNVISYLREGDLLVANHTKVSKRRVYLRSKNRIHEAMFLEEKESLWRCKIRNSKKLKMGEQLCDEKTKLVLFTIEKKEEEFVFLKPKHPLQEEDFQQIGEIPIPPYLKRNADSEDEIRYQTLFAKTPGSVAAPTAGLHFSENIFKTLKEKKIQFCTLELKVGYGTFQPLTEENFQNQKLHREEFFLEEPSAQMLNLAKKERRRIFSIGTTTLRALESAYDPVTDSFRSGPGATELFILPENQLQSCQGLITNFHLPSSSLLLLVSAFAGKELILKAYQKAIQEKFRFYSYGDAMLILGIELIP

SEQ ID NO: 68195 - protein, 350 aa, Leptospira noguchii
  REGION 1..350: note = tr|T0FEZ8|T0FEZ8_9LEPT S-adenosylmethionine:tRNA ribosyltransferase-isomerase OS=Leptospira noguchii serovar Panama str. CZ214 OX=1001595 GN=queA PE=3 SV=1
MLFKDLKEFEFILSEERIARYPVANRDESRLMVLDVNTGEISSEPSFKNVISYLREGDLLVANHTKVSKRRVYLRSKNRIHEAMFLEEKESLWRCKIRNSKKLKMGEQLYDEKTKLILFTIEKKEEEFVFLKPKHPLQEEDFQQIGEIPIPPYLKRNADSEDEIRYQTLFAKTPGSVAAPTAGLHFSENIFKTLKEKKIQFCTLELKVGYGTFQPLAEENFQSQKLHREEFFLEEPSAQMLNLAKKERRRIFSIGTTTLRALESAYDPVTDSFRSGPGATELFILPEDRLQSCQGLITNFHLPSSSLLLLVSAFAGKDLILKAYQKAIQEKFRFYSYGDAMLILGIELIP

SEQ ID NO: 68196 - protein, 346 aa, unidentified
  source 1..346: note = Leptospira noumeaensis
  REGION 1..346: note = tr|A0A4R9I9I6|A0A4R9I9I6_9LEPT S-adenosylmethionine:tRNA ribosyltransferase-isomerase; OS = Leptospira noumeaensis OX=2484964 GN=queA PE=3 SV=1
MDFLQDYDFHLPEEQIAKFPLENRDESRLLVVDKTESKFSEAPLFKDITRFVLPGDIFVYNQTKVSYRRVYLQVESGRIHESIFLEAEDESCQVWLCILKNRAKLKLGDKLSPVGFQEFEFFYRGAKEELSILHSERSISEPDFEVFGNIPIPPYLKRNVTEEDKIRYQTIFASRSGSVAAPTAGLHFTESLKENLRSLGVEFLPVELQIGYGTFRPLTAEQWQTKTLHRENYSVSAFTATKLNDARKEGSRIIAVGTTTLRVLETVFDSQLKTYKVGVGQTDIFLSPGDNIQSVQGLITNFHLPKSSLLLLVSAFANARLVMSSYHYALKNGFRFYSYGDSMFLF

SEQ ID NO: 68197 - protein, 349 aa, unidentified
  source 1..349: note = Leptospira ognonensis
  REGION 1..349: note = tr|A0A4R9K866|A0A4R9K866_9LEPT S-adenosylmethionine:tRNA ribosyltransferase-isomerase; OS = Leptospira ognonensis OX=2484945 GN=queA PE=3 SV=1
MNLEETLADYDFPLDESRIAKFPVATRDESKLLVLNRNSGQITDIAQFKQIESYLVPGDVLVYNETKVSKRRVFLSTPRGRIHESVFIESRDPEGKEWICILKNRKKLKLGDVLFPSASENHFCIYSGNEGDLSILQFKEKVDEIDFEIWGNIPIPPYLKRMATKEDEERYQTIFAKQLGSVAAPTAGLHFTESLRAKLEGNGVQFLPVQLQIGYGTFQPLNEEQWQEKKLHKETFEVTAETATILNGARKEGRRIISVGTTSLRVLETIFEKENQVYVAGKGETDIFMSPGDIIFSVQGLITNFHLPRSSLLLLVSTFVGKELTMKAYHHALEKNYRFYSYGDAMLLV

SEQ ID NO: 68198 - protein, 346 aa, unidentified
  source 1..346: note = Leptospira perdikensis
  REGION 1..346: note = tr|A0A4R9JIV9|A0A4R9JIV9_9LEPT S-adenosylmethionine:tRNA ribosyltransferase-isomerase; OS = Leptospira perdikensis OX=2484948 GN=queA PE=3 SV=1
MDFLQEYDFLLPEEQIAKFPLENRDESRLLVVDKTESKHWEAPLFRDIINLVRPGDIFVYNETKVSYRRVYLQVGSGRIHESIFLEPQDPTNQTWLCILKNRAKLKFGDKLSPVAFPNFSFSFQGHSEELSILYSETEISDSDFAIFGNIPIPPYLKRNVTEEDKVRYQTIFANRSGSVAAPTAGLHFTEKLKDELRTRGVEFLPVELQIGYGTFRPLTTEQWQTKTLHRENYSVSEATATKLNEARKEGRRVIAIGTTTLRVLESVFDSQLKTYKVGSSQTDIFLSPGDNIQSVQGLITNFHLPKSSLLLLVSAFANTRLVMSSYQYALKNGFRFYSYGDSMFLF

SEQ ID NO: 68199 - protein, 353 aa, unidentified
  source 1..353: note = Leptospira perolatii
  REGION 1..353: note = tr|A0A2M9ZPN7|A0A2M9ZPN7_9LEPT S-adenosylmethionine:tRNA ribosyltransferase-isomerase; OS = Leptospira perolatii OX=2023191 GN=queA PE=3 SV=1
MDFQELSDFQFELPEDQIAKNPASSRDQSKLLVLDRSNGEKLEEKSFDCILKYLVSGDVLVVNNTKVSKRRVYLLSSSGRRHEALFLGQDRNANWKALVRNSRKLKIGEILRDEKTGSISFILCGKEKENVLLSAPSEFTEETFDRIGQTPIPPYFKRESTEEDDIRYQTVYARGLGSVAAPTAGLHFTPELIKRCKDSGIQFLELELKVGYGTFQPLTEENFQSKSLHEESYFLPEQTASKLNQARAQNRRIISVGTTTLRVLETAYDPSLKMFRAGEGKSTLFLQPEDRIESSDGLITNFHLPQSSLLLLVCAFAKKEWVLSAYKYAISNHFRFFSYGDAMLILKTIQHPT

SEQ ID NO: 68200 - protein, 345 aa, unidentified
  source 1..345: note = Leptospira putramalaysiae
  REGION 1..345: note = tr|A0A4R9L722|A0A4R9L722_9LEPT S-adenosylmethionine:tRNA ribosyltransferase-isomerase; OS = Leptospira putramalaysiae OX=2484984 GN=queA PE=3 SV=1
MLFTDLKDFEFELPEDRIARYPAKNRDESRLMVVEVGSEKIQVEDAFKNIVSYLKEGDVLIGNHTKVSKRRVYLKNPLRIHEAMFLETKDGLWRCKIRNSKKLKTGDRLQDAKTGLRFFRVEGKEEEFVFLKPDQELQEEDFQSIGEIPIPPYLKREANSEDEIRYQTLFAKTPGSVAAPTAGLHFSESLFQTLKEKKIQICTLELTVGYGTFQPLTEENFQNKKLHREEFFLEESSASILNLAKKEGRRIVSIGTTTLRALESTYDPITKTFRSGAGATELFLQPNDKLQSCEGLITNFHLPGSSLLLLVSAFAGKELILRAYQRAIQEEFRFYSYGDAMLILR

SEQ ID NO: 68201 - protein, 348 aa, unidentified
  source 1..348: note = Leptospira ryugenii
  REGION 1..348: note = tr|A0A2P2E512|A0A2P2E512_9LEPT S-adenosylmethionine:tRNA ribosyltransferase-isomerase; OS = Leptospira ryugenii OX=1917863 GN=queA PE=3 SV=1
MDLLDLEEYDFALPEEQIAKFPAEDRAASRLLCLDRSHAQIQEHSHFREIATYFKPGDILVYNETKVSKRRVFLHSKSERIHEAIFLKPLDELASTWECILKFRRKLKLGDLLFLNSESSLHFRFEGKMGELSILKANRPLTEEDFEVFGNIPIPPYLKRLATEEDEIRYQTVFAKQPGSVAAPTAGLHFTEDLVALLQSAGIEFLPVQLKIGYGTFQGLTEEQLKSKSLHSEEYSLAPLVASRLTNAKRNGQRIIAIGTTSLRVLETVYEKESQIFHPGEGKTDIFLSPGDHILSIDGIITNFHLPKSSLILLVSTFAGKNLIKEAYGYALTNQFRFYSYGDAMFIY

SEQ ID NO: 68202 - protein, 351 aa, unidentified
  source 1..351: note = Leptospira saintgironsiae
  REGION 1..351: note = tr|A0A2M9YAW5|A0A2M9YAW5_9LEPT S-adenosylmethionine:tRNA ribosyltransferase-isomerase; OS = Leptospira saintgironsiae OX=2023183 GN=queA PE=3 SV=1
MEFQDLSDFDFELPEDQIAKFPAAKRDKSRLLVLGRTQNFLKEETEFSKILNYLQEGDVLVANATRVSKRRVFLVTKTGRRHEAMFLTETEPGVWKTLTRNSKKLKLGDTISDEATGKFLFSVIRKEEEFTIFQSELPLDENSFETIGRTPIPPYFKRESTSEDDVRYQTVYSKNLGSVAAPTAGLHFTPELLEELKKRNIEFLKLELKVGYGTFQSLNEDHFANKKLHEEEFDLPLETKNVLDLAKKNGKRIISVGTTTLRALESAYDPNTKTFRSGEGKTRLFLQPEDSILSCEGLITNFHLPQSSLLLLVSAFAEKEKILKAYKFAIEQNFRFFSYGDSMLILDPEKV

SEQ ID NO: 68203 - protein, 347 aa, Leptospira santarosai
  REGION 1..347: note = tr|A0A0E2BMQ1|A0A0E2BMQ1_9LEPT S-adenosylmethionine:tRNA ribosyltransferase-isomerase; OS = Leptospira santarosai str. MOR084 OX=1049984 GN=queA; PE = 3 SV=1
MLFEDLKEFEFTLSEERIARYPTANRDESKLMVLDVNAGNIFSESSFKNIVSYLKEGDVLVANHTKVSKRRVYLKTQTRIHETMFLEENELLWKCKIRNSKKLKVGTKLSDEKTQRIAFKVEKKEGEFVFLKPDRTLQEEDFQQIGEIPIPPYLKRNPNSEDEIRYQTLFAKTPGSVAAPTAGLHFSEPVFQTLKEKKIQFCTLELKVGYGTFQPLTEKNFQNQKLHREEFFLGESSAEILNLAKKEKRRIVSIGTTTLRALESAFDKTNDSFRSGPGSTELFIQPENRLNSCECLITNFHLPGSSLLLLVSAFAGKELILKAYRKAIQEKFRFYSYGDAMLILGKR

SEQ ID NO: 68204 - protein, 347 aa, Leptospira santarosai; identical to SEQ ID NO: 68203
  REGION 1..347: note = tr|A0A1V2EJG9|A0A1V2EJG9_9LEPT S-adenosylmethionine:tRNA ribosyltransferase-isomerase; OS = Leptospira santarosai OX=28183 GN=queA PE=3 SV=1

SEQ ID NO: 68205 - protein, 353 aa, unidentified
  source 1..353: note = Leptospira sarikeiensis
  REGION 1..353: note = tr|A0A4R9K1T2|A0A4R9K1T2_9LEPT S-adenosylmethionine:tRNA ribosyltransferase-isomerase; OS = Leptospira sarikeiensis OX=2484943 GN=queA PE=3 SV=1
MEFQDLSDFDFDLPEEQIAKFPAAQRDRSRLLVLGRKSEFLKEEPEFARILEYLKPGDLLVANATRVSKRRVFLLSKTERRHEAMFLSETSPGIWKTLIRNSKKLKIGDRLLDEKTGTFGFSVLDKEEEFTILRSGSELDENKFELIGNTPIPPYFKRESTSEDDLRYQTVYSKNLGSVAAPTAGLHFTPELLDKLKTIGIGFLELELKVGYGTFQSLSQDHFSNKKLHEEEYYIPEETAQILNSAKQGKSRIISVGTTTLRALESSYDPDIEKFKAGSGNTNLFLQPEDSILSCDGLITNFHLPQSSLLLLVSAFAEKQKILNAYKYAIDRKFRFFSYGDSMLILDPDPDST

SEQ ID NO: 68206 - protein, 351 aa, unidentified
  source 1..351: note = Leptospira selangorensis
  REGION 1..351: note = tr|A0A4R9GF59|A0A4R9GF59_9LEPT S-adenosylmethionine:tRNA ribosyltransferase-isomerase; OS = Leptospira selangorensis OX=2484982 GN=queA PE=3 SV=1
MEFQDLSDFDFELPEDQIAKFPAAKRDKSRLLVIGRTQNFLKEEVEFSKILGYLKEGDVLVANATRVSKRRVFLITKTGRRHESMFLSETEPGVWKTLTRNSKKLKVGDKVTDEATGKFHFSVGRKEEEFIIFRAETLLDENSFEIIGRTPIPPYFKRESTSEDDVRYQTVYSKNLGSVAAPTAGLHFTPELLEELKNRNIEFLKLELKVGYGTFQSLNEDHFANKKLHEEEFELPLETKNVLDSAKKDGRRIISVGTTTLRALESAYDPNTKTFRSGEGKTRLFLQPEDSILSCEGLITNFHLPQSSLLLLVSAFAEKEKILKAYKFAIEQNFRFFSYGDSMLILDPEKI

SEQ ID NO: 68207 - protein, 351 aa, unidentified
  source 1..351: note = Leptospira selangorensis
  REGION 1..351: note = tr|A0A5F2C2S9|A0A5F2C2S9_9LEPT S-adenosylmethionine:tRNA ribosyltransferase-isomerase; OS = Leptospira selangorensis OX=2484982 GN=queA PE=3 SV=1
MEFQDLSDFDFELPEDQIAKFPAAKRDKSRLLVIGRTQNFLKEEVEFSKILGYLKEGDVLVANATRVSKRRVFLITKTGRRHESMFLSETEPGVWKTLTRNSKKLKVGDKVTDEATGRFLFSVGRKEEEFIIFRAETPLDENSFEIIGRTPIPPYFKRESTSEDDVRYQTVYSKNLGSVAAPTAGLHFTPELLEELKNRNIEFLKLELKVGYGTFQSLNEDHFANKKLHEEEFELPLETKNVLDSAKKDGRRIISVGTTTLRALESAYDPNTKTFRSGGGKTRLFLQPEDSILSCEGLITNFHLPQSSLLLLVSAFAEKEKILKAYKFAIEQNFRFFSYGDSMLILDPEKI

SEQ ID NO: 68208 - protein, 348 aa, unidentified
  source 1..348: note = Leptospira semungkisensis
  REGION 1..348: note = tr|A0A4R9FZR2|A0A4R9FZR2_9LEPT S-adenosylmethionine:tRNA ribosyltransferase-isomerase; OS = Leptospira semungkisensis OX=2484985 GN=queA PE=3 SV=1
MKFTDLSEFDFELPEEQIAKFPASKRDQSRLLVIGRTKDFLTEEAEFTSILKYLKRGDVLVANHTRVSKRRVFLVTSTGRRHESLFLSEVQPGVWKTLLRNSKKLKIGDTLFDEVSRNFSFSVIGKQEEFTLVQAGTEWNEESFEKVGRTPIPPYFKRESSSEDDIRYQTVYSKNLGSVAAPTAGLHFTPELISKLQSNEIEFLDLELRVGYGTFQPLTEEHFSQKKLHEEFFLMPERTTQILNQAKKENRRIIAVGTTTLRALEASYQKEKNEFKVGEGSTTLFLQPGDPIQSCEGLITNFHLPESSLLLLVSAFSEKNRMMDAYRYAVQKGFRFFSYGDSMLILDP

SEQ ID NO: 68209 - protein, 347 aa, Leptospira sp.
  REGION 1..347: note = tr|M5UGZ9|M5UGZ9_9LEPT S-adenosylmethionine:tRNA ribosyltransferase-isomerase OS=Leptospira sp. Fiocruz LV4135 OX=1193013 GN=queA PE=3 SV=1
MLFEDLKEFEFTLSEERIARYPTANRDESKLMVLDVNAGNIFSESSFKNIVSYLKEGDVLVANHTKVSKRRVYLKTQTRIHETMFLEENELLWKCKIRNSKKLKVGTKLSDEKTQRIAFKVEKKEGEFVFLKSDRTLQEEDFQQIGEIPIPPYLKRNPNSEDEIRYQTLFAKTPGSVAAPTAGLHFSEPVFQTLKEKKIQFCTLELKVGYGTFQPLTEKNFQNQKLHREEFFLGESSAEILNLAKKEKRRIVSIGTTTLRALESAFDKTNDSFRSGPGSTELFIQPENRLNSCECLITNFHLPGSSLLLLVSAFAGKELILKAYRKAIQEKFRFYSYGDAMLILGKR

SEQ ID NO: 68210 - protein, 347 aa, Leptospira sp.
  REGION 1..347: note = tr|M6EG11|M6EG11_9LEPT S-adenosylmethionine:tRNA ribosyltransferase-isomerase OS=Leptospira sp. serovar Kenya str. Sh9 OX=1242991 GN=queA PE=3 SV=1
MLFEDLKEFEFTLSEERIARYPAANRDESRLMVLDVNVGNIFSESSFKNLVSYLKEGDVLVANHTKVSKRRVYLKTQIRTHETMFLEEKELLWKCKIRNSKKLKVGTKLSDEKTQRISFTVEKKEGEFVFLKPEQTLQEEDFQQIGEIPIPPYFKRNPDPKDEIRYQTLFAKTPGSVAAPTAGLHFSESIFQTLKEKKIRFCTLELKVGYGTFQPLTEENFQNQKLHREEFFLEKSSTEILNLAKKEGRRIFSIGTTTLRALESAYDYATNSFRSGRGTTELFIQPEDRLKSCECLITNFHLPSSSLLLLVSAFAGKELVLKAYQKAIQEKFRFYSYGDAMLILGKR

SEQ ID NO: 68211 - protein, 345 aa, unidentified; identical to SEQ ID NO: 68200
  source 1..345: note = Leptospira stimsonii
  REGION 1..345: note = tr|A0A5E8TJD8|A0A5E8TJD8_9LEPT S-adenosylmethionine:tRNA ribosyltransferase-isomerase; OS = Leptospira stimsonii OX=2202203 GN=queA PE=3 SV=1

SEQ ID NO: 68212 - protein, 345 aa, unidentified
  source 1..345: note = Leptospira stimsonii
  REGION 1..345: note = tr|A0A396Z0W2|A0A396Z0W2_9LEPT S-adenosylmethionine:tRNA ribosyltransferase-isomerase; OS = Leptospira stimsonii OX=2202203 GN=queA PE=3 SV=1
MLFTDLKDFEFELPENRIARYPAKNRDESRLMVVEVGSEKIRIEDAFKNIVSYLKEGDVLIGNHTKVSKRRVYLKNQLRTHEAMFLETKDGLWRCKIRNSRKLKTGDRLQDVKTGLRLFQVERKEEEFVFLKPEQELKEEDFQSIGEIPIPPYLKREANSEDEIRYQTLFAKTPGSVAAPTAGLHFSESLFQTLKEKKIQICTLELTVGYGTFQPLTEENFQNKKLHREEFFLEESSASLLNLAKKEGRRIISIGTTTLRALESTYDPKTKTFRSGAGATELFLQPNDELQSCEGLITNFHLPGSSLLLLVSAFAGKELILRAYQRAIQEEFRFYSYGDAMLILR

SEQ ID NO: 68213 - protein, 346 aa, unidentified
  source 1..346: note = Leptospira terpstrae
  REGION 1..346: note = tr|N1VRX9|N1VRX9_9LEPT S-adenosylmethionine:tRNA ribosyltransferase-isomerase OS=Leptospira terpstrae serovar Hualin str. LT 11-33 = ATCC 700639 OX=1257025; GN = queA P E=3 SV=1
MDFLQEYDFHLPEEQIAKFPLETRDESRLLVVDKTKSKYWEAPLFRDIITLVRSGDVFVYNETKVSYRRVFLQVESGRIHESIFLEPEDSNHQVWLCILKNRAKLKLGDKLFPVGYKNFQFSYYGPKEELSNLFSERSISDADFEIFGNIPIPPYLKRDVTEEDKVRYQTIFAERSGSVAAPTAGLHFTEELKENLRKIGAEFLPVELQIGYGTFRPLTAEQWQTKTLHRENYLVSESTATKLNDARREGRRIIAVGTTTLRVLETVFDSQIQKYKVGASQTDIFLSPGDRIQSVQGLITNFHLPKSSLLLLVSAFATTQLVLDSYRYALKNGFRFYSYGDSMFLF

SEQ ID NO: 68214 - protein, 345 aa, unidentified
  source 1..345: note = Leptospira tipperaryensis
  REGION 1..345: note = tr|A0A1D7V3T7|A0A1D7V3T7_9LEPT S-adenosylmethionine:tRNA ribosyltransferase-isomerase; OS = Leptospira tipperaryensis OX=2564040 GN=queA PE=3 SV=1
MLFSDLEEFEFELPEDRIARYPAKNRDESRLMVVKVGSGEIHTENTFKNIIAYLREGDVLIGNHTKVSKRRVYLKNQLRTHEAMFLETKDGLWRCKIRNSRKLKTGDRLQDVKTGLRLFQVEGKEDEFVFLKSEKELKEEDFQEIGEIPIPPYLKRDADAEDEIRYQTLFAKTPGSVAAPTAGLHFSESLFEILKEKKIRICTLELTVGYGTFQPLTEENFQNKKLHREEFFLEESSASILNLAKKEGRRILSIGTTTLRALESTYDPLTKTFRSGHGATELFLQPEDKLQSCEGLITNFHLPGSSLLLLVSAFAGKELILRSYQKAIQEEFRFYSYGDAMLILS

SEQ ID NO: 68215 - protein, 348 aa, unidentified
  source 1..348: note = Leptospira vanthielii
  REGION 1..348: note = tr|N1W2Z0|N1W2Z0_9LEPT S-adenosylmethionine:tRNA ribosyltransferase-isomerase OS=Leptospira vanthielii serovar Holland str. Waz Holland = ATCC 700522 OX=1218591; GN = q ueA PE=3 SV=1
MDFLNEYDFHLPDEQIAKFPLENRDESRLLVVDIGQSKFWEAPLFRDITALVRPGDVFVYNETKVSYRRVYLQVESGRIHESIFLESVDQSNQGWLCILKNRAKLKLGEMLSPVGFKNFRFSFQGPKEELSILFSETPISDSDFAIFGNIPIPPYLKRNVTEEDKIRYQTIFANRSGSVAAPTAGLHFTEDLKESLRKLGAEFLPVELQIGYGTFRPLTPEQWQTKTLHKEKYFVSESTASKLNDARKEGRRIIAVGTTTLRVLETVFDSQLQKYKVGSSQTDIFLSPGNRIQSVQGLITNFHLPKSSLLLLVSAFANTQLVLDVYQYALQNRFRFYSYGDSMFLFQK

SEQ ID NO: 68216 - protein, 348 aa, unidentified; identical to SEQ ID NO: 68215
  source 1..348: note = Leptospira vanthielii
  REGION 1..348: note = tr|A0A4V3JVQ2|A0A4V3JVQ2_9LEPT S-adenosylmethionine:tRNA ribosyltransferase-isomerase; OS = Leptospira vanthielii OX=293085 GN=queA PE=3 SV=1

SEQ ID NO: 68217 - protein, 347 aa, Leptospira weilii
  REGION 1..347: note = tr|M6FGL5|M6FGL5_9LEPT S-adenosylmethionine:tRNA ribosyltransferase-isomerase OS=Leptospira weilii str. 2006001855 OX=996804 GN=queA PE=3 SV=1
MLFEDLKEFEFMLSEERIARYPAANRDESRLMVLDVNAGNIFSEPSFKNLVSYLKEGDVLVANHTKVSKRRVYLKTQTRTHETMFLEEKELLWKCKIRNSKKLKVGTKLSDKKTQCISFTVEKKEGEFVFLKPEQILREEDFQRIGEIPIPPYFKRNPDSKDEIRYQTLFAKTPGSVAAPTAGLHFSESIFQTLKEKKIQFCTLELKVGYGTFQPLTEENFQNQKLHREEFFLEESSAEILNLAKKEGRRIFSIGTTTLRALESAYDYATDSFRSGRGATELFIQPEDRLKSCECLITNFHLPGSSLLLLVSAFAGKELISKAYQKAIQEKFRFYSYGDAMLILGKR

SEQ ID NO: 68218 - protein, 232 aa, Leptospira weilii
  REGION 1..232: note = tr|M3ETJ5|M3ETJ5_9LEPT S-adenosylmethionine:tRNA ribosyltransferase-isomerase OS=Leptospira weilii serovar Topaz str. LT2116 OX=1088540 GN=LEP1GSC188_3225 PE=3 SV=1
MYLIYSGKKEGEFVFLKSEQILQEEDFQRIGEIPIPPYFKRNPDPKDEIRYQTLFAKTPGSVAAPTAGLHFSESIFQTLKEKKIQFCTLELKVGYGTFQPLTEENFQNQKLHREEFFLEESSTKILNLAKKEGRRIFSIGTTTLRALESAYDYATNSFRSGRGATELFIQPEDRMKSCECLITNFHLPGSSLLLLVSAFAGKELISKAYQKAIQEKFRFYSYGDAMLILGKR

SEQ ID NO: 68219 - protein, 348 aa, Leptospira wolbachii
  REGION 1..348: note = tr|R8ZYE8|R8ZYE8_9LEPT S-adenosylmethionine:tRNA ribosyltransferase-isomerase OS=Leptospira wolbachii serovar Codice str. CDC OX=1218599 GN=queA PE=3 SV=1
MDFLQEYDFHLPDEQIAKFPLENRDESRLLVVDIGQTKFWEAPLFRDITALVRPGDVFVYNETKVSYRRVYLQVESGRIHESIFLESVDKSNQGWLCILKNRAKLKLGDILSPVGFKNFRFFFQGPEEELSILFSETPISDSDFAIFGNIPIPPYLKRNVTEEDKVRYQTIFANRSGSVAAPTAGLHFTEDLKENLRKLGAEFLPVELQIGYGTFRPLTPEQWQTKTLHKEKYFVSESTASKLNDARKEGRRIIAVGTTTLRVLETIFDSQLQKYKVGSSQTDIFLSPGDRIQSVQGLITNFHLPKSSLLLLVSAFANTQLVLDVYQYALQNRFRFYSYGDSMFLFQK

SEQ ID NO: 68220 - protein, 398 aa, Leptospira wolffii
  REGION 1..398: note = tr|S3UP67|S3UP67_9LEPT S-adenosylmethionine:tRNA ribosyltransferase-isomerase OS=Leptospira wolffii serovar Khorat str. Khorat-H2 OX=1193069 GN=queA PE=3 SV=1
MPFQVDPHSGTLFEKAEKANQINSFLQKGVGRVKIGSRRKARVFIGRMKISDLSEFDFELPEELIAKFPAPERDRSRLLCIGRTHSFLTEEKEFLEIRKYLRKGDVLVANSTRVSKRRVFLRTKTGRRHEALFLSELEPGIWKALVRNSKKLKPEEMLQDEVAAGFSFKLVGRSEEFSLLQAGPEFREESFEQIGRIPIPPYFKRESGPEDEIRYQTVYSKALGSVAAPTAGLHFTSGLISDLKNSGIEFLDLELRVGYGTFQPIGENHFAEKRLHEERFLLPEYTVSRLNLAKKEKRRILSVGTTTLRALESSYDPISDSFRMGEGETTLFLQPGDPVRSCDGLITNFHLPQSSLLLLVSAFAGKENILNAYRFAIEHKFRFFSYGDAMLILDPIPN

SEQ ID NO: 68221 - protein, 398 aa, Leptospira wolffii
  REGION 1..398: note = tr|A0A5F1YRD2|A0A5F1YRD2_9LEPT S-adenosylmethionine:tRNA ribosyltransferase-isomerase; OS = Leptospira wolffii OX=409998 GN=queA PE=3 SV=1
MPFQVDPHSGTFFEKAEKANQINSFLQKGLGRVKIGSRRNARVFIGRMKISDLSEFDFELPEELIAKFPAPERDRSRLLCIGRTRSFLTEEKEFLEIRKYLRKGDVLVANSTRVSKRRVFLRTKTGRRHEALFLSEVEPGIWKALVRNSKKLKPEEILQDEVVAGFSFKLVGRSEEFSLLQAGPEFREESFEQIGRIPIPPYFKRESGPEDEIRYQTVYSKALGSVAAPTAGLHFTSDLISDLKNSGIEFLDLELRVGYGTFQPIGENHFAEKRLHEERFLLPEHTVFRLNLAKKEKRRILSVGTTTLRALESSYDPISDSFRMGEGETTLFLQPGDPVRSCDGLITNFHLPQSSLLLLVSAFAGKENILNAYRFAIEHKFRFFSYGDAMLILDPIPN

SEQ ID NO: 68222 - protein, 346 aa, unidentified
  source 1..346: note = Leptospira yanagawae
  REGION 1..346: note = tr|A0A5E8H6A7|A0A5E8H6A7_9LEPT S-adenosylmethionine:tRNA ribosyltransferase-isomerase; OS = Leptospira yanagawae serovar Saopaulo str. Sao Paulo = ATCC 700523 OX=124948 3 GN=queA PE=3 SV=1
MDFLNEFDFHLPEEQIARFPAKNRDESRLLLVDKTAERFWETPFFRDIREWVKPGDVFVYNETKVSYRRVYLQVTSGRIHESIFLEAEDDGSRIWTCILKNRAKLKLGEVLTPVGFPSFSFRYEGKKEELSTLVSENTVTDSDFEIFGTIPIPPYLKRNVTEEDKLRYQTIFAKKSGSVAAPTAGLHFTESLRKELQNHGAEFLPVELQVGYGTFRPLTAEQWQTKTLHKERYEITEVTASRLNDAKKAGRRVIAIGTTSLRVLETVFDSQQQKYKVGVGQTDIFLSPGDKIESVQGLITNFHLPKSSLLLLVSAFANSRLVMNAYRYALQNKFRFYSYGDSMFLF

SEQ ID NO: 68223 - protein, 346 aa, unidentified
  source 1..346: note = Leptospira yanagawae
  REGION 1..346: note = tr|A0A4R9IYF0|A0A4R9IYF0_9LEPT S-adenosylmethionine:tRNA ribosyltransferase-isomerase; OS = Leptospira yanagawae OX=293069 GN=queA PE=3 SV=1
MDFLNEFDFHLPEEQIARFPAKNRDESRLVLVDKTTEKFWEAPFFRDIREWVRPGDVFVYNETKVSYRRVYLQVESGRIHESIFLEAEGDASRIWTCILKNRAKLKLGEVLAPVGFPTFSFRYEGKNEELSILVSDKTVTDSDFEIFGTIPIPPYLKRNVTEEDKVRYQTIFAKKSGSVAAPTAGLHFTESLRAELEKTGAEFLPVELQVGYGTFRPLTAEQWQTKTLHKERYEITEGTASRLDGARREGRRVIAIGTTTLRVLETVFDSQQQKYKVGVGQTDIFLSPGDKIESVQGLITNFHLPKSTLLLLVSAFANSRLVMDVYRYALQNKFRFYSYGDSMFLF

SEQ ID NO: 68224 - protein, 352 aa, unidentified
  source 1..352: note = Leptospira yasudae
  REGION 1..352: note = tr|A0A418A5R1|A0A418A5R1_9LEPT S-adenosylmethionine:tRNA ribosyltransferase-isomerase; OS = Leptospira yasudae OX=2202201 GN=queA PE=3 SV=1
MLFEDLKEFEFDLPEERIARYPAAHRDESKLMILDVDSGEIKSEPSFKNIVSYLREGDVLVANHTKVSKRRVYLKTPLRVHEAMFLEEKEQLWKCKIRNSKKLKLGEELKDNRTQKLGFTVAKKEEEFVFLKPQRSLTEEDFQTIGEIPIPPYLKRDADAQDEIRYQTLFAKTPGSVAAPTAGLHFSEELFETLRQKKIQLCTLELKVGYGTFQPLTEENFQNQKLHREKFFLEETSVELLNAAKQEGRRILSIGTTTLRALESAYEPNTKTFRAGPGATELFIRPDDNLQSCEGLITNFHLPGSSLLLLVSAFAGKKLILDAYQKAIQEKFRFYSYGDAMLILGRKKSVSK

SEQ ID NO: 68225 - protein, 151 aa, unidentified
  source 1..151: note = Leptospiraceae bacterium
  REGION 1..151: note = tr|A0A357IYS6|A0A357IYS6_9LEPT S-adenosylmethionine:tRNA ribosyltransferase-isomerase; OS = Leptospiraceae bacterium OX=2026757 GN=DEA96_11635 PE=3; SV = 1
MQRLKERRIRIASVRLAVGLGTFAPLSEENWKRKQLHRERFSMPSATASLLNNPQGRIIAVGTTTLRALESNLREHGRFQPGEFETSAFFHPPDTISSIQGLITNFHLPGSSLLMLVAAFSGTDRILPAYKKAIAERYRFYSYGDAMLVFA

SEQ ID NO: 68226 - protein, 268 aa, unidentified
  source 1..268: note = Leptospiraceae bacterium
  REGION 1..268: note = tr|A0A357IY33|A0A357IY33_9LEPT S-adenosylmethionine:tRNA ribosyltransferase-isomerase (Fragment) OS=Leptospiraceae bacterium OX=2026757; GN = DEA96_09955 PE=3 SV=1
MSAIGKTNLTHFMKQLSEIQQEYGFELPDELIARYPAQFRDQSRLMLLPAGSRPGEAEHRSFYELDQLLEPEDILVWNDTLVEPRRLILRRQSGARVEALFLEPAPEIEAASAQPEAPLNHESESIYWSCLIRNASRIKQDEILIEPQSGQGFRFLRMPGNGSESSPGDAFFLCPEPALDIHAFFQAYGQMPIPPYLGRTEDDSDRNRYQTVFAGSQELSSAAAPTAGLHFTADLIQRLKERRIRIASVRLAVGLGTFAPLSEENWKR

SEQ ID NO: 68227 - protein, 385 aa, Leptospirillum ferriphilum
  REGION 1..385: note = tr|A0A059XS32|A0A059XS32_9BACT S-adenosylmethionine:tRNA ribosyltransferase-isomerase; OS = Leptospirillum ferriphilum YSK OX=1441628 GN=queA PE=3; SV = 1
MTSDENMHHTRLDPGTFYQPETLWTTNEEQLSVSRGNPDEYDYDLPEDRIRLFPPKNRGESRLLVVGRESGGPYFGTMEEFSRFLFPGDLLVLNDSRVLPARVFIRAPTGRKIELLFLNPQDPSPVRFLGKGIGSSSTLSLPGGGRVMDIRYLPEEGCFQGVYEGEETLLSWLESHGEMPLPPYIRKARDHHPSDRERYQTVFSRHAGSVAAPTAGLHFTEALLEHLKDKGVETATVTLHVGIGTFRPLGPGGVGQHVMHAERFLVPDETVQKIEDARRRGSRVFAVGTTVMRTLETWGQHPVRDAVPAWTRLFIRPGFPFRVVDGLLTNFHQPRSTLVVLVDSFLGGNGRWRSLYRQALEEGFMFLSYGDAMLIVPEDRRGGDA

SEQ ID NO: 68228 - protein, 336 aa, Leptospirillum ferriphilum
  REGION 1..336: note = tr|A0A1V3SW92|A0A1V3SW92_9BACT S-adenosylmethionine:tRNA ribosyltransferase-isomerase; OS = Leptospirillum ferriphilum OX=178606 GN=BOX24_07320; PE = 3 SV=1
MRLFPPKNRGESRLLVVGRESGGPYFGTMEEFSRFLFPGDLLVLNDSRVLPARVFIRAPTGRKIELLFLNPQDPSPVRFLGKGIGSSSTLSLPGGGRVMDIRYLPEEGCFQGVYEGEETLLSWLESHGEMPLPPYIRKARDHHPSDRERYQTVFSRHAGSVAAPTAGLHFTEALLEHLKDKGVETATVTLHVGIGTFRPLGPGGVGQHVMHAERFLVPDETVQKIEDARRRGSRVFAVGTTVMRTLETWGQHPVRDAVPAWTRLFIRPGFPFRVVDGLLTNFHQPRSTLVVLVDSFLGGNGRWRSLYRQALEEGFMFLSYGDAMLIVPEDRRGGDA

SEQ ID NO: 68229 - protein, 356 aa, unidentified
  source 1..356: note = Leptospirillum ferrodiazotrophum
  REGION 1..356: note = tr|C6HYF8|C6HYF8_9BACT S-adenosylmethionine:tRNA ribosyltransferase-isomerase OS=Leptospirillum ferrodiazotrophum OX=412449 GN=queA PE=3 SV=1
MDRSSPEARDYDYELPEERIRLVPPPRRDLSRLAVVPRRGDGGRPPFLASSVAHLPSLLAPGDLLVANDSRVVPARTRARTSRGRAIDLLVLGPFDSGTAGTVRFLGKGLKGEKRLALFGGRGVLDGICYDEALECFSGEYRGEEALVALLEAQGEMPLPPYIARRRSADGSDRERYQTVYARVPGSVAAPTAGLHLGEELLDRLREKGVERASVTLHVGVGTFRGLSEGPVEDHRMHEEWYVVPRETAEAIARTRARGGRVVAVGTTSLRALESAFALGEIPPEGRAGWTRLYVRPGYRFLAADALFTNFHTPRSTLLVLVDAFLGGDGRWREIYRRALEEGFFFLSYGDALLIL

SEQ ID NO: 68230 - protein, 366 aa, Leptospirillum ferrooxidans
  REGION 1..366: note = tr|I0IKG3|I0IKG3_LEPFC S-adenosylmethionine:tRNA ribosyltransferase-isomerase OS=Leptospirillum ferrooxidans (strain C2-3) OX=1162668 GN=queA PE=3 SV=1
MDNPFALTRDSPGKKEEMAVSSYDYELPQSAIRLVPPENRDGSKMMVVPRSFRSREELSLDNILSLHHYLQPGDLLVLNDTRVIPARVYGKTSSGRAIEVLFLSFGSSLDSNVLFLSKSPGKSATEIHFPGGITLSGIRRVEEKDCYAGSLPDGLDVIAWLERAGEMPLPPYIQKHRKADQDDRERYQTVFSRNPGSVAAPTAGLHLSGIILEALEKKGVEKAFVTLHVGMGTFRPLSTPFLKDHQMHEEWYCVPEPTLALLEKTKKRGGRIIGVGTTVVRTLESMAQLGKTSGQTDLFIRPGYSFSYIDGLLTNFHQPRSTLLVLLDAFLGGSGSWKILYGEALSRGLSFLSYGDACLILPDGKG

SEQ ID NO: 68231 - protein, 336 aa, Leptospirillum sp.
  REGION 1..336: note = tr|A0A0K0WQI0|A0A0K0WQI0_9BACT S-adenosylmethionine:tRNA ribosyltransferase-isomerase; OS = Leptospirillum sp. Group II 'CF-1' OX=1660083; GN = ABH19_00245 PE=3 SV=1
MRLFPPKNRGESRLLVVGRDSGGPYFGTMEEFSRFLFPGDLLVLNDSRVLPARVFIRAPTGRKIELLFLNPQDPSPVRFLGKGIGSSSTLSLPGGGRVRDIRYLPEEGCFQGVYEGEETLLSWLESHGEMPLPPYIRKARDHHPSDRERYQTVFSRHAGSVAAPTAGLHFTEALLEHLKDKGVETATVTLHVGIGTFRPLGPGGVGQHVMHAERFLVPDETVQKIEDARRRGSRVFAVGTTVMRTLETWGQHPVRDAVPAWTRLFIRPGFPFRVVDGLLTNFHQPRSTLVVLVDSFLGGNGRWRSLYRQALEEGFMFLSYGDAMLIVPEDRRGGDA

SEQ ID NO: 68232 - protein, 182 aa, Leptospirillum sp.
  REGION 1..182: note = tr|T0XM73|T0XM73_9BACT S-adenosylmethionine:tRNA ribosyltransferase-isomerase (Fragment) OS=Leptospirillum sp. Group IV 'UBA BS' OX=1260983; GN = D084_Lepto4C00668G0002PE=3 SV=1
MTGSREASSYDYELPPERIRLVPPKRREESRLAVVPRRPEEDRPLLFRSVSDLPEILRPGDRLVVNDSRVVPARTRGRTSRGREVEILFLGPFGGGSPHKVRFLAKGLGQETRLALFSGRGELRMEGYDENQGCFSGEYRGEKPLDGELEAEGEMPLPPYIAKRRRAEASDRERYQTVYARV

SEQ ID NO: 68233 - protein, 356 aa, Leptothrix cholodnii
  REGION 1..356: note = tr|B1XWH6|B1XWH6_LEPCP S-adenosylmethionine:tRNA ribosyltransferase-isomerase OS=Leptothrix cholodnii (strain ATCC 51168 / LMG 8142 / SP-6) OX=395495 GN=queA; PE = 3 SV =1
MNTAYTVADFDFDLPPELIAQHPAPERSGSRLLDASAPAQPVDRIFHELPGLLNPGDLLVFNDTQVIRARLFGAKDSGGAVEALVERVLPAAAGGGHEVWAHLRASKSPRAGQSVLFRNDQGEQFSADVLGRCGPEDSLFHLRFPSDAFALLERYGHVPLPPYITHADEADDVRRYQTVFARHPGAVAAPTAALHFDEALLAALEARGVRRASVTLHVGAGTFQPVRVDRLDQHRMHSEWFEVPQATVDAIAATRAAGGKVVAVGTTTLRALESAARGGVLRAGAQETDIFITPGFAFQVVDRLVTNFHLPKSTLLMLVSAFAGHATMHALYRHAISRGYRFFSYGDAMLLTRSSA

SEQ ID NO: 68234 - protein, 366 aa, Leptothrix mobilis
  REGION 1..366: note = tr|A0A4Q7LTQ1|A0A4Q7LTQ1_9BURK S-adenosylmethionine:tRNA ribosyltransferase-isomerase; OS = Leptothrix mobilis OX=47994 GN=queA PE=3 SV=1
MTDPTLPPSSDLTVSDFDFALPPELIAQHPAAERSASRLLDGRGATPVDRIFRELPGLLSAGDLLVFNDTQVIRARLHGAKDSGGSVEALVERVLPVGPSGTHEVWAHLRASKSPKPGQGVVFRSDAGETFRAEVLGRCGPENGLFHLRFPSDVFALLERCGHIPLPPYITHADDAEDARRYQTVFARTPGAVAAPTAALHFDEAVLAALAERGIERASVTLHVGAGTFQPVRVERIAEHRMHSEWFEVPAATVAAIEATRARGGRVVAVGTTTLRALESAARDSAAQGLPLQAGARETDIFITPGFPFRVVDRLVTNFHLPRSTLLMLVSAFAGHARMHALYDHAIAQRYRFFSYGDAMLLDRQG

SEQ ID NO: 68235 - protein, 340 aa, Leptotrichia buccalis
  REGION 1..340: note = tr|C7NC60|C7NC60_LEPBD S-adenosylmethionine:tRNA ribosyltransferase-isomerase OS=Leptotrichia buccalis (strain ATCC 14201 / DSM 1135 / JCM 12969 / NCTC 10249 / C-101 3-b) OX=523794 GN=queA PE=3 SV=1
MNISDFDFELPEELIAQHAVEPRDHSKLLVLNKDKKTLEHKKFYNIIDYLKKDDVLVINRTKVIPARLFGHKENGVVLECFLLKRYDLYTWEVLLKPAKKLKIGQKLIFSDGILKAELLEIKEDGNRIIKFNFEGRFEEILDKLGEMPLPPYIMEKLEDKNRYQTVYAKEGESVAAPTAGLHFTNELLEKIREKGITIAEVFLDVGLGTFRPVQVENVLDHKMHSEKYRIPEETAKIINEAKKKGNRVIAVGTTSVRTLESSVDENGKLKASEGNTNIFIYGDYKFKIIDAIITNFHLPKSTLIMLISAFGGKEFIFEAYKKAVEEKYRFYSFGDSMFIY

SEQ ID NO: 68236 - protein, 340 aa, Leptotrichia goodfellowii
  REGION 1..340: note = tr|D0GKN7|D0GKN7_9FUSO S-adenosylmethionine:tRNA ribosyltransferase-isomerase OS=Leptotrichia goodfellowii F0264 OX=596323 GN=queA PE=3 SV=1
MNIAEFDFDLPEELIAQHAVNPRDHSKLLVLNKEKKEIEHKRFYNIIDYLKKDDVLVINRTKVIPARLYGRKDTGTVLECFLLKRYDLYTWEVLLKPAKRLKIGQKIVFSENMLEAELIEIKSDGNRVLKFNYKGNFEEILDKLGEMPLPPYITEKLEDKDRYQTVYAKEGESVAAPTAGLHFTEELLEKIKEKGIIIAEVFLDVGLGTFRPVQTENIHEHIMHSEKYWVPKETAEIVNNAKRKGNRVIAVGTTSVRTLESSVNEKGELIENESETSIFIYGDYKFKIVDAIITNFHLPKSTLIMLISAFGGKEFVFSAYEEAVREKYRFYSFGDSMFIY

SEQ ID NO: 68237 - protein, 340 aa, Leptotrichia goodfellowii; identical to SEQ ID NO: 68236
  REGION 1..340: note = tr|A0A510JBV8|A0A510JBV8_9FUSO S-adenosylmethionine:tRNA ribosyltransferase-isomerase; OS = Leptotrichia goodfellowii OX=157692 GN=queA PE=3 SV=1

SEQ ID NO: 68238 - protein, 340 aa, Leptotrichia hofstadii
  REGION 1..340: note = tr|A0A510JF45|A0A510JF45_9FUSO S-adenosylmethionine:tRNA ribosyltransferase-isomerase; OS = Leptotrichia hofstadii OX=157688 GN=queA PE=3 SV=1
MKISDFDFELPEELIAQHAVNPRDHSKLLVLNKKEKTLEHKKFYNIIDYLKKDDVLVINRTKVIPARLFGHKENGVVLECFLLKRYDLYTWEVLLKPAKKLKIGQKLIFLEGVLEAELMEIKEDGNRIIKFNFEGRFEEILDKLGEMPLPPYIVEKLEDKNRYQTVYAKEGESVAAPTAGLHFTNELLGKIREKGVIITEVFLDVGLGTFRPVQVENVLDHKMHSEKYRIPEETVKIINKAKEKGNRVIAVGTTSVRTLESSVDDNGKLIASEGDTNIFIYGDYNFKITDAIITNFHLPKSTLIMLISAFGGKELIFEAYKKAIEEKYRFYSFGDSMFIY

SEQ ID NO: 68239 - protein, 340 aa, Leptotrichia hofstadii
  REGION 1..340: note = tr|C9MYG8|C9MYG8_9FUSO S-adenosylmethionine:tRNA ribosyltransferase-isomerase OS=Leptotrichia hofstadii F0254 OX=634994 GN=queA PE=3 SV=1
MKISDFDFELPEELIAQHAVNPRDHSKLLVLNKKEKTLEHKKFYNIIDYLKKDDVLVINRTKVIPARLFGHKENGVVLECFLLKRYDLYTWEVLLKPAKKLKIGQKLIFLEGVLEAELMEIKEDGNRIIKFNFEGRFEEILDKLGEMPLPPYIVEKLEDKNRYQTVYAKEGESVAAPTAGLHFTNELLGKIREKGVIITEVFLDVGLGTFRPVQVENVLDHKMHSEKYRIPEETVKIINKAKEKGNRVIAVGTTSVRTLESSVDDNGKLIASEGDTNIFIYGDYNFKIVDAIITNFHLPKSTLIMLISAFGGKEFIFEAYKKAIEEKYRFYSFGDSMFIY

SEQ ID NO: 68240 - protein, 340 aa, Leptotrichia hongkongensis
  REGION 1..340: note = tr|A0A510L9C5|A0A510L9C5_9FUSO S-adenosylmethionine:tRNA ribosyltransferase-isomerase; OS = Leptotrichia hongkongensis OX=554406 GN=queA PE=3 SV=1
MKISDFDFELPEELIAQHAVNPRDHSKLLVLNKKEKTLEHKKFYNIIDYLKKDDVLVINRTKVIPARLFGHKENGVVLECFLLKRYDMYTWEVLLKPAKKLKIGQKLIFLEGVLEAELLEIKEDGNRVIKFDFEGRFEEILDKLGEMPLPPYIMEKLEDKNRYQTVYAKEGESVAAPTAGLHFTNELLEKIRKKGVIITEVFLDVGLGTFRPVQVENVLDHKMHSEKYRIPEETAKIINEAKKNGNRVIAVGTTSVRTLESSVDENGELIASEGDTNIFIYGDYKFKIVDAIITNFHLPKSTLIMLISAFGGKEFVFDAYKKAVEEKYRFYSFGDSMFIY

SEQ ID NO: 68241 - protein, 331 aa, Leptotrichia shahii
  REGION 1..331: note = tr|A0A510JPH1|A0A510JPH1_9FUSO S-adenosylmethionine:tRNA ribosyltransferase-isomerase; OS = Leptotrichia shahii OX=157691 GN=queA PE=3 SV=1
MKISDFDFELPEELIAQHAVNPRDHSRLLVLNKKEKILEYKKFYDIIDYLKKGDVLVINRTKVIPARLLGHKENGVVLECFLLKRYDLYTWEVLLKPAKKLKIGQKIIFLEGILEAELLEIKDDGNRVVKFSFEGRFEEILDRLGEMPLPPYITEKLEDKNRYQTVYAKEGESVAAPTAGLHFTKELLEKIRQKGIIIAEVFLDVGLGTFRPVKVENVLDHKMHSEKYRVPDETAKIVNEAKKNGNRVIAVGTTSVRTLESAAYENGKLMADEGNTSIFIYGNYKFKIVDAIITNFHLPKSTLIMLISAFGGKEFIFEAYKKAIEEKYRFY

SEQ ID NO: 68242 - protein, 340 aa, Leptotrichia sp.
  REGION 1..340: note = tr|A0A3P1W1K3|A0A3P1W1K3_9FUSO S-adenosylmethionine:tRNA ribosyltransferase-isomerase; OS = Leptotrichia sp. OH3620_COT-345 OX=2491048 GN=queA PE=3; SV = 1
MNIAEFDFDLPEELIAQSAVNPRDHSKLLVLNRKKQKIEHKKFYNIIDYLKKDDILVINRTKVIPARLYGKKNTGTVLECFLLKRYDLNTWEVLLKPAKRLKIGQKIIFSDNLLEAELIEIKEDGNRVLKFSYDGNFEEILDKLGEMPLPPYITEKLKDKDRYQTVYAKEGESVAAPTAGLHFTEELLEQIKEKGVTVTEVFLDVGLGTFRPVQTENINEHKMHSEKYRIPEKTAEIINEAKKRGQRIIAVGTTSVRTLESSVDEKGNLVNSEGETDIFIYGDYKFKIIDGIITNFHLPKSTLIMLVSAFGGKDFIFKAYKEAVKEKYRFYSFGDSMFIY

SEQ ID NO: 68243 - protein, 340 aa, Leptotrichia sp.
  REGION 1..340: note = tr|U2R1V9|U2R1V9_9FUSO S-adenosylmethionine:tRNA ribosyltransferase-isomerase OS=Leptotrichia sp. oral taxon 879 str. F0557 OX=1227268 GN=queA PE=3 SV=1
MKISDFDFELPEELIAQHAVNPRDHSKLLVLNKKEKTLEHKKFYNIIDYLKKDDVLVINRTKVIPARLFGHKENGVVLECFLLKRYDLYTWEVLLKPAKKLKIGQKLIFLEGVLEAELLEIKEDGNRIIKFNFEGRFEEILDKLGEMPLPPYIMEKLEDKNRYQTVYAKEGESVAAPTAGLHFTNELLDKIRKKGVIITEVFLDVGLGTFRPVQVENVLDHKMHSEKYRIPEETAKIINEAKKNGNRVIAVGTTSVRTLESSVDENGKLIASKGDTNIFIYGDYEFKIVDAIITNFHLPKSTLIMLISAFGGKEFVFEAYKKAVEEKYRFYSFGDSMFIY

SEQ ID NO: 68244 - protein, 340 aa, Leptotrichia trevisanii
  REGION 1..340: note = tr|A0A510KIY5|A0A510KIY5_9FUSO S-adenosylmethionine:tRNA ribosyltransferase-isomerase; OS = Leptotrichia trevisanii OX=109328 GN=queA PE=3 SV=1
MKISDFDFELPEELIAQHAVNPRDHSKLLVLNKKEKTLEHKKFYNIIDYLKKDDILVINRTKVIPARLFGHKENGVVLECFLLKRYDMYTWEVLLKPAKKLKIGQKLIFMEGVLEAELLEIKEDGNRIIKFSFEGRFEEILDKLGEMPLPPYIMEKLEDKNRYQTVYAKEGESVAAPTAGLHFTNELLEKIREKGVIIAEVFLDVGLGTFRPVQVENVLDHKMHSEKYRIPEETVEIINKAKEKGNRIIAVGTTSVRTLESSVDDNGKLIASEGDTNIFIYGDYNFKIVDAIITNFHLPKSTLIMLISSFGGKEFVFEAYKKAIEEKYRFYSFGDSMFIY

SEQ ID NO: 68245 - protein, 340 aa, Leptotrichia trevisanii
  REGION 1..340: note = tr|A0A510JZ48|A0A510JZ48_9FUSO S-adenosylmethionine:tRNA ribosyltransferase-isomerase; OS = Leptotrichia trevisanii OX=109328 GN=queA PE=3 SV=1
MKISDFDFELPEELIAQHAVNPRDHSKLLVLNKKEKTLEHKKFYNIIDYLKKDDILVINRTKVIPARLFGHKENGVVLECFLLKRYDMYTWEVLLKPAKKLKIGQKLIFLEEVLEAELLEIKEDGNRIIKFSFEGRFEEILDKLGEMPLPPYIMEKLEDKNRYQTVYAKEGESVAAPTAGLHFTNELLEKIREKGVIIAEVFLDVGLGTFRPVQVENVLDHKMHSEKYRIPEETAKIINEAKEKGNRVIAVGTTSVRTLESSVDENGKLIASEGDTNIFIYGDYNFKIVDAIITNFHLPKSTLIMLISSFGGKEFVFEAYKKAIEEKYRFYSFGDSMFIY

SEQ ID NO: 68246 - protein, 340 aa, Leptotrichia wadei
  REGION 1..340: note = tr|A0A134AQ68|A0A134AQ68_9FUSO S-adenosylmethionine:tRNA ribosyltransferase-isomerase; OS = Leptotrichia wadei OX=157687 GN=queA PE=3 SV=1
MKISDFDFELPEELIAQHAVNPRDHSRLLVLNKTEKTLEHKKFYNIIDYLKKDDVLVINRTKVIPARLFGHKENGVVLECFLLKRYDLYTWEVLLKPAKKLKIGQKIIFLEGVLEAELLEIKEDGNRVVKFNFEGRFEEILDKLGEMPLPPYIMEKLEDKNRYQTVYAKEGESVAAPTAGLHFTNQLLEKIRKKGVIIAEVFLDVGLGTFRPVQVENILDHKMHSEKYRVPEETAKIVNEAKEKGNRVIAVGTTSVRTLESAVDESGKLMAVEGNTSIFIYGDYKFKIADAIITNFHLPKSTLIMLISAFGGKEFIFEAYKKAIEEKYRFYSFGDSMFIY

SEQ ID NO: 68247 - protein, 340 aa, Leptotrichia wadei
  REGION 1..340: note = tr|U2RBE2|U2RBE2_LEPWF S-adenosylmethionine:tRNA ribosyltransferase-isomerase OS=Leptotrichia wadei (strain F0279) OX=888055 GN=queA PE=3 SV=1
MKISDFDFELPEELIAQHAVNPRDHSRLLVLNKTEKTLEHKKFYNIIDYLKKDDVLVINRTKVIPARLFGHKENGVVLECFLLKRYDLYTWEVLLKPAKKLKIGQKIIFLEGVLEAELLEIKEDGNRVVKFNFEGRFEEILDKLGEMPLPPYIMEKLEDKNRYQTVYAKEGESVAAPTAGLHFTNELLEKIREKGVIIAEVFLDVGLGTFRPVQVENILDHKMHSEKYRVPEETAKIVNEAKEKGNRVIAVGTTSVRTLESAVDESGKLMADEGNTSIFIYGNYKFKIADAIITNFHLPKSTLIMLISAFGGKEFIFEAYKKAIEEKYRFYSFGDSMFIY

SEQ ID NO: 68248 - protein, 355 aa, Leuconostoc carnosum
  REGION 1..355: note = tr|K0D9C8|K0D9C8_LEUCJ S-adenosylmethionine:tRNA ribosyltransferase-isomerase OS=Leuconostoc carnosum (strain JB16) OX=1229758 GN=queA PE=3 SV=1
MTEEQHYQLSDFDYDLPESLIAQTPLKQRDSSRLLVLDADTGSYEDKHFYDILDYVAPGDAIVMNNSRVLPARLHGARPETGGHAEVLLLRQDHGDVWETLVKPAKKSPVGSTIVFGDDIDNPIMTATIVGELEHGGRYIEFHYEGIFMELLEQLGEMPLPPYIKEKLADQERYQTVYSKVEGSAAAPTAGLHWTPELLDKIRQKGVKTVELTLHVGLGTFRPVEEENIEDHKMHSEFYQLSQEAADTLNEVHEYGGRIIATGTTSIRTLETIGSKFDGHLQADSGWTDIFIKPGYHWTMVDAFITNFHLPKSTLVMLVAAFTGRENILNAYQHAVNDKYRFFSFGDAMFIKRER

SEQ ID NO: 68249 - protein, 355 aa, Leuconostoc carnosum; identical to SEQ ID NO: 68248
  REGION 1..355: note = tr|A0A2U3MT15|A0A2U3MT15_LEUCA S-adenosylmethionine:tRNA ribosyltransferase-isomerase; OS = Leuconostoc carnosum OX=1252 GN=queA PE=3 SV=1

SEQ ID NO: 68250 - protein, 355 aa, Leuconostoc citreum
  REGION 1..355: note = tr|A0A5A5TXP7|A0A5A5TXP7_LEUCI S-adenosylmethionine:tRNA ribosyltransferase-isomerase; OS = Leuconostoc citreum OX=33964 GN=queA PE=3 SV=1
MTDEKHYQLADFDYDLPEALIAQTPLKQRDASRLLVLDADTGAYQDKHFYDILDYVNPGDAIVMNNSRVLPARLHGVRPETGGHAEVLLLRQDHGDVWETLVRPAKKSPVGSTIVFGDDVTQPIMTATVVGELEHGGRYVEFHYDGIFMALLDKLGEMPLPPYIKEKLADQERYQTVYSKVDGSAAAPTAGLHWTPELLNQVRAKGVKTVELTLHVGLGTFRPVEEENIEDHKMHSEFYQLSQDAADTLNQVRENGGRIIATGTTSIRTLETIGSKFEGKLQADSGWTDIFIKPGYKWTTVDAFITNFHLPKSTLVMLVAAFTGRDNILNAYQHAVAEQYRFFSFGDAMFIKRDK

SEQ ID NO: 68251 - protein, 355 aa, Leuconostoc citreum
  REGION 1..355: note = tr|B1MZV2|B1MZV2_LEUCK S-adenosylmethionine:tRNA ribosyltransferase-isomerase OS=Leuconostoc citreum (strain KM20) OX=349519 GN=queA PE=3 SV=1
MTDEKHYQLADFDYDLPEALIAQTPLKQRDTSRLLVLDADTGAYQDKHFYDILDYVNPGDAIVMNNSRVLPARLHGVRPETGGHAEVLLLRQDHGDVWETLVRPAKKSPVGSTIVFGDDVTQPIMTATVVGELEHGGRYVEFHYDGIFMALLDKLGEMPLPPYIKEKLADQERYQTVYSKVDGSAAAPTAGLHWTPELLNQVRAKGVKTVELTLHVGLGTFRPVEEENIEDHKMHSEFYQLSQDAADTLNQVRENGGRIIATGTTSIRTLETIGSKFEGKLQADSGWTDIFIKPGYKWTTVDAFITNFHLPKSTLVMLVAAFTGRDNILNAYQHAVAEQYRFFSFGDAMFIKRDK

SEQ ID NO: 68252 - protein, 352 aa, Leuconostoc fallax
  REGION 1..352: note = tr|A0A4R5N8E1|A0A4R5N8E1_9LACT S-adenosylmethionine:tRNA ribosyltransferase-isomerase; OS = Leuconostoc fallax OX=1251 GN=queA PE=3 SV=1
MTQEHYTLSDFDYDLPEALIAQTPLKQRDASRLLALNAISGEYEDRHFYDILDYVKAGDAIVMNNSRVLPARLHGARPETGGHAEVLLLRQDHGDVWEVLMKPAKKSPIGSEVVFGDDMQHPIMTATVLEDLEHGGKMIEFHYDGIFMELLDKLGEMPLPPYIKEKLADQERYQTVYSKVDGSAAAPTAGLHWTPELLDKVRAKGVKTVELTLHVGLGTFRPVEEENIEDHKMHSEFYQLTADAAQDLNEVRQNGGRIIATGTTSIRTLETIGSKFSGELKADSGWTDIFIKPGYQWTVVDAFITNFHLPKSTLVMLVAAFTGREHIMNAYHHAVAQQYRFFSFGDAMFIYK

SEQ ID NO: 68253 - protein, 353 aa, Leuconostoc gelidum
  REGION 1..353: note = tr|J9YJA2|J9YJA2_LEUGJ S-adenosylmethionine:tRNA ribosyltransferase-isomerase OS=Leuconostoc gelidum (strain JB7) OX=1229756 GN=queA PE=3 SV=1
MTEEQHYQLADFDYDLPETLIAQTPLKQRDSSRLLVLDADTGLYEDKHFYDILDYVNPGDAIVMNNSRVLPARLHGVRPETGGHAEVLLLRQDHGDVWETLVKPAKKSPVGSTIFFGNDIDNPVMTATVVGELEHGGRYIEFHYEGIFMELLEKLGEMPLPPYIKEKLADQERYQTVYSKVDGSAAAPTAGLHWTPELLDKVRAKGVQTIELTLHVGLGTFRPVEEENIEDHKMHSEFYQLSSEAADALNKVHATGGRIIATGTTSIRTLETIGSKFNGQLQADSGWTDIFIKPGYQWTTVDAFITNFHLPKSTLVMLVAAFTGRDNILNAYQHAVNDKYRFFSFGDAMFIKR

SEQ ID NO: 68254 - protein, 353 aa, Leuconostoc gelidum
  REGION 1..353: note = tr|A0A175CJX4|A0A175CJX4_LEUGE S-adenosylmethionine:tRNA ribosyltransferase-isomerase; OS = Leuconostoc gelidum subsp. gasicomitatum OX=115778; GN = queA PE=3 SV=1
MTEEQHYQLADFDYDLPETLIAQTPLKQRDSSRLLVLDADTGLYEDKHFYDILDYVNPGDAIVMNNSRVLPARLHGVRPETWGHAEVLLLRQDHGDVWETLVKPAKKSPVGSTIFFGNDIDNPVMTATVVGELEHGGRYIEFHYEGIFMELLEKLGEMPLPPYIKEKLVDQERYQTVYSKVDGSAAAPTAGLHWTPELLDKVRAKGVQTIELTLHVGLGTFRPVEEENIEDHKMHSEFYQLSSEAADALNKVHATGGRIIATGTTSIRTLETIGSKFNGQLQVDSGWTDIFIKPGYQWTTVDAFITNFHLPKSTLVMLVAAFTGRDNILNAYQHAVNDKYRFFSFGDAMFIKR

SEQ ID NO: 68255 - protein, 353 aa, Leuconostoc kimchii
  REGION 1..353: note = tr|D5T5A2|D5T5A2_LEUKI S-adenosylmethionine:tRNA ribosyltransferase-isomerase OS=Leuconostoc kimchii (strain IMSNU 11154 / KCTC 2386 / IH25) OX=762051 GN=queA; PE = 3 S V=1
MTEETRYQLTDFDYNLPEELIAQTPLKQRDSSRLLVLDADSGDYEDKHFYDILSYVNPGDAIVMNNSRVLPARLHGARPETGGHAEVLLLRQDHGDVWETLVKPAKKSPIGSTIVFGDDMNHPIMTATVVGELEHGGRYIEFHYDGIFMELLDKLGEMPLPPYIKEKLADQERYQTVYSKVDGSAAAPTAGLHWTPELLDKVRAKGVQTVELTLHVGLGTFRPVEEENIEDHKMHSEFYQLSQEAADALNQVHANGGRIIATGTTSIRTLETIGSKFNGHLQADSGWTDIFIKPGYHWTTVDAFITNFHLPKSTLVMLVAAFTGRDNILNAYQHAVDDKYRFFSFGDAMFIKR

SEQ ID NO: 68256 - protein, 353 aa, Leuconostoc lactis
  REGION 1..353: note = tr|A0A5B8T6S4|A0A5B8T6S4_LEULA S-adenosylmethionine:tRNA ribosyltransferase-isomerase; OS = Leuconostoc lactis OX=1246 GN=queA PE=3 SV=1
MTAQPYQLSDFDYDLPEALIAQTPLKQRDASRLLVLDADTGAYEDKHFYDILDYVEPGDAIVMNNSRVLPARLHGARPETGGHAEVLLLRQDHGDVWETLVKPAKKSPVGSTIVFGDDINNPIMTATIVGELEHGGRYIEFHYDGIFMELLEKLGEMPLPPYIKEKLDDQERYQTVYSKVDGSAAAPTAGLHWTPELLDKVRAKGVKTVELTLHVGLGTFRPVEEENIEDHKMHSEFYQLTQEAADTLNDVHANGGRIIATGTTSIRTLETIGSKFDGKLQADSGWTDIFIKPGYQWTTVDAFITNFHLPKSTLVMLVAAFTGRDNILKAYEHAVADQYRFFSFGDAMFVKRG

SEQ ID NO: 68257 - protein, 353 aa, Leuconostoc lactis
  REGION 1..353: note = tr|A0A1B2A229|A0A1B2A229_LEULA S-adenosylmethionine:tRNA ribosyltransferase-isomerase; OS = Leuconostoc lactis OX=1246 GN=queA PE=3 SV=1
MTAQPYQLSDFDYDLPEALIAQTPLKQRDASRLLVLDADTGAYDDKHFYDILDYVEPGDAIVMNNSRVLPARLHGARPETGGHAEVLLLRQDHGDVWETLVKPAKKSPVGSTIVFGDDINNPIMTATVVGELEHGGRYIEFHYDGIFMELLEKLGEMPLPPYIKEKLDDQERYQTVYSKVDGSAAAPTAGLHWTPELLDKVRAKGVKTVELTLHVGLGTFRPVEEENIEDHKMHSEFYQLTQEAADTLNDVHANGGRIIATGTTSIRTLETIGSKFDGHLQADSGWTDIFIKPGYQWTTVDAFITNFHLPKSTLVMLVAAFTGRDNILKAYEHAVADQYRFFSFGDAMFVKRG

SEQ ID NO: 68258 - protein, 377 aa, Leuconostoc mesenteroides
  REGION 1..377: note = tr|Q03YJ4|Q03YJ4_LEUMM S-adenosylmethionine:tRNA ribosyltransferase-isomerase OS=Leuconostoc mesenteroides subsp. mesenteroides (strain ATCC 8293 / NCDO 523) OX=2031 20 GN=queA PE=3 SV=1
MAFFFANKYVTMEIRLFLKGFDIIMAEEKKYTLSDFDYDLPEALIAQTPLKQRDASRLLALNAKTGGYEDKHFYDILDYLNPGDAIVMNNSRVLPARLHGARPETGGHAEVLLLRQDHGDVWETLVKPAKKSPVGSTIVFGDDIENPIMTATVVGELEHGGRYIEFHYDGIFMELLNQLGEMPLPPYIKEKLDDQERYQTVYSKVDGSAAAPTAGLHWTPELLDRVRAKGVKTVELTLHVGLGTFRPVDEENIEDHKMHSEFYQLSQEAADELNSVRKHGGRIIATGTTSIRTLETIGTKFNGDLTADSGWTDIFIKPGYNWTVVDAFITNFHLPKSTLVMLVAAFTGRDNILNAYKHAVDDQYRFFSFGDAMFIHK

SEQ ID NO: 68259 - protein, 353 aa, Leuconostoc mesenteroides
  REGION 1..353: note = tr|A0A1X0VAD9|A0A1X0VAD9_LEUME S-adenosylmethionine:tRNA ribosyltransferase-isomerase; OS = Leuconostoc mesenteroides subsp. mesenteroides OX=33967; GN = queA PE=3 SV=1
MAEEKKYTLSDFDYDLPEALIAQTPLKQRDASRLLALNAKTGGYEDKHFYDILDYLNPGDAIVMNNSRVLPARLHGARPETGGHAEVLLLRQDHGDVWETLVKPAKKSPVGSTIVFGDDIENPIMTATVVGELEHGGRYIEFHYDGIFMELLDQLGEMPLPPYIKEKLDDQERYQTVYSKVDGSAAAPTAGLHWTPELLDRVRAKGVKTVELTLHVGLGTFRPVDEENIEDHKMHSEFYQLSQEAADELNSVRKHGGRIIATGTTSIRTLETIGTKFNGDLTADSGWTDIFIKPGYNWTVVDAFITNFHLPKSTLVMLVAAFTGRDNILNAYKHAVDDQYRFFSFGDAMFIHK

SEQ ID NO: 68260 - protein, 353 aa, Leuconostoc pseudomesenteroides
  REGION 1..353: note = tr|A0A062XME1|A0A062XME1_LEUPS S-adenosylmethionine:tRNA ribosyltransferase-isomerase; OS = Leuconostoc pseudomesenteroides PS12 OX=1339247 GN=queA; PE = 3 SV=1
MTTEKHYTLSDFDYDLPEELIAQTPLKQRDASRLLVLNAETGQYEDKHFYNILDYVNAGDAIVMNNSRVLPARLHGARPETGGHAEVLLLRQDHGDVWETLVKPAKKSPIGSTIVFGDDLDNPIMTATVVGELEHGGRYIEFHYDGIFMELLEQLGEMPLPPYIKEKLADQERYQTVYSKVDGSAAAPTAGLHWTPELLDKVRAKGVKTVELTLHVGLGTFRPVDEENIDDHKMHSEFYQLSQEAADQLNEVRANGGRIIATGTTSIRTLETIGSKFDGELKADSGWTDIFIKPGYHWTVVDAFITNFHLPKSTLVMLVAAFTGRDNILNAYAHAVEDKYRFFSFGDAMFIHK

SEQ ID NO: 68261 - protein, 353 aa, Leuconostoc pseudomesenteroides
  REGION 1..353: note = tr|A0A5B8SYH6|A0A5B8SYH6_LEUPS S-adenosylmethionine:tRNA ribosyltransferase-isomerase; OS = Leuconostoc pseudomesenteroides OX=33968 GN=queA PE=3; SV = 1
MTTEKHYTLSDFDYDLPEELIAQTPLKQRDASRLLVLNAETGQYEDKHFYDILDYVNAGDAIVMNNSRVLPARLHGARPETGGHAEVLLLRQDHGDVWETLVKPAKKSPVGSTIVFGDDLDNPIMTATVVGELEHGGRYVEFHYDGIFMELLEQLGEMPLPPYIKEKLDDQERYQTVYSKVDGSAAAPTAGLHWTPELLDKVRAKGVKTVELTLHVGLGTFRPVDEENIDDHKMHSEFYQLSQEAADQLNEVRANGGRIIATGTTSIRTLETIGSKFDGDLKADSGWTDIFIKPGYHWTVVDAFITNFHLPKSTLVMLVAAFTGRDNILNAYSHAVADKYRFFSFGDAMFIHK

SEQ ID NO: 68262 - protein, 353 aa, unidentified
  source 1..353: note = Leuconostoc suionicum
  REGION 1..353: note = tr|A0A2N9K9Z6|A0A2N9K9Z6_9LACT S-adenosylmethionine:tRNA ribosyltransferase-isomerase; OS = Leuconostoc suionicum OX=1511761 GN=queA PE=3 SV=1
MAEEKKYTLSDFDYDLPEALIAQTPLKQRDASRLLALNAKTGVYEDKHFYDILDYLNPGDAIVMNNSRVLPARLHGARPETGGHAEVLLLRQDHGDVWETLVKPAKKSPVGSTIVFGDDIENPIMTATVVGELEHGGRYIEFHYDGIFMELLDQLGEMPLPPYIKEKLDDQERYQTVYSKVDGSAAAPTAGLHWTPELLDKVRAKGVKTIELTLHVGLGTFRPVDEENIEDHKMHSEFYQLSQEAADELNSVRKHGGRIIATGTTSIRTLETIGTKFNGDLTADSGWTDIFIKPGYNWTVVDAFITNFHLPKSTLVMLVAAFTGRDNILNAYKHAVDDRYRFFSFGDAMFIHK

SEQ ID NO: 68263 - protein, 353 aa, unidentified; identical to SEQ ID NO: 65562
  source 1..353: note = Leuconostocaceae bacterium
  REGION 1..353: note = tr|A0A1G6H959|A0A1G6H959_9LACT S-adenosylmethionine:tRNA ribosyltransferase-isomerase; OS = Leuconostocaceae bacterium R-53105 OX=1855370 GN=queA; PE = 3 SV=1

SEQ ID NO: 68264 - protein, 344 aa, unidentified
  source 1..344: note = Leucothrix pacifica
  REGION 1..344: note = tr|A0A317CLX4|A0A317CLX4_9GAMM S-adenosylmethionine:tRNA ribosyltransferase-isomerase; OS = Leucothrix pacifica OX=1247513 GN=queA PE=3 SV=1
MKLSDFDYELPNELIAQQALSDRAASRLLVVKSEGVCEDKTFRDIVDLIQPEDLLVFNNTKVLPARLFGQKSTGGQIEVLVERLLDEHSLLAHVRSSKSPKAGARLTLEGGFEAEVMGRQGALFELRFESDDHKTAIELLEAHGHMPLPPYIERSDTEDDRERYQTVFAERPGAVAAPTAGLHFNEELLNALKAKGVATAEVTLHVGAGTFQPVRVEDLSEHVMHSEWIDVPQSVCDAVAACRARGGKVVAVGTTTVRSLESAAMTGELKPFQGDTDIFITPGYEFQVIDRLITNFHLPKSTLLMLVSAFSGYETMMQAYKHAVEQRYRFFSYGDAMYLSRLEE

SEQ ID NO: 68265 - protein, 344 aa, Leucothrix sp.
  REGION 1..344: note = tr|A0A317C8J0|A0A317C8J0_9GAMM S-adenosylmethionine:tRNA ribosyltransferase-isomerase; OS = Leucothrix sp. IMCC9719 OX=1481894 GN=queA PE=3 SV=1
MKLSDFDYELPPELIAQQALSDRAASRLLVVADDGECKDQTFRDIVDLIEPNDLLVFNNTKVLPARLFGEKATGGKLEVLVERLLDDNNLLAHVRCSKSPKPGAFIQLEGAFDAEVVRRHDTLFELRFISGDERNAIDLLEQYGHMPLPPYIERDDTQDDRTRYQTVFAEKPGAVAAPTAGLHFNEALFKAILAKGVETAEVTLHVGAGTFQPVRVEELSEHVMHSEWIDVPQSVCDAVADCRARGGRVIAVGTTTVRSLETAAQSGELKPFQGDTNIFITPGYQYQVVDRLITNFHLPKSTLLMLVSAFSGYDTMKKAYAHAVEQKYRFFSYGDAMFLKRKSD

SEQ ID NO: 68266 - protein, 339 aa, Levilinea saccharolytica
  REGION 1..339: note = tr|A0A0M9U315|A0A0M9U315_9CHLR S-adenosylmethionine:tRNA ribosyltransferase-isomerase; OS = Levilinea saccharolytica OX=229921 GN=queA PE=3 SV=1
MRTDDFDYFLPPERIAQTPVEPRHASRLLVVNRATDQLEHRHFWEVGDYLRPGDLLVVNHTRVLPARIFARKPTGGKVEILLLRQEEDQVWEALVGGKRVTAGLSLQLEDGASVKVEAVLDGSRRRLRFEGPVQAYLERHGQMPLPPYIHTPLSNPERYQTVYAAQPGSAAAPTAGLHFTPELMDALRAKGVNFAAVTLHVGLDTFAPVTEDDPQEHVIHTEWCQLSAETAAQIEAARQAGGRVIAVGTTSVRTLESAARAAGPGQSVAAYSGPTDLFILPGYKFRAVDAMITNFHLPRSTLLMLVSAFAGRERMLAAYAEAVRLEYRFFSFGDAMLIV

SEQ ID NO: 68267 - protein, 354 aa, Lewinella agarilytica
  REGION 1..354: note = tr|A0A1H9NXE6|A0A1H9NXE6_9BACT S-adenosylmethionine:tRNA ribosyltransferase-isomerase; OS = Lewinella agarilytica OX=478744 GN=queA PE=3 SV=1
MRTKLSQFKFELNEKLIARTPSKRRDDSRLMVVNRATGEIEHKMFSDLLDFYDEGDSLVFNNTKVFPARLYGLKEKTQARIEVFLLRELNAQARLWDVLVDPARKIRVGNKLYFNDKRGVTKLVAEVVDNTTSRGRTIRFLYDGPNDQFLNELHSLGNTPLPKLLEREADSRDAERYQTVFASEIGAVAAPTAGLHFSRETLMRMELKGIKKAEITLHLGLGTFRDIEVEDLSKHKMDAEYFRVEQPAVDIVNATKREGGLICAVGTTSVRACENSVSAERLLATNEGWTNKFIFPPYDFHIPDHLLTNFHLPKSSLFITTCAFGGIDLILEAYKIAQKEKYRFFAYGDAMLII

SEQ ID NO: 68268 - protein, 410 aa, Lewinella agarilytica
  REGION 1..410: note = tr|A0A1H9NVM4|A0A1H9NVM4_9BACT S-adenosylmethionine:tRNA ribosyltransferase-isomerase; OS = Lewinella agarilytica OX=478744 GN=SAMN05444359_1406; PE = 3 SV=1
MPRSARDLSIADFTYDLPDERIARHPVARREEARQLVYRDGKITEGIFRDLPERLPAGTLLIGNRTRVIHARLHFPIGEGKRPVEIFCLDPLQPVEYAMSLGAQTQVQWKCLIGGNRRWKSGVADLEVEVNGQQITLTAERGKQRGNSFDVYFSWTPEGELTFGEVLAAAGSIPLPPYLGRQTEAADQDRYQTVFAKTEGSVAAPTAGLHFTPETLAALQKRGIDWEEVTLHVGAGTFKPVSSPTLGGHEMHREYFEINLPLVDRICQQLAAGKPIVCVGTTSLRCVESLFYVANGADQPDGFNTHIGQWAAEEADFPEKTALARLECLRDLMVLSGNHELNGYTSILLSPASDIRIADGLITNFHQPNSTLLLLVAAFVGDDWKRIYDYALENDFRFLSYGDSSLLWKR

SEQ ID NO: 68269 - protein, 354 aa, Lewinella marina
  REGION 1..354: note = tr|A0A2G0CD29|A0A2G0CD29_9BACT S-adenosylmethionine:tRNA ribosyltransferase-isomerase; OS = Lewinella marina OX=438751 GN=queA PE=3 SV=1
MRTKLSQFKFELNDKLIARTPSKRRDDSRLMVVNRATGEIEHKQFSDLLEYYSEGDTLVFNNTKVFPARLYGLKEKTQARIEVFLLRELNSQARLWDVLVDPARKIRVGNKLYFNDKRGNNRLVAEVVDNTTSRGRTIRFLYDGPNDEFTKELHGLGNTPLPKLLEREADSRDAERYQTVFASEVGAVAAPAAGLHFSRETLMRMELAGVKKAEVTLHLGLGTFRDIEVEDLSKHKMDAEYYRIEQPAVDTVNATKKDGGLVCAVGTTSLRALENSVSAERLLATSEGWTNKFIFPPYDFHIPDHLLTNFHLPKSSLFITTCAFGGIDLILEAYAQAQKEKYKFFAYGDAMLIV

SEQ ID NO: 68270 - protein, 414 aa, Lewinella marina
  REGION 1..414: note = tr|A0A2G0CDF7|A0A2G0CDF7_9BACT S-adenosylmethionine:tRNA ribosyltransferase-isomerase; OS = Lewinella marina OX=438751 GN=CGL56_12510 PE=3 SV=1
MTPDARALRIDDYDYALPDERIARYPLPDRARAKLLHYRAGEMESLHFADLPDLLPAGTLVIGNQTRVIHARLHFTLADERPLEIFCLEPLEPADYALSLGSTTGVSWKCLVGGNRRWKSGEIDARVNVGGTDCRLTARRGKRLDNAFRIEFSWQADRPLSFGEVLEAAGSIPLPPYLGRPAEAEDRDRYQTVFAEREGSVAAPTAGLHFTPGVMERLRERGSDFRTLTLHVGAGTFKPVTSDTLGDHVMHREYFSVDRELVRALHAQKAAGRPVVSVGTTSMRCLESLYYFGARLLAGDPAGDSLDQWVGSDPRLTSATVAPALAALLQWMEVEGRENFSGYTQLLLTPAVRPRVVDGLITNFHQPRSTLLLLVASLVGEDWRRIYDFALGGDFRFLSYGDSSLLWRRGAGAE

SEQ ID NO: 68271 - protein, 352 aa, Lewinella nigricans
  REGION 1..352: note = tr|A0A2D0MY44|A0A2D0MY44_9BACT S-adenosylmethionine:tRNA ribosyltransferase-isomerase; OS = Lewinella nigricans DSM 23189 = NBRC 102662 OX=1122177; GN = CRP01_39275 PE=3 S V=1
MQSPTISALDFELPVHLSRPLPTESRGLERDAVKLLVSKMNTDSVFHTTFAEIDRFLQAGDVLVVNTSATVPAALDIVLPTGRRGKIHLSNQISDTTWRGELREIVQGRPKRYFLGQAGAVFPLPGGGTATLLDLHSGSTTDTRHLQLWEIRLDLPLVPLPYLHRYGKPIRYDEQQFPLEYYQTAFSTEAGSAEMPSAGRAFTHPLITRLLIKGVQFAPITLHTGVSSLETDEEPFPEFFRVPAITASLINTARQQGRRIIAVGTTAGRAVESAVDRHGQVREKEGWTELYIKAESGMQIITGLITGFHEPRASHLHMLEALAGRHHLEIAYRAALERDYLWHEFGDLHLIV

SEQ ID NO: 68272 - protein, 354 aa, Lewinella nigricans
  REGION 1..354: note = tr|A0A2D0NGC7|A0A2D0NGC7_9BACT S-adenosylmethionine:tRNA ribosyltransferase-isomerase; OS = Lewinella nigricans DSM 23189 = NBRC 102662 OX=1122177; GN = queA PE=3 SV=1
MRTKLSHFAFDLPQKLIAKYPEKNRDESRLMVVHKDTGKIEHRIFKDILDYFDDGDVMVFNNTKVFPARLYGRKEKTGAKIEVFLLRELNNEARLWDVLVDPARKIRVGNKLYFSDEHDNDILVAEVVDNTTSRGRTIRFLYDGTDEEFQKELHTLGNTPLPKEIGRPAEESDKERYQTIFAKELGAVAAPTAGLHYSRELMKRLEIKGLEFAELTLHIGLGTFRSIDVEDLSKHKMDAEYYKITQPAVDVVNKGKEGKKRVCGVGTTTMRAVESSVSAESLLKPSEGWTNKFIYPPYDFHIADSMVSNFHLPKSSLLIMVCAFGGFDLIMEAYQEAIKEEYRFFSYGDAMLII

SEQ ID NO: 68273 - protein, 414 aa, Lewinella sp.
  REGION 1..414: note = tr|A0A5C7FBQ8|A0A5C7FBQ8_9BACT S-adenosylmethionine:tRNA ribosyltransferase-isomerase; OS = Lewinella sp. SSH13 OX=2602767 GN=FUA23_21300 PE=3 SV=1
MANNARDLSIDVFDYSLPDERIARYPAKERAGAKQLVYRNGEISHGVFSELPDRLPAGTLLIGNRTRVIHARLFFPLAEGKRPIEVFCLDPLLPVDYAQNLGARTQVQWKVLIGGNRRWKRGPLSLELEVSGQKTSLTAERGERMDNTFALTFSWETEGAPLTFGEILAAAGTIPLPPYLGRESEPDDSARYQTVFAKTEGSVAAPTAGLHFTPEVMNNLQKNGVDWEEVTLHVGAGTFKPVDADTLGGHTMHREFFTVSISFIERLRNQLKAGKPVVSVGTTSLRCLESLFYLGAGFAVGELMVVDGPVEVGQWVAEDPQLVGTDPLAAVNGLMELMKTNSLTELSGYTQLLLTPFAELKLADGLITNFHQPRSTLLLLVAAIVGDDWRRIYDYALEHDFRFLSYGDSSLLWK

SEQ ID NO: 68274 - protein, 354 aa, Lewinella sp.
  REGION 1..354: note = tr|A0A180ELL3|A0A180ELL3_9BACT S-adenosylmethionine:tRNA ribosyltransferase-isomerase; OS = Lewinella sp. 4G2 OX=1803372 GN=queA PE=3 SV=1
MRTKLSQFKFELNDKLIAKTPTKRRDDSRLMVVNRETGTIEHKMFSDLLDYYEEGDSLVFNNTKVFPARMYGLKEKTQARIEVFLLRELNAQARLWDVLVDPARKIRVGNKLYFNDKKGNNRLVAEVVDNTTSRGRTIRFLYDGPNDEFRKILHSLGNTPLPKVLEREPDSRDAERYQTVFAKEIGAVAAPTAGLNFSRETLMRMELKGIKKAEITLHLGLGTFRDIEVEDLSKHKMDAEYFKVTQEAADIVNATKKDGGLVCAVGTTALRACEDSVSAERLLATNEGWTNRFIFPPYKFHIPDHLLTSFHLPKSSLFIVTCAFGGIDLILEAYAQAQKEKYKFFAYGDAMLII

SEQ ID NO: 68275 - protein, 414 aa, unidentified
  source 1..414: note = Lewinella xylanilytica
  REGION 1..414: note = tr|A0A2S6I295|A0A2S6I295_9BACT S-adenosylmethionine:tRNA ribosyltransferase-isomerase; OS = Lewinella xylanilytica OX=1514080 GN=CLV84_2191 PE=3; SV = 1
MMMDPRELRIDDFDYSLPDDRIARYPLPDRAAAKLLHYREGTVTDRHFRELPDLLPAGTLLVGNSTRVIHARLYFPLPTGRTVEIFCLEPLRPVDYALSLSATQGAVEWKCLIGGNRRWKSGSISLPVHQADDTFTLVAERLERTDDTFTVRFTWSGPRELSFGELLEAAGTIPLPPYLGRAAEGEDHHRYQTVFAEREGSVAAPTAGLHFTPQVMEGLVDREVDFRTLTLHVGAGTFKPVSAPNLGGHVMHREYFSVSIELLHRLEAQLRAGRPIVSIGTTSMRCLESLFYLGARGMTEGNWENELGQWVATEASVSRTDAAPALAALIHHLEMTNSESFTGYTQLMLTPAARPRIVDGLITNFHQPRSTLLLLVAAMVGDAWKDIYQHARETDYRFLSYGDSSLLWRRSAGA

SEQ ID NO: 68276 - protein, 354 aa, unidentified
  source 1..354: note = Lewinella xylanilytica
  REGION 1..354: note = tr|A0A2S6I1D5|A0A2S6I1D5_9BACT S-adenosylmethionine:tRNA ribosyltransferase-isomerase; OS = Lewinella xylanilytica OX=1514080 GN=queA PE=3 SV=1
MRTKLSQFKFELNDKLIARTPSKRRDDSRLMVVNRATGAIEHKQFTDLLDYYSEGDTLVFNNTKVFPARLYGLKEKTQARIEVFLLRELNSQARLWDVLVDPARKIRVGNKLYFNDKRGNNRLVAEVVDNTTSRGRTIRFLYDGPNDEFTKELHGLGNTPLPKLLEREADSRDAERYQTVFAKELGAVAAPTAGLHFSRETLMRMELAGVKNAEVTLHLGLGTFRDIEVEDLSKHKMDAEYYKIEQPAVKTVNATKKDGGLVCAVGTTTLRALENSVSAERLLATSEGWTNKFIFPPYDFHIPDHLLTNFHLPKSSLFITTCAFGGIELILEAYAQAQKEKYKFFAYGDAMLII

SEQ ID NO: 68277 - protein, 354 aa, unidentified
  source 1..354: note = Lewinellaceae bacterium
  REGION 1..354: note = tr|A0A2C6CXN0|A0A2C6CXN0_9BACT S-adenosylmethionine:tRNA ribosyltransferase-isomerase; OS = Lewinellaceae bacterium SD302 OX=2014804 GN=queA PE=3; SV = 1
MRTKLSQFKFELPEKLIAKYPLRHRDDSRLMVVDRKTGTFEHKQFKDILDYYDDGDTFIFNNTKVFPARLYGRKEKTGARIEVFLLRELNSHSRLWDVLVDPARKIRVGNKLYFSNNDDDDRLVAEVVDNTTSRGRTIRFLYDGPDDVFMKELYALGNTPLPRIMEREAEAIDAERFQTVVAKTMGSVAAPAAGLHFSEETLLRMQIQGIQRAEVTLHLGLGTFRDIEVEDLSKHKMEAEYFKIEQPAVDIVNKSKRARKQVCAVGTTVIRSIETSVSAEDLLKTSEGWTNKFIFPPFEFRIADSMLTNFHLPKSSLFIMACAFGGIDLMLEAYAEAIKEKYRFYTYGDAMLIL

SEQ ID NO: 68278 - protein, 416 aa, unidentified
  source 1..416: note = Lewinellaceae bacterium
  REGION 1..416: note = tr|A0A2C6CNL0|A0A2C6CNL0_9BACT S-adenosylmethionine:tRNA ribosyltransferase-isomerase; OS = Lewinellaceae bacterium SD302 OX=2014804 GN=CEQ90_17570; PE = 3 SV=1
MSGTSAREFRIEDFTYELPDDRIARHPLAERDAAKLLHYHDGMIDDHHFWELPELLPPGTLLVGNATRVIHARLHFELPNGRQIEIFCLDPLEPVDYQRNFSASGSVVWKCLVGGNRRWKDGVTATLNVPHQGDSLQLRAERLGRTDNTFEIRFSWEGAEVAFGPLLDAAGEIPLPPYLGRDAEEDDKDRYQTVFAEIEGSVAAPTAGLHLSERLMAKMRDRNLNWGEVILHVGAGTFKPVTSDTLGGHEMHREYFEVDLLFLERLLAQLRSGQPIVSVGTTTTRCMESIYYFGSKLAYEADFSLPASIDIGQWVATERSYELSPAEAVQALIDRMQVSGRKKIQGNTQLIITPDLSLRMVDGIITNFHQPNSTLLLIVAATVGQENWKSIYRHALTGDYRFLSYGDGSLLWKHKG

SEQ ID NO: 68279 - protein, 360 aa, unidentified
  source 1..360: note = Liberibacter asiaticus
  REGION 1..360: note = tr|C6XHB0|C6XHB0_LIBAP S-adenosylmethionine:tRNA ribosyltransferase-isomerase OS=Liberibacter asiaticus (strain psy62) OX=537021 GN=queA PE=3 SV=1
MMVKEFDFDLPPSRIALRPVFPRDSARLMVVHPNLSCPLVISDHLVSDLPAFLNSNDAIVFNNTKVITAQLNGVRFCHINRREKEISCTLHMRVSPNSWSVYARPSKVIKKGDILHFFSQDGQSRLEATVIDKWNTGEILLVFSISGIELERQISLVGTIPLPPYIARKRPIDARDYVDYQTTYAKIQGSVAAPTAGLHFTSNLLSRLISIGIKVYFVTLHVGAGTFMPVKVEDTDDHIMHSEIGFIDAPTAQALNSVKSRGGRIVSVGTTSLRLLETATTEDGIINPWSGFTNIFITPGYRFRAVDILMSNFHLPKSTLLMLVSAFCGIEETKKMYQHAISHAYRFYSYGDTSLLFQKR

SEQ ID NO: 68280 - protein, 358 aa, unidentified
  source 1..358: note = Liberibacter crescens
  REGION 1..358: note = tr|L0EVN4|L0EVN4_LIBCB S-adenosylmethionine:tRNA ribosyltransferase-isomerase OS=Liberibacter crescens (strain BT-1) OX=1215343 GN=queA PE=3 SV=1
MRIELFDFDLPDHSIALRPTYPRDFSRLMVAYSHPSVHFSHHRMCDLLTFLKPNDVIIFNNTKVIPAQLQGFRVRQGYAEVRLSILLHVRISDDSWRAFPSSGKKIRQGDTIYFSSEDKKIQLSALVLEKHETGEITLVFSKSGEELDAQINIIGKIPLPPYIIRKRSVDEHDVVDYQTIYGCVQGAVAAPTAGLHFTSDLLDNLDVLGVEKHFVTLHVGAGTFIPVRVDNTDNHVMHGEIGYIDVKTVQAVNAAKAEGRRIIAVGTTTLRLLESAAIRDGVIKPWSGSTEIFITPGYRFRIVDMLITNFHLPRSTLFMLVAAFYGLEEIKKAYEHAIMQGYRFYSYGDASLLFRKEQ

SEQ ID NO: 68281 - protein, 359 aa, unidentified
  source 1..359: note = Liberibacter solanacearum
  REGION 1..359: note = tr|E4UDV1|E4UDV1_LIBSC S-adenosylmethionine:tRNA ribosyltransferase-isomerase OS=Liberibacter solanacearum (strain CLso-ZC1) OX=658172 GN=queA PE=3 SV=1
MMVKEFDFHLPSSRIALRPVSPRDSARLMVVYPNLSCSQMISDYSVRDLPIFLNSNDAIVFNNTKVIAAQLRGRRLRRTNDSEHWISCTLHMRISSNSWSAYVRPGKIIRQGDTIYFFSQDGQSKLEANVIEKRDTGEILLVFPLSGTELDRQIALIGTMPLPPYIAKKRPIDERDYVDYQTTYASIQGSVAAPTAGLHFTSDLLSKLVSMGVAVYFITLHVGAGTFMPVRVEDTDDHIMHSEIGFIDAQTAQDLNAVKLRGGRIVAVGTTSLRLLETATTEDGIIMPLSGYTNIFITPGYRFRAVDVLLSNFHLPKSTLLMLVSAFCGVEETKTMYQHAIANSYRFYSYGDASLIFKK

SEQ ID NO: 68282 - protein, 344 aa, unidentified
  source 1..344: note = Lihuaxuella thermophila
  REGION 1..344: note = tr|A0A1H8FU79|A0A1H8FU79_9BACL S-adenosylmethionine:tRNA ribosyltransferase-isomerase; OS = Lihuaxuella thermophila OX=1173111 GN=queA PE=3 SV=1
MEVSLYDFDLPKELIAQTPITDRAASRLMVLNRRTGEVVHTRFSQILEHLKPGDVLVLNDSRVRPARLIGMKEGTGANIELLLLKPLGEDRWEALVKPAKRVKEGTVILFGDGQLKAVAEEQTEVAGGRVFRLEYEADDVEKLFEQLGQMPLPPYIHEQLDDPERYQTVFSRVVGSAAAPTAGLHFTEELLERIRQKGVETAFITLHVGLGTFRPVTVEHVEEHQMHAEYYEVGEETAGIIRRAKERGGRVIAVGTTSVRTLETVANQFDGEIRASSGWTDIFIYPGYTFRAVDGLITNFHLPKSTLLMLVSAFASREHILAAYQEAVRERYRFFSFGDAMLII

SEQ ID NO: 68283 - protein, 345 aa, unidentified
  source 1..345: note = Lihuaxuella thermophila
  REGION 1..345: note = tr|A0A1H8C2F2|A0A1H8C2F2_9BACL S-adenosylmethionine:tRNA ribosyltransferase-isomerase; OS = Lihuaxuella thermophila OX=1173111 GN=SAMN05444955_1035; PE = 3 SV=1
MAAPIDFVLPEMLNATAPPERRGIRRDHVRLMISDRRTGESQHTKFYCLPQYLRPGDVIALNVSRTLPAVLKASWRRGERWVDPSVEIRLASRIDEQSWEALVVGEGVKAGDIFQFSPSLFAVVTVVRAENPLVRLRFSLQGAELLEQFYKFGEPIRYEYIDQPWDLDYYQTVYASVPGSVEIPSAGRAFSWELLIQLRKKGVQVVSLTLHTGLSDLLDDRYRLEPEKNCEYYSIPEQTARVINEAKKSGGRVIAVGTTVVRALESAALSGGVCVAKEGRTCLRIHEQTPLQVVDGLMTGFHEPEASHLDLLSAFVPPPILSGMYDEAVRERYLWHEFGDIHLIL

SEQ ID NO: 68284 - protein, 352 aa, unidentified
  source 1..352: note = Limimaricola cinnabarinus
  REGION 1..352: note = tr|A0A2G1MF51|A0A2G1MF51_9RHOB S-adenosylmethionine:tRNA ribosyltransferase-isomerase; OS = Limimaricola cinnabarinus OX=1125964 GN=queA PE=3 SV=1
MKLSDFDFDLPEDLIATRPARPRSSARLLLAQGETIADRVVTDLVEILRPGDRLVLNDTKVIPARLSGTRTRPGAAGEGIARIEVTLLAPRADGCWTALVKPLRKLREGESIVFSEKLSAELVGREADQAVLRFDLEGEDFDAAIAEVGAMPLPPYIAAKREADEADRADYQTVWAARPGAVAAPTASLHFDEPLMAALAERGVSITHVTLHVGAGTFLPVKVDDIRDHKMHAEWGQVSERAAAEIAATRATGGRVIPVGTTALRLIESAARGGQIEPWVGETDIFITPGFEFRVAHGLMTNFHLPKSTLMMLVSALMGVEEIRRIYDHAIANRYRFFSYGDASLLLPQRGR

SEQ ID NO: 68285 - protein, 352 aa, unidentified
  source 1..352: note = Limimaricola cinnabarinus
  REGION 1..352: note = tr|U2Z745|U2Z745_9RHOB S-adenosylmethionine:tRNA ribosyltransferase-isomerase OS=Limimaricola cinnabarinus LL-001 OX=1337093 GN=queA PE=3 SV=1
MKLSDFDFDLPDELIATRPARPRSSARLLLAQGGEIADRVVTDLVEILRPGDRLVLNDTKVIPARLTGIRTRPGASGEGTARIEVTLLGPRPDGSWSALIKPLRKLREGEVIEFSDRLSAELVSREEGQGVLRFDLEGDAFDRALQMVGAMPLPPYIAARRAADESDREDYQTVWAARPGAVAAPTASLHFDEPLMAALAARGVDVTHVTLHVGAGTFLPVKVDDIRDHKMHAEWGEVSAGAAAEIAATRAAGGRVIPVGTTALRLIESAARDGEVAPWSGETDIFITPGFAFRVADGLMTNFHLPKSTLMMLVSALMGVEEIRRIYEHAIANRYRFFSYGDASLLLPRADS

SEQ ID NO: 68286 - protein, 352 aa, unidentified
  source 1..352: note = Limimaricola hongkongensis
  REGION 1..352: note = tr|A0A017HDM2|A0A017HDM2_9RHOB S-adenosylmethionine:tRNA ribosyltransferase-isomerase; OS = Limimaricola hongkongensis DSM 17492 OX=1122180 GN=queA; PE = 3 SV=1
MKLSDFDFDLPEELIATRPARPRSSARLLLAQGDEIADRVVSDLASILRPGDRLVLNDTKVIPARLSGVRTRPGAAGEGAAKIEVTLLAPRADGAWSALVKPLRKLREGEVVVFSDRLSAELVGREADQAVLRFDLEGEDFDAAIAEVGAMPLPPYIAAKRAADDSDREDYQTVWAARPGAVAAPTASLHFDAPLMAALDARGVSFTHVTLHVGAGTFLPVKVDDIRDHKMHAEWGEVSEKAAAEIAATRATGGRVIPVGTTALRLIESAARGGRIMPWVGETDIFITPGFEFRVAHGLMTNFHLPKSTLMMLVSALMGVEEIRRIYDHAIANRYRFFSYGDASLLLPRGAR

SEQ ID NO: 68287 - protein, 350 aa, unidentified
  source 1..350: note = Limimaricola pyoseonensis
  REGION 1..350: note = tr|A0A1G7H056|A0A1G7H056_9RHOB S-adenosylmethionine:tRNA ribosyltransferase-isomerase; OS = Limimaricola pyoseonensis OX=521013 GN=queA PE=3 SV=1
MKLSDFDFDLPEELIATRPAKPRSSARLLLARGDAIDDRHVYDLPEILRPGDRLVLNDTKVIPARLSGLRTRPGAEGEGQARIEVTLLTPRPDGTWTALIKPLRKLREGEVIEFSDRLSAELVARDEGQGVLRFDLEGDAFDRALQQVGAMPLPPYIAAKRPADEADREDYQTVWAARPGAVAAPTASLHFDAALMAALEARGVSFTHVTLHVGAGTFLPVKVDDISEHRMHAEWGEVTEAAAAEIAATRAAGGRIIPVGTTALRLIESAAQGGQIGPWRGETDIFITPGFEFRVAHGLMTNFHLPKSTLMMLVSAMMGMDRIRAIYGHAIAERYRFFSYGDASLLLPRG

SEQ ID NO: 68288 - protein, 352 aa, unidentified
  source 1..352: note = Limimaricola soesokkakensis
  REGION 1..352: note = tr|A0A1X6YXF0|A0A1X6YXF0_9RHOB S-adenosylmethionine:tRNA ribosyltransferase-isomerase; OS = Limimaricola soesokkakensis OX=1343159 GN=queA PE=3 SV=1
MKLSDFDFDLPEELIATRPAKPRSSARLLLAQGQEIADQVVTDLVRILRPGDRLVLNDTKVIPARLSGTRTRPGAAGEGTARIEVTLLGPRADGCWSALVKPLRKLREGEVVVFSERLSAELVGREADQAVLRFDLEGDDFDAAIAEVGAMPLPPYIAAKRAADESDREDYQTVWAARPGAVAAPTASLHFDEPLMAALAARGVSFTHVTLHVGAGTFLPVKVDDIRDHKMHAEWGEVSEKAAAEIAATRATGGRVIPVGTTALRLIESAARGGQIAPWSGETDIFITPGFEFRVAHGLMTNFHLPKSTLMMLVSALMGVEEIRRIYDHAIANRYRFFSYGDASLLLPRNGR

SEQ ID NO: 68289 - protein, 348 aa, unidentified
  source 1..348: note = Limimonas halophila
  REGION 1..348: note = tr|A0A1G7SJA1|A0A1G7SJA1_9PROT S-adenosylmethionine:tRNA ribosyltransferase-isomerase; OS = Limimonas halophila OX=1082479 GN=queA PE=3 SV=1
MQTSDFDFELPEHFIAQRPARPRDSARLLEVRADGLNDRTVRALPELLGPDDLLVFNDTRVIPAQLTVRRGEARVGLTLHKPDPEDDAVWHVFARPAKRLRPGNTVHAGDTLSAEVLARDGGEVTLRFDRGGAALREALEEVGQTPLPPYIDRPEGPDEADRDDYQTVFAREPGAVAAPTAGLHFTDRLLAELDARGVRRAGVTLHVGAGTFLPVKSDDPREHPMHAEHGHLDAGTAEAVNATRAAGGRVVAVGTTALRLLETAAADDGTVHPFAGESDLFILPGYRFKAVDCLMTNFHLPRSTLFMLVCAFAGTARMQAAYAHAKAAGYRFYSYGDACFLHRQEAAA

SEQ ID NO: 68290 - protein, 358 aa, Limnobacter sp.
  REGION 1..358: note = tr|A0A151QIV8|A0A151QIV8_9BURK S-adenosylmethionine:tRNA ribosyltransferase-isomerase; OS = Limnobacter sp. CACIAM 66H1 OX=1813033 GN=queA PE=3 SV=1
MKLSEFDFDLPEQLIAQHPPEHRGESRLLVCQNNKPIEDHLFEQVLNLLQPNDVLVVNDTKVLKARLEGYKASGGKIEVMLERILDDRRFTAMIRASKSPKPGSDIVLAGIATARVLSKHDMMYELELLESSLSLPELLEKHGALPLPPYIEHSANAQDDDRYQTVFAREPGAVAAPTAGLHFTERLLQEVQARGVKLLNLTLHVGAGTFLPVKTDNVDEHVMHSERYAISGSLIEAMIRAKQNGGKVVAVGTTSLRALEAWATETGCNLSTTEGLNKAAEFAHSGHAGDTQIFIKPGYTFKVVDRLITNFHLPKSTLLMLVSAFAGKTNILNAYAHAIAQQYRFFSYGDAMWLERSE

SEQ ID NO: 68291 - protein, 358 aa, Limnobacter sp.
  REGION 1..358: note = tr|A0A520TBP6|A0A520TBP6_9BURK S-adenosylmethionine:tRNA ribosyltransferase-isomerase; OS = Limnobacter sp. OX=2003368 GN=queA PE=3 SV=1
MKLSEFDFDLPEQLIAQHPPEHRGESRLLVCQSNKAIEDRLFAHVLNLLQPNDVLVVNDTKVLKARLEGHKASGGKIEVMLERILDDRRFTAMIRASKSPKPGSEIVLAGAATARVLNKHDMMYELELLESSLSLPDLLDTYGALPLPPYIEHSANAQDDERYQTVFAREPGAVAAPTAGLHFTEKLLQEVQTRGVQLLNLTLHVGAGTFLPVKTDNVDEHVMHSERYAISGSLIEAMIKAKQNGGKVVAVGTTSLRALEAWATETGCNLSTTEGLNKAAEFAHRGYGGDTQIFIKPGYSFKVVDRLITNFHLPKSTLLMLVSAFAGKTNILNAYAHAIAQQYRFFSYGDAMWLERSE

SEQ ID NO: 68292 - protein, 358 aa, unidentified
  source 1..358: note = Limnobaculum parvum
  REGION 1..358: note = tr|A0A2Y9U1B2|A0A2Y9U1B2_9ENTR S-adenosylmethionine:tRNA ribosyltransferase-isomerase; OS = Limnobaculum parvum OX=2172103 GN=queA PE=3 SV=1
MRVTDFSFELPESLIARYPQAERSACRMLSLDGVSGTLIDDTFTDVLDKLNAGDLLVFNNTRVIPARLFGKKASGGKIEVLVERVLDDRRVLAHVRASKAPKPGAELLLGDDESIPAIMAARHDALFELHFTDGRDVLTILNAAGHMPLPPYIDRPDEEADRELYQTVYSQRPGAVAAPTAGLHFDQPLLEALRAKGINMEFVTLHVGAGTFQPVRVDDIKQHVMHAEYAEVPQQVVDAVLACKARGNKVVAVGTTSVRSLESAAQAAKQDLIEPFFGDTRIFIYPGYQFRVIDTLITNFHLPESTLIMLVSAFAGYSNIMRAYQQAVEKQYRFFSYGDAMFITRNPEAINEIPDGKS

SEQ ID NO: 68293 - protein, 366 aa, unidentified
  source 1..366: note = Limnochorda pilosa
  REGION 1..366: note = tr|A0A0K2SN93|A0A0K2SN93_9FIRM S-adenosylmethionine:tRNA ribosyltransferase-isomerase; OS = Limnochorda pilosa OX=1555112 GN=queA PE=3 SV=1
MRMDAFDYHLPPGAIAQEPVEPRDASRLLVLRREDGRLEHRIFRDLPEYLAPGDVLVVNESRVRPARLIGEKEGTGGAVELLLLRPDAEGAWECLARPGRRLRAGQRLVFGGGRLRGQVVDPRVPRSPGGEGPSRAAGVRRVRFEHRGPLEQVLEELGRVPLPPYIHRELADPERYQTVYARETGSAAAPTAGLHFTPELLDRIRSMGVVVAPVVLHVGLDTFRPVTEQEAEEHPMHREYYAIPAETAAAVEGARARGGRVVAVGTTSVRALEAAAIRAEGLDPAGDRGAAAGRVPAGSGWTDLYIYPGYRFRAVDALVTNFHLPRSTLLLLVSAFAGRERVLEAYRVAVEAGYRFFSFGDAMVIL

SEQ ID NO: 68294 - protein, 371 aa, unidentified
  source 1..371: note = Limnochorda pilosa
  REGION 1..371: note = tr|A0A0K2SN96|A0A0K2SN96_9FIRM S-adenosylmethionine:tRNA ribosyltransferase-isomerase; OS = Limnochorda pilosa OX=1555112 GN=LIP_2755 PE=3 SV=1
MTVLTARLDFHLPESLFAARPPEARGLARDQVQLLVLDAGRRSWQHARFTDLPAFLHPGDLLVVNASQAIAASLPARHGSGPHTGLPFRIHLSTPLPPWEAQTHGLPSREAWIVEPRTARGIPGEPIAPGEEVDIPGPKGGALARVRFVAPYRSFARLWVAGAGAQEALLEVAARVGEPIRYPYLEGRYPIRTYQTVYGDVPGSAEMPSAGRPFSRRTLQRLRAQGVEVARIVLHTGVSSHEIETPLVDEQPTYPEPFEVPPATAAAVNSARQRGGRVIAVGTTVVRALESCASADSSVRPARGFTDLFVSPARPVRSVDGLLTGVHAPRSSHLAMLSALVDPELLLASYEDAKSRGYLWHEFGDSNLILR

SEQ ID NO: 68295 - protein, 369 aa, Limnohabitans curvus
  REGION 1..369: note = tr|A0A315ESP6|A0A315ESP6_9BURK S-adenosylmethionine:tRNA ribosyltransferase-isomerase; OS = Limnohabitans curvus OX=323423 GN=queA PE=3 SV=1
MSHIYTLSDFDFELPESLIAQHPASERSASRLLDGRHAEFANRTFKDLPSLLKAGDLLVFNDTQVVKARLFGEKPTGGKLELLVERVLTNHEVVAHMKVSKKPPVGTELLMVGGKNNGGFNATLLGRWPNEDGQLFRFKFSDEPHTLMQRHGHMPLPPYIERHQNTTDAQHETEADKAEDERRYQTVFAKHPGAAAAPTAALHFDEGVLQGLEAQGVARASVTLHVGAGTFQPVKTENLAEHRMHSEWYNIPPETVQAIADCRARGGRVVAVGTTSVRTLESWAQSGQASGDTQIFITPGFAFQVVDVLITNFHLPKSTLLMLVSAFAGFEHMHALYRHAIANHYRFFSYGDAMLLERNSERKAAHVEV

SEQ ID NO: 68296 - protein, 363 aa, Limnohabitans parvus
  REGION 1..363: note = tr|A0A315EB81|A0A315EB81_9BURK S-adenosylmethionine:tRNA ribosyltransferase-isomerase; OS = Limnohabitans parvus II-B4 OX=1293052 GN=queA PE=3 SV=1
MTASVSSLREFTLSDFDFELPTELIAQHPATERSSSRLLDGSAATVVDRIFHELPSLLQAGDLLVFNDTKVVKARIFGEKASGGKLELLIERVLPGHQVVAHMKVSKKPLVGGKMFMAGGARNGGFDAVLLGRWPDEKGQLFHLQLSDEPHALMEKHGVVPLPPYIERPAGAIEHQDTEEDARRYQTVFARAPGAVAAPTAALHFDEALLAQLEARGVQRASVTLHVGAGTFQPVKTENIADHTMHREWYEVPEATQQAIADCKARGGQVVAVGTTTVRTLESWAKFSQASGDTQIFITPGFEFHLVDRLITNFHLPKSTLMMLVSAFAGYEHIMGLYRHAIANQYRFFSYGDAMLLTRTQPR

SEQ ID NO: 68297 - protein, 354 aa, Limnohabitans planktonicus
  REGION 1..354: note = tr|A0A2T7U8G7|A0A2T7U8G7_9BURK S-adenosylmethionine:tRNA ribosyltransferase-isomerase; OS = Limnohabitans planktonicus II-D5 OX=1293045 GN=queA; PE = 3 SV=1
MTSSAPSSRPFTLSDFDFELPPELIAQHPAAERSGSRLLDGSSPAVVDRIFRELPGLLRADDLLVFNDTKVIKARIFGEKATGGKLELLIERVLPGHQVVAHMKVSKKPLPGGKMFMMGGAQNGGFDATLLGRWPDENGQLFHLQLSDEPHALMEKHGHVPLPPYITHTDTEEDAQRYQTVFARTPGAVAAPTAALHFDEALLAALDAQGVQRASVTLHVGAGTFQPVKTENITEHTMHSEWYEVPEATQQAIAECKARGGQVVAVGTTTVRTLESWAQFGQASGDTQIFITPGFEFQVVDRLITNFHLPKSTLMMLVSAFAGYEHIMGLYRHAIAQKYRFFSYGDAMLLSRAS

SEQ ID NO: 68298 - protein, 360 aa, Limnohabitans sp.
  REGION 1..360: note = tr|A0A315AZW3|A0A315AZW3_9BURK S-adenosylmethionine:tRNA ribosyltransferase-isomerase; OS = Limnohabitans sp. MMS-10A-192 OX=1835769 GN=queA PE=3; SV = 1
MTTLSASPREFTLRDFDFELPPALIAQHPAAERSGSRLLDGSSSTVVDRIFRELPDLLHAGDLLVFNDTKVVKARIFGEKASGGKLELLIERVLPGDQVVAHMKVSKKPLVGGKMFMMGGAHNGGFDATLLGRWPDENGQLFHLQLSDEPHALMEKHGHVPLPPYIAHTDTAEDAQRYQTVFARAPGAVAAPTAALHFDEALLAALQARGVQRASVTLHVGAGTFQPVKTENIADHTMHREWYEVPEATQQAIAACKARGGKVVAVGTTTVRTLESWAKFKQVSGDTQIFITPGFEFQVVDRLITNFHLPKSTLMMLVSAFAGYEHIMGLYRHAIANQYRFFSYGDAMLLTHTPPASQAS

SEQ ID NO: 68299 - protein, 375 aa, Limnohabitans sp.
  REGION 1..375: note = tr|A0A2M6V0Z9|A0A2M6V0Z9_9BURK S-adenosylmethionine:tRNA ribosyltransferase-isomerase; OS = Limnohabitans sp. G3-2 OX=1100711 GN=queA PE=3 SV=1
MSSSAAPRDFTLSDFDFELPTPLIAQHPATERSASRLLDGSSPAVVDRIFHELPGLLNAGDLLVFNDTKVVKARIFGEKASGGKLELLIERVLPGHQVVAHMRVSKKPLLGGKMHLAGGARHGGFDAVLLGRWPDENGQLFHLQLSDEPHALMEKHGVMPLPPYIERPAGTGEHADTAEDAQRYQTVFARAPGAVAAPTAALHFDEGVLTALKARGVQTASVTLHVGAGTFQPVKTENIAEHTMHSEWYEVPEATQQAIAECKARGGQVVAVGTTTVRTLESWAQFGQASGDTQIFITPGFDFQVVDRLITNFHLPKSTLMMLVSAFAGYEHIMGLYRHAIANQYRFFSYGDAMLLKRTALDLSPAEGTPDRLRV

SEQ ID NO: 68300 - protein, 371 aa, unidentified
  source 1..371: note = Limnoraphis robusta
  REGION 1..371: note = tr|A0A0F5YK79|A0A0F5YK79_9CYAN S-adenosylmethionine:tRNA ribosyltransferase-isomerase; OS = Limnoraphis robusta CS-951 OX=1637645 GN=queA PE=3 SV=1
METDRLDWTTEGYDYELPEERIAQNPVIPRDQSRLLVVDSLTSHHHRIFQDLPNYLKSGDLLIFNDTRVIPARLYGNKSSGAAVEILLIEERKPNCWLALVKPGRRFKIGVRVEFESLNSTDQEVLQPLSATVVETDAATGGRLLQFDLPAGQSLIEQLDQFGHIPFPPYVTQSDALPQQYQTIYAQRPGAVAAPTAGLHFTEELFERLHHQGINKAFVTLHVGVGTFRPVEVKDITTHQMHAEWIEVSAETVEQIEKTKANGGRIIAVGTTVVRTLEGVAMAEGKLTPYCGKTEAFIYPGYQFRVIDGLITNFHLPRSSLMMLVAALIGRQRLLDLYQDAIAQKAEGFAHPYRFYSFGDGMLILPEAVIS

SEQ ID NO: 68301 - protein, 375 aa, unidentified; identical to SEQ ID NO: 63555
  source 1..375: note = Limnospira indica
  REGION 1..375: note = tr|H1WBK2|H1WBK2_9CYAN S-adenosylmethionine:tRNA ribosyltransferase-isomerase OS=Limnospira indica PCC 8005; OX = 376219 GN=queA PE=3 SV=1

SEQ ID NO: 68302 - protein, 360 aa, unidentified
  source 1..360: note = Limnothrix rosea
  REGION 1..360: note = tr|A0A1Q4R7S4|A0A1Q4R7S4_9CYAN S-adenosylmethionine:tRNA ribosyltransferase-isomerase; OS = Limnothrix rosea IAM M-220 OX=454133 GN=queA PE=3 SV=1
MSTVDQNLASYDYILPPECIAQTPVTPRDHSRLLVLDSPTTHHHQHFYQLGDWLQPNDLLIMNNTKVIPARLHGRKVTGAPVEVLLLEEKSVNTWLALVKPGKRFTLGAEIAFTSPRDLDQVLRATVIDRDPETGGRVLAFDLPATTNLWSVLDDFGEIPFPPYVTDSEAKPDQYQTIYAEQPGAVAAPTAGLHFTPELLDKLGAKGIARAFITLHVGVGTFRPVEVDDITTHDMHYEWIDVPDSTVQKIKETKAKGGRVIAIGTTAVRSLEGMAAASDGELRGFQGKTNLFIYPGYEWQVVDGLITNFHLPKSSLMMLVSALIGRERLLALYGEAIAEGYRFYSFGDAMAILPQAKGMM

SEQ ID NO: 68303 - protein, 381 aa, unidentified
  source 1..381: note = Limnothrix sp.
  REGION 1..381: note = tr|A0A372DU01|A0A372DU01_9CYAN S-adenosylmethionine:tRNA ribosyltransferase-isomerase; OS = Limnothrix sp. CACIAM 69d OX=1890733 GN=queA PE=3 SV=1
MGYINDPDRSLDGYHYELPSDRIAQNPREPRDRSRLLVATSPHEIVHRQFRDLLEFLRPGDLLVMNDSSVIPARLHGHKASGAAVEVLLLEARSPDHWLALVRPGKRLLVGTQIEFDPPPGAAQANPAAPKLSAEVVAVDRNTGGRLLRFQLPPGANSLLEILDAWGEMPLPPYITDSAAPPDRYQTVYARDPGSAAAPTAGLHFTPELLDRLSAAGVGRAFVTLHVGVGTFRPVASPDITAHKMHEEWALLSEEVAEKIRTTRANGGRVFAVGTTAVRTLESAARHGQVEAFCGKTDLFIYPGYQWRVVDGLITNFHLPRSSLMMLVGAFVGRARLLELYQAALDAPADPYPDRYRFYSFGDAMLLLPDACIAPRFERKE

SEQ ID NO: 68304 - protein, 389 aa, unidentified
  source 1..389: note = Limnothrix sp.
  REGION 1..389: note = tr|A0A1C0V7D0|A0A1C0V7D0_9CYAN S-adenosylmethionine:tRNA ribosyltransferase-isomerase; OS = Limnothrix sp. P13C2 OX=1880902 GN=queA PE=3 SV=1
MGYINDPDRSLDGYHYELPNDRIAQNPREPRDRSRLLVATSPHEIVHRQFRDLLEFLRPGDLLVMNDSSVIPARLHGHKASGAAVEVLLLEARSPDSWLALVRPGKRLLVGTQIEFDPPPGMAQTNPTADPTAVPTVAKLSAEVVAVDRNTGGRLLRFQLPPGVNSLLEILDAWGEMPLPPYITDSAAPPDRYQTVYARDPGSAAAPTAGLHFTPELLDRLSAAGVGRAFVTLHVGVGTFRPVASPDITAHKMHEEWALLSEEVAEKIRTTRANGGRVFAVGTTAVRTLESAARHGQVEAFCGKTDLFIYPGYQWRVVDGLITNFHLPRSSLMMLVGAFVGRARLLELYQAALDAPADPYPDRYRFYSFGDAMLLLPDACIAPRFETED

SEQ ID NO: 68305 - protein, 349 aa, Lishizhenia tianjinensis
  REGION 1..349: note = tr|A0A1I7B5C3|A0A1I7B5C3_9FLAO S-adenosylmethionine:tRNA ribosyltransferase-isomerase; OS = Lishizhenia tianjinensis OX=477690 GN=queA PE=3 SV=1
MKLSEFNFELPEELIAEYPSKNRDESRLMVVHRDTGKIEHKLFKDVIDYFDEGDVMIRNNTKVFPARMYGNKEKTGAKIEVFLLRELNRESLLWDVLVDPARKIRIGNKLYFGDDESLVAEVIDNTTSRGRTLRFLFDGTYEEFKAKITELGETPLPKYIKREVEEEDEERYQTIYASEEGAVAAPTAGLHFSKNLLKRLEIKGIDFAEITLHVGLGTFRPVEVEDLTKHKMDSEQVTITQKCADKVNEAKKNKKKVIAIGTTSMRAIESSVSTENLLKPFDGWTNKFIFPPYDFSIADAMITNLHTPSSTLLMMVSAYMGHDLMMEAYQEAIKEKYKFYSYGDAMLIL

SEQ ID NO: 68306 - protein, 342 aa, unidentified
  source 1..342: note = Listeria aquatica
  REGION 1..342: note = tr|W7B4D6|W7B4D6_9LIST S-adenosylmethionine:tRNA ribosyltransferase-isomerase OS=Listeria aquatica FSL S10-1188 OX=1265818 GN=queA PE=3 SV=1
MKVEDFDFDLPEELIAQTPLLDRTASRLMLVDKETGELKDDTFKAIVSELHTGDALVLNDTRVLPARLHGIKEETGAHIEVLLLKQQEGNAWETLVKPAKRIRKGAKIRFGDGELEAVCLEELEHGGRILEFHYQGIFYEILEQLGEMPLPPYIKEQLEDGDRYQTVYAKENGSAAAPTAGLHFTEELLDEIKAKGVKVCFLTLHVGLGTFRPVDVEDTENHKMHSEFYRLTEETAAILNEVKQNGGRIVAVGTTSIRTLETIASKFDGRLQADSGWTDIFISPGYTFKAVDALITNFHLPKSTLIMLVSALASREIILKAYAHAVSERYRFFSFGDAMFIH

SEQ ID NO: 68307 - protein, 343 aa, unidentified
  source 1..343: note = Listeria booriae
  REGION 1..343: note = tr|A0A099VY74|A0A099VY74_9LIST S-adenosylmethionine:tRNA ribosyltransferase-isomerase; OS = Listeria booriae OX=1552123 GN=queA PE=3 SV=1
MRVEDFDFELPEELIAQTPLLDRTSSRLMLVNKETGAIEDAHFPAILEQLHAGDALVLNDTRVLPARLHGEKAETGAHIEVLLLKQKEGDAWETLVKPAKRIRKGMRIQFGDGELSAVCLEELEHGGRILQFEYSGIFYEILERLGEMPLPPYIKEQLEDQDRYQTVFARENGSAAAPTAGLHFTQDLLEEVRAKGVKVVFLTLHVGLGTFRPVDVEDTANHKMHSEFYRLTREAAQELNAVKAAGGKIVAVGTTSIRTLETIATKFDGQLQEDSGWTDIFISPGYTFKAVDALITNFHLPKSTLIMLVSALASRENIMVAYEHAVAERYRFFSFGDAMFIYA

SEQ ID NO: 68308 - protein, 343 aa, unidentified
  source 1..343: note = Listeria cornellensis
  REGION 1..343: note = tr|W7BUG1|W7BUG1_9LIST S-adenosylmethionine:tRNA ribosyltransferase-isomerase OS=Listeria cornellensis FSL F6-0969 OX=1265820 GN=queA PE=3 SV=1
MRVEDFDFELPEELIAQTPLLDRTSSRLMLLNKETGAIKDKHFPAILEHLHAGDALVLNDTRVLPARLHGEKAETGAHIEVLLLKQTEGDAWETLVKPAKRIRKGMRIVFGDGELSAVCLEELEHGGRILQFEYSGIFYEILERLGEMPLPPYIKEQLADQDRYQTVFARENGSAAAPTAGLHFTEELLDQVRAKGVRVVFLTLHVGLGTFRPVDVEDTANHKMHSEFYRLTAEAARELNDVKAAGGKVVAVGTTSIRTLETIASKFDGKLQEDSGWTEIFIAPGYTFKAVDALITNFHLPKSTLIMLVSALSDREKIMAAYEHAVAQEYRFFSFGDAMFIYA

SEQ ID NO: 68309 - protein, 342 aa, unidentified
  source 1..342: note = Listeria fleischmannii
  REGION 1..342: note = tr|W7DGY5|W7DGY5_9LIST S-adenosylmethionine:tRNA ribosyltransferase-isomerase OS=Listeria fleischmannii FSL S10-1203 OX=1265822 GN=queA PE=3 SV=1
MKVEDFDFDLPESLIAQTPLLDRTSSRLMVLDKTTGDISDEKFTTIIDYLNEGDALVLNDTRVLPARLHGIKEETGAHIEVLLLKQKEGNKWETLVKPAKRIRVGAKISFGEGELTAICTEELEHGGRILEFHYTGIFYEILENLGEMPLPPYIKEQLSDQDRYQTVYAKENGSAAAPTAGLHFTEELLETIRKKGIHICFVTLHVGLGTFRPVDVSDTENHKMHSEFYRLNAETAATLNEVKANGKKIVAVGTTSIRTLETIATKFDGELQADSGWTDIFIFPGYTFKAVDALITNFHLPKSTLIMLVSALSTRENILNAYHHAVEAKYRFFSFGDAMFIH

SEQ ID NO: 68310 - protein, 342 aa, unidentified
  source 1..342: note = Listeria fleischmannii
  REGION 1..342: note = tr|A0A2X3HD88|A0A2X3HD88_9LIST S-adenosylmethionine:tRNA ribosyltransferase-isomerase; OS = Listeria fleischmannii subsp. fleischmannii OX=1671902; GN = queA PE=3 SV=1
MKVEDFDFDLPESLIAQTPLLDRTSSRLMVLDKTTGDISDEKFTNIIDYLNEGDALVLNDTRVLPARLHGIKEETGAHIEVLLLKQKEGNKWETLVKPAKRIRVGAKISFGEGELTAICTEELEHGGRILEFHYTGIFYEILENLGEMPLPPYIKEQLSDQDRYQTVYAKENGSAAAPTAGLHFTEELLETIRKKGIHICFVTLHVGLGTFRPVDVSDTENHKMHSEFYRLNAETAAILNEVKANGKKIVAVGTTSIRTLETIATKFDGELQADSGWTDIFIFPGYTFKAVDALITNFHLPKSTLIMLVSALSTRENILNAYHHAVEAKYRFFSFGDAMFIH

SEQ ID NO: 68311 - protein, 343 aa, unidentified
  source 1..343: note = Listeria floridensis
  REGION 1..343: note = tr|W7C428|W7C428_9LIST S-adenosylmethionine:tRNA ribosyltransferase-isomerase OS=Listeria floridensis FSL S10-1187 OX=1265817 GN=queA PE=3 SV=1
MRVEDFNFDLPEELIAQTPLLDRTASRLMLVDKKTGALKDETFKAIVDELHAGDALVLNDTRVLPARLHGVKEETGAHIEVLLLKQKEGNTWETLVKPAKRIREGAKIRFGENGELEAVCLEELEHGGRILEFHYEGIFYEVLEQLGEMPLPPYIKEQLADQDRYQTVYARENGSAAAPTAGLHFTEELLEEIKQKGVKVCFLTLHVGLGTFRPVDVEDTDNHKMHSEFYRLTEETALTLREVKASGGKVIAVGTTSIRTLETIASKFDGEIVADSGWTDIFISPGYTFKAVDALITNFHLPKSTLIMLVSALASREIILNAYEHAVSERYRFFSFGDAMFIH

SEQ ID NO: 68312 - protein, 342 aa, Listeria grayi
  REGION 1..342: note = tr|D7UZ08|D7UZ08_LISGR S-adenosylmethionine:tRNA ribosyltransferase-isomerase OS=Listeria grayi DSM 20601; OX = 525367 GN=queA PE=3 SV=1
MKVEDFDFDLPEELIAQTPLLDRTASRLMVLNKETGAIDDKHFASIVDYLEPGDALVLNNTRVLPARLHGLKDETGAHIEVLLLKQKADNEWETLVKPAKRIRVGQTITFGNGELKAVCKEELEHGGRILEFHYEGIFYEVLENLGEMPLPPYIKEQLEDQGRYQTVYAKENGSAAAPTAGLHFTEALLDQIREKGVKVIFLTLHVGLGTFRPVDVADTDNHKMHSEFYRLTKEAAAELSEVKAAGKRIIAVGTTSIRTLETIASRNNGALVEESGWTDIFISPGFTFQAVDALITNFHLPKSTLIMLVSALSNRDIILHAYRHAVENRYRFFSFGDAMFIH

SEQ ID NO: 68313 - protein, 342 aa, Listeria grayi
  REGION 1..342: note = tr|A0A378MAJ4|A0A378MAJ4_LISGR S-adenosylmethionine:tRNA ribosyltransferase-isomerase; OS = Listeria grayi OX=1641 GN=queA PE=3 SV=1
MKVEDFDFDLPEELIAQTPLLDRTASRLMVLNKETGAIDDKHFASIVDYLEPGDALVLNNTRVLPARLHGLKDETGAHIEVLLLKQKADNEWETLVKPAKRIRVGQTITFGNGELKAVCKEELEHGGRILEFHYEGIFYEVLESLGEMPLPPYIKEQLEDQGRYQTVYAKENGSAAAPTAGLHFTEALLDQIREKGVKVIFLTLHVGLGTFRPVDVADTDNHKMHSEFYRLTKEAAAELSEVKAAGKRIIAVGTTSIRTLETIASRNNGALVEESGWTDIFISPGFTFQAVDALITNFHLPKSTLIMLVSALSNRDIILHAYRHAVENRYRFFSFGDAMFIH

SEQ ID NO: 68314 - protein, 342 aa, Listeria innocua
  REGION 1..342: note = sp|Q92BI3|QUEA_LISIN S-adenosylmethionine:tRNA ribosyltransferase-isomerase OS=Listeria innocua serovar 6a (strain ATCC BAA-680 / CLIP 11262) OX=272626 GN=queA; PE = 3SV=1
MKVEDFDFDLPEELIAQTPLLDRTSSRLMVLDKESGEIKDQHFTDIISYLNKGDALVLNDTRVLPARLHGIKDETGAHIEVLLLKQKEGNAWETLVKPAKRIRKGATITFGDGALKATCLEELEHGGRILEFSYEGIFYEVLEQLGEMPLPPYIKEQLADQDRYQTVYAKENGSAAAPTAGLHFTEELLAQISAKGVEIIFVTLHVGLGTFRPVDVEDTQNHKMHSEFYRLTEESADRINKIKSAGGKVVAVGTTSIRTLETIASRHDGKLIAESGWTDIFISPGYEFQAVDALITNFHLPKSTLIMLVSALSDRTKILAAYNHAVEQQYRFFSFGDAMFIH

SEQ ID NO: 68315 - protein, 342 aa, Listeria innocua; identical to SEQ ID NO: 68314
  REGION 1..342: note = tr|A0A5H5ASQ3|A0A5H5ASQ3_LISIO tRNA preQ1(34) S-adenosylmethionine ribosyltransferase-isomerase QueA; OS = Listeria innocua OX=1642 GN=queA PE=4 SV=1

SEQ ID NO: 68316 - protein, 342 aa, Listeria ivanovii
  REGION 1..342: note = tr|A0A097B5I6|A0A097B5I6_LISIV S-adenosylmethionine:tRNA ribosyltransferase-isomerase; OS = Listeria ivanovii subsp. londoniensis OX=202752 GN=queA; PE = 3 SV=1
MKVEDFDFDLPEELIAQTPLLDRTSSRLMVLDKATGEIKDQHFTDILSYLHEGDALVLNDTRVLPARLHGIKDETGAHIEVLLLKQKEGNTWEALVKPAKRIRQGATITFGDGALQATCLEELEHGGRILEFSYEGIFYEVLEQLGEMPLPPYIKEQLADQDRYQTVYAKENGSAAAPTAGLHFTEDLLAKIKEKGVEIIFVTLHVGLGTFRPVDVEDTTNHKMHSEFYRLTEEAAERINRVKETGGKVIAVGTTSIRTLETIASRHEGNIVAESGWTDIFISPGYTFRAVDALITNFHLPKSTLIMLVSALSDRNKILTAYNHAVEEQYRFFSFGDAMFIH

SEQ ID NO: 68317 - protein, 342 aa, Listeria ivanovii
  REGION 1..342: note = tr|G2Z9N0|G2Z9N0_LISIP S-adenosylmethionine:tRNA ribosyltransferase-isomerase OS=Listeria ivanovii (strain ATCC BAA-678 / PAM 55) OX=881621 GN=queA PE=3 SV=1
MKVEDFDFDLPEKLIAQTPLIDRTSSRLMVLDKTSGEIKDQHFTDILGYLNEGDALVLNDTRVLPARLHGIKDETGAHIEVLLLKQKEGNAWETLVKPAKRIRQGATITFGDGALKAICLEELEHGGRILEFSYEGIFYEVLEQLGEMPLPPYIKEQLADQNRYQTVYAKENGSAAAPTAGLHFTEELLGKMKAKGVEIIFVTLHVGLGTFRPVDVEDTANHKMHSEFYRLTEEAAERINQVKETGGKVVAVGTTSIRTLETIASRHEGNLVAESGWTDIFISPGYTFRAVDALITNFHLPKSTLIMLVSALSDRNKILTAYNHAVEEQYRFFSFGDAMFIH

SEQ ID NO: 68318 - protein, 342 aa, unidentified
  source 1..342: note = Listeria kieliensis
  REGION 1..342: note = tr|A0A3D8TV17|A0A3D8TV17_9LIST S-adenosylmethionine:tRNA ribosyltransferase-isomerase; OS = Listeria kieliensis OX=1621700 GN=queA PE=3 SV=1
MRVEDFDFDLPEELIAQTPLLDRTASRLMLVDKQTGELKDDTFKSIVSELHAGDALVLNDTRVLPARLHGIKEETGAHIEVLLLKQQEGNTWETLVKPAKRIRKGAKIKFGDGELEAVCLEELEHGGRILEFHYQGIFYEILEQLGEMPLPPYIKEQLEDGDRYQTVYAKENGSAAAPTAGLHFTEELLDEIKAKGVKVCFLTLHVGLGTFRPVDVEDTENHKMHSEFYRLTEETAVVLNDVKQNGGKIVAVGTTSIRTLETIATKFDGRIQADAGWTDIFISPGYTFKAVDALITNFHLPKSTLIMLVSALASRDIILHAYAHAVREEYRFFSFGDAMFIH

SEQ ID NO: 68319 - protein, 342 aa, Listeria marthii
  REGION 1..342: note = tr|E3YQH9|E3YQH9_9LIST S-adenosylmethionine:tRNA ribosyltransferase-isomerase OS=Listeria marthii FSL S4-120 OX=702457 GN=queA PE=3 SV=1
MKVEDFDFDLPEELIAQTPLLDRTSSRLMVLDKESGEIKDQHFTDIISYLNEGDALVLNDTRVLPARLHGIKDETGAHIEVLLLKQKEGNAWETLVKPAKRIRKGATITFGDGALKATCLEELEHGGRILEFTYEGIFYEVLEQLGEMPLPPYIKEQLADQDRYQTVYAKENGSAAAPTAGLHFTEDLLAKISAKGVEIIFVTLHVGLGTFRPVDVEDTTNHKMHSEFYRLTEESAARINQIKAQGGKVVAVGTTSIRTLETIASRHDGKLVAESGWTEIFISPGYTFQAVDALITNFHLPKSTLIMLVSALSDRTKILAAYNHAVEEQYRFFSFGDAMFIH

SEQ ID NO: 68320 - protein, 342 aa, Listeria monocytogenes
  REGION 1..342: note = sp|Q8Y6Z9|QUEA_LISMO S-adenosylmethionine:tRNA ribosyltransferase-isomerase OS=Listeria monocytogenes serovar 1/2a (strain ATCC BAA-679 / EGD-e) OX=169963; GN = queA PE =3 SV=1
MKVEDFDFDLPEELIAQTPLLDRTSSRLMVLDKESGDIKDQHFTDIISYLNEGDALVLNDTRVLPARLHGIKDETGAHIEVLLLKQKEGNAWETLVKPAKRIRKGATITFGDGALKATCLEELEHGGRILEFSYEGIFYEVLEQLGEMPLPPYIKEQLADQDRYQTVYAKENGSAAAPTAGLHFTEDLLEQISAKGVEIIFVTLHVGLGTFRPVDVEDTTNHKMHSEFYRLTEESAERINKIKAQGGKVVAVGTTSIRTLETIASRHDGKLVAESGWTEIFISPGYTFQAVDALITNFHLPKSTLIMLVSALSDRTKILAAYNHAVEEQYRFFSFGDAMFIH

SEQ ID NO: 68321 - protein, 342 aa, Listeria monocytogenes
  REGION 1..342: note = sp|B8DHL7|QUEA_LISMH S-adenosylmethionine:tRNA ribosyltransferase-isomerase OS=Listeria monocytogenes serotype 4a (strain HCC23) OX=552536 GN=queA PE=3 SV=1
MKVEDFDFDLPEELIAQTPLLDRTSSRLMVLDKESGDIKDQHFTDIISYLNEGDALVLNDTRVLPARLHGIKDETGAHIEVLLLKQKEGNAWETLVKPAKRIRKGATITFGDGALKATCLEELEHGGRILEFSYEGIFYEVLEQLGEMPLPPYIKEQLADQDRYQTVYAKENGSAAAPTAGLHFTEDLLAKISAKGVEIIFVTLHVGLGTFRPVDVEDTANHKMHSEFYRLTEESAERINKIKVQGGKVVAVGTTSIRTLETIASRHDGKLVAESGWTEIFISPGYTFQAVDALITNFHLPKSTLIMLVSALSDRTKILAAYNHAVEQQYRFFSFGDAMFIH

SEQ ID NO: 68322 - protein, 343 aa, unidentified
  source 1..343: note = Listeria riparia
  REGION 1..343: note = tr|W7D573|W7D573_9LIST S-adenosylmethionine:tRNA ribosyltransferase-isomerase OS=Listeria riparia FSL S10-1204 OX=1265816 GN=queA PE=3 SV=1
MRVEDFDFELPEELIAQTPLLDRTSSRLMLVNKETGAIEDAHFPAILEQLHAGDALVLNDTRVLPARLHGEKAETGAHIEVLLLKQKEGDAWETLVKPAKRIRKGMRIEFGDGELSAVCLEELEHGGRILQFEYSGIFYEILERLGEMPLPPYIKEQLEDQNRYQTVFARENGSAAAPTAGLHFTQDLLQKVRAKGVKVIFLTLHVGLGTFRPVDVEDTANHKMHSEFYRLTREAAQELNAVKAAGGKIVAVGTTSIRTLETIATKFDGELQEDSGWTDIFISPGYIFKAVDALITNFHLPKSTLIMLVSALAGREYIMAAYEHAVAERYRFFSFGDAMFIYA

SEQ ID NO: 68323 - protein, 343 aa, Listeria rocourtiae
  REGION 1..343: note = tr|A0A4V3DPT7|A0A4V3DPT7_9LIST S-adenosylmethionine:tRNA ribosyltransferase-isomerase; OS = Listeria rocourtiae OX=647910 GN=queA PE=3 SV=1
MRVEDFDFELPEELIAQTPLLDRTSSRLMLLNKETGAIEDKHFPAILEHLHAGDALVLNDTRVLPARLHGEKAETGAHIEVLLLKQTEGDAWETLVKPAKRIRKGMRIQFGDGELSAVCLEELEHGGRILQFEYSGIFYEILERLGEMPLPPYIKEQLADQDRYQTVFARENGSAAAPTAGLHFTQDLLEQVRKKGVKVVFLTLHVGLGTFRPVDAEDTANHKMHSEFYRLTAEAAHELQDVKASGGKIVAVGTTSIRTLETIATKFDGKLQEDSGWTEIFISPGYTFKAVDALITNFHLPKSTLIMLVSALSDREKIMVAYEHAVAQEYRFFSFGDAMFIYA

SEQ ID NO: 68324 - protein, 342 aa, Listeria seeligeri
  REGION 1..342: note = tr|A0A5B8AAK9|A0A5B8AAK9_LISSE S-adenosylmethionine:tRNA ribosyltransferase-isomerase; OS = Listeria seeligeri OX=1640 GN=queA PE=3 SV=1
MKVEDFDFDLPEELIAQTPLLDRTSSRLMVLDKATGEIKDQHFTDILSYLHEGDALVLNDTRVLPARLHGTKDETGAHIEVLLLKQKEGNAWETLVKPAKRIRQGATITFGDGALKATCLEELEHGGRILEFSYEGIFYEVLEQLGEMPLPPYIKEQLADQDRYQTVYAKENGSAAAPTAGLHFTEDLLAKIKAKGVEIIFVTLHVGLGTFRPVDVEDTANHKMHSEFYRLTEEAAERINKVKETGGKVVAVGTTSIRTLETIASRHEGELVAESGWTEIFISPGYTFQAVDALITNFHLPKSTLIMLVSALSDRNKILTAYNHAVEQQYRFFSFGDAMFIH

SEQ ID NO: 68325 - protein, 342 aa, Listeria seeligeri; identical to SEQ ID NO: 68324
  REGION 1..342: note = tr|E3ZQR7|E3ZQR7_LISSE S-adenosylmethionine:tRNA ribosyltransferase-isomerase OS=Listeria seeligeri FSL N1-067 OX=702453 GN=queA PE=3 SV=1

SEQ ID NO: 68326 - protein, 343 aa, Listeria sp.
  REGION 1..343: note = tr|A0A3N9TTU9|A0A3N9TTU9_9LIST S-adenosylmethionine:tRNA ribosyltransferase-isomerase; OS = Listeria sp. SHR_NRA_18 OX=2269046 GN=queA PE=3 SV=1
MRVEDFDFELPEELIAQTPLLDRTSSRLMLLNKETGAIEDKHFPAILEHLHAGDALVLNDTRVLPARLHGEKAETGAHIEVLLLKQTEGDAWETLVKPAKRIRKGMRIVFGDGELSAVCLEELEHGGRILQFEYSGIFYEILERLGEMPLPPYIKEQLADQDRYQTVFARENGSAAAPTAGLHFTEDLLNQVRAKGVKVVFLTLHVGLGTFRPVDVEDTANHKMHSEFYRLTAEAARELNDVKAADGKVVAVGTTSIRTLETIASKFDGKLQEDSGWTEIFISPGYAFKAVDALITNFHLPKSTLIMLVSALADREKIMAAYEHAVAQEYRFFSFGDAMFIYA

SEQ ID NO: 68327 - protein, 343 aa, unidentified
  source 1..343: note = Listeria weihenstephanensis
  REGION 1..343: note = tr|A0A1S7FUY6|A0A1S7FUY6_9LIST S-adenosylmethionine:tRNA ribosyltransferase-isomerase; OS = Listeria weihenstephanensis OX=1006155 GN=queA PE=3 SV=1
MRVEDFDFELPEELIAQTPLLDRTSSRLLLLNKETGAMEDKHFPAILEHLKDGDALVLNDTRVLPARLHGEKAETGAHIEVLLLKQMEGDAWETLVKPAKRIRKGMRIVFGNGELSAVCLEELEHGGRILQFEYSGIFYEILERLGEMPLPPYIKEQLEDQDRYQTVFARENGSAAAPTAGLHFTQDLLEQVRAKGVKVVFLTLHVGLGTFRPVDVEDTENHKMHSEFYRLTAEAAHELNVVKAAGGKIVAVGTTSIRTLETIASKFDGKLQEDSGWTEIFISPGYTFKAVDALITNFHLPKSTLIMLVSALADREKIMAAYEHAVAEKYRFFSFGDAMFIYA

SEQ ID NO: 68328 - protein, 343 aa, unidentified; identical to SEQ ID NO: 68327
  source 1..343: note = Listeria weihenstephanensis
  REGION 1..343: note = tr|W7CMD8|W7CMD8_9LIST S-adenosylmethionine:tRNA ribosyltransferase-isomerase OS=Listeria weihenstephanensis FSL R9-0317 OX=1265845 GN=queA PE=3 SV=1

SEQ ID NO: 68329 - protein, 342 aa, Listeria welshimeri
  REGION 1..342: note = sp|A0AIY0|QUEA_LISW6 S-adenosylmethionine:tRNA ribosyltransferase-isomerase OS=Listeria welshimeri serovar 6b (strain ATCC 35897 / DSM 20650 / SLCC5334); OX = 386043 GN =queA PE=3 SV=1
MKVEDFDFDLPEELIAQTPLLDRTSSRLMVLDKKSGEIKDQHFTDILSYLNEGDALVLNDTRVLPARLHGTKDETGAHIEVLLLKQKEGNAWETLVKPAKRIRKGGTITFGNGALKATCLEELEHGGRILEFSYEGIFYEVLEQLGEMPLPPYIKEQLADQDRYQTVYAKENGSAAAPTAGLHFTEDLLAQISAKGVEIIFVTLHVGLGTFRPVDVEDTANHKMHSEFYRLTEDAANRINKIKATGGKVVAVGTTSIRTLETIASHNEGKLVAESGWTDIFISPGYTFQAVDALITNLHLPKSTLIMLVSALSNRTNILAAYNHAVEQQYRFFSFGDAMFIH

SEQ ID NO: 68330 - protein, 343 aa, unidentified; identical to SEQ ID NO: 68326
  source 1..343: note = Listeriaceae bacterium
  REGION 1..343: note = tr|A0A099W1F1|A0A099W1F1_9LIST S-adenosylmethionine:tRNA ribosyltransferase-isomerase; OS = Listeriaceae bacterium FSL A5-0209 OX=1497679 GN=queA; PE = 3 SV=1

SEQ ID NO: 68331 - protein, 345 aa, Litoreibacter albidus
  REGION 1..345: note = tr|A0A1H2XIN0|A0A1H2XIN0_9RHOB S-adenosylmethionine:tRNA ribosyltransferase-isomerase; OS = Litoreibacter albidus OX=670155 GN=queA PE=3 SV=1
MKLSDFDFELPEQLIATRPAVPRSASRLLVATPDTLEDKAVTDLGDYLRAGDVLVLNDTKVIPARLFGHRARDGNLSKMEVTLLSPTVDGAWRALVKPLRKVRDGEVITFAAGLEAEVISRADGQATMVFNREGQAFDDALAEAGQMPLPPYIAAKRAADAQDKTDYQTVFAKTTGAVAAPTASLHFDEALLAKLAAKGVEFADVTLHVGAGTFLPVKVDDVKTHKMHAEWGNVSAEAAKIIATAKAEGRRVIPVGTTALRLIESAATGAGQIAPWQGETEIFIYPGYAFQIADALMTNFHLPKSTLMMLVSALMGQQRVCEIYDHAIAHEYRFFSYGDSSLLLP

SEQ ID NO: 68332 - protein, 345 aa, unidentified
  source 1..345: note = Litoreibacter arenae
  REGION 1..345: note = tr|S9QCL5|S9QCL5_9RHOB S-adenosylmethionine:tRNA ribosyltransferase-isomerase OS=Litoreibacter arenae DSM 19593 OX=1123360 GN=queA PE=3 SV=1
MKLSDFDFDLPERLIATRPAVPRSASRLLVASPTKIDDRTVTDLPDLLQDGDLLVLNDTKVIPARLFGHRERDGNVSKIEVTLLSPTPDGTWRALVKPLRKVRDGEAITFAAGLEASLLSRDDGQAVLSFNRQGKAFDDALAEAGQMPLPPYIAAKRAADEQDKTDYQTVFAKTTGAVAAPTASLHFDEPLLDKLKAKGVQFAHVTLHVGAGTFLPVKVDDVKTHKMHAEWGQVSQEAASQIKAAKEQGRRVVPVGTTALRLIESAASAQGEIAPWEGETDIFIYPGFEFKITDALMTNFHLPKSTLMMLVSALMGQQRVREIYTHAIDSDYRFFSYGDSSLLLP

SEQ ID NO: 68333 - protein, 345 aa, unidentified
  source 1..345: note = Litoreibacter ascidiaceicola
  REGION 1..345: note = tr|A0A1M4VMZ5|A0A1M4VMZ5_9RHOB S-adenosylmethionine:tRNA ribosyltransferase-isomerase; OS = Litoreibacter ascidiaceicola OX=1486859 GN=queA PE=3; SV = 1
MKLSDFDFDLPEQLIATRPAVPRSASKLLVATPDRIEDRVVTDLVDYLNAGDVLVLNDTKVIPARLFGHRERAGNISKMEVTLLSPTTDGRWRALVKPLRKVRDGEAITFAAGLEAEVLSRTDGQAVLGFNLEGQAFDDALAIAGQMPLPPYIAAKRAADAQDKTDYQTVFAKTSGAVAAPTASLHFDDDLLSRLTEIGVEFVHVTLHVGAGTFLPVKVDDVKTHKMHAEWGQVSKHAAERINAAKAEGRRVIPVGTTALRLIESAATSNRVIAPWQGETEIFIYPGYAFRIADALMTNFHLPKSTLMMLVSALMGQERVRQIYDHAISQEYRFFSYGDSSLLLP

SEQ ID NO: 68334 - protein, 345 aa, unidentified
  source 1..345: note = Litoreibacter halocynthiae
  REGION 1..345: note = tr|A0A4R7LS16|A0A4R7LS16_9RHOB S-adenosylmethionine:tRNA ribosyltransferase-isomerase; OS = Litoreibacter halocynthiae OX=1242689 GN=queA PE=3 SV=1
MKLSDFDFDLPEQLIATRPAVPRSASKLLVATPDRIEDRVVTDLVDYLHAGDVLVLNDTKVIPARLFGHRERDGNISKMEVTLLSPTTDGTWRALIKPLRKVRDGEAITFAAGLVAEVLSRTDGQAVLGFNLEGQAFDDALAIAGQMPLPPYIAAKRAADAQDKTDYQTVFAKTSGAVAAPTASLHFDAELLDRLSKVGVEFVHVTLHVGAGTFLPVKVDDVETHKMHAEWGQVSKHAAERISAAKAEGRRVIPVGTTALRLIESAAKSNGVIAPWQGETDIFIYPGYAFQIADALMTNFHLPKSTLMMLVSALMGQERVRQIYDHAISQEYRFFSYGDSSLLLP

SEQ ID NO: 68335 - protein, 345 aa, Litoreibacter janthinus
  REGION 1..345: note = tr|A0A1I6H195|A0A1I6H195_9RHOB S-adenosylmethionine:tRNA ribosyltransferase-isomerase; OS = Litoreibacter janthinus OX=670154 GN=queA PE=3 SV=1
MKLSDFDFDLPERLIATRPVVPRSASRLLVATPDQLSDKSVFDLPDLLGAGDLLVLNDTKVIPARLFGHRERDGNVSKIEVTLLSPTPDGTWRALVKPLRKVRDGESITFAAGLEATLLGRDDGQATLAFNLQGQAFDDALAEAGQMPLPPYIAAKRAADAQDKTDYQTVFAKTTGAVAAPTASLHFDQALLERLAANGVEFAHVTLHVGAGTFLPVKVEDVQTHKMHAEWGRVPEAAAAQISAAKTEGRRVIPVGTTALRLIESAATGDGQIGPWQGETDIFIYPGFTFQIADALMTNFHLPKSTLMMLVSALMGQQRVREIYDHAIAHDYRFFSYGDSSLLLP

SEQ ID NO: 68336 - protein, 345 aa, unidentified
  source 1..345: note = Litoreibacter meonggei
  REGION 1..345: note = tr|A0A497VH96|A0A497VH96_9RHOB S-adenosylmethionine:tRNA ribosyltransferase-isomerase; OS = Litoreibacter meonggei OX=1049199 GN=queA PE=3 SV=1
MKLSDFDFALPEHLIATRPAVPRSASKLLVATPDRIEDRVVTDLVDYLRAGDVLVLNDTKVIPARLFGHRDRDGNVSKMEVTLLSPTSNGTWRALVKPLRKVRDGEVITFAAGLEAELLSRDDGQAVLGFNLEGQAFDDALAVAGQMPLPPYIAAKRVADTQDKTDYQTVFARTTGAVAAPTASLHFDTELLLRLTESGIELAHVTLHVGAGTFLPVKVDDVKTHKMHAEWGQVSEDAVARINAAKAEGRRVIPVGTTALRLIESAATKAGQIVPWQGETDIFIYPGFKFQIADALMTNFHLPKSTLMMLVSALMGQERVRQIYDHAIEHEYRFFSYGDSSLLLP

SEQ ID NO: 68337 - protein, 349 aa, unidentified
  source 1..349: note = Litoreibacter ponti
  REGION 1..349: note = tr|A0A2T6BI63|A0A2T6BI63_9RHOB S-adenosylmethionine:tRNA ribosyltransferase-isomerase; OS = Litoreibacter ponti OX=1510457 GN=queA PE=3 SV=1
MKLDEFDFALPEQLIATRPAVPRSSARLLVAGPEAIEDRVVTDLPDYLRRGDLLVLNDTKVIPARLFGHRERDGNVSKMEVTLLSPTPSGDWRALIKPLRKVRDGERITFAVGLDATVLGREDGQAELSFNLQGADFDAALEIAGQMPLPPYIAAKRAADARDKTDYQTVWARETGAVAAPTASLHFDAPLLEALAAKGVQFAHVTLHVGAGTFLPVKVEDVTTHKMHAEWGHVSAAAAAQINATKDAGGRVIPVGTTALRLIESAATGPGQIAPWQGETDIFIYPGFEFQVADGLMTNFHLPKSTLMMLVSALMGQDRIREIYDHAVAQAYRFFSYGDSSLLLPNDAR

SEQ ID NO: 68338 - protein, 351 aa, Litoreibacter sp.
  REGION 1..351: note = tr|A0A5B8ITU0|A0A5B8ITU0_9RHOB S-adenosylmethionine:tRNA ribosyltransferase-isomerase; OS = Litoreibacter sp. LN3S51 OX=2599296 GN=queA PE=3 SV=1
MHLSDFDFDLPEDLIATRPAKPRSSARMLVAQGGGIQDRIVNELPGILRPGDRLVLNDTKVLPARLSGVRRRAGPDGEGIARIEVTLLDPQSDGRWTALIKPLRKLRDGEEIEFSNTLRAEMLSRDDQGVALLRLSEDGDALEKALDESGMMPLPPYIASKRAADDQDKLDYQTVFAKRTGAVAAPTASLHFDEPLLAALAARGVEFTNVTLHVGAGTFLPVKVDDPRHHKMHAEWGEVSAQAADEIAQTKANGGRVIPVGTTALRLIETAARDSGQVEPWSAPTDIFIYPGFNFHVADALMTNFHLPKSTLMMLVSAFMGTERIREIYAHALQQKYRFFSYGDASLLIPD

SEQ ID NO: 68339 - protein, 349 aa, unidentified
  source 1..349: note = Litoricolaceae bacterium
  REGION 1..349: note = tr|A0A520S3F1|A0A520S3F1_9GAMM S-adenosylmethionine:tRNA ribosyltransferase-isomerase; OS = Litoricolaceae bacterium OX=2510333 GN=queA PE=3 SV=1
MKRHDFSYQLPEDLVASAPLDNRTDSRLMVIHPAQPIMHQHVSDLPSMIRPGDVVVANNTRVFPARLFGAKESGGRAEVMIERLISDNRARAFVKASKSPKIGSVLSMDGGFELTITGRDGDLFLLDSDPSVCILDMAEAYGHVPLPPYIKRDDTATDKERYQTVFAKDAGAVAAPTAGLHLDQSLIEEIKVRGAHWCEITLHVGAGTFTPVRVDDLSEHQMHGEWYHISDDAESIIQSAKAEGRRIFAIGTTTMRCLEGSAAVNGGQIRAGSSETSIFITPGYKFNVIDVLFTNFHLPESTLLMLVSAFGGFDRVLAAYQEAVQARYRFFSYGDACLIIRDPEAGGAS

SEQ ID NO: 68340 - protein, 353 aa, unidentified
  source 1..353: note = Litoricolaceae bacterium
  REGION 1..353: note = tr|A0A520S777|A0A520S777_9GAMM S-adenosylmethionine:tRNA ribosyltransferase-isomerase; OS = Litoricolaceae bacterium OX=2510333 GN=queA PE=3 SV=1
MRSPLKRQDFAYQLPEDLIASQPLDNRTDSRLMVIHPGQPFAHRQVSDLPSLIRAGDVVVANNTRVFPARLFGAKASGGRIEVMIERLLSEHAVRAFVKASKSPKDGAVLHMDGGFELTITGRDGDLFLLESDPSLRILEMAEAHGHIPLPPYIKRDDTASDRERYQTVFAKDSGAVAAPTAGLHIDESMIQAIKEQGATWCEVTLHVGAGTFNPVRVDDLSEHQMHGEWYNISPEVCETIQEARATGRRIIAIGTTTMRCLEGSAAANGGQIKAGSDETSIFITPGYQFNVIDMLFTNFHLPESTLLMLVSAFGGYERMMAAYQEAVREGYRFFSYGDACLMMRDPEASHAS

SEQ ID NO: 68341 - protein, 371 aa, unidentified
  source 1..371: note = Litorilinea aerophila
  REGION 1..371: note = tr|A0A540VGS8|A0A540VGS8_9CHLR S-adenosylmethionine:tRNA ribosyltransferase-isomerase; OS = Litorilinea aerophila OX=1204385 GN=queA PE=3 SV=1
MKTALFDYDLPPELIAQEPAEPRDSSRLMVLHRADGRIEHRRFRDIGDYLRAGDLLVANDSRVIPARLHGHKSTGGKVEIFLLRKLDQAGSEWECLTRGRNLVAGVQVQVEPLASGEEEPAPPVEATIVAVNPSGTRVVRFAQPISPYLHQLGEIPLPPYITAYQGDRERYQTVYSRPEGSVAAPTAGLHFTPELLVALRKQGVGFETVTLHVGLDTFKPVEAEEVEKHTIHTEWAELSADTARRINQVSLQGGRIVAVGTTTVRTLEWAATGAQGIDPYDPQACPWQRTAAFAGPVDLYIYPGYRFRAVDGLITNFHLPRSSLLMLVSAFVGQHHPEDLDWGRRTLLAAYEVAKQEGYRFYSFGDAMLIL

SEQ ID NO: 68342 - protein, 353 aa, unidentified
  source 1..353: note = Litorilituus sediminis
  REGION 1..353: note = tr|A0A4P6P5M0|A0A4P6P5M0_9GAMM S-adenosylmethionine:tRNA ribosyltransferase-isomerase; OS = Litorilituus sediminis OX=718192 GN=queA PE=3 SV=1
MRVSDFSFNLPEELIARYPKADRTGSRLMTLDGNSGRIQDLGFVDIIEQLNAGDLLVFNNTRVIPARMFGQKSTGGKIEVLVERMLDQHSVLAHIRSSKSPKVDAELLFAGKENAEIKATMVARHGALFELKFHGEQGVLNILEDIGHMPLPPYIDRPDEDSDKERYQTVYNEKPGAVAAPTAGLHFDEAILEKIKAKGVELAFVTLHVGAGTFQPVKVDEIADHIMHAEYVEVPDEVVQQIQNTKARGGRIVAVGTTSVRSLESAAKAASDKGEALSAFYGDTDIFITPGYQFKLVDALLTNFHLSESTLLMLVSAFAGYEHIMPAYQHAIKEKYRFFSYGDAMFLTKQTSA

SEQ ID NO: 68343 - protein, 352 aa, unidentified
  source 1..352: note = Litorilituus sp.
  REGION 1..352: note = tr|A0A502LA85|A0A502LA85_9GAMM S-adenosylmethionine:tRNA ribosyltransferase-isomerase; OS = Litorilituus sp. RZ04 OX=2491017 GN=queA PE=3 SV=1
MRVSDFSFDLPEELIARYPMANRTGSRLMTLNGDTGERNDLNFTDIIEQLNAGDLLVFNNTRVIPARMYGQKSTGGKIEVLVERIVDQHTALAHIRASKSPKVGAELVLQNESGASVNATMVGRQGALFELKFHGDESVLTVLENIGHMPLPPYIDRPDEDSDKERYQTVYNEKPGAVAAPTAGLHFDEAILEKIKAKGVELAFVTLHVGAGTFQPVKVDEISDHIMHAEYVEVPADVVEQIRTTKASGGRVVAVGTTSVRSLESAAKTAKEQNQPLTEFYGDTDIFITPGYEFLVVDALLTNFHLSESTLLMLVSAFAGYEHIMPAYQHAIEQKYRFFSYGDAMFLTKKSI

SEQ ID NO: 68344 - protein, 350 aa, Litorimicrobium taeanense
  REGION 1..350: note = tr|A0A1H8YW50|A0A1H8YW50_9RHOB S-adenosylmethionine:tRNA ribosyltransferase-isomerase; OS = Litorimicrobium taeanense OX=657014 GN=queA PE=3 SV=1
MNLSDFDFDLPEALIATRPVSPRSSARLLVAEGDQITDAQVFNLPDWLRPGDRLVLNDTKVIPARLSGTRRRMGPEGETEARIEATLLEPRAGGAWAALLKPLKKVREGEVIRFSDALSATLLAKEDGQAVLEFNLLGDDFDAALAQAGAMPLPPYIAAKRAADEQDKTDYQTIFARHSGAVAAPTASLHFDDALLAALRAKGVAFTHVTLHVGAGTFLPVKVDDVTTHKMHAEWGEVSATAAAEIAATKAAGGRVIPVGTTALRLIETAARGGQIAPWQGDTDIFIYPGFTFNVADALMTNFHLPKSTLMMLVSALMGQDTVRHIYAHAIAEGYRFFSYGDASLLIPAR

SEQ ID NO: 68345 - protein, 352 aa, Litorimonas taeanensis
  REGION 1..352: note = tr|A0A420WKR2|A0A420WKR2_9RHOB S-adenosylmethionine:tRNA ribosyltransferase-isomerase; OS = Litorimonas taeanensis OX=568099 GN=queA PE=3 SV=1
MDVSLFDFTLPEAAIALRPSVPRDSAKLLHVSAAGEFSDHRVSDLATLLNAGDVLVLNETKVFSAALKGVRPARSHGGGGAVTVDVNLHTPETDMTWRAFVRPAKRVREGDVLTFSDELKGVISDKREGGDVAITFECEGDLMASIDAAGEPPLPPYIARKRKPDAQDVEDYQTVYAQEAGSVAAPTAGLHFTPEVFQSLSDKGVELARLILHVGAGTFLPVKSEDTSAHKMHSERYTISDSTAAQINKAKAEGRRIVAVGTTSLRALESSVDEVGKVQSGSAETEIFLTPGSDFKVIDGLMTNFHLPKSTLFMLVSAIAGLDRMQSAYAYAIENNYRFYSYGDSSLIWKAD

SEQ ID NO: 68346 - protein, 352 aa, Loktanella atrilutea
  REGION 1..352: note = tr|A0A1M4T4E6|A0A1M4T4E6_9RHOB S-adenosylmethionine:tRNA ribosyltransferase-isomerase; OS = Loktanella atrilutea OX=366533 GN=queA PE=3 SV=1
MKLSDFDFDLPDGLIATRPARPRTAARLLVATPDTMTDATVSDLGDWLRPGDRLVLNDTRVIPARLDGLRHRSGEAGETVARIEVTLLQPTPEGHWSALLKPLKKVRDGEEIVFGDALRATVTGRAEGQAILSFNLTGDAFDATLNSVGAMPLPPYIAALRPADEADRTDYQTAWAKHTGAVAAPTASLHFDAALLDRLAAKGVQFTHVTLHVGAGTFLPVKVDDIAEHRMHSEWGQVTPQAAEEINATRAAGGRIIPVGTTALRLIETAATERGVQPWEGPTDIFITPGFRFRAADALMTNFHLPKSTLMMLVSALMGRQRIRDIYEHAISSRYRFFSYGDASLLLPQGAD

SEQ ID NO: 68347 - protein, 353 aa, Loktanella fryxellensis
  REGION 1..353: note = tr|A0A1H7YS70|A0A1H7YS70_9RHOB S-adenosylmethionine:tRNA ribosyltransferase-isomerase; OS = Loktanella fryxellensis OX=245187 GN=queA PE=3 SV=1
MKLSDFDFDLPDGLIATRPARPRTAARLLVATPDTLTDATVADLGLWLRPGDRLVLNDTKVIPARLDGVRHRSGEAGDTVARIEVTLLEPTPAGHWMALVKPLKKVRDGEEIVFGDALSARVVGRADGQAELAFDLTGDAFDAALAQVGAMPLPPYIAALRPADDADRDDYQTAWARTPGAVAAPTASLHFDADLLAALAGSGVTFTHVTLHVGAGTFLPVKVDDVTQHKMHSEWGQVTPQAAAEIAATKAAGGRIIPVGTTALRLIETAARSGTIAAWEGPTDIFITPGFRFRVADALMTNFHLPKSTLMMLVSALMGQDRIRAVYDHAIAERYRFFSYGDASLLLPHRDAS

SEQ ID NO: 68348 - protein, 352 aa, Loktanella salsilacus
  REGION 1..352: note = tr|A0A1I4BPJ1|A0A1I4BPJ1_9RHOB S-adenosylmethionine:tRNA ribosyltransferase-isomerase; OS = Loktanella salsilacus OX=195913 GN=queA PE=3 SV=1
MKLSDFDFDLPEGLIATRPARPRTSARLLVATPDSITDAVVSDLGDWLRPGDRMILNDTKVIPARLEGLRHRSGEAGDTAARIEVTLLQPTPDAHWMALLKPLKKVRDGEEIVFGDDLRATVVGRSDGQAELQFNLTGDDFDAALLQVGAMPLPPYIAALRPADAADKEDYQTAWARHTGAVAAPTASLHFDAALLDQLAAKGVQFTHVTLHVGAGTFLPVKVDDVSEHKMHSEWGQVTQAAADQINATRAAGGRIIPVGTTALRLIETAATDDGVQAWEGPTDIFITPGFKFRAADALMTNFHLPKSTLMMLVSALMGQSRIRDVYKHAISSRYRFFSYGDASLLLPQGDA

SEQ ID NO: 68349 - protein, 351 aa, Loktanella sp.
  REGION 1..351: note = tr|A0A4Q3Y8T6|A0A4Q3Y8T6_9RHOB S-adenosylmethionine:tRNA ribosyltransferase-isomerase; OS = Loktanella sp. IMCC34160 OX=2510646 GN=queA PE=3 SV=1
MKLSDFDFDLSEDLIATRPARPRSSARLLLAVGDGIDDRHVFDLPDILRPGDRLVLNDTKVIPARLTGLRRRSGPEGETEARIEATLLEPRADGTWGALLKPLKKVRDGEVIVFSPDLSATVEGRADGQGHLRFNLTGEDFDTALAEAGAMPLPPYIAALRAPDEQDKQDYQTVWARNSGAVAAPTASLHFDEPLMAALAVRGVDLTHVTLHVGAGTFLPVKVDDIRDHKMHAEWGEVTEKAVADIMATKAAGGRVIPVGTTALRLIESAAVGGTLTPWRGETDIFITPGFTFNVADGLMTNFHLPKSTLMMLVSAFMGVDRIRRIYDHAVAGKYRFFSYGDASLLLPGGQ

SEQ ID NO: 68350 - protein, 354 aa, Loktanella sp.
  REGION 1..354: note = tr|A0A0F4RMH9|A0A0F4RMH9_9RHOB S-adenosylmethionine:tRNA ribosyltransferase-isomerase; OS = Loktanella sp. S4079 OX=579483 GN=queA PE=3 SV=1
MKLSDFDFDLPEELIATRPARPRSSAKLLFARGQDISDRIVSDLVDILQPGDRLVLNDTKVIPARLSGQRFRNGENGLTHSKIEVTLLEPRANGDWAALIKPLRKIRDGEDIVFSDELSANVTGRADGQAFLRFNLTGDDFDVALAAVGAMPLPPYIAAKRPADEADKEDYQTYWARHSGAVAAPTASLHFDGPLLDALAERGVSFTHVTLHVGAGTFLPVKVDDVRDHKMHSEWGEVTPQAAAEINATKAAGGRVIPVGTTALRLIETAARDGAIAPWTGPTDIFIMPGFTFQVADGLMTNFHLPKSTLMMLVSALMGQDKIKQIYAHAIAAGYRFFSYGDASLLFPADTKSP

SEQ ID NO: 68351 - protein, 359 aa, Lonepinella koalarum
  REGION 1..359: note = tr|A0A5D1ZSI1|A0A5D1ZSI1_9PAST S-adenosylmethionine:tRNA ribosyltransferase-isomerase; OS = Lonepinella koalarum OX=53417 GN=queA PE=3 SV=1
MLVSDFYFDLPDELIARYPKPDRTSSRLLQLNGQNGEIFHRTFADVLDLVNAGDLLVFNNTRVIPARMFGRKVSGGKVEVLVERVLSESTFLAHIRSSKAPKNEAVLVLGEDKLGENNGIAVTMLGRQGALFELEIADKNTAVLDVLNKIGHIPLPPYIDRPDEEADQERYQTVYNKIPGAVAAPTAGLHFDDELLAKLKAKGVNFAFVTLHVGAGTFQPVRVEKIEDHQMHAEYVEVPQDVVDAVLATKSAGKRVIAVGTTSVRSLESAALFAEEKGCSQIIEPYFSDTSIFIYPGKKFRVVDCLITNFHLPESTLIMLVSAFAGYENVMKSYRSAVENRYRFFSYGDAMFISKKVDV

SEQ ID NO: 68352 - protein, 359 aa, Lonepinella koalarum
  REGION 1..359: note = tr|A0A4R1KUR3|A0A4R1KUR3_9PAST S-adenosylmethionine:tRNA ribosyltransferase-isomerase; OS = Lonepinella koalarum OX=53417 GN=queA PE=3 SV=1
MLVSDFYFDLPDELIARYPKPDRTSSRLLQLNGQNGEIFHRTFADVLDLVNAGDLLVFNNTRVIPARMFGRKVSGGKVEVLVERVLSESTFLAHIRSSKAPKNGAILVLGEDKLGENNGIAVTMLGRQGALFELEIADKNTAVLDVLNKIGHIPLPPYIDRPDEEADQERYQTVYNKIPGAVAAPTAGLHFDDELLAKLKAKGVNFAFVTLHVGAGTFQPVRVEKIEDHQMHAEYVEVSQDVVDAVLATKSAGKRVIAVGTTSVRSLESAALFAEEKGSSQIIEPYFSDTSIFIYPGKKFRVVDCLITNFHLPESTLIMLVSAFAGYENVMAAYKSAVENRYRFFSYGDAMFISKKVDV

SEQ ID NO: 68353 - protein, 348 aa, unidentified
  source 1..348: note = Longibacter salinarum
  REGION 1..348: note = tr|A0A2A8CWB7|A0A2A8CWB7_9BACT S-adenosylmethionine:tRNA ribosyltransferase-isomerase; OS = Longibacter salinarum OX=1850348 GN=queA PE=3 SV=1
MKRSEFTYEFPEELTAEYPAEPRDSCRLMVLNREKERVEHHHFHELPDFYNPGDVIVVNNTKVYPARIYGKKKKTGAKIEVFLLRELNPESRLWDVMVDPARKIRIGNKLWFDDELSAEVIDNTTSRGRTIRLNFDGRNDDLYEKIRELGETPLPPYIKRDVESEDEDRYQTIFAEERGAVAAPTAGLHFTPELIERLKEKGVHICNITLHVGRGTFRPVGVEDLTKHRMDSEEFTIPKDTADKVNKALQSEENSVTAVGTTVVRTLESSLSASQLLKADHSWTDLFVYPPFEFKITERLITNFHRPESTLLMMTSAFAGYDFLFEAYEEAFEEGYQLFSFGDAMLIV

SEQ ID NO: 68354 - protein, 347 aa, unidentified; identical to SEQ ID NO: 64949
  source 1..347: note = Longibaculum muris
  REGION 1..347: note = tr|A0A4R3Z2P1|A0A4R3Z2P1_9FIRM S-adenosylmethionine:tRNA ribosyltransferase-isomerase; OS = Longibaculum muris OX=1796628 GN=queA PE=3 SV=1

SEQ ID NO: 68355 - protein, 339 aa, Longilinea arvoryzae
  REGION 1..339: note = tr|A0A0S7BJ42|A0A0S7BJ42_9CHLR S-adenosylmethionine:tRNA ribosyltransferase-isomerase; OS = Longilinea arvoryzae OX=360412 GN=queA PE=3 SV=1
MKTSDFDYPLPLERIAQTPVEPRHNSRLMVLRRDRTEIEHTVFYRVGEYLNPGDLLVINRTRVIPARIYALKTTGGRVELLLLRREDETTWEALVGGKGLLAGKRVTIPNGPQAEVIEVLEGSRRRIRFSAPVEGYLPSIGQMPLPPYIHTHLENQERYQTVYADRPGSAAAPTAGLHFTPELMGQLREQGVRFAEVTLHVGLDTFAPVTEDDPGEHKIHTEWCELNPETADLINATRKAGRRIIAVGTTSVRTLESAAQKAASGDAVAPFCGPTSIFILPGYTFGAVDGMITNFHLPKSTLIMLVSAFAGRERILAAYQEAIRLEYRFFSFGDAMLLL

SEQ ID NO: 68356 - protein, 348 aa, unidentified
  source 1..348: note = Longimonas halophila
  REGION 1..348: note = tr|A0A2H3P8M1|A0A2H3P8M1_9BACT S-adenosylmethionine:tRNA ribosyltransferase-isomerase; OS = Longimonas halophila OX=1469170 GN=queA PE=3 SV=1
MKRSEFSYDYPKELIAEYPAEPRDSCRLMVVNRDDQTVEHTVFNQLPKYFNEGDVIVVNNTKVYPARLFGKKKKTGASIEVFLLRELNPESRLWDVMVDPARKIRIGNKLYFDRELSAEVIDNTTSRGRTLRLHFTGTNEELYAKIRELGQTPLPPYIDREVEEEDRDRYQTIFAEHRGAVAAPTAGLHFTPELIQALRDKGVHVAEVTLHVGRGTFRPVGVEDLTKHRMDSEQYTIPEETAEAVNRALRSEDNTVTAIGTTVVRTIESSLSANQMLKADSSWTDLFIYPPYDFQITDQLVTNFHRPESTLIMMVSAFAGYDFVMEFYQEAFDEEYRLFSFGDAMLIR

SEQ ID NO: 68357 - protein, 356 aa, unidentified
  source 1..356: note = Lonsdalea britannica
  REGION 1..356: note = tr|A0A1X3RYX4|A0A1X3RYX4_9GAMM S-adenosylmethionine:tRNA ribosyltransferase-isomerase; OS = Lonsdalea britannica OX=1082704 GN=queA PE=3 SV=1
MRVADFSFELPESLIAHYPQAQRSGCRLLSLDGPSGETSLGIFSDLLDKLEPGDLLVFNNTRVIPARLFGRKASGGKLEVLVERVLDEHRVLAHVRASKAPKPGAELVLGEDESVAATMLSRQDALFEIRFDDPRDVLTILNDIGHIPLPPYIDRPDEDADRELYQTVYSQRPGAVAAPTAGLHFDEPLLAALRDKGIEMAFVTLHVGAGTFQPVRVDSIEDHVMHAEYAEVPQDVVDAVLACKARGNRVIAVGTTSVRSLESAAQASSEAMIAPFFGDTRIFIYPGYHYRVIDALVTNFHLPESTLIMLVSAFAGYRHTMNAYRQAVAEQLRFFSYGDAMFITRNPEAEQEHVGE

SEQ ID NO: 68358 - protein, 356 aa, unidentified
  source 1..356: note = Lonsdalea iberica
  REGION 1..356: note = tr|A0A1X3RX76|A0A1X3RX76_9GAMM S-adenosylmethionine:tRNA ribosyltransferase-isomerase; OS = Lonsdalea iberica OX=1082703 GN=queA PE=3 SV=1
MRVADFSFELPESLIAHYPQAQRSGCRLLSLDGPSGETSLGIFSDLLDKLEPGDLLVFNNTRVIPARLFGRKASGGKLEVLVERVLDEHRVLAHVRASKAPKPGAELVLGEDESVVATMLSRQDALFEIRFDDPRDVLTILNDIGHIPLPPYIDRPDEDADRELYQTVYSQRPGAVAAPTAGLHFDEPLLAALRDKGIEMAFVTLHVGAGTFQPVRVDSIEDHVMHAEYAEVPQDVVDAVLACKARGNRVIAVGTTSVRSLESAAQASSDAIIAPFFGDTRIFIYPGYHYRVIDALVTNFHLPESTLIMLVSAFAGYRHTMNAYRRAVAEQLRFFSYGDAMFITRNPEAEQEHVGE

SEQ ID NO: 68359 - protein, 356 aa, unidentified
  source 1..356: note = Lonsdalea populi
  REGION 1..356: note = tr|A0A3N0UHT4|A0A3N0UHT4_9GAMM S-adenosylmethionine:tRNA ribosyltransferase-isomerase; OS = Lonsdalea populi OX=1172565 GN=queA PE=3 SV=1
MRVADFSFELPESLIAHYPQAQRSACRLLSVDGPSGETSLGIFSDLLDKLEPGDLLVFNNTRVIPARLFGRKASGGKLEVLVERVLDEHRVLAHVRASKAPKPGAELVLGEDESVAATMLSRQDALFEIRFDDPRDVLTILNDIGHIPLPPYIGRPDEEADRELYQTVYSQRPGAVAAPTAGLHFDEPLLAALRKKGIEMAFVTLHVGAGTFQPVRVDSIEDHVMHAEYAEVPQDVVDAVLACKARGNRVIAVGTTSVRSLESAAQTCSDAVIAPFFGDTRIFIYPGYHYRVIDALVTNFHLPESTLIMLVSAFAGYRHTMNAYRQAVAEQLRFFSYGDAMFITRNPKAEQEHVGE

SEQ ID NO: 68360 - protein, 356 aa, unidentified
  source 1..356: note = Lonsdalea quercina
  REGION 1..356: note = tr|A0A1H3WBE5|A0A1H3WBE5_9GAMM S-adenosylmethionine:tRNA ribosyltransferase-isomerase; OS = Lonsdalea quercina OX=71657 GN=queA PE=3 SV=1
MRVADFSFELPESLIAHYPQAQRSGCRLLSLDGPSGETSLGIFSDLLDKLEPGDLLVFNNTRVIPARLFGRKASGGKLEVLVERVLDAHRVLAHVRASKAPKPGAELVLGEDESVAATMLSRQDALFEIRFDDPRDVLTILNDIGHIPLPPYIDRPDEDADRELYQTVYSQRPGAVAAPTAGLHFDEPLLAALRDKGIEMAFVTLHVGAGTFQPVRVDSIEDHVMHAEYAEVPQDVVDAVLACKARGNRVIAVGTTSVRSLESAAQASSEAIIAPFFGDTRIFIYPGYHYRVIDALVTNFHLPESTLIMLVSAFAGYRHTMNAYRLAVAEQLRFFSYGDAMFITRNPGAEQESVGE

SEQ ID NO: 68361 - protein, 339 aa, unidentified
  source 1..339: note = Lucifera butyrica
  REGION 1..339: note = tr|A0A498R0L5|A0A498R0L5_9FIRM S-adenosylmethionine:tRNA ribosyltransferase-isomerase; OS = Lucifera butyrica OX=1351585 GN=queA PE=3 SV=1
MQLSDFDYFLPQDLIAQRPCEPRDHSRLLVLDRQTGRIEHKSFYNLKQYLLPGDTLVFNDTRVIPARLIGSRLDSGGKVEVFLLNRHSGNEWETLVKPGKKARPGTVVQFSEELSCEILAATDYGGRIVRFVFEGIFEEILDRLGETPLPPYIKEKLSDKERYQTVYARERGSAAAPTAGLHFTRELMQELATQGINLAFITLHVGLGTFRPVKVADIEQHVMHKEYYSVSAQTAALINETRQKGRKVIAVGTTAVRTLETAGSSGTLESKSGWTDIFIYPGYPFKIVDRMITNFHLPQSTLLMLVSAFAGRDAVLAAYEEAVRQKYRFFSFGDAMLIL

SEQ ID NO: 68362 - protein, 387 aa, unidentified
  source 1..387: note = Lujinxingia litoralis
  REGION 1..387: note = tr|A0A328C8I4|A0A328C8I4_9DELT S-adenosylmethionine:tRNA ribosyltransferase-isomerase; OS = Lujinxingia litoralis OX=2211119 GN=queA PE=3 SV=1
MSEDAKITDQGDDIWTHQTDTIDLNSVHAYDYALPPELIAATPAPRREEARLLVSRRGEKDIEHTRFKHLTEHLRAGDLLIFNDTRVVPARLEAFKDTGGRVELFVLDVEEPSEQERWTRPATGLLRLRCMTRSSKALRPGMVLTVTRGSDTWPVTLSEAGGGRALVELSWEANALAFLERFGRIPLPPYIEQRRREADDAIEVDDAVRYQTVLASEPGAVAAPTAGLHFSEELLARLEAMGVGRATLTLTVGAGTFKPVTSERLEDHPMHAEAYRIPEGLRERIAACKAAGGRVIAVGTTSARALEAEARRETPLSPGWRETSIFIRPGDSFQMCDGLITNFHLPRSTLLALVATFVGYPTLRRIYSQAVARGYRFYSYGDSSLLL

SEQ ID NO: 68363 - protein, 358 aa, unidentified
  source 1..358: note = Luminiphilus syltensis
  REGION 1..358: note = tr|B8KXC3|B8KXC3_9GAMM S-adenosylmethionine:tRNA ribosyltransferase-isomerase OS=Luminiphilus syltensis NOR5-1B OX=565045 GN=queA PE=3 SV=1
MLRQDFQFDLPGELIAQEPLAERSSSRLLVLEGASGDLFHKQFTDIVDLINPEDLLVFNNTKVLPARLFGVKQTGGRVEILIERLRADGSAVAQVRASKTPRDGAAIYITSDEESDKSEFYVRVVGREGSMYLLEPEVGDWREIMRRFGHMPLPPYIDRPDNESDQDRYQTVYASKEGAVAAPTAGLHFDRNLLRDLSAKGVASVEVTLHVGAGTFQPVRAERIEDHHMHAETIDVGLTVCEAVDACRDGGGRVVAVGTTAVRSLEAAAAAGSLVPFHGDTDIFLYPGRPFRVVDAMITNFHLPESTLIMLVSAFAGREHVLAAYRAAVSQRYRFFSYGDAMFITAHPEARREGLLEI

SEQ ID NO: 68364 - protein, 349 aa, unidentified
  source 1..349: note = Lunatimonas lonarensis
  REGION 1..349: note = tr|R7ZPA7|R7ZPA7_9BACT S-adenosylmethionine:tRNA ribosyltransferase-isomerase OS=Lunatimonas lonarensis; OX = 1232681 GN=queA PE=3 SV=1
MKLSDFKFEVPKKLISLYPTENRDESRLMVVHKATGKIDHRVFKEVIEYFNDGDVFVTNNTKVFPARLYGNKEKTGAKIEVFLLRELNRELRLWDVLVDPARKIRVGNKLYFGDSDLVAEVIDNTTSRGRTIRFLFDGTDEEFFKTIDVLGETPILKEYIEREVDSSDRDRYQTIYAEHVGAVAAPTAGLHFTPHLLKRLEIKGVSVSPITLHIGLGTFRQVDVEDLTKHKMDSENYDIPERTVELVNRALDGKKRVVAVGTTSLKTIESSVTANGRLKASAGWTDKFIIPPYDFKIANSLITNFHLPESTLLMTTAAFGGYDLVMKAYQEAIKEKYRFFSYGDAMLII

SEQ ID NO: 68365 - protein, 403 aa, unidentified
  source 1..403: note = Lunatimonas lonarensis
  REGION 1..403: note = tr|R7ZQV7|R7ZQV7_9BACT S-adenosylmethionine:tRNA ribosyltransferase-isomerase OS=Lunatimonas lonarensis; OX = 1232681 GN=queA PE=3 SV=1
MADRPNLPKSSFWYELPEDRIAKYPLERRDASNLLWYKDQTIRHHRFSDLPDLLPPDSLMVFNNTKVIPARLLFQRETGSWIEIFLLKPIEPSTVIQTAMEETASTTWETMIGNLKRWKDGERLVQTVRLAEKNVQLTATLRSREERLVQLEWDSPFPFASIVEAAGKVPLPPYLNREATDADKETYQTVYSAVKGAVAAPTAGLHFTPQILDSIKSKGIEMDYLTLHVGAGTFQPISVENATEHAMHGEQMVFTADNLRALIHTKGKIVAVGTTSIRSLESLYWFGIKLMREKETTFVIPQDYPYRNHPNLPPYKEVFSFVLGWMEKNNKKKLDGETAIYIYPGYTFRVVSGLVTNFHQPGSTLILLIAAFTGENWREIYRQALENRYRFLSYGDSSLLWRE

SEQ ID NO: 68366 - protein, 344 aa, unidentified
  source 1..344: note = Luteibacter pinisoli
  REGION 1..344: note = tr|A0A4Y5Z350|A0A4Y5Z350_9GAMM S-adenosylmethionine:tRNA ribosyltransferase-isomerase; OS = Luteibacter pinisoli OX=2589080 GN=queA PE=3 SV=1
MKKSDFDFDLPPDLIAQMPLERRSGSRLLVLDVAGRSKANRKFYDLPDLVQPGDLMVFNDTRVLPARLYGRKDSGGAVEILIERVTGAHEARAQLGVSKKPKEGGIIELADGTRITVMGRDGEFFNLRFDIEEPLERLLSRLGEMPLPPYIERSVDDTDMERYQTVFAREPGAVAAPTAGLHFDEALLEKLRAKGVDFGYVTLHVGAGTFQPMRAENVQDHVMHREWLNVGAELVEKIRATRAAGHRVIAVGTTVVRALESATVEGVLRPFAGETQIFIFPGYKITSVDALVTNFHLPQSTLLMLVSALAGKEVILDAYRYAVLQRYRFFSYGDAMLILPPKAP

SEQ ID NO: 68367 - protein, 344 aa, Luteibacter rhizovicinus
  REGION 1..344: note = tr|A0A0G9HA26|A0A0G9HA26_9GAMM S-adenosylmethionine:tRNA ribosyltransferase-isomerase; OS = Luteibacter rhizovicinus DSM 16549 OX=1440763 GN=queA; PE = 3 SV=1
MKKSDFDFDLPPDLIAQAPLARRSGSRLLVVDVGAHTKKDRKFYELPEMLQPGDLLIFNDTRVLPARLYGRKDTGGEVEILIERVTGPHEARAQLGVSKKPKEGGRIELADGSMITVLGREGEFFLLRFESEEPLERLLSRLGEMPLPPYIERGAEEADNERYQTVFAREPGAVAAPTAGLHFDEELLAKLRARGVEMGYVTLHVGAGTFQPMRAEDVRDHVMHREWLNVGAGLVEKIRETRAAGGRVVAVGTTVVRALESATVEGVLRPFAGETQIFIFPGYKITSVDALITNFHLPQSTLLMLVSALAGKEAILESYRYAVLQRYRFFSYGDAMLIVPSKTS

SEQ ID NO: 68368 - protein, 360 aa, Luteibacter rhizovicinus
  REGION 1..360: note = tr|A0A4R3YU52|A0A4R3YU52_9GAMM S-adenosylmethionine:tRNA ribosyltransferase-isomerase; OS = Luteibacter rhizovicinus OX=242606 GN=queA PE=3 SV=1
MSDNAAPFVSPGFSVKKSDFDFDLPPELIAQAPLAERSGSRLLLLDVATGTRENRLFRDLPDLLQPGDLLVFNDTRVLPARLYGHKESGGAVEILIERVTGTHEARAQLGVSKKPKAGGRIVLADGSIATVLGRDGEFFMLRFETQEPLEKVLLRLGEMPLPPYIERSADQNDTERYQTVFAREPGAVAAPTAGLHFDESLLERIRALGVDMGYVTLHVGAGTFQPMRADDVRDHVMHREWLNVGAGLVEQIRATRAAGGRVIAVGTTVVRALESATVDGVLRPFAGETQIFIFPGYRITSVDGLVTNFHLPQSTLLMLVSALAGKETILDAYRFAVAERYRFFSYGDAMLILPRRPLSA

SEQ ID NO: 68369 - protein, 359 aa, Luteibacter sp.
  REGION 1..359: note = tr|A0A1T5BAW3|A0A1T5BAW3_9GAMM S-adenosylmethionine:tRNA ribosyltransferase-isomerase; OS = Luteibacter sp. 22Crub2.1 OX=1283288 GN=queA PE=3 SV=1
MGDNPHPLPDVALAVKKSDFDFELPPDLIAQAPLARRSGSRLLVVDVAARSKKDRKFDELPEMVRPGDLLVFNDTRVLPARLYGRKESGGAVEILIERVTGPHEARAQLGVSKKPKEGGRIELADGSMITVLGREGEFFLLRFESEEPLERLLSRLGEMPLPPYIERTADQSDMERYQTVFAREPGAVAAPTAGLHFDEHLLQRLRDVGVDMGYVTLHVGAGTFQPMRADDVRDHVMHREWLNVGAALVEKIRATRAAGGRVIAVGTTVVRALESATVEGVLRPFAGETQIFIFPGYKITSVDALITNFHLPQSTLLMLVSALAGKETILDAYRYAVLQRYRFFSYGDAMLIYPAATPA

SEQ ID NO: 68370 - protein, 347 aa, Luteibacter sp.
  REGION 1..347: note = tr|A0A1I0NHG4|A0A1I0NHG4_9GAMM S-adenosylmethionine:tRNA ribosyltransferase-isomerase; OS = Luteibacter sp. 329MFSha OX=1798239 GN=queA PE=3 SV=1
MKRSDFDFDLPPELIAQAPLARRSGSRLLVVDVEAHTKKDRRFTDLPEMLRPGDLLVFNDTRVLPARLYGRKESGGAVEILIERVTGAHEARAQLGVSKKPKEGGRIELADGSMVTVLGREGEFFLLRFEGDEPLERLLSRLGEMPLPPYIERGAEEADKERYQTVFAREPGAVAAPTAGLHFDEELLERLRARGVETGYVTLHVGAGTFQPMRADDIRDHVMHREWLNVGAALVEKIRATRAAGGRVVAVGTTVVRALESATVEGVLRPFAGETQIFIFPGYRITSVDALITNFHLPQSTLLMLVSALAGKEAIFDAYRYAVLQRYRFFSYGDAMLILPKPATPAA

SEQ ID NO: 68371 - protein, 342 aa, Luteibacter yeojuensis
  REGION 1..342: note = tr|A0A0F3KAT6|A0A0F3KAT6_9GAMM S-adenosylmethionine:tRNA ribosyltransferase-isomerase; OS = Luteibacter yeojuensis OX=345309 GN=queA PE=3 SV=1
MKKSDFDFDLPPDLIAQAPLERRSGSRLLVVDVGARSKANRKFYELPDLINPGDLLVFNDTRVLPARLYGRKDSGGAVEILIERVTGAREARAQLGVSKKPKEGGIIELADGTRITVLGRDGEFFNLRFEIDEPLERLLGRLGEMPLPPYIERSADDTDMERYQTVFAREPGAVAAPTAGLHFDEALLEKLRARGVDFGYVTLHVGAGTFQPMRAENVHDHVMHREWLNVGAELVEKIRATRAAGGRVIAVGTTVVRALESATVEGVLRPFAGETQIFIFPGYKITSIDALVTNFHLPQSTLLMLVSALAGKEAILDAYRYAVLQRYRFFSYGDAMLIIPPR

SEQ ID NO: 68372 - protein, 345 aa, Luteibacter yeojuensis
  REGION 1..345: note = tr|A0A561HEK5|A0A561HEK5_9GAMM S-adenosylmethionine:tRNA ribosyltransferase-isomerase; OS = Luteibacter yeojuensis OX=345309 GN=queA PE=3 SV=1
MKKSDFDFDLPPELIAQAPLARRSGSRLLVVDVEARSKANRKFHELPDLVRPGDLLVFNDTRVLPARLYGNKESGGAVEILIERVTGAHEARAQLGVSKKPKEGGRIVLADGSLITVLGREGEFFKLRFEGDEPLERTLSRLGEMPLPPYIERGAGEEDKERYQTVFAREPGAVAAPTAGLHFDEALLAQLREKGVDFGYVTLHVGAGTFQPMRADDVRDHVMHREWLNVGASLVEKIRATREAGGRVIAVGTTVVRALESATVDGVLRPFAGETQIFIFPGYRITSIDALITNFHLPQSTLLMLVSALAGKEAILDAYRYAVLQRYRFFSYGDAMLILPPKAPA

SEQ ID NO: 68373 - protein, 349 aa, unidentified
  source 1..349: note = Luteibaculum oceani
  REGION 1..349: note = tr|A0A5C6VJR7|A0A5C6VJR7_9FLAO S-adenosylmethionine:tRNA ribosyltransferase-isomerase; OS = Luteibaculum oceani OX=1294296 GN=queA PE=3 SV=1
MKLSQFKLDLPKELIATHPTIDREDSRLMVVDRKSGKIEHKTFKDIINYFDDKDVFILNNTKVFPARLYGNKEKTGAKIEVFLLRELNRESLLWDVLVDPARKIRIGNKLYFGEDDSLVAEVIDNTTSRGRTLRFLYDGPHEEFKKTIMALGETPIPKYIDREVEPEDAERYQTVYAKHEGAVAAPTAGLHFSKNLLKRLEIKGINFAEVTLHVGLGTFRPVEVEDLTKHKMDSEQVIIPSATSNMVNEAIENRRKVCAVGTTVMRAIESSVSSNGRLNPINDWTNKFIFPPYEFSIADSMVTNFHMPESTLLMMVAAFAGYDLTMEAYQEAIKEKYRFFSYGDAMLIL

SEQ ID NO: 68374 - protein, 385 aa, unidentified
  source 1..385: note = Luteibaculum oceani
  REGION 1..385: note = tr|A0A5C6VBL0|A0A5C6VBL0_9FLAO S-adenosylmethionine:tRNA ribosyltransferase-isomerase; OS = Luteibaculum oceani OX=1294296 GN=queA PE=3 SV=1
MLNLKDYHFTLPDSRIAKHPPKERGNSKLLSYNKGIIEHLAFRDLVGQISSDATLFFNDTKVIPARIFLRKPTGALIEIFLLEPLKPSKAHEEVMSTTNTCTWKCLIGNAKKWALNTSLKHESINFTSTRTGDNEVTFTWEGCTFSEILTEIGKIPLPPYIQREVEENDKNRYQTVYSKIDGAVAAPTAGLHFTEEILEELKGKGVKIEYLTLHVSAGTFQPIKTDDISEHPMHNEQVLISKSSIENLLNSKQIIAVGTTSMRTLESLYWFGVKLHNGENDFFIKKDDPYRLKPIYKEEAINKVLAYMEEKQIEKLTGQTEIFLYPGYNFHICDGLVTNFHMPGSTLILLVAAFIGEDWRKVYQEALDHDYRMLSYGDSSLLLPG

SEQ ID NO: 68375 - protein, 345 aa, Luteimonas aestuarii
  REGION 1..345: note = tr|A0A4R5TYB7|A0A4R5TYB7_9GAMM S-adenosylmethionine:tRNA ribosyltransferase-isomerase; OS = Luteimonas aestuarii OX=453837 GN=queA PE=3 SV=1
MKKSDFNYELPPELIAQAPLPERSASRMLVVPPGDEAFVDAHVRDLVEWLRPGDLLVFNDTRVIPARLFGQKDTGGRVEILIERLLPGNEVRAQVGASKSPKPGGRIALDGGGEAEVLGRDGEFYHLRFHVEGALESWLLKVGRLPLPPYIRREPGRDDDERYQTVFARNVGAVAAPTAGLHFDDALLAALRERGVQSGHVTLHVGAGTFQPVRVDDVREHAMHSEWLNVGAELVAQVRRTREAGGRVVAVGTTVVRALESAMHAGELHPFAGETRIFIFPGYRVRSVDALLTNFHLPESTLLMLVSAFAGKDRIFAAYAHAVRERYRFFSYGDAMLLFPQASTG

SEQ ID NO: 68376 - protein, 344 aa, unidentified
  source 1..344: note = Luteimonas cucumeris
  REGION 1..344: note = tr|A0A562LBJ7|A0A562LBJ7_9GAMM S-adenosylmethionine:tRNA ribosyltransferase-isomerase; OS = Luteimonas cucumeris OX=985012 GN=queA PE=3 SV=1
MKKTDFHYDLPAELIAQTPLPERSASRLLCVPPAPEPLADQHVRDLPQWLQPGDLLVFNDTRVIPARLLGTKSSGGRVEILIERLLPGNEARAQIGASKSPKPGGRIALDAGGEVEVLGRDGEFYLLRFHVDDPLESWLLRAGRLPLPPYIQREPDADDAERYQTVFARAVGAVAAPTAGLHFDEALLQALRERGVQFGHVTLHVGAGTFQPMRVDDVREHRMHSEWLNVGAELVEQARRTRAAGGRIIAVGTTVVRALESAMHDGALLPFAGETRIFIFPGYRIRSVDALLTNFHLPESTLLMLVSAFAGRERVFAAYAHAVRERYRFFSYGDAMLLFPETSK

SEQ ID NO: 68377 - protein, 342 aa, Luteimonas marina
  REGION 1..342: note = tr|A0A5C5TW84|A0A5C5TW84_9GAMM S-adenosylmethionine:tRNA ribosyltransferase-isomerase; OS = Luteimonas marina OX=488485 GN=queA PE=3 SV=1
MKKSDFHYELPPELIAQAPLPERSASRLLVVPPGDAPFVDAQVRALGDWLRPGDLLVFNDTRVIPARLFGQKESGGRVEILIERLLANNEARAQVGASKAPKPGSRIVLDGGGEAEVLGRDGEFYHLRFRVEGALESWLLKAGRLPLPPYIRREPGQDDAERYQTVFAREVGAVAAPTAGLHFDDALLAALRERGVAFGHVTLHVGAGTFQPVRVDDLREHAMHGEWLNVGPELVAQVRRTREAGGRVVAVGTTVVRALESAMKDGELHAFAGETRIFIFPGYRIRSVDALLTNFHLPESTLLMLVSAFAGKDRIFAAYAHAVRERYRFFSYGDAMLLFPQP

SEQ ID NO: 68378 - protein, 344 aa, Luteimonas sp.
  REGION 1..344: note = tr|A0A344J5V4|A0A344J5V4_9GAMM S-adenosylmethionine:tRNA ribosyltransferase-isomerase; OS = Luteimonas sp. 83-4 OX=2172536 GN=queA PE=3 SV=1
MKKSDFHFDLPPALIAQAPLPERSASRLLLVPPGDAPFEDRGIRDLPDLLREGDLLVFNDTRVIPARLFGTKETGGRVEILIERVLPGNEARAQVGASKTPKPGSRITLDAGGEVEVLGRDEAFHHLRFHVDAPLDKWLVDAGRLPLPPYIERVPDAADAERYQTVFAREPGAVAAPTAGLHFDEALLEALRAKGVEFGHVTLHVGAGTFQPMRVDDVGDHVMHSEWLNVGAELVQQVRRTRARGGRVIAVGTTVVRSLESAMRDGELQPFAGETRIFIFPGYRIESVDAMVTNFHLPESTLLMLVSAFAGRERILDAYAHAVDARYRFFSYGDAMLLWGAPDA

SEQ ID NO: 68379 - protein, 350 aa, Luteimonas sp.
  REGION 1..350: note = tr|A0A0H1AR11|A0A0H1AR11_9GAMM S-adenosylmethionine:tRNA ribosyltransferase-isomerase; OS = Luteimonas sp. FCS-9 OX=1547516 GN=queA PE=3 SV=1
MKKSDFHFDLPEELIAQAPLAERSASRLLVVPPADAAFDDRHVRDLPDLLQPGDLLVFNDTRVIPARLFGHKDSGGRVEILIERLLPGNEARAQIGASKAPRPGGRIVLDGGGHAEVLARDEGFYHLRFEVDGALESWLLQAGRMPLPPYIRREPGVDDAERYQTVFAREVGAVAAPTAGLHFDDALLSRLRARGVDFGHVTLHVGAGTFQPMRVDDIREHRMHSEWLNVGAELVAQIRRTRASGGRVVAVGTTVVRALESASVDGELHPFAGETRIFIFPGYRIRSVDAMVTNFHLPESTLLMLVSAFAGRDRILAAYDHAVRARYRFFSYGDAMLLWSRDSGFGSGDS

SEQ ID NO: 68380 - protein, 346 aa, unidentified
  source 1..346: note = Luteimonas terrae
  REGION 1..346: note = tr|A0A4R5UC88|A0A4R5UC88_9GAMM S-adenosylmethionine:tRNA ribosyltransferase-isomerase; OS = Luteimonas terrae OX=1530191 GN=queA PE=3 SV=1
MKKSDFHFDLPEHLIAQAPLAERSASRLLVVPPGQGSFDDRQVRDLPDLLQPGDLLIFNDTRVIPARLFGQKDSGGRVEILIERLLPDNEARAQIGASKSPRPGGRIQLDAGGSAEVISRDEGFYHLRFELDDTLESWLLKAGRMPLPPYIRREPGQDDAERYQTVFAREVGAVAAPTAGLHFDDALLARLRERGVQFGHVTLHVGAGTFLPMRVEDVREHRMHSEWLNVGAELVAQIRRTREAGGRVIAVGTTVVRALESASVDGELHPFAGETQIFIFPGYRIRSVDAMVTNFHLSESTLLMLVSAFAGKDRVFAAYDHAVQAEYRFFSYGDAMLLWGAHAPAA

SEQ ID NO: 68381 - protein, 352 aa, unidentified
  source 1..352: note = Luteipulveratus halotolerans
  REGION 1..352: note = tr|A0A0L6CMC1|A0A0L6CMC1_9MICO S-adenosylmethionine:tRNA ribosyltransferase-isomerase; OS = Luteipulveratus halotolerans OX=1631356 GN=VV01_19960; PE = 3 SV=1
MTLLDTHPTTRFRAPDDTTAPAPAEARGLTRDGVRLLVASADGIHHGRFRDLPDELGPGDLVVVNNSATTAAEIDGWRTAHGRVVVHAATPLDDGTWVIELRTAPDAAAPVLDAVAGEHIEVSTLVLTLLEPYPRADSSPTGEGNRLWRVSVDGDLDDALTRHGRPIAYGYLDRAYPLSAYQAVFSTVPGSAEMPSAGRPFTDQIITRLIARGVGVAPITLHTGVSSQDAGEAPQAERFEVPDATARLVNATRATGGRVIAVGTTVTRALESAVAPGGRVVAARGWTERVISPADPARVVDGLITGWHNPEASHLLLVESIAGAELTQAAYDAAVAEGYLWHEFGDSALLLP

SEQ ID NO: 68382 - protein, 352 aa, Luteipulveratus mongoliensis
  REGION 1..352: note = tr|A0A0K1JDM6|A0A0K1JDM6_9MICO S-adenosylmethionine:tRNA ribosyltransferase-isomerase; OS = Luteipulveratus mongoliensis OX=571913 GN=VV02_01200; PE = 3 SV=1
MTLLTDHPTTHFRAPDDTTAPAPAEARGVARDGVRLMVAGAHGIDHVRFRDLPDHLAPGDLVVVNNSATIAGEVDGWRAGHGPVVVHAATPLDDGTWVIELRTAPDAASPVLDGISGEHVEVGHLVLTLIAPYPYEGSSPTGSGNRLWRVAVDGDLHDVLARHGRAIAYGYLDHAYPLSAYQSVFSTVPGSAEMPSAGRPFTDSIITRLVAGGIGVAPITLHTGVSSQDAGEAPQTERFDVPEVTARLVNATRATGGRVIAVGTTVTRALESAVASDGRVVAARGWTDRVISPTDPARVVDGLITGWHNPEASHLLLVESIAGAELTQAAYDAAVDEGYLWHEFGDSALLLP

SEQ ID NO: 68383 - protein, 350 aa, unidentified
  source 1..350: note = Luteitalea pratensis
  REGION 1..350: note = tr|A0A143PUG6|A0A143PUG6_9BACT S-adenosylmethionine:tRNA ribosyltransferase-isomerase; OS = Luteitalea pratensis OX=1855912 GN=queA_2 PE=3 SV=1
MIPATAPIQRPADARLFGVDRFGQPRHMMRSRLIDLLKPTDVVIANDAATLPASLRGTHAPSGREIEVRLAARTSLSPSTIGRVLAVVFGEGDFRVPTEDRPQPPALNRGDRLLLGPLRAAVVSRVNHRRLVLLQFDGTADEIWRGLARHGHPVQYAHLQEPLAIWDTWTPIAGLPVAFEPPSASFALSWGLLESLAARGIGFATVTHAAGLSSTGDPVLDAMLPFDEPYVIPRYTARLVNRARARGSRVVAVGTSVVRALEHAGAEGRVRPGEGLATGRLGPGSALRIVDAILTGTHEPGTSHHELLRAFATSSTLALVDEELTRVGYRTHEFGDSVFLERQDRNTRGG

SEQ ID NO: 68384 - protein, 347 aa, unidentified
  source 1..347: note = Luteitalea pratensis
  REGION 1..347: note = tr|A0A143PFT0|A0A143PFT0_9BACT S-adenosylmethionine:tRNA ribosyltransferase-isomerase; OS = Luteitalea pratensis OX=1855912 GN=queA_1 PE=3 SV=1
MRVDEFDFHLPESQIAQHPPAERGTSRLMVLDRASGETTIGHVSDLTAWLRAGDVLVLNDTRVFPARLLGRRLPGGGRLECLLVASHGAGAWDALVHPGQRLKIGSRFVCEGEGGAIHGEIVGRSDYGRRTVHLRAEGFADVDEAIEAIGHMPLPPYIRRPDASEDRDRYQTVFGTHRGSVAAPTAGLHFTPDLLAQLRAIGVEIVTITLHVGYGTFKPVRVDIVEEHIVDPERYDVSTTAADAINRAKAEGRRVVVVGTTSTRALESAAGADGRVRAGAATTTLYIRPGHRFQVVDALMTNFHVPRSSLLFLVCAFGGREHVLGAYARAIDEGLRFYSYGDAMLIT

SEQ ID NO: 68385 - protein, 349 aa, unidentified
  source 1..349: note = Lutibacter agarilyticus
  REGION 1..349: note = tr|A0A238XTQ0|A0A238XTQ0_9FLAO S-adenosylmethionine:tRNA ribosyltransferase-isomerase; OS = Lutibacter agarilyticus OX=1109740 GN=queA PE=3 SV=1
MKLSHFKFELPEDLLAEYPAEHRDESRLMVLNRKEKTIEHKQFKDLINYFDEGDLMVLNNTKVFPARMYGEKEKTGARIEVFLLRELNAESRLWDVLVDPARKIRIGNKLFFGDDESLVAEVIDNTTSRGRTLRFLYDGSYEEFRKKLEELGETPLPKYIKREVEASDEERYQTIYAKEEGAVAAPTAGLHFSKHLMKRLEIKGVDFAEVTLHVGLGTFSAVEVEDLSKHKMDSEQCVVSQETADVVNNAIDAKKRVCAVGTTVMRAVESSVSSNHRLNSYDAWTNKFIFPPYDFSIANCMITNFHTPKSTLMMMVAAFAGYDFLMEAYDEAVKEGYKFYSYGDAMLII

SEQ ID NO: 68386 - protein, 349 aa, unidentified
  source 1..349: note = Lutibacter flavus
  REGION 1..349: note = tr|A0A238ZE89|A0A238ZE89_9FLAO S-adenosylmethionine:tRNA ribosyltransferase-isomerase; OS = Lutibacter flavus OX=691689 GN=queA PE=3 SV=1
MKLSHFKFELPEELYAEYPAEHRDESRLMVLNRKEKTIEHKQFKDIINYFDEGDLMLLNNTKVFPARMYGEKEKTGARIEVFLLRELNAESRLWDVLVDPARKIRIGNKLFFGEDESLVAEVIDNTTSRGRTLRFLYDGSYEEFRVKLEQLGETPLPKYIKREVEESDEERYQTIYAKHEGAVAAPTAGLHFSKHLMKRLEIKGVDFAEVTLHVGLGTFSPVEVEDLSKHKMDSEQAKISQETADKVNKAIDSKRRVCAVGTTAMRAIESAVSSNSRLNSYDGWTNKFIFPPYEFSIANCMITNFHTPKSTLMMMAAAFAGYDFLMEAYEVAVKEKYKFYSYGDAMLII

SEQ ID NO: 68387 - protein, 349 aa, Lutibacter maritimus
  REGION 1..349: note = tr|A0A1I6QQ77|A0A1I6QQ77_9FLAO S-adenosylmethionine:tRNA ribosyltransferase-isomerase; OS = Lutibacter maritimus OX=593133 GN=queA PE=3 SV=1
MKLSHFKFDLPEELLAVRPAEHRDESRLMVLNRKEKTIEHKLFKDIIDYFDEGDLMIVNNTKVFPARMYGEKEKTGARIEVFLLRELNAESRLWDVLVDPARKIRIGNKLFFGDDESLVAEVIDNTTSRGRTLRFLYDGSYEEFRKKLEELGETPLPKYINRPVEPEDEERYQTIYAKHEGAVAAPTAGLHFSKHLMKRLEIKGVDFAEVTLHVGLGTFSPVEVEDLSKHKMDSEQAIITEETTEIVNNAIDKKRRVCAVGTTVMRAVESSVSSNNRLNSFNGWTNKFIFPPYDFSIANCMITNFHTPKSTLMMMVAAFADYDFLMKAYEEAVKEKYKFYSYGDAMLII

SEQ ID NO: 68388 - protein, 349 aa, unidentified
  source 1..349: note = Lutibacter oceani
  REGION 1..349: note = tr|A0A3D9RLJ9|A0A3D9RLJ9_9FLAO S-adenosylmethionine:tRNA ribosyltransferase-isomerase; OS = Lutibacter oceani OX=1853311 GN=queA PE=3 SV=1
MKLSHFKFELPEDLLAEYPAEHRDESRLMVLNRKEKTIEHKQFKDLINYFDEGDLMILNNTKVFPARMYGEKEKTGARIEVFLLRELNAESRLWDVLVDPARKIRIGNKLFFGDDESLVAEVIDNTTSRGRTLRFLYDGSYEEFRKKLEELGETPLPKYIKREVNEDDEERYQTIYAKHEGAVAAPTAGLHFSKHLMKRLEIKGVDFAEVTLHVGLGTFSAVEVEDLSKHKMDSEQAIIPDETVEIVNKAIDSKRRVCAVGTTVMRAVESSVSSDNHLNSFNGWTNKFIFPPYDFSIANCMITNFHTPKSTLMMMAAAFAGYDFLMEAYDEAVKEGYKFYSYGDAMLII

SEQ ID NO: 68389 - protein, 349 aa, unidentified
  source 1..349: note = Lutibacter oricola
  REGION 1..349: note = tr|A0A1H3EDR5|A0A1H3EDR5_9FLAO S-adenosylmethionine:tRNA ribosyltransferase-isomerase; OS = Lutibacter oricola OX=762486 GN=queA PE=3 SV=1
MKLSHFKFDLPVDLLAEYPAEHRDEARLMVLNRKEQTIEHKMFKDLIDYFDEGDLMVLNNTKVFPARMYGEKEKTGARIEVFLLRELNAESRLWDVLVDPARKIRIGNKLFFGDDESLVAEVIDNTTSRGRTLRFLYDGSYEEFRKKLEELGETPLPKYIQREVEPSDEERYQTIYAKHEGAVAAPTAGLHFSKHLMKRLEIKGIDFGEVTLHVGLGTFSAVEVEDLSKHKMDSEQAIIDADTTKIVNAAIDNKKRICAVGTTVMRAMESSVSSNQHLNEFNGWTNKFIFPPYDFSIANSMITNFHTPKSTLMMMVAAFAGYDFLMEAYEEAVKEGYKFYSYGDAMLII

SEQ ID NO: 68390 - protein, 349 aa, unidentified
  source 1..349: note = Lutibacter profundi
  REGION 1..349: note = tr|A0A0X8G821|A0A0X8G821_9FLAO S-adenosylmethionine:tRNA ribosyltransferase-isomerase; OS = Lutibacter profundi OX=1622118 GN=queA PE=3 SV=1
MKLSKFKFELPEGLLAEYPAEHRDESRLMVLDRKKQTIEHHTFKDLINYFDEGDLMILNNTKVFPARMYGEKEKTGARIEVFLLRELNAESRLWDVLVDPARKIRIGNKLFFGDDESLVAEVIDNTTSRGRTLRFLYDGSYEEFRKKLQELGETPLPKYIQRKVEPSDAERYQTIYAKHEGAVAAPTAGLHFSKHLMKRLEIKGIDFSEVTLHVGLGTFSPVEVEDLSKHKMDSEKAIVTSETIKIVNNAIDNKKRICAVGTTVMRALESAVSSNGHLNTFDRWTNKFIFPPYDFSIANSMITNFHTPKSTLMMMAAAFAGYDFLMEAYEEAVKEKYKFYSYGDAMLII

SEQ ID NO: 68391 - protein, 349 aa, Lutibacter sp.
  REGION 1..349: note = tr|A0A2G1XYW3|A0A2G1XYW3_9FLAO S-adenosylmethionine:tRNA ribosyltransferase-isomerase; OS = Lutibacter sp. OX=1925666 GN=queA PE=3 SV=1
MKLSKFKFELPEDLLAEYPAEHRDESRLMVLNRKEQTIEHHQFKDLINYFDEGDLFILNNTKVFPARMYGEKEKTGARIEVFLLRELNAESRLWDVLVDPARKIRIGNKLFFGDDESLVAEVIDNTTSRGRTLRFLYDGSYEEFRKKLQVLGETPLPKYIQREVEASDAERYQTIYAKHEGAVAAPTAGLHFSKHLMKRLEIKGIDFSEVTLHVGLGTFSPVEVEDLSKHKMDSEKALVTPETIKTVNSAMNRKKRVCAVGTTVMRALESSVSSNGRLNTFDGWTNKFIFPPYDFSIANCMITNFHTPKSTLMMMAAAFAGYDFLMEAYEEAVKEKYKFYSYGDAMLII

SEQ ID NO: 68392 - protein, 349 aa, Lutibacter sp.
  REGION 1..349: note = tr|A0A559S367|A0A559S367_9FLAO S-adenosylmethionine:tRNA ribosyltransferase-isomerase; OS = Lutibacter sp. Hel_I_33_5 OX=1566289 GN=queA PE=3 SV=1
MKLSNFHFELPEELMAEYPAEHRDESRLMVLHRDTQKIEHKLFKDVINYFNEGDVMILNNTKVFPARMFGNKEKTGARIEVFLLRELNAENRLWDVLVDPARKIRIGNKLFFGEDDSLVAEVIDNTTSRGRTLRFLYDGPYDEFRKKLLELGETPLPKLIKRDVEASDEERYQTIFAKHEGAVAAPTAGLHFSKHLLKRLEIKGIDFAETTLHVGLGTFSPVEVEDLSKHKMDSEQIRIPETSADMINNAIETKKRICAVGTTVMRTVESCVSASQRLNSFEGWTNKFIFPPFEFSIANSMITNFHTPKSTLLMQAAAFGGYDFVMEAYQVAIKEKYKFHTYGDAMLII

SEQ ID NO: 68393 - protein, 362 aa, unidentified
  source 1..362: note = Lutibaculum baratangense
  REGION 1..362: note = tr|V4TL70|V4TL70_9RHIZ S-adenosylmethionine:tRNA ribosyltransferase-isomerase OS=Lutibaculum baratangense AMV1 OX=631454 GN=queA PE=3 SV=1
MRVDLFDFELPEELIALRPAEPRGASRLLVVRPGATPETEDRAFADLPKLLVSGDVLVFNDTRVIPARLFGRRTGRGETEPRIEVTLHKRAGEDGWHAFARPARKLELGDCVDFGDGNGACLLGALAATVEAKGEGGEILLRFELSGAALDEVIEAVGEIPLPPYIASRRPADMRDRQDYQTVYAREAGAVAAPTAGLHFTPEVMGELSSRGIGSETLTLHVGAGTFLPVKADDTADHRMHAETGRIDAEVAARLNDARARGGRIVAVGTTALRLLESAATPEGLIEPFAGDTDIFITPGYRFRGADLLVTNFHLPRSTLFMLVSAFSGLETMRGAYAHAVAARYRFYSYGDSCLLFPSEAR

SEQ ID NO: 68394 - protein, 350 aa, unidentified
  source 1..350: note = Lutimaribacter litoralis
  REGION 1..350: note = tr|A0A521EUS1|A0A521EUS1_9RHOB S-adenosylmethionine:tRNA ribosyltransferase-isomerase; OS = Lutimaribacter litoralis OX=1010611 GN=queA PE=3 SV=1
MKLSDFDFDLPEELIATRPAKPRSSARLLVAEEDQITDARVTDILHWLRPGDRLVLNDTKVIPARLSGTRERDGAEGRTKARIEATLLEPRAGGHWAALVKPLKKIREGEEIVFSDALSATLIAKEDGQAVLAFNLTGDDFDVALAQAGAMPLPPYIAAKRAADEQDKQDYQTVWARAAGAVAAPTASLHFDEPLLAQIRDLEVQISFVTLHVGAGTFLPVKVDDVTSHKMHAEWGEVSEAAAAQIAATKAAGGRVIPVGTTALRLIESAARSGDIQPWRGETDIFIYPGFSFHVADALMTNFHLPKSTLMMLVSALMGQDRIRAIYDHAVAQGYRFFSYGDASLLIPKG

SEQ ID NO: 68395 - protein, 352 aa, unidentified
  source 1..352: note = Lutimaribacter pacificus
  REGION 1..352: note = tr|A0A1H0EY73|A0A1H0EY73_9RHOB S-adenosylmethionine:tRNA ribosyltransferase-isomerase; OS = Lutimaribacter pacificus OX=391948 GN=queA PE=3 SV=1
MKLADFDFDLPERLIATRPARPRSSARLLVAEGDAIRDAHVFDLPGILRPGDRLVLNDTRVIPARLTGQRHRDSGQGPVSARIEVTLLEPRADGTWAALLKPLRKMDIGEDIVFSPELSATLEAREDGQGLLRFNLAGEDFDAALAQAGAMPLPPYIAARRPADAQDKDDYQTVWAARSGAVAAPTASLHFDEPLLAALRARGIAFTHVTLHVGAGTFLPVKVEDVTTHRMHAEWGEVSATAAAEIAATRSAGGRVIPVGTTALRLIETAARDTGAIRAWEGETDIFIYPGFEFRVTDALMTNFHLPKSTLMMLVSALMGRERVRRIYDHAIANDYRFFSYGDASLLIPPGA

SEQ ID NO: 68396 - protein, 353 aa, Lutimaribacter saemankumensis
  REGION 1..353: note = tr|A0A1G8GQX1|A0A1G8GQX1_9RHOB S-adenosylmethionine:tRNA ribosyltransferase-isomerase; OS = Lutimaribacter saemankumensis OX=490829 GN=queA PE=3; SV = 1
MKLADFDFDLPENLIATRPARPRSSARLLVAEGDTIRDAHVFDLPDILRPGDRLVLNDTRVIPARLTGQRHRDSAQGQVSAKIEVTLLEPRADGGWTALLKPLRKVEPGEEIVFSPDLSARLEARQDGQGVLRFNLTGDDFDAALAQAGAMPLPPYIAAKRPADAQDKNDYQTVWAARSGAVAAPTASLHFDEPLLHALQARGVDFTFVTLHVGAGTFLPVKVDDVTTHKMHSEWGQVSPEAASEIAATKSAGGRVIPVGTTALRLIETAARDTGAIRAWEGDTDIFIYPGFTFRVTDALMTNFHLPKSTLMMLVSALMGQDRISRIYDHAIREEYRFFSYGDASLLFPHPQA

SEQ ID NO: 68397 - protein, 341 aa, Lutispora thermophila
  REGION 1..341: note = tr|A0A1M6HPU7|A0A1M6HPU7_9CLOT S-adenosylmethionine:tRNA ribosyltransferase-isomerase; OS = Lutispora thermophila DSM 19022 OX=1122184 GN=queA PE=3; SV = 1
MNTSDFYYKLPEELIAQEPIYPRDMSRLMILNKESGCIEHKIFKDIINYLNPGDCLVLNDTRVIPARLFGSKEGTQSTIEILLLTRKSKDTWEVMVRPGKKAKLGAKIIFGDGQLVAEIIEISDGGNRIIKFSYDGIFETILENLGHMPLPPYIKKELEDKERYQTVYSKHEGSAAAPTAGLHFTDTLLQDIENKGIKLAYITLHVGLGTFRPVKVKNIEEHKMHSEYYDINQESADKINSSRKEGKRIICVGTTSTRTLESVADENGMVSAKKGWTDIFIYPGYKFKCTDGLITNFHLPESTLLMLVSALAGKENILRAYEEAIKNKYRFFSFGDAMLII

SEQ ID NO: 68398 - protein, 373 aa, Lyngbya aestuarii
  REGION 1..373: note = tr|U7QKQ7|U7QKQ7_9CYAN S-adenosylmethionine:tRNA ribosyltransferase-isomerase OS=Lyngbya aestuarii BL J; OX = 1348334 GN=queA PE=3 SV=1
MEINKLDWTTEGYDYKLPEERIAQNPVVPRDQSRLLVIDSLTSHHHRIFRDLPHWLKSDDLLVFNNTQVIPARLYGHKSSGGSVEILLLEEQKPNFWLALVKPGKRFKPGVRIEFEPLHPAPDSILQPLSATVVDTDETTGGRLLEFNLPQGQSLIEQLDQFGHIPFPPYVNQSQAFPQQYQTIYAQRPGAVAAPTAGLHFTEELFERLHHQGIHKAFVTLHVGVGTFRPVEVQDITTHQMHAEWIEVSSETVKQIQKTKANGGRVIAVGTTVVRTLEGVAMAEGKLTPYSGKTDAFIYPGYQFQVIDGLITNFHLPRSSLMMLVAAFIGRQRLLDLYQDAIAQSAEGFTHPYRFYSFGDAMLILPEARISRS

SEQ ID NO: 68399 - protein, 358 aa, Lyngbya confervoides
  REGION 1..358: note = tr|A0A0C1Y3P3|A0A0C1Y3P3_9CYAN S-adenosylmethionine:tRNA ribosyltransferase-isomerase; OS = Lyngbya confervoides BDU141951 OX=1574623 GN=queA PE=3; SV = 1
MGIPDNSDFQLSAYNYELPPDRIAQNPVEPRDHARLLTITSARGHEHRHVYDLPSLLQPGDLLVLNDTKVLPARLFGQKVGGAAVEILLLEERASLEWLALVKPGKRLKPGAQIHFGENLDQPALIADVVASDPETNGRILKFTIPGPESFYEVCDRLGKMPLPPYITESTAPDDRYQTIYAEKLGAVAAPTAGLHFTPELFAQLDDRGIDRTFITLHVGVGTFRPVEAATITDHTMHAEWLDVPAATVEKIRQTKANGGRVIAVGTTVTRALEGAAQSGELQPLQGKTNLFIYPGYQWQVLDGLMTNFHLPESSLMMLVSAMIGRQRLLDLYAEAVRQDYRFYSFGDAMLILPTARR

SEQ ID NO: 68400 - protein, 371 aa, Lyngbya sp.
  REGION 1..371: note = tr|A0YUJ9|A0YUJ9_LYNSP S-adenosylmethionine:tRNA ribosyltransferase-isomerase OS=Lyngbya sp. (strain PCC 8106) OX=313612 GN=queA PE=3 SV=1
METDRLDWTTEGYDYELPEERIAQNPVVPRDQSRLLVIDSLTSHHHRVFRDLPHWLKSDDLLVFNNTQVIPARLYGHKSSGGSVEILLLEEQKPNCWLALVKPGKYFKPGVKIEFEPLHPAPDSILQPLSAIVVDTDETTGGRLLQFYLPQGQSLIEQLDQFGHIPFPPYVNQSQAFPQQYQTIYAQRPGAVAAPTAGLHFTEELFERLHHQGINKAFVTLHVGVGTFRPVEVQDITTHQMHAEWIEVSPETVEQIQKTKANGGRVIAVGTTVVRTLEGVAMAEGKLTSYRGKTDAFIYPGYQFQVIDGLITNFHLPRSSLMMLVAAFIGRPRLLDLYQDAIAQSAEGFTHPYRFYSFGDGMLILPEARIS

SEQ ID NO: 68401 - protein, 346 aa, unidentified
  source 1..346: note = Lysinibacillus acetophenoni
  REGION 1..346: note = tr|A0A285U374|A0A285U374_9BACI S-adenosylmethionine:tRNA ribosyltransferase-isomerase; OS = Lysinibacillus acetophenoni OX=614649 GN=queA PE=3 SV=1
MKVEDFDFELPEELIAQTPLEDRTASRLMVVDRQTGEVEHHQFPHILDEIHEGDCLVLNDTRVMPARLFGTKEGTGAHIELLLLKQGQDDEWETLVKPAKRVKIGTEITFGNGLLKATCTGELDHGGRMFKFSYDGIFYEILDQLGEMPLPPYIHEKLDDRERYQTVYSKAIGSAAAPTAGLHFTNEILDKIKAKGVEIVFITLHVGLGTFRPVSVDSIESHDMHSEFYSVTEEAANTINHTKVNGGKVIAVGTTSTRTLETIAQKYDGEIRAEQGWTNIFIYPGFEYKAIDGLITNFHLPKSTLVMLVSALTSRDIILSAYRKAVEERYRFFSFGDAMFIRPIRD

SEQ ID NO: 68402 - protein, 346 aa, Lysinibacillus boronitolerans
  REGION 1..346: note = tr|A0A0A3IUN8|A0A0A3IUN8_9BACI S-adenosylmethionine:tRNA ribosyltransferase-isomerase; OS = Lysinibacillus boronitolerans JCM 21713 = 10a = NBRC 103108 OX=1294264 GN=qu eA PE=3 SV=1
MRVEDFDFELPEELIAQTPLVDRTASRLMVVTPGSNKVEHHHFAHVLEELHAGDCLVLNDTRVLPARLMGVKEETGAHIEVLLLKQLAGTDEWETLVKPAKRVKVGTVITFGDGLLTATCTGELEHGGRTFEFQYDGIFYEILEQLGEMPLPPYIREKLEDKDRYQTVYAKERGSAAAPTAGLHFTEELLAQVKAKGVDVVFITLHVGLGTFRPVSVDSIENHEMHAEFYSVTEQAADTINRVKRNGGKVIAVGTTSTRTLETIGSKYGGEVRAEQGWTSIFIYPGYNFTVVDGLITNFHLPKSTLVMLVSTLATRETILSAYQQAVEERYRFFSFGDAMFIRPKK

SEQ ID NO: 68403 - protein, 352 aa, unidentified
  source 1..352: note = Lysinibacillus chungkukjangi
  REGION 1..352: note = tr|A0A318TVF0|A0A318TVF0_9BACI S-adenosylmethionine:tRNA ribosyltransferase-isomerase; OS = Lysinibacillus chungkukjangi OX=1202712 GN=queA PE=3; SV = 1
MKEVVKMKVEDFDFHLPEELIAQTPLEDRTASRLMIVDRKTGEVEHSHFPQIVDELQKGDCLVLNDTRVMPARLFGVKEETGAHIEVLLLKQGNDDEWETLVKPAKRVKVGTEVTFGDGLLKAICTGELDHGGRLFKFSYDGIFYEILDQLGEMPLPPYIHEKLENRERYQTVYSKEIGSAAAPTAGLHFTNEILEQIKEKGVEIVFITLHVGLGTFRPVSVESIESHDMHSEFYSVTEEAAKTINRTKANGGKVVAVGTTSTRTLETIAQKYEGEIRAEQGWTNIFIYPGFEYKAIDGLITNFHLPKSTLVMLVSALTSRDIILNAYNRAVEEKYRFFSFGDAMFIRPARS

SEQ ID NO: 68404 - protein, 345 aa, unidentified
  source 1..345: note = Lysinibacillus composti
  REGION 1..345: note = tr|A0A3N9UX51|A0A3N9UX51_9BACI S-adenosylmethionine:tRNA ribosyltransferase-isomerase; OS = Lysinibacillus composti OX=720633 GN=queA PE=3 SV=1
MKVEDFDFHLPEELIAQTPLEDRTASRLMIVDRGTGEVEHSYFKHIVDQLQKGDCLVLNDTRVMPARLFGTKEETGAHIEVLLLKQGKDDEWETLVKPAKRVKVGTEITFGDGLLKATCTEELDHGGRLFKFSYDGIFYEILDKLGEMPLPPYIHEKLDDRERYQTVYSKEIGSAAAPTAGLHFTNEILEQIKEKGIEIVFITLHVGLGTFRPVSVDSIENHDMHSEFYSVSEEAAEVINRTKANGGKVIAVGTTSTRTLETIAQKYDGEIRAEQGWTNIFIYPGFEYKAIDGLITNFHLPKSTLVMLVSALTSREIILNAYNKAVEEKYRFFSFGDAMFIRPSR

SEQ ID NO: 68405 - protein, 346 aa, unidentified
  source 1..346: note = Lysinibacillus contaminans
  REGION 1..346: note = tr|A0A0M8Q4T5|A0A0M8Q4T5_9BACI S-adenosylmethionine:tRNA ribosyltransferase-isomerase; OS = Lysinibacillus contaminans OX=1293441 GN=queA PE=3 SV=1
MRVEDFDFELPEELIAQTPLMDRTASRLMVVTPGSEKVEHHQFAHILDELHAGDCLVLNDTRVLPARLMGVKEETGAHIEVLLLKQTAGTDEWETLVKPAKRVKIGTVVTFGDGLLTATCTGELEHGGRLFEFKYDGIFYEILEQLGEMPLPPYIREKLDDQERYQTVYAKERGSAAAPTAGLHFTEELLEQVKAKGVEIVFITLHVGLGTFRPVSVDSIENHAMHSEFYSVTEEAAEAINRVKANGGNIVAVGTTSTRTLETIGSKYDGEVRAEQGWTSIFIYPGYEFTVVDGLITNFHLPKSTLVMLVSTLATQETILSAYNQAVEEKYRFFSFGDAMFIRPKK

SEQ ID NO: 68406 - protein, 345 aa, unidentified
  source 1..345: note = Lysinibacillus endophyticus
  REGION 1..345: note = tr|A0A494ZBL0|A0A494ZBL0_9BACI S-adenosylmethionine:tRNA ribosyltransferase-isomerase; OS = Lysinibacillus endophyticus OX=1978490 GN=queA PE=3 SV=1
MKVEDFDFHLPEELIAQTPLEDRTSSRLMIVDRKTGEVEHSYFKHIVDELHEGDCLVLNDTRVMPARLMGVKEETGAHIELLLLKQGEGDVWETLAKPAKRVKVGTVISFGEGLLKATCIGELDHGGRLFEFSYDGIFYEILDKLGEMPLPPYIHEKLDDRERYQTVYSKEIGSAAAPTAGLHFTNEILEQIKQKGVEIVFITLHVGLGTFRPVSVDSIENHDMHSEFYSVSESAAETINRTKANGGKVIAVGTTSTRTLETIAQKYDGEIRAEQGWTNIFIYPGFEYKAIDGLITNFHLPKSTLVMLVSALTSREIILNAYNKAVEEKYRFFSFGDAMFIRPIR

SEQ ID NO: 68407 - protein, 346 aa, Lysinibacillus fusiformis
  REGION 1..346: note = tr|A0A4Y4ICY0|A0A4Y4ICY0_9BACI S-adenosylmethionine:tRNA ribosyltransferase-isomerase; OS = Lysinibacillus fusiformis OX=28031 GN=queA PE=3 SV=1
MRVEDFDFELPEELIAQTPLVDRTASRLMVVTPGSIEVEHHHFAHVLDELRAGDCLVLNDTRVLPARLMGVKEETGAHIEVLLLKQLAGSDEWETLVKPAKRVKVGTVITFGDGLLTATCTGELDHGGRTFEFHYDGIFYEILEQLGEMPLPPYIREKLEDKDRYQTVYAKERGSAAAPTAGLHFTEELLEQVKAKGVEVVFITLHVGLGTFRPVSVDSIENHEMHAEFYSVTDEAADTINRVKRNGGKVIAVGTTSTRTLETIGSKYGGEVRPEQGWTSIFIYPGYTFSVVDGLITNFHLPKSTLVMLVSTLATRETILSAYQQAVEEKYRFFSFGDAMFIRPKE

SEQ ID NO: 68408 - protein, 346 aa, Lysinibacillus fusiformis
  REGION 1..346: note = tr|A0A2I0V1J5|A0A2I0V1J5_9BACI S-adenosylmethionine:tRNA ribosyltransferase-isomerase; OS = Lysinibacillus fusiformis OX=28031 GN=queA PE=3 SV=1
MRVEDFDFELPEELIAQTPLIDRTASRLMVVTPGATKVEHHHFAHVLDELHAGDCLVLNDTRVLPARLMGVKEETGAHIEVLLLKQLAGTDEWETLVKPAKRVKVGTVITFGEGLLTATCTGELEHGGRTFDFHYDGIFYEILEQLGEMPLPPYIREKLEDKDRYQTVYAKERGSAAAPTAGLHFTEQLLEQVKAKGVEVVFITLHVGLGTFRPVSVDSIENHEMHAEFYSVTEQAADTINRVKQNGGKVIAVGTTSTRTLETIGSKYEGEVRAEQGWTSIFIYPGYNFTVVDGLITNFHLPKSTLVMLVSTLATRETILSAYQQAVEEKYRFFSFGDAMFIRPKK

SEQ ID NO: 68409 - protein, 346 aa, unidentified
  source 1..346: note = Lysinibacillus halotolerans
  REGION 1..346: note = tr|A0A3M8H4X3|A0A3M8H4X3_9BACI S-adenosylmethionine:tRNA ribosyltransferase-isomerase; OS = Lysinibacillus halotolerans OX=1368476 GN=queA PE=3 SV=1
MKVEDFDFYLPEELIAQTPLEDRTASRLMIVDRKTGEVEHSQFKHIVDELQKGDCLVLNNTRVMPARLLGVKEETGAHIEVLLLKQGNNDEWETLVKPAKRVKVGTEISFGDGLLKATCIGELDHGGRLFKFNYEGIFYEILDQLGEMPLPPYIHEKLDDRERYQTVYSKEIGSAAAPTAGLHFTNEILDQIKEKGVEVVFITLHVGLGTFRPVSVDSIENHDMHSEFYSVSEEAAEVINRTKANGGKVIAVGTTSTRTLETVAHKYNGEIRAEQGWTNIFIYPGFEYKAIDGLITNFHLPKSTLVMLVSALTTREIILNAYNKAVEEKYRFFSFGDAMFIRPNRS

SEQ ID NO: 68410 - protein, 346 aa, Lysinibacillus macroides
  REGION 1..346: note = tr|A0A0N0CV02|A0A0N0CV02_9BACI S-adenosylmethionine:tRNA ribosyltransferase-isomerase; OS = Lysinibacillus macroides OX=33935 GN=queA PE=3 SV=1
MRVEDFDFALPEELIAQTPLVDRTASRLMVVTPGSHKVEHHHFAHIVDELQAGDCLVLNDTKVLPARLMGVKEGTGAHIEVLLLKQLAGTDEWETLVKPAKRVKVGTVITFGDGLLTATCTGELEHGGRTFEFQYEGIFYEILEQLGEMPLPPYIREKLEDKDRYQTVYAKERGSAAAPTAGLHFTEQLLAQVKAKGVEVAFITLHVGLGTFRPVSVDSIENHEMHAEFYSVTEEAAATINQVKRNGGKVIAVGTTSTRTLETIGSKYSGEVRAEQGWTSIFIYPGYNFTVVDGLITNFHLPKSTLVMLVSTLATRETILSAYQQAVEEKYRFFSFGDAMFIRPKR

SEQ ID NO: 68411 - protein, 346 aa, unidentified
  source 1..346: note = Lysinibacillus manganicus
  REGION 1..346: note = tr|A0A0A3I1C6|A0A0A3I1C6_9BACI S-adenosylmethionine:tRNA ribosyltransferase-isomerase; OS = Lysinibacillus manganicus DSM 26584 OX=1384049 GN=queA; PE = 3 SV=1
MRVEDFDFELPEELIAQTPLEDRTASRLMVVDRKTGDVEHNHFPQIVAELQQGDCLVLNDTRVMPARLFGVKEETGAHIELLLLKQGQDDEWETLVKPAKRVKVGTELTFGEGLLKATCTGELDHGGRMFKFSYEGIFYEILDQLGEMPLPPYIHEKLDDSERYQTVYSKEIGSAAAPTAGLHFTTEILEKIKENGVEIVFITLHVGLGTFRPVSVDSIENHDMHSEFYSVSEDAAKVINRTKANGGKVIAVGTTSTRTLETIAQKYNGEIRAEQGWTNIFIYPGFDYKAIDGLITNFHLPKSTLVMLVSALTSRDIILNAYRQAVEKKYRFFSFGDAMFIRPDRD

SEQ ID NO: 68412 - protein, 347 aa, unidentified
  source 1..347: note = Lysinibacillus mangiferihumi
  REGION 1..347: note = tr|A0A4U2ZEJ8|A0A4U2ZEJ8_9BACI S-adenosylmethionine:tRNA ribosyltransferase-isomerase; OS = Lysinibacillus mangiferihumi OX=1130819 GN=queA PE=3; SV = 1
MRVEDFDFELPEELIAQTPLVDRTASRLMVVTPGSEKVEHHHFAHILEELHAGDCLVLNDTRVLPARLMGVKEETGAHIEVLLLKQTAGTDEWETLVKPAKRVKVGTVVTFGDGLLTATCTAELDHGGRMFKFKYDGIFYEILEQLGEMPLPPYIREKLDDSERYQTVYAKERGSAAAPTAGLHFTQELLEQVRAKGVEIVFITLHVGLGTFRPVSVDSIENHEMHAEFYSVTEEAAATINRVKANGGHVIAVGTTSTRTLETIGSKYGEVRAEQGWTSIFIYPGYQFTVVDGLITNFHLPKSTLVMLVSTLATKDTILSAYHQAVEEKYRFFSFGDAMFIRPSLQK

SEQ ID NO: 68413 - protein, 346 aa, unidentified
  source 1..346: note = Lysinibacillus massiliensis
  REGION 1..346: note = tr|A0A0A3J0F1|A0A0A3J0F1_9BACI S-adenosylmethionine:tRNA ribosyltransferase-isomerase; OS = Lysinibacillus massiliensis 4400831 = CIP 108448 = CCUG 49529 OX=1211035 GN= queA PE=3 SV=1
MKVEDFDFDLPEELIAQTPLEDRTASRLMIVDRKTGEVEHHHFPRIVEELQKGDCLVLNDTRVMPARLFGVKEETGAHIEILLLKQGNADEWETLVKPAKRVKIGTEITFGDGLLKATCTGELDHGGRLFKFSYDGIFYEILDQLGDMPLPPYIHEKLEDRERYQTVYSKEIGSAAAPTAGLHFTNEILELIKEKGVEVVFITLHVGLGTFRPVSVDSIENHDMHSEFYSVTEEAAEVINRTKKHGGKVIAVGTTSTRTLETIAQKYNGEIRAEQGWTNIFIYPGFEYKAIDGLITNFHLPKSTLVMLVSALTSREIILNAYRKAVEEKYRFFSFGDAMFIRPSRD

SEQ ID NO: 68414 - protein, 347 aa, unidentified
  source 1..347: note = Lysinibacillus odysseyi
  REGION 1..347: note = tr|A0A0A3IKS9|A0A0A3IKS9_9BACI S-adenosylmethionine:tRNA ribosyltransferase-isomerase; OS = Lysinibacillus odysseyi 34hs-1 = NBRC 100172 OX=1220589; GN = queA PE=3 SV=1
MKVEDFDFHLPEELIAQTPLLDRASSRLMVVNPFTMEIEHHQFGHILDELQAGDCLVLNDTKVLPARLMGTKEDTGAGIELLLLKQTGNDEWETLVKPAKRVKIGTVITFGGGLLKATCTGMLEHGGRSFKFSYDGIFYEILEKLGEMPLPPYIREKLEDQDRYQTVYARERGSAAAPTAGLHFTQELLEQIKNKGVHVVFVTLHVGLGTFRPVSVDSIEDHDMHSEFYSVTEEAAEVINRTKQSGGKVVSVGTTSTRTLETIASKYNGEIRAEQGWTNIFIYPGYEYKAIDGLITNFHLPKSTLVMLVSALAGKETILHAYNEAVKEKYRFFSFGDAMYIRPRNNR

SEQ ID NO: 68415 - protein, 347 aa, unidentified
  source 1..347: note = Lysinibacillus saudimassiliensis
  REGION 1..347: note = tr|A0A078M3L0|A0A078M3L0_9BACI S-adenosylmethionine:tRNA ribosyltransferase-isomerase; OS = Lysinibacillus saudimassiliensis OX=1461583 GN=queA; PE = 3 SV=1
MRVEDFDFELPEQLIAQTPLLDRTASRLLVVTPDTTVLQHEKFPAIVDELEAGDCLVLNDTRVLPARLMGEKDTGAHIEVLLLKQHETDVWETLVKPAKRVKVGTVVTFGNLLTATCTEILAHGGRKFKFSYDGIFYEILDQLGEMPLPPYIREKLDDQDRYQTVFARERGSAAAPTAGLHFTDEILDAIRAKGVTITFITLHVGLGTFRPVSVDSIDDHEMHSEFYSMSEETAALINQTKANGGKVIAVGTTSTRTLETIGAKYNGEMRAEQGWTSIFIYPGYKWTVVDGLLTNFHLPKSTLVMLVSSLASKETIMHAYETAVQQQYRFFSFGDAMFIRPNRKDTK

SEQ ID NO: 68416 - protein, 346 aa, unidentified
  source 1..346: note = Lysinibacillus sinduriensis
  REGION 1..346: note = tr|A0A0A3HPX9|A0A0A3HPX9_9BACI S-adenosylmethionine:tRNA ribosyltransferase-isomerase; OS = Lysinibacillus sinduriensis BLB-1 = JCM 15800; OX = 1384057 GN=queA PE=3 SV=1
MKVEDFDFHLPEELIAQTPLEDRTASRLMIVDRKTGKVENSHFPQIVDELQKGDCLVLNDTRVMPARLFGVKEETGAHIEVLLLKQGSGDEWETLVKPAKRVKVGTEITFGDGLLKATCIGELDHGGRVFKFDYDGIFYEILDQLGEMPLPPYIHEKLENRERYQTVYSKEIGSAAAPTAGLHFTNEILEQIKKKGVEIVFITLHVGLGTFRPVSVDSIESHDMHSEFYSVNEEAATTINRVKANGGKVVAVGTTSTRTLETIAQKYDGEIRAEQGWTNIFIYPGFEYKAIDGLITNFHLPKSTLVMLVSALTSREIILNAYNRAVEEQYRFFSFGDAMFIRPIRP

SEQ ID NO: 68417 - protein, 342 aa, Lysinibacillus sp.
  REGION 1..342: note = tr|A0A544UZG6|A0A544UZG6_9BACI S-adenosylmethionine:tRNA ribosyltransferase-isomerase; OS = Lysinibacillus sp. SDF0063 OX=2133753 GN=queA PE=3 SV=1
MDVQQFDFDLPEHLIAQHPLEDRTSSRLLVLEKQTGNIVHQQFTHLIDHLQAGDVLVMNDSRVLPARLIGEKADTGAKIEILLLKSLGDDRWETLVKPGKRMKPGTEVIFGNGLLRCVCEDVTETGGRIVRFLYEGIFYEILDQLGSMPLPPYIHAQLEDSERYQTVYAKERGSAAAPTAGLHFTKPYLEQIAAKGVQLAYVTLHVGLGTFRPVSADSVEEHVMHAEYYEIPEETAELVNQAKAEGRRVIAVGTTSCRTLETVGRANGGKLVATSGWTDIFIYPGYTFSILDGLLTNFHLPKSTLVMLVSALAGKENVMRAYKTAVEEEYRFFSFGDAMLIL

SEQ ID NO: 68418 - protein, 347 aa, Lysinibacillus sp.
  REGION 1..347: note = tr|A0A4R7UD96|A0A4R7UD96_9BACI S-adenosylmethionine:tRNA ribosyltransferase-isomerase; OS = Lysinibacillus sp. YR326 OX=1855296 GN=queA PE=3 SV=1
MRVEDFDFELPEELIAQTPLLDRTASRLMVVTPGSKNVEHHHFAHILDELQAGDCLVLNDTRVLPARLMGVKEETGAHIEVLLLKQMAGTDEWETLVKPAKRVKVGTVVTFGDGLLTATCTGELDHGGRTFEFKYNGIFYEILEQLGEMPLPPYIREKLEDKDRYQTVYAKERGSAAAPTAGLHFTEELLEQVKAKGVEVVFITLHVGLGTFRPVSVDSIENHEMHSEFYSVTEETASIINRVKSNGGKVIAVGTTSTRTLETIGSKYGGEVRAEQGWTSIFIYPGYEFTIVDGLITNFHLPKSTLVMLVSTLATRETILSAYHQAVEEKYRFFSFGDAMFIRPKGE

SEQ ID NO: 68419 - protein, 346 aa, Lysinibacillus sphaericus; identical to SEQ ID NO: 68407
  REGION 1..346: note = tr|A0A410MQ52|A0A410MQ52_LYSSH S-adenosylmethionine:tRNA ribosyltransferase-isomerase; OS = Lysinibacillus sphaericus OX=1421 GN=queA PE=3 SV=1

SEQ ID NO: 68420 - protein, 346 aa, Lysinibacillus sphaericus
  REGION 1..346: note = sp|B1HVA2|QUEA_LYSSC S-adenosylmethionine:tRNA ribosyltransferase-isomerase OS=Lysinibacillus sphaericus (strain C3-41) OX=444177 GN=queA PE=3 SV=1
MRVEDFDFELPEELIAQTPLVDRTASRLMVVTPGSNEVEHQHFAHVLEELRTGDCLVLNDTRVLPARLMGVKEETGAHIEVLLLKQLPGTDEWETLVKPAKRVKVGTVITFGDGLLTATCTGELDHGGRTFEFHYDGIFFEILEQLGEMPLPPYIREKLEDKDRYQTVYAKERGSAAAPTAGLHFTEELLEQVKAKGVEVVFITLHVGLGTFRPVSVDSIENHEMHAEFYSVTEEAADTINRVKRNGGKIIAVGTTSTRTLETIGSKYDGEVRAEQGWTSIFIYPGYTFTVVDGLITNFHLPKSTLVMLVSTLATRETILSAYQQAVEEKYRFFSFGDAMFIRPKE

SEQ ID NO: 68421 - protein, 347 aa, unidentified
  source 1..347: note = Lysinibacillus tabacifolii
  REGION 1..347: note = tr|A0A4U2XQI8|A0A4U2XQI8_9BACI S-adenosylmethionine:tRNA ribosyltransferase-isomerase; OS = Lysinibacillus tabacifolii OX=1173107 GN=queA PE=3 SV=1
MRVEDFDFELPEELIAQTPLVDRTASRLMVVTPGSEKVEHHHFAHILEELHAGDCLVLNDTRVLPARLMGVKEETGAHIEVLLLKQTAGTDEWETLVKPAKRVKVGTVVTFGDGLLTATCTAELDHGGRMFEFKYEGIFYEILEQLGEMPLPPYIREKLDDSERYQTVYAKERGSAAAPTAGLHFTQELLEQVRAKGVEIVFITLHVGLGTFRPVSVDSIENHEMHAEFYSVTEEAAATINRVKANGGHVIAVGTTSTRTLETIGSKYGEVRAEQGWTSIFIYPGYQFTVVDGLITNFHLPKSTLVMLVSTLATKDTILSAYHQAVEEKYRFFSFGDAMFIRPSLQK

SEQ ID NO: 68422 - protein, 345 aa, unidentified
  source 1..345: note = Lysinibacillus telephonicus
  REGION 1..345: note = tr|A0A431UWZ2|A0A431UWZ2_9BACI S-adenosylmethionine:tRNA ribosyltransferase-isomerase; OS = Lysinibacillus telephonicus OX=1714840 GN=queA PE=3 SV=1
MKVEDFDFHLPEELIAQTPLEDRTASRLMIVDRKTGEVEHSLFKHIVEELHEGDCLVLNDTRVMPARLFGEKEETGAHIELLLLKQGSDDEWETLVKPAKRVKVGTVITFGDGLLKATCTGELDHGGRMFKFSYDGIFYEILDKLGEMPLPPYIHEKLDNRERYQTVYSKEIGSAAAPTAGLHFTNELLDEIKAKGVEIVFITLHVGLGTFRPVSVDSIENHDMHSEFYSVTEEAAQTINRIKANGGKVIAVGTTSTRTLETIAHKYDGEIRAEQGWTNIFIYPGFEYKAIDGLITNFHLPKSTLVMLVSALTSREIILNAYNIAVEEKYRFFSFGDAMFIRPIR

SEQ ID NO: 68423 - protein, 347 aa, unidentified
  source 1..347: note = Lysinibacillus varians
  REGION 1..347: note = tr|X2GVD8|X2GVD8_9BACI S-adenosylmethionine:tRNA ribosyltransferase-isomerase OS=Lysinibacillus varians; OX = 1145276 GN=queA PE=3 SV=1
MRVEDFDFELPEELIAQTPLVDRTASRLMVVTPGSEKVEHHHFAHILEELHAGDCLVLNDTRVLPARLMGVKEETGAHIEVLLLKQTAGTDEWETLVKPAKRVKVGTVVTFGDGLLTATCTAELDHGGRMFEFKYEGIFYEILEQLGEMPLPPYIREKLDDSERYQTVYAKERGSAAAPTAGLHFTQELLEQVRVKGVEIVFITLHVGLGTFRPVSVDSIENHEMHAEFYSVTEEAAATINRVKANGGHVIAVGTTSTRTLETIGSKYGEVRAEQGWTSIFIYPGYQFTVVDGLITNFHLPKSTLVMLVSTLATKDTILSAYHQAVEEKYRFFSFGDAMFIRPSLQK

SEQ ID NO: 68424 - protein, 347 aa, Lysinibacillus xylanilyticus
  REGION 1..347: note = tr|A0A2M9PWZ8|A0A2M9PWZ8_9BACI S-adenosylmethionine:tRNA ribosyltransferase-isomerase; OS = Lysinibacillus xylanilyticus OX=582475 GN=queA PE=3 SV=1
MRVEDFDFELPEELIAQTPLLDRTASRLMVVTPGSKNVEHHHFAHILNELQAGDCLVLNDTRVLPARLMGVKEETGAHIEVLLLKQMAGTDEWETLVKPAKRVKVGTVVTFGDGLLTATCTGELDHGGRTFEFKYNGIFYEILEQLGEMPLPPYIREKLEDKDRYQTVYAKERGSAAAPTAGLHFTEELLEQVKAKGVEVVFITLHVGLGTFRPVSVDSIENHEMHSEFYSVTEETASIINRVKSNGGKVIAVGTTSTRTLETIGSKYGGEVRAEQGWTSIFIYPGYEFTIVDGLITNFHLPKSTLVMLVSTLATRETILSAYHQAVEEKYRFFSFGDAMFIRPKGE

SEQ ID NO: 68425 - protein, 347 aa, Lysinibacillus xylanilyticus; identical to SEQ ID NO: 68418
  REGION 1..347: note = tr|A0A0K9F6Y1|A0A0K9F6Y1_9BACI S-adenosylmethionine:tRNA ribosyltransferase-isomerase; OS = Lysinibacillus xylanilyticus OX=582475 GN=queA PE=3 SV=1

SEQ ID NO: 68426 - protein, 345 aa, unidentified
  source 1..345: note = Lysinibacillus xyleni
  REGION 1..345: note = tr|A0A285S5A5|A0A285S5A5_9BACI S-adenosylmethionine:tRNA ribosyltransferase-isomerase; OS = Lysinibacillus xyleni OX=614648 GN=queA PE=3 SV=1
MKVEDFDFHLPEELIAQTPLEDRTSSRLMIVDRKTGEVDHSNFKHIVDELHGGDCLVLNDTRVMPARLMGVKEETGAHIELLLLKQGEEDIWETLAKPAKRVKVGTVISFGEGLLKATCIGELDHGGRLFKFSYDGIFYEILDKLGEMPLPPYIHEKLDDRERYQTVYSKEIGSAAAPTAGLHFTNEILEQIKQKGVEIVFITLHVGLGTFRPVSVDSIENHDMHSEFYSVSDVAAETINRTKANGGKVIAVGTTSTRTLETIAQKYDGEIRAEQGWTNIFIYPGFVYKAIDGLITNFHLPKSTLVMLVSALTSREIILNAYNKAVEEKYRFFSFGDAMFIRPIR

SEQ ID NO: 68427 - protein, 350 aa, unidentified
  source 1..350: note = Lysobacter aestuarii
  REGION 1..350: note = tr|A0A508A2J2|A0A508A2J2_9GAMM S-adenosylmethionine:tRNA ribosyltransferase-isomerase; OS = Lysobacter aestuarii OX=1706195 GN=queA PE=3 SV=1
MRKSDFHYELPAELIAQAPLAERSASRLLVVPPEPGVLGDRAFRELPALLEPGDLLVFNDTRVIPARLFGRKSTGGRVEILIERLLGGADARAQLGVSKSPKPGAVIVLDAGGEAEVLGRDGEFYRLRFHLSESLESWLVKAGRLPLPPYIEREPGADDAERYQTVFAREAGAVAAPTAGLHFDDALLDALRERGVSMGHVTLHVGAGTFQPVRVEQLDQHVMHSEWLNVGAELVDQVRRTRAAGGRVIGVGTTVVRALESAMQGNASGERELRPFAGETRLFILPGYRIRSVDAMITNFHLPESTLLMMISAFAGKARVFEAYAHAIRERYRFFSYGDAMLLWPGGDAR

SEQ ID NO: 68428 - protein, 352 aa, Lysobacter antibioticus
  REGION 1..352: note = tr|A0A0S2E0S3|A0A0S2E0S3_9GAMM S-adenosylmethionine:tRNA ribosyltransferase-isomerase; OS = Lysobacter antibioticus OX=84531 GN=queA PE=3 SV=1
MKKNDFHYELPPELIAQAPLAERSASRLLVVPPAPAPREDRVFRELPQLLQPGDLLVFNDTRVIPARLFGQKSTGGRVEILIERLLGGMEARAQIGVSKSPKAGARIALDAGGEAEVLDREGEFYRLRFHVPESLEQWLLHAGRLPLPPYIQREPGSDDQERYQTVFAREVGAVAAPTAGLHFDDALLAQLRERGVEFGHVTLHVGAGTFQPVRAESLDQHVMHSEWLNVGAGLVEQIRRTRAAGGRVIAVGTTVVRALESAIRHHSGVAGEESELQPFAGETRLFILPGYRIRSVDGLITNFHLPESTLLMLVSAFAGKDAVFAAYEHAIRERYRFFSYGDAMLLWPTAEV

SEQ ID NO: 68429 - protein, 350 aa, unidentified
  source 1..350: note = Lysobacter arseniciresistens
  REGION 1..350: note = tr|A0A0A0F4X4|A0A0A0F4X4_9GAMM S-adenosylmethionine:tRNA ribosyltransferase-isomerase; OS = Lysobacter arseniciresistens ZS79 OX=913325 GN=queA; PE = 3 SV=1
MKKSDFTYDLPPGLIAQAPLPQRSASRLLQVPPAPAPFSDHVFSDLPGLLRAGDLLVFNDTRVIPARLFGTKATGGRVEILIERLLGGADARAQLGVSKSPKAGARITLDAGGVAEVLGRDGEFYHLRFHVAEGLEQWLLHAGRLPLPPYIQREPGADDAERYQTVFARNTGAVAAPTAGLHFDQPLLDTLAAMGVQSGHVTLHVGAGTFQPVRVDDLSEHVMHSEWINVGAALVEQVRRTRAAGGRVIAVGTTVVRALETAIQRTDANPDGELQPFAGESRLFILPGYRIRSVDALVTNFHLPESTLLMMVSAFAGKERVFAAYRHAIDAGYRFFSYGDAMLLWPEARA

SEQ ID NO: 68430 - protein, 349 aa, Lysobacter capsici
  REGION 1..349: note = tr|A0A120AG08|A0A120AG08_9GAMM S-adenosylmethionine:tRNA ribosyltransferase-isomerase; OS = Lysobacter capsici AZ78 OX=1444315 GN=queA PE=3 SV=1
MKKSDFNYELPPELIAQAPLAERSASRLLVVPPAPAPREDRVFSDLPQLLQPGDLLVFNDTRVIPARLFGQKSTGGRVEILIERLLGGSEARAQLGVSKSPKQGARIALDAGGEAEVLGRDGEFYRLRFHVPESLEQWLLHAGRLPLPPYIQREPGRDDDERYQTVFAREIGAVAAPTAGLHFDEALLAQLRERGIEFGHVTLHVGAGTFQPVRADSLDQHVMHSEWLNVGAGLIEQIRRCRARGGRVIAVGTTVVRALESAIRLNPADDGELLPFAGETRLFILPGYRITSVAGLITNFHLPESTLLMLVSAFSGKEQVFAAYEHAIAQRYRFFSYGDAMLLWPLAAD

SEQ ID NO: 68431 - protein, 349 aa, Lysobacter capsici
  REGION 1..349: note = tr|A0A290ZZ53|A0A290ZZ53_9GAMM S-adenosylmethionine:tRNA ribosyltransferase-isomerase; OS = Lysobacter capsici OX=435897 GN=queA PE=3 SV=1
MKKSDFNYELPPELIAQAPLAERSASRLLVVPPAPAPREDRVFSDLPQLLQPGDLLVFNDTRVIPARLFGQKSTGGRVEILIERLLGGSEARAQLGVSKSPKQGARIALDAGGEAEVLGRDGEFYRLRFHVPESLEQWLLHAGRLPLPPYIQREPGQDDDERYQTVFAREIGAVAAPTAGLHFDEALLAQLRERGIEFGHVTLHVGAGTFQPVRADSLDQHVMHSEWLNVGAGLIEQIRRCRARGGRVIAVGTTVVRALESAIRLNPADDGELLPFAGETRLFILPGYRITSVDGLITNFHLPESTLLMLVSAFSGKEQVFAAYEHAIAQRYRFFSYGDAMLLWPLAAD

SEQ ID NO: 68432 - protein, 350 aa, Lysobacter concretionis
  REGION 1..350: note = tr|A0A0A0EP39|A0A0A0EP39_9GAMM S-adenosylmethionine:tRNA ribosyltransferase-isomerase; OS = Lysobacter concretionis Ko07 = DSM 16239 OX=1122185; GN = queA PE=3 SV=1
MKKSDFHYLLPPRLIAQAPLAARSSSRLLLVPPIPGAFEDHVFSELPDLLAPGDLLVFNDTRVIPARLFGQKATGGRVEILIERLLGGDEARAQLGVSKSPRSGSRIALDAGGEVEVLGRDGEFYRLRFHVAESLEAWLLHAGQLPLPPYIQRAPGADDAERYQTVFARETGAVAAPTAGLHFDEPLLERLAARGVGFGHVTLHVGAGTFQPVRVDDLDQHVMHSEWLNVGAALVEQVRRTRAAGGRVIAVGTTVVRALETAMRPTPENPAGELLPYAGESRLFILPGYRIRSVDAMVTNFHLPESTLLMMVSAFAGRDRVFAAYAHAIAREYRFFSYGDAMLLFPESMQ

SEQ ID NO: 68433 - protein, 353 aa, Lysobacter daejeonensis
  REGION 1..353: note = tr|A0A0A0F3N4|A0A0A0F3N4_9GAMM S-adenosylmethionine:tRNA ribosyltransferase-isomerase; OS = Lysobacter daejeonensis GH1-9 OX=1385517 GN=queA PE=3; SV = 1
MKKSDFHYDLPPELIAQAPLAERSASRLLVVPPAPASLQDRHFRDLLDLLAPGDLLVFNDTRVIPARLFGQKATGGRVEILIERLLGGNQARAQLGVSKSPKAGARIALDAGGEAEVLGRDGEFYVLQFHVPESLEQWLLHAGRLPLPPYIQRAPGQDDTERYQTVFAREVGAVAAPTAGLHFDEALLAALKAKGVEFGHVTLHVGAGTFQPVRVDDLDQHVMHSEWLNVGAELVEAVRRTRDAGGRVVGVGTTVVRALESATRTNDTGQRELQPYAGETRLFILPGYRITAVDALVTNFHLPESTLLMMVSAFAGQDRVFEAYAHAIREGYRFFSYGDAMLLFPEAAPEFRA

SEQ ID NO: 68434 - protein, 350 aa, Lysobacter defluvii
  REGION 1..350: note = tr|A0A0A0M7H3|A0A0A0M7H3_9GAMM S-adenosylmethionine:tRNA ribosyltransferase-isomerase; OS = Lysobacter defluvii IMMIB APB-9 = DSM 18482 OX=1385515; GN = queA PE=3 SV=1
MKKSDFTYELPAELIAQAPLAERSASRLLVVPPAPGALLDRQVRELPRLLEPGDLLVFNDTRVIPARLFGHKQTGGRVEILVERLLGEGRARVQLGVSKSPKAGALIELDAGGIAEVAGRDGEFYLLDFRVDGPLQEYLERAGRLPLPPYIQREPGTDDAERYQTVFARVAGAVAAPTAGLHFDAPLLDELAARGVRTAHVTLHVGAGTFQPVRVEDLSGHVMHAERIEVGQAVVDEVARTRAAGGRVIAVGTTVVRALETAMQVGPDNPDGALRPFAGESRLFILPGYRIRSVDAMLTNFHLPESTLLMMVSAFAGRERIRQAYRHAVESRYRFFSYGDAMLLFPEASS

SEQ ID NO: 68435 - protein, 346 aa, Lysobacter dokdonensis
  REGION 1..346: note = tr|A0A0A2WIJ3|A0A0A2WIJ3_9GAMM S-adenosylmethionine:tRNA ribosyltransferase-isomerase; OS = Lysobacter dokdonensis DS-58 OX=1300345 GN=queA PE=3; SV = 1
MKRSDFHYDLPQDLIAQAPLPERSASRLLVVQPAPAPLGDRGVRDLPDLLRAGDLMVFNDTRVIPARLFGQKASGGRVEILIERLLPGDEARAQVGASKSPKAGSRIALDAGGEAEVLGREGEFYRLRFHVDGPFAEWLQHAGRLPLPPYIHRDADINDDARYQTVFAKQTGAVAAPTAGLHFDEALLDALRAKGVAFGHVTLHVGAGTFQPVRVDELSEHRMHSEWLNVDASLVEQVRATRARGGRVIAVGTTVVRALESALVDGQLQPFAGETAIFILPGYRIRSVDALLTNFHLPESTLLMLVSAFAGKARIFEAYAHAIAQGYRFFSYGDAMLLWPSDGDTQ

SEQ ID NO: 68436 - protein, 346 aa, Lysobacter enzymogenes
  REGION 1..346: note = tr|A0A0S2DJZ4|A0A0S2DJZ4_LYSEN S-adenosylmethionine:tRNA ribosyltransferase-isomerase; OS = Lysobacter enzymogenes OX=69 GN=queA PE=3 SV=1
MKKSDFHYDLPPELIAQAPLPERSASRLLRVPPAPAALEDRNVRDLPQLLQPGDLLVFNDTRVIPARLFGQKSTGGRVEILIERLLGGNEARAQLGVSKSPKEGARIAMDAGGEAEVLGRDGEFYRLRFHVSESLEQWLLHAGRLPLPPYIQREPGRDDAERYQTVFAREVGAVAAPTAGLHFDESLLQALRERGVQFGHVTLHVGAGTFQPVRADDLSQHVMHSEWLNVGAGLVEQIRRTRAAGGRVIGVGTTVVRALESATRQGGGELQPYAGETRLFILPGYRIRSVDAMVTNFHLPESTLLMMISAFAGKQRVFDAYAHAIAQRYRFFSYGDAMLLSASDAE

SEQ ID NO: 68437 - protein, 382 aa, Lysobacter enzymogenes
  REGION 1..382: note = tr|A0A3N2RHU9|A0A3N2RHU9_LYSEN S-adenosylmethionine:tRNA ribosyltransferase-isomerase; OS = Lysobacter enzymogenes OX=69 GN=queA PE=3 SV=1
MARSPSRSEPAPRPGSRPIGRASDGAAPGAQSLRFPLKKSDFHYDLPPELIAQAPLPERSASRLLQVPPAPAALEDRNVRDLPQLLQPGDLLVFNDTRVIPARLFGQKSTGGRVEILIERLLGANEARAQLGVSKSPKEGARIALDAGGEAEVLGRDGEFYRLRFHVSESLEQWLLHAGRLPLPPYIQREPGRDDAERYQTVFAREVGAVAAPTAGLHFDEYLLQALRERGVQFGHVTLHVGAGTFQPVRADDLSQHVMHSEWLNVGAELVEQIRRTRAAGGRVIGVGTTVVRALESATRQGGGELRPYAGETRLFILPGYRIRSVDAMVTNFHLPESTLLMMISAFAGKQRVFDAYAHAIAQRYRFFSYGDAMLLWASEET

SEQ ID NO: 68438 - protein, 348 aa, Lysobacter gummosus
  REGION 1..348: note = tr|A0A0S2G998|A0A0S2G998_9GAMM S-adenosylmethionine:tRNA ribosyltransferase-isomerase; OS = Lysobacter gummosus OX=262324 GN=queA PE=3 SV=1
MKKSDFHYELPPELIAQAPLAQRSASRLLVVPPLPAAREDRVFSDLPQMLQPGDLLVFNDTRVIPARLFGQKSTGGRVEILIERLLGGSEARAQLGVSKSPKEGARIALDAGGEAEVLGREGEFYRLRFHVPESLEQWLLHAGRLPLPPYIQREPGHDDAERYQTVFAREVGAVAAPTAGLHFDEELLARLRERGVQFGHVTLHVGAGTFQPVRADHLDQHVMHSEWLNVGAGLVEQIRRTRAAGGRVIAVGTTVVRALESAIRLNQDADGELRPFAGETRLFILPGYQIRSVDALITNFHLPESTLLMLVSAFAGKEQVFSAYEHAIAERYRFFSYGDAMLLWPQAS

SEQ ID NO: 68439 - protein, 381 aa, unidentified
  source 1..381: note = Lysobacter lycopersici
  REGION 1..381: note = tr|A0A516V4A7|A0A516V4A7_9GAMM S-adenosylmethionine:tRNA ribosyltransferase-isomerase; OS = Lysobacter lycopersici OX=1324796 GN=queA PE=3 SV=1
MKKSDFHYELPPELIAQAPLPQRSASRLLVVPPGEGAFEDRHVRDLPSLLRAGDLLVFNDTRVIPARLFGQKASGGRVEILIERLLPGNEARAQLGVSKPPQVGSRIALDAGGETEVLAREEGGFWHLRFHVPESLENWLLHAGRMPLPPYIQREPGADDAERYQTVFARAVGAVAAPTAGLHFDEALLDALRERGVHFGHVTLHVGAGTFQPVRVDDIREHRMHSEWLNVGAELVQQVRRTREAGGRVVAIGTTVVRALESAMQGDELQPFAGETSIFLFPGVRIRSVDALLTNFHLPESTLLMLVSAFAGKERIFAAYEHAVRERYRFFSYGDAMLLWPEADGVPPFEKGGQGGFATVRENAEERILPDPPFPKEGGEQ

SEQ ID NO: 68440 - protein, 353 aa, unidentified
  source 1..353: note = Lysobacter maris
  REGION 1..353: note = tr|A0A2U9T730|A0A2U9T730_9GAMM S-adenosylmethionine:tRNA ribosyltransferase-isomerase; OS = Lysobacter maris OX=1605891 GN=queA PE=3 SV=1
MKKSDFHYELPPELIAQAPLAERSASRLLLVPPAPQPFADRVFRDLPGLLQPGDLLVFNDTRVIPARLFGQKSTGGRVEILIERLLGSAEARAQLGVSKSPRPGARIALDAGGEAEVLGRDGEFYHLRFHVDTPLESWLSRAGQLPLPPYIERRPGAEDAERYQTVFARETGAVAAPTAGLHFDDALLDALKARGVHTGHVTLHVGAGTFQPVRVEHLDQHLMHSEWLNVGAELVEQVRRTRAAGGRVIAVGTTVVRALESAMRDDGEGGRELRPFAGETRLFILPGYRIRSVDAMVTNFHLPESTLLMMISAFAGKERVFEAYAHAIRERYRFFSYGDAMLLWPRHDSGFPA

SEQ ID NO: 68441 - protein, 341 aa, unidentified
  source 1..341: note = Lysobacter pythonis
  REGION 1..341: note = tr|A0A3M2HWZ6|A0A3M2HWZ6_9GAMM S-adenosylmethionine:tRNA ribosyltransferase-isomerase; OS = Lysobacter pythonis OX=2483112 GN=queA PE=3 SV=1
MKKSDFRFDLPPELIAQAPLPERSASRLLVVPAGECGFADRGIRELPALLREGDLLVFNDTRVIPARLFGRKTSGGRVEILIERLLPENEARVQIGASKAPKPGSRIELDAGGEVEVLGRDDAFYHLRFHIGQPLEKWLVDAGRLPLPPYIERMPDAADAERYQTVFARHTGAVAAPTAGLHFDQPLLDALRSKGVEFGHVTLHVGAGTFQPMRAENAHEHVMHSEWLNVGAELVRQVRETRARGGRVIAVGTTVVRALESAMRDGQLQPFAGETRIFIFPGYRIESVDAMLTNFHLPESTLLMLVSAFAGRERILVAYAHAVARRYRFFSYGDAMLLWGR

SEQ ID NO: 68442 - protein, 353 aa, Lysobacter ruishenii
  REGION 1..353: note = tr|A0A562LSZ4|A0A562LSZ4_9GAMM S-adenosylmethionine:tRNA ribosyltransferase-isomerase; OS = Lysobacter ruishenii OX=686800 GN=queA PE=3 SV=1
MKKSDFHYDLPPELIAQAPLAERSASRLLLVPPAPAPLEDRHFRDLVDLLAPGDLLVFNDTRVIPARLFGQKATGGRVEILIERLLGGNQARAQLGVSKSPKTGARIALDAGGEAEVLGRDGEFYVLQFHVPESLEQWLLHAGRLPLPPYIQRAPGQDDAERYQTVFAREVGAVAAPTAGLHFDESLLAALKAKGVQFGHVTLHVGAGTFQPVRVDDLGQHVMHSEWLNVGAELVDAIRQTRAAGGRVIGVGTTVVRALESATRTSETGERELQPYAGETRLFILPGYRITAVDALVTNFHLPESTLLMMVSAFSGQDRIFQAYAHAIAERYRFFSYGDAMLLFPSDTTREAP

SEQ ID NO: 68443 - protein, 359 aa, unidentified
  source 1..359: note = Lysobacter silvestris
  REGION 1..359: note = tr|A0A2K1PXZ7|A0A2K1PXZ7_9GAMM S-adenosylmethionine:tRNA ribosyltransferase-isomerase; OS = Lysobacter silvestris OX=1645665 GN=queA PE=3 SV=1
MPIRATAAASILKTSDFRFDLPPELIAQQPLPERSASRLLVVPPGDAAFEDRGIRDLPGLLRAGDLLVFNDTRVIPARLFGQKATGGRVEILIERLLGDGVAKAQIGASKTPKPGSSIELDGGGSAEVIDRDDRGFFTLRFHVDGEFIDWLQRVGQLPLPPYIEHTPDAVDAERYQTVFAERAGAVAAPTAGLHFDDALLQSLRDRGIDDARITLHVGAGTFQPVRVENLDEHRMHSEWIDVPQKLVDKVRATRAAGGRVIAVGTTVLRALESAMTPDGLQAFSGETSIFIYPGIEVRSVDGLVTNFHLPESTLLMLVSAFAGRERILAAYEHAVRERYRFFSYGDAMLLWPQDGVSRK

SEQ ID NO: 68444 - protein, 360 aa, Lysobacter soli
  REGION 1..360: note = tr|A0A3D8VD79|A0A3D8VD79_9GAMM S-adenosylmethionine:tRNA ribosyltransferase-isomerase; OS = Lysobacter soli OX=453783 GN=queA PE=3 SV=1
MKKSDFHYDLPPELIAQAPLPERSASRLLVVPPTRGNAFDSGFQDRVFRDLPDLLQPGDLLVFNDTRVIPARLYGQKTTGGRVEILIERMLGGFEVRAQLGVSKSPKEGARIALDAGGEAEVLGRDGEFYRLRFHIDESLEKYLLHAGRLPLPPYIQREAGTDDDTRYQTVFAREVGAVAAPTAGLHFDEALLDALKARGVEFGHVTLHVGAGTFQPVRVDELDQHVMHSEWLNVGAALIEQIRRTRAAGGRVIAVGTTVVRALESAMRRNDDGEGELQPYAGETRLFILPGYRIRSVDALITNFHLPESTLLMLVSAFAGKARVFAAYDHAIAERYRFFSYGDAMLLFPQSHDEREQAE

SEQ ID NO: 68445 - protein, 348 aa, Lysobacter sp.
  REGION 1..348: note = tr|A0A4R4F393|A0A4R4F393_9GAMM S-adenosylmethionine:tRNA ribosyltransferase-isomerase; OS = Lysobacter sp. N42 OX=2545719 GN=queA PE=3 SV=1
MKRSDFDYDLPPELIAQAPLPERSASRLLVVRPDGDLEDRTFRDLPALLRKGDLLVFNDTRVIPARLFGRKSTGGRVEIMIERLLGADRARVQLGVSKSPKEGAVIELDAGGTAHVLGREEGFYVLRFDVPEPLESWLLHAGRLPLPPYIQREPGADDAERYQTVFAREVGAVAAPTAGLHFDEALLERLRAMGVDFGHVTLHVGAGTFQPVREDDVSRHVMHSEWINVGAALVEQVRRTREAGGRVIAVGTTVVRALESATRRDEAGDAELAPFAGETRLFILPGYRTTTVDALVTNFHLPQSTLLMLVSAFAGRDRVFQAYRHAVNARYRFFSYGDAMLLFPRPGP

SEQ ID NO: 68446 - protein, 347 aa, Lysobacter sp.
  REGION 1..347: note = tr|A0A345ZP69|A0A345ZP69_9GAMM S-adenosylmethionine:tRNA ribosyltransferase-isomerase; OS = Lysobacter sp. TY2-98 OX=2290922 GN=queA PE=3 SV=1
MKKSDFDYELPPELIAQAPLPERSASRLLVVPPGDVPFEDRVFRDLPNLLRVGDLLVFNDTRVIPARLFGQKATGGRVEIMIERLLGGDRARAQLGVSKSPKAGAEIELDAGGVARVLGREGGFYDLQFEVNEPLESWLLHAGRLPLPPYIQREPGQDDAERYQTVFAKEVGAVAAPTAGLHFDEALLDQLRAMGVEFGHVTLHVGAGTFQPVRVDDLSEHVMHSEWINVGASLVEQIRRTREAGGRVIGVGTTVVRALESATRRDENGMAEIVPFAGETQLFILPGYRITSVDAMVTNFHLPQSTLLMMVSAFVGRTRIFDAYRHAIHARYRFFSYGDAMLLWGRD

SEQ ID NO: 68447 - protein, 361 aa, Lysobacter spongiicola
  REGION 1..361: note = tr|A0A1T4N6E6|A0A1T4N6E6_9GAMM S-adenosylmethionine:tRNA ribosyltransferase-isomerase; OS = Lysobacter spongiicola DSM 21749 OX=1122188 GN=queA; PE = 3 SV=1
MFPGPPAKPLILKKSDFSYELPPDLIAQAPLPERSSSRLLVVPPAPASLSDRVFRDLPDLLEAGDLLVFNDTRVIPARLFGRKQTGGRVEILIERMLGGQEARAQLGVSKSPKAGARIELDAGGEAEVIGRDGEFYHLRFHVQTGLEQYLLHAGRLPLPPYIQREPGADDAERYQTVFARQAGAVAAPTAGLHFDQPLLDALAARGVEFGHVTLHVGAGTFQPVRADDLSEHVMHSEWLNVGAGLVEQVRRTRAAGRRVVAVGTTVVRALESAMQRTDRHPEGELQPFAGESRLFILPGYRIRSIDALVTNFHLPESTLLMMVSAFAGKARISEAYRHAIEQRYRFFSYGDAMLLLPEERS

SEQ ID NO: 68448 - protein, 344 aa, unidentified
  source 1..344: note = Lysobacter tolerans
  REGION 1..344: note = tr|A0A1N6NXZ5|A0A1N6NXZ5_9GAMM S-adenosylmethionine:tRNA ribosyltransferase-isomerase; OS = Lysobacter tolerans OX=1604334 GN=queA PE=3 SV=1
MKKSDFHFDLPPELIAQAPLPERSASRLLVVPPGNAPFEDRGIRDLPSLLREGDLLIFNDTRVIPARLFGNKATGGRVEILIERLLPDNEARAQIGASKTPKPGSRITLDAGGEVEVMGRDDAFHQLRFHVDAPLEKWLVDAGRLPLPPYIERAPDAADSERYQTVFARHTGAVAAPTAGLHFDEALLDELRAGGIEFGHVTLHVGAGTFQPMRVESVYEHVMHSEWLNVGAELVQQVRRTRERGGRVIAVGTTVVRALESAMREGALQPFAGETQIFIFPGYRIQSVDAMVTNFHLPESTLLMLVSAFVGRERILAAYQYAVAQRYRFFSYGDAMLLFSKDAG

SEQ ID NO: 68449 - protein, 405 aa, unidentified
  source 1..405: note = Macellibacteroides sp.
  REGION 1..405: note = tr|A0A1C2BVB4|A0A1C2BVB4_9PORP S-adenosylmethionine:tRNA ribosyltransferase-isomerase; OS = Macellibacteroides sp. HH-ZS OX=1857568 GN=A9168_07930; PE = 3 SV=1
MTAKTEQIRIEEFNYPLLDERIAKFPLTKRDESKLLVYRNGKIDEAVFKQLSDYLPQGSMLVYNNTRVIQARMLFQKETGAQIEVFCLEPVIPHDYALVFQQTESCSWLCLVGNLKKWKEGALHKTIRMDDKEVVLSAERIKTTGDSHLVRFSWNNPQVTFAELLDAAGILPIPPYLHRETRESDLQTYQTVYSKIKGSVAAPTAGLHFTPEVLAGLDAKGFTREEVTLHVGAGTFKPVKSEVIGDHEMHTEFISVRRSAIENIRTNLGRIIAVGTTSVRTLESLYYMGRTLVNNPDATSEELVVTQWTPYHDTEEVTAHEALTALLDYLDRNQTDTLLSATQIMIAPGYEFKIVKGIITNFHQPKSTLLLLISAFVNGNWKSIYNYALDNDFRFLSYGDSSLLL

SEQ ID NO: 68450 - protein, 349 aa, unidentified
  source 1..349: note = Macellibacteroides sp.
  REGION 1..349: note = tr|A0A1C2BTE6|A0A1C2BTE6_9PORP S-adenosylmethionine:tRNA ribosyltransferase-isomerase; OS = Macellibacteroides sp. HH-ZS OX=1857568 GN=queA PE=3; SV = 1
MKLSKFKFNLPSELIALQPAKNRDESRLMVVHRKTGEIEHRVFKDILEYFGPQDVFIFNNTKVFPARLYGNKEKTGARIEVFLLRELNEELRLWDVLVDPARKIRIGNKLYFGEDDSMVAEVIDNTTSRGRTLRFLFDGNHDEFKKALYALGETPLPKYIEREVDEDDEQRYQNIYASEEGAVVAPAAGLHFSRELMKRLEIKDCRFAFLTVHSGLGNFREIDVEDLTKHKMDSEQMVVNAEVVKTVNEAKDSNNQICAVGTSVMRAVETAVSTDGHLKEFEGWTNKFIFPPYDFSVATSMVTNFHMPLSTLLMMTASFGGYDLIMDAYEVAIKEKYRFGAYGDAMLII

SEQ ID NO: 68451 - protein, 340 aa, unidentified
  source 1..340: note = Macrococcus bohemicus
  REGION 1..340: note = tr|A0A4R5YBU6|A0A4R5YBU6_9STAP S-adenosylmethionine:tRNA ribosyltransferase-isomerase; OS = Macrococcus bohemicus OX=1903056 GN=queA PE=3 SV=1
MDVNEFNFELPERLIAQTPLLDRTASRLLALNKMTGEITHTHFKSIIDYLNEGDTLVLNDTKVMPARLFGVKSDTGAKIEMLMLTEHDNGWEVLIKPAKRVQIGTEVSFGDGKIIATCVDMLEQGGRIMQLKYDGILQERLDELGLMPLPPYIKETLDDQDRYQTVYAKAVGSAAAPTAGLHFTKELLAAIEEKGVNITYITLHVGLGTFRPVSVDSVEDHDMHSEYYEMTAETAQLLNRTKASGKRIISVGTTSTRTLETIADEKGQFEAQSGWTDIFIYPGYKFKAIDAMITNFHLPKSTLVMLVSSLATKEIILNAYHEAVKEEYRFFSFGDAMLIY

SEQ ID NO: 68452 - protein, 340 aa, unidentified
  source 1..340: note = Macrococcus bohemicus
  REGION 1..340: note = tr|A0A328A6Y3|A0A328A6Y3_9STAP S-adenosylmethionine:tRNA ribosyltransferase-isomerase; OS = Macrococcus bohemicus OX=1903056 GN=queA PE=3 SV=1
MDVNEFNFELPERLIAQTPLLDRTASRLLALNKTTGEITHTHFKSIIDYLNEGDTLVLNDTKVMPARLFGVKSDTGAKIEMLMLTEHDNGWEVLIKPAKRVQIGTEVSFGDGKIIATCVDMLEQGGRIMQLKYDGILQERLDELGLMPLPPYIKETLDDQDRYQTVYAKAVGSAAAPTAGLHFTKELLAAIEEKGVNITYITLHVGLGTFRPVSVDSVEDHDMHSEYYEMTAETAQLLNRTKASGKRIISVGTTSTRTLETIADEKGHFEAQSGWTDIFIYPGYKFKAIDAMITNFHLPKSTLVMLVSSLATKEIILNAYHEAVKEEYRFFSFGDAMLIY

SEQ ID NO: 68453 - protein, 341 aa, Macrococcus bovicus
  REGION 1..341: note = tr|A0A4R6C2S1|A0A4R6C2S1_9STAP S-adenosylmethionine:tRNA ribosyltransferase-isomerase; OS = Macrococcus bovicus OX=69968 GN=queA PE=3 SV=1
MNVNDFDFELPEELIAQTPLLDRTSSRLMTLNKETGAVSHEHFSDIISHLNAGDTLVLNDTKVMPARLYGIKEETGAKVEMLLLKQMTDNDWEVLIKPAKRVTVGTVVSFGDGKLTAVCKELLPQGGRIMTLQYNGILQERLEELGEMPLPPYIKEQLEDQSRYQTVYAKAVGSAAAPTAGLHFTEDLLEKIAAKGVNIAYITLHVGLGTFRPVSVEEIEDHDMHSEYYEMSQQTADILNETRENGGRIITVGTTSTRTLETIASLHADFTETSGWTDIFIYPGYEFKGIDAMITNFHLPKSTLMMLISSLATREYVLNAYAEAVKEKYRFFSFGDAMFIY

SEQ ID NO: 68454 - protein, 341 aa, Macrococcus brunensis
  REGION 1..341: note = tr|A0A4V3BDH2|A0A4V3BDH2_9STAP S-adenosylmethionine:tRNA ribosyltransferase-isomerase; OS = Macrococcus brunensis OX=198483 GN=queA PE=3 SV=1
MNVNDFDFELPEELIAQTPLLDRTSSRLMTLNKDTGAVSHEHFSDIVSHLNAGDTLVLNDTKVMPARLYGIKEETGAKVEMLLLKQMADNDWEVLIKPAKRVTVGTVVSFGEGKLKAVCKELLPQGGRIMTLQFSGILQERLEELGEMPLPPYIKEQLEDQSRYQTVYAKAVGSAAAPTAGLHFTEALLEEIAAKGVNIAYITLHVGLGTFRPVSVEEIEEHDMHSEYYEMSQATADILNRTRQQGGRIITVGTTSTRTLETIASMHPEFTETSGWTDIFIYPGYEFKGIDAMITNFHLPKSTLMMLISSLTTREHVLNAYAQAVKEKYRFFSFGDAMFIY

SEQ ID NO: 68455 - protein, 340 aa, unidentified
  source 1..340: note = Macrococcus canis
  REGION 1..340: note = tr|A0A4P9CIY1|A0A4P9CIY1_9STAP S-adenosylmethionine:tRNA ribosyltransferase-isomerase; OS = Macrococcus canis OX=1855823 GN=queA PE=3 SV=1
MDVNEFDFYLPESLIAQTPLQDRTASRLLTLNKLTGEIKHTTFKSIIDYLNAGDTLVLNDTKVMPARLFGVKEDTGAKIEMLMLTEHDNGWEVLIKPAKRVTVGTRVSFGEGKIVATCVEELDQGGRIMQLHYDGILQERLDELGLMPLPPYIKETLDDQSRYQTVYARATGSAAAPTAGLHFTESLLEAIKAKGVNIAYITLHVGLGTFRPVSVDDVESHKMHSEYYEMTEETAELLNDTRNRGNRIITVGTTSTRTLETIADDSGHFTAQSGWTDIFIYPGYSFKAVDAMITNFHLPKSTLVMLVSSLATKEFIMNAYHEAVNEKYRFFSFGDAMFIY

SEQ ID NO: 68456 - protein, 340 aa, unidentified
  source 1..340: note = Macrococcus canis
  REGION 1..340: note = tr|A0A1W7ACB6|A0A1W7ACB6_9STAP S-adenosylmethionine:tRNA ribosyltransferase-isomerase; OS = Macrococcus canis OX=1855823 GN=queA PE=3 SV=1
MDVNEFDFNLPESLIAQTPLQDRTASRLLTLNKLTGEIKHTTFKSIIDYLNAGDTLVLNDTKVMPARLFGVKEDTGAKIEMLMLTEHDNGWEVLIKPAKRVTVGTRVSFGEGKIVATCVEELDQGGRIMQLHYDGILQERLDELGLMPLPPYIKETLDDQSRYQTVYARATGSAAAPTAGLHFTESLLETIKAKGVNIAYITLHVGLGTFRPVSVDDVESHKMHSEYYEMTEETAELLNDTRNRGNRIITVGTTSTRTLETIADDSGHFTAQSGWTDIFIYPGYSFKAVDAMITNFHLPKSTLVMLVSSLATKEFIMNAYHEAVNEKYRFFSFGDAMFIY

SEQ ID NO: 68457 - protein, 341 aa, Macrococcus carouselicus
  REGION 1..341: note = tr|A0A4R6BR75|A0A4R6BR75_9STAP S-adenosylmethionine:tRNA ribosyltransferase-isomerase; OS = Macrococcus carouselicus OX=69969 GN=queA PE=3 SV=1
MNVNDFDFELPEELIAQTPLLDRASSRLMTLNKETGDISHTHFSDIVSYLNPGDTLVLNDTKVMPARLYGIKEETGAKVEMLLLTQLEDNDWEVLIKPAKRVAVGTVVSFGDGRLQAVCKELLPQGGRVMTLQYTGILQERLEELGEMPLPPYIKEQLEDQSRYQTVYAKAVGSAAAPTAGLHFTEKLLEEISAKGVNVTYITLHVGLGTFRPVSVDKIEDHDMHSEYYEMSQKTADILNQTRKNGKRIITVGTTSTRTLETIASRDGEFTETSGWTDIFIYPGYEFKGIDAMITNFHLPKSTLMMLISSLASREIILNAYAEAVKEKYRFFSFGDAMFIY

SEQ ID NO: 68458 - protein, 340 aa, Macrococcus caseolyticus
  REGION 1..340: note = sp|B9E717|QUEA_MACCJ S-adenosylmethionine:tRNA ribosyltransferase-isomerase OS=Macrococcus caseolyticus (strain JCSC5402) OX=458233 GN=queA PE=3 SV=1
MDVNEFDFNLPESLIAQTPLQDRTASRLLTLNKHTGEIKHTNFKSIIDYLNTGDTLVLNDTKVMPARLFGVKEDTGAKIEMLMLTEHDNGWEVLIKPAKRVTIGTRISFGEGKIVAICVEELDQGGRIMQLNYEGILQERLDELGLMPLPPYIKETLEDQSRYQTVYARATGSAAAPTAGLHFTESLLEDIKAKGINIAYITLHVGLGTFRPVSVDDVESHKMHSEYYEMSEETAKLLNDTRDSGNRIITVGTTSTRTLETIADDSGHFTAQSGWTDIFIYPGYSFKAVDAMITNFHLPKSTLVMLVSSLATKEFIMNAYNEAVNEKYRFFSFGDAMFIY

SEQ ID NO: 68459 - protein, 340 aa, Macrococcus caseolyticus
  REGION 1..340: note = tr|A0A3B0FFC8|A0A3B0FFC8_9STAP S-adenosylmethionine:tRNA ribosyltransferase-isomerase; OS = Macrococcus caseolyticus OX=69966 GN=queA PE=3 SV=1
MDVNEFDFNLPESLIAQTPLQDRTASRLLTLNKHTGEIKHTNFKSIIDYLDTGDTLVLNDTKVMPARLFGVKEDTGAKIEMLMLTEHDNGWEVLIKPAKRVTIGTRISFGEGKIVAICVEELDQGGRIMQLNYEGILQERLDELGLMPLPPYIKETLEDQSRYQTVYARATGSAAAPTAGLHFTESLLEDIKAKGINIAYITLHVGLGTFRPVSVDDVESHKMHSEYYEMSEETAKLLNDTRDSGNRIITVGTTSTRTLETIADDSGHFTAQSGWTDIFIYPGYSFKAVDAMITNFHLPKSTLVMLVSSLATKEFIMNAYNEAVNEKYRFFSFGDAMFIY

SEQ ID NO: 68460 - protein, 340 aa, unidentified
  source 1..340: note = Macrococcus epidermidis
  REGION 1..340: note = tr|A0A327ZXM2|A0A327ZXM2_9STAP S-adenosylmethionine:tRNA ribosyltransferase-isomerase; OS = Macrococcus epidermidis OX=1902580 GN=queA PE=3 SV=1
MDVNEFDFELPERLIAQTPLLDRTASRLLALNKLTGEITHTHFKSIIDYLNEGDTLVLNDTKVMPARLFGVKSDTGAKIEMLMLTEHDNGWEVLIKPAKRVQIGTKVSFGDGKIIATCVDMLEQGGRIMQLKYDGILQERLDELGLMPLPPYIKETLDDQDRYQTVYAKAVGSAAAPTAGLHFTKELLAAIEEKGVNIAYITLHVGLGTFRPVSVDSIEDHDMHSEYYEMTAETAQLLNRTKASGKRIISVGTTSTRTLETIADENGHFEAQSGWTDIFIYPGYKFKAIDAMVTNFHLPKSTLVMLVSSLATREIILDAYHEAVKEEYRFFSFGDAMFIY

SEQ ID NO: 68461 - protein, 340 aa, unidentified
  source 1..340: note = Macrococcus goetzii
  REGION 1..340: note = tr|A0A4R6CC57|A0A4R6CC57_9STAP S-adenosylmethionine:tRNA ribosyltransferase-isomerase; OS = Macrococcus goetzii OX=1891097 GN=queA PE=3 SV=1
MDVNEFDFELPEKLIAQTPLLDRTASRLLALNKVTGEITHTHFKSIIDYLNEDDTLVLNDTKVMPARLFGVKSDTGAKIEMLMLTEHDNGWEVLIKPAKRVQIGTEVSFGDGKIIATCVDILEQGGRIMQLKYDGILQERLDELGLMPLPPYIKETLDDQDRYQTVYAKAIGSAAAPTAGLHFTKELLAAIEEKGVNIAYITLHVGLGTFRPVSVDSIEDHDMHSEYYEMTTETAQLLNRTKASGKRIISVGTTSTRTLETIADENGHFEAQSGWTDIFIYPGYKFKAIDAMVTNFHLPKSTLVMLVSSLATREIILDAYHEAVKEEYRFFSFGDAMFIY

SEQ ID NO: 68462 - protein, 340 aa, unidentified
  source 1..340: note = Macrococcus goetzii
  REGION 1..340: note = tr|A0A2G5NQS4|A0A2G5NQS4_9STAP S-adenosylmethionine:tRNA ribosyltransferase-isomerase; OS = Macrococcus goetzii OX=1891097 GN=queA PE=3 SV=1
MDINEFDFALPEKLIAQTPLLDRTASRLLALNKVTGEITHTHFKSIIDYLNEGDTLVLNDTKVMPARLFGVKSDTGAKIEMLMLTEHDNGWEVLIKPAKRVQKGTEVYFGDGKIIATCVDILEQGGRIMQLKYDGILQERLDELGLMPLPPYIKETLDDQDRYQTVYAKAVGSAAAPTAGLHFTKELLAAIEEKGVNIAYITLHVGLGTFRPVSVDSIEDHDMHSEYYEMTTETAQLLNRTKASGKRIISVGTTSTRTLETIADENGHFEAQSGWTDIFIYPGYKFKAIDAMITNFHLPKSTLVMLVSSLATREFILDAYHEAVKEEYRFFSFGDAMFIY

SEQ ID NO: 68463 - protein, 341 aa, Macrococcus hajekii
  REGION 1..341: note = tr|A0A4R6BMC8|A0A4R6BMC8_9STAP S-adenosylmethionine:tRNA ribosyltransferase-isomerase; OS = Macrococcus hajekii OX=198482 GN=queA PE=3 SV=1
MNVNDFDFELPEELIAQTPLLDRTSSRLMTLNKETGDIHHAHFSDIVDYLETGDTLVLNDTKVMPARLYGVKQETGAKVEMLLLKQLEGNDWEVLIKPAKRVQVGTVVSFGEGKLQADCKELLPQGGRIMTLKYTGILQERLEEMGEMPLPPYIKEQLKDQSRYQTVYAKAMGSAAAPTAGLHFTEALLEKIAAKGVNITYITLHVGLGTFRPVSVDNIEEHDMHSEYYEMSQQTADVLNQTRKKGGRIITVGTTSTRTLETIASLHDDFIETSGWTDIFIYPGYEFKGIDAMITNFHLPKSTLMMLISSLASRERVLNAYAEAVKERYRFFSFGDAMFIY

SEQ ID NO: 68464 - protein, 341 aa, Macrococcus lamae
  REGION 1..341: note = tr|A0A4R6BXF2|A0A4R6BXF2_9STAP S-adenosylmethionine:tRNA ribosyltransferase-isomerase; OS = Macrococcus lamae OX=198484 GN=queA PE=3 SV=1
MNVNDFDFELPEELIAQTPLLDRTSSRLMLLNKATGEVAHSHFKNIIDYLLPGDTLVLNDTKVMPARLFGVKEETGAKVEMLMLKQLEGNDWEVLIKPAKRINPGAVVTFGEGKLKAVCKENLPQGGRVMTLEFDGILQERLEELGEMPLPPYIKEKLEDQSRYQTVYAKAVGSAAAPTAGLHFTEELLKAIKAKGVNVTYITLHVGLGTFRPVSVDNIEEHDMHSEYYEMTAETAGLLNATRAAGHRIITVGTTSTRTLETIASHNEQFQEESGWTDIFIYPGYEFKGIDAMITNFHLPKSTLMMLISSLSTREHVLNAYQQAVEERYRFFSFGDAMFIY

SEQ ID NO: 68465 - protein, 340 aa, Macrococcus sp.
  REGION 1..340: note = tr|A0A4Q1BAQ5|A0A4Q1BAQ5_9STAP S-adenosylmethionine:tRNA ribosyltransferase-isomerase; OS = Macrococcus sp. DPC7161 OX=2507060 GN=queA PE=3 SV=1
MEVNEFDFELPERLIAQTPLLDRTSSRLLALNKETGDIQHQTFKDVVSYLNPGDTLVLNDTKVMPARLFGVKVDTGAKVEMLMLTEHEDGWEVLIKPAKRVQIGTKVSFGDGKIIAECVNLLEQGGRIMKLEFEGILQERLDELGLMPLPPYIKETLEDQDRYQTVYAREVGSAAAPTAGLHFTTELLDEIKSKGVNIAYITLHVGLGTFRPVSVETIEAHEMHSEYYEMSSETASLLNQTRTNGHRIITVGTTSTRTLETIADNDGKFKAASGWTDIFIYPGYTFRGIDGMITNFHLPKSTLVMLVSTLAGKENIMKAYNEAIKEEYRFFSFGDAMLIY

SEQ ID NO: 68466 - protein, 349 aa, unidentified
  source 1..349: note = Mageeibacillus indolicus
  REGION 1..349: note = tr|D3R1X0|D3R1X0_MAGIU S-adenosylmethionine:tRNA ribosyltransferase-isomerase OS=Mageeibacillus indolicus (strain UPII9-5) OX=699246 GN=queA PE=3 SV=1
MKTSDFYYELPKELIAQHPTAKRDNSRLMLVNPATQSIGHTHFSEIINYIDAGDCLVLNNTKVIPARLLGVKRDTGVHVEFLLLNRRADDEWEVIVRPGRRLRQGSVVDFMPGELSAEITEVLPTGNRVVKFFFNGIWEEILDKAGTMPLPPYIKEKLADPSRYNTVYAKYDGSAAAPTAGLHFTPELLAALQAKGVKLAYVTLHVGLGTFRPVKAENIAEHHMHSEYYELPPETAQLINEVKASGHKIIAVGTTSTRTVESVYHNNGKVVPETGWTDIFIYPGFKFGVIDGLITNFHLPESTLMMLVSAIAGKDFIFSAYAEAVKEKYRFFSFGDAMFIQNCIPEGKI

SEQ ID NO: 68467 - protein, 349 aa, unidentified; identical to SEQ ID NO: 68466
  source 1..349: note = Mageeibacillus indolicus
  REGION 1..349: note = tr|A0A2J8B4G1|A0A2J8B4G1_9FIRM S-adenosylmethionine:tRNA ribosyltransferase-isomerase; OS = Mageeibacillus indolicus OX=884684 GN=queA PE=3 SV=1

SEQ ID NO: 68468 - protein, 374 aa, unidentified
  source 1..374: note = Magnetococcales bacterium
  REGION 1..374: note = tr|A0A2E3C1W8|A0A2E3C1W8_9PROT S-adenosylmethionine:tRNA ribosyltransferase-isomerase; OS = Magnetococcales bacterium OX=2026759 GN=queA PE=3 SV=1
MSYTLSDYDYTLPPELIAQQPATPRDSARLLVSGASGAKGGINAKDYTFADLPSLLKAGDILVTNNTRVLPARLYGYREKVEIVSDGANLPYEVKGKLDVEVLLHRYTGNDNEWLAFCKPAKKLKPGHTIFFGDEETLGEADVVGRDGDQLILNFKNFGSNDAVGFESFLKQAGELPLPPYIERPDGNEDDDNERYQTVYAKRQGAVAAPTAGLHFTPELLRELEQKGVETAQVTLHVGAGTFQPVRSEDLSEHIMHKEWGEITAETVAQIEAAKARGGRVICVGTTSMRIIETASQSGTLKPFKGDTDIFIQPGYTFKTVDGLITNFHLPKSTLLMLVAAFVGHDEMHQIYKTAIAEKYRFYSYGDSSLLWSK

SEQ ID NO: 68469 - protein, 363 aa, unidentified
  source 1..363: note = Magnetococcus marinus
  REGION 1..363: note = sp|A0L579|QUEA_MAGMM S-adenosylmethionine:tRNA ribosyltransferase-isomerase OS=Magnetococcus marinus (strain ATCC BAA-1437 / JCM 17883 / MC-1) OX=156889; GN = queA PE=3SV=1
MNGTSFFGGDGTRLSHYDYDLPAAHIAQRPMEPRDHARLLVSRAQGVEDSRFDQLVEHLQAGDLLVLNDTKVIPARLLGHKPSGGRVEIFLLKPDPQHPPLWRAMTRSNKPLKVGQRVEFGEDFYAELVERQAEGHVLVALHAVGMGLDEAMQHYGQMPLPPYISGSDAQQDKSRYQTVFARRDGAVAAPTAGLHFTDALFERLAAKGVTWCHVTLHVGLGTFQPVRVEDLDAHPMHGEWRQLEADAVAKIQRTKAAGGRVVAVGTTAVRTLESSVDDQGVLQASCGETRLFIRPGYRFKVVDLMLTNFHLPKSTLLMLVAAFVGRSRLRRDYAHAMGKNYRFYSYGDTTLLYPQLEEERGLS

SEQ ID NO: 68470 - protein, 355 aa, unidentified
  source 1..355: note = Magnetococcus massalia
  REGION 1..355: note = tr|A0A1S7LMT6|A0A1S7LMT6_MAGMO S-adenosylmethionine:tRNA ribosyltransferase-isomerase; OS = Magnetococcus massalia (strain MO-1) OX=451514 GN=queA; PE = 3 SV=1
MFQSDQAGDHLEDWDFHLPEQLIAQRPVEPRDHSRLLVSLPDRIENHRFDALPSFLRPGDLLVLNDTRVIPARLLGRKPSGGRVEIFLLKPLPGDGALWRAMGRSSKPIKPGLQVLIGDGFHCEVVERLDEGQLSVRLVAEAGQTIEQALAQYGQMPLPPYITDSDAEEDKARYQTVFAKRDGAVAAPTAGLHFTPELLAQLEAMGVGTVHVTLHVGLGTFQPVRVSKLDEHTMHAEWREISEEAAERIRATRAAGGRVIAVGTTAVRSLESSVNEAGELIANMGETRLFIRPGYRFRVVDLMITNFHLPKSTLLMLVAAFAGKDRLARDYRYAMEQALRFFSYGDAQLIYPKSL

SEQ ID NO: 68471 - protein, 344 aa, unidentified
  source 1..344: note = Magnetofaba australis
  REGION 1..344: note = tr|A0A1Y2K2T6|A0A1Y2K2T6_9PROT S-adenosylmethionine:tRNA ribosyltransferase-isomerase; OS = Magnetofaba australis IT-1 OX=1434232 GN=queA PE=3 SV=1
MTDRLEDYDYPLPPERIAQAPAEPRDASRLLVSLPDSIEDRRFGDIKAYLRAGDLLVVNDTRVIPARLMGRKASGGKVELFLVKPLDNAGTWEALTKTSKPLKPGTEIHFSPTFRAIFEARQEDGSARARLVCDDASIDAAVEQHGQMPLPPYIQSDDPQRDKQRYQTVYADQPGAVAAPTAGLHFTPELLSELCDMGVKRAHVTLHVGLGTFQPVRESDLDKHVMHAEWFSVTPETADLINQTRAAGGRIVAVGTTSARTLESAADEAGVVHPGSGETRLFIRPGYRFRAVDLLITNFHLPKSTLLMLVSALIGKQRLDRDYVHAMTEQYRFYSYGDAMLAVP

SEQ ID NO: 68472 - protein, 343 aa, unidentified
  source 1..343: note = Magnetospira sp.
  REGION 1..343: note = tr|W6KDH4|W6KDH4_MAGSQ S-adenosylmethionine:tRNA ribosyltransferase-isomerase OS=Magnetospira sp. (strain QH-2) OX=1288970 GN=queA PE=3 SV=1
MDVDLFDFELPRELIAQRPAVPRDSARLLHVGAMLADRGMTDLVEQLRPGDLLLSNDTRVIPARLAGKRGEAKVEVTLHKQAGPDAWHAFARPARKLRPGDELRFNDRFAAQVTEKGDMGEVLLTFDRSGGDLIAALEQWGIMPLPPYIRQGHGDARDRDDYQTLFAARDGAVAAPTAGLHFTPDLLRKLDDRGVKNQRLTLHVGAGTFLPVKVERVEEHKMHAEWGEISEEVAAAVNHTRAQGGRIVAVGTTSLRLLESAVDDQGIVQPFQGETDIFIYPGFQFRAVDLLMTNFHLPRSTLFMLVCAFAGTERMKAAYAHAVAQQYRFYSYGDGCLLERGES

SEQ ID NO: 68473 - protein, 343 aa, unidentified
  source 1..343: note = Magnetospirillum caucaseum
  REGION 1..343: note = tr|M3A6H2|M3A6H2_9PROT S-adenosylmethionine:tRNA ribosyltransferase-isomerase OS=Magnetospirillum caucaseum; OX = 1244869 GN=queA PE=3 SV=1
MDDFDFDLPREMIAERPATPRDASRLLHVPASGGLADLGVRDLPALLAPGDILVFNDTRVIPARLAGRRGLAGIEVTLHQRTGLARWKAFARPAKKLKPGDRVDFAEGFSAQVAEKGEMGEVILDFDRAGEDLMLALEAFGKLPLPPYIRQGEADERDTGDYQTVFAREKGAVAAPTAGLHFTPDLLAALEARGVKRATITLHVGAGTFLPVKVDDTDDHRMHQEIGVVTPEAAAAVNAARAAGGRVVAVGTTSLRLLESAADPLGTLQPFDDATDIFITPGHSFRLADMLLTNFHLPRSTLFMLVSAFSGLERMRAAYEHAKAAGYRFYSYGDCCLLERTPT

SEQ ID NO: 68474 - protein, 345 aa, Magnetospirillum gryphiswaldense
  REGION 1..345: note = tr|V6F777|V6F777_MAGGM S-adenosylmethionine:tRNA ribosyltransferase-isomerase OS=Magnetospirillum gryphiswaldense (strain DSM 6361 / JCM 21280 / NBRC 15271 / MSR-1)OX=431944 GN=queA PE=3 SV=1
MDVNLFDFDLPRTLIAERPVSPRDAARLLHVQAGGLTDGVVGDLPRWLRPGDLLISNDTRVIPARLFGRKGEGGVELTLHERTSLDEWKAFARPAKKLRPGDKVRFADDFSATVAAKGEAGEVLMRFDRGGDDLMLALDAYGRLPLPPYIRKGEADERDRADYQTVFAREKGAVAAPTAGLHFTDSLLAALESAGVTRTTVTLHVGAGTFLPVKVDDTKDHRMHAERGVVTAEVADLVNRTKAARGRVVAVGTTSLRLLESAADDDGVLHPFDGPTDIFITPGYRFRLVDVLMTNFHLPKSTLFMLVSAFAGLDRMHQAYAYAMNRGYRFYSYGDACLLERENPC

SEQ ID NO: 68475 - protein, 345 aa, Magnetospirillum gryphiswaldense
  REGION 1..345: note = tr|A4U390|A4U390_9PROT S-adenosylmethionine:tRNA ribosyltransferase-isomerase OS=Magnetospirillum gryphiswaldense OX=55518 GN=queA PE=3 SV=1
MDVNLFDFDLPRTLIAERPVSPRDAARLLHVQAGGLTDGVVGDLPRWLRPGDLLISNDTRVIPARLFGRKGEGGIELTLHERTSLDEWKAFARPAKKLRPGDEVRFADDFSATVAAKGEAGEVLMRFDRGGDDLMLALDAYGRLPLPPYIRKGEADERDRADYQTVFAREKGAVAAPTAGLHFTDALLTALESAGVTRTTITLHVGAGTFLPVKVDDTKDHRMHAERGVVTAEVADLVNRTKAAGGRVVAVGTTSLRLLESAADDDGVLHPFDGPTDIFITPGYRFRLVDVLMTNFHLPKSTLFMLVSAFAGLDRMHQAYAYAMNRGYRFYSYGDACLLERENPC

SEQ ID NO: 68476 - protein, 345 aa, unidentified
  source 1..345: note = Magnetospirillum kuznetsovii
  REGION 1..345: note = tr|A0A364NX73|A0A364NX73_9PROT S-adenosylmethionine:tRNA ribosyltransferase-isomerase; OS = Magnetospirillum kuznetsovii OX=2053833 GN=queA PE=3; SV = 1
MKVDDFDFDLPRELIAERPAEPRGSARLLHVGAQGLIDGRVAELAGMLKPGDVMVFNDTRVIPARLFGRRGEAGVEVTLHQRVALDSWKAFARPAKKLRPGDRVDFGHGFSAAVVEKGEAGEVTLRFDQSGEALLAALEEFGRMPLPPYIRKGQADERDKGDYQTVFARAKGAVAAPTAGLHFTPDLLAELDARGVRRVTVTLHVGAGTFLPVKVDDTADHRMHSEIGVISADAAAAVNAAKSAGGRVVAVGTTSARLLESAADETGCLHPFDAATDIFITPGYRFRLVDVLMTNFHLPRSTLFMLVSAFMGLDRMKSAYEHAKASGYRFYSYGDACLLERKASP

SEQ ID NO: 68477 - protein, 291 aa, unidentified
  source 1..291: note = Magnetospirillum magneticum
  REGION 1..291: note = tr|Q2W9S3|Q2W9S3_MAGSA S-adenosylmethionine:tRNA ribosyltransferase-isomerase OS=Magnetospirillum magneticum (strain AMB-1 / ATCC 700264) OX=342108; GN = amb0598 PE=3 S V=1
MVFNDTKVIPARLLGRRGLAGVELTLHQRTGLSQWKAFARPAKKLKPGDRVDFAEGFSAVVAEKGEMGEVTLDFDRSGEDLMVALETHGHLPLPPYIRQGTADERDKGDYQTVFAREKGAVAAPTAGLHFTPELLAALDARGVKRVTVTLHVGAGTFLPVKVDDTDDHRMHQEIGVVTPETAAAVNAARAAGGRVVAVGTTSARLLESAADPLGTLHPFDGATDIFITPGHVFRQVDVLLTNFHLPRSTLFMLISAFAGLERMKAAYEHAKAAGYRFYSYGDCCLLERTPI

SEQ ID NO: 68478 - protein, 345 aa, Magnetospirillum magnetotacticum
  REGION 1..345: note = tr|A0A0C2UWU1|A0A0C2UWU1_MAGMG S-adenosylmethionine:tRNA ribosyltransferase-isomerase; OS = Magnetospirillum magnetotacticum MS-1 OX=272627 GN=queA; PE = 3 SV=1
MRVDDFDFELPRELIAERPVCPRDSARLLHVPIIGGLSDRGVRDLPDLLMPGDILVFNDTKVIPARLFGRRGTAGVEVTLHQRTGLAQWKAFARPAKKLRPGDRVDFAEGFFATVAEKGEMGEVTLDFDRSGEDLMVALEAFGSLPLPPYIRKGEADERDRGDYQTVFARQKGAVAAPTAGLHFTPDLLAALDARGVKRATVTLHVGAGTFLPVKADDTNDHRMHQEIGVITPETAAAINAAKAAGGRVVAVGTTSARLLESAADPLGILHPFDGATDIFITPGHSFRLADVLLTNFHLPRSTLFMLVSAFSGLSRMKEAYEHAKAAGYRFYSYGDCCLLERTPT

SEQ ID NO: 68479 - protein, 342 aa, unidentified
  source 1..342: note = Magnetospirillum marisnigri
  REGION 1..342: note = tr|A0A178MU40|A0A178MU40_9PROT S-adenosylmethionine:tRNA ribosyltransferase-isomerase; OS = Magnetospirillum marisnigri OX=1285242 GN=queA PE=3 SV=1
MKVDDFDFDLPRELIAERPAEPRGSSRLLRVTPAGRADAMVADLPRLLRPGDVMVFNDTRVIPARLFGRRGEAGVEVTLHQRVALDAWKAFARPAKKLRPGDRVTFGEGFSALVADKGEAGEVTLAFDQSGEALLAVLEDFGRMPLPPYIRKGVADQRDHDDYQTVFAREKGAVAAPTAGLHFTPDLLAALDARGIERVCVTLHVGAGTFLPVKVDDTSDHRMHSEIGVITGQAAAAINAARARGGRVVAVGTTAARLLESAADETGILHPFDAATDIFITPGYRFRLVDVLMTNFHLPRSTLFMLVSAFMGLDAMKAAYEHAKAAGYRFYSYGDSSLLERG

SEQ ID NO: 68480 - protein, 345 aa, unidentified
  source 1..345: note = Magnetospirillum moscoviense
  REGION 1..345: note = tr|A0A178MMZ9|A0A178MMZ9_9PROT S-adenosylmethionine:tRNA ribosyltransferase-isomerase; OS = Magnetospirillum moscoviense OX=1437059 GN=queA PE=3; SV = 1
MKVDLFDFDLPRERIAERPVNPRDSARLLHVTTSGLADHVVADLPRFLRPGDVVVSNDTRVIPARLFGHRGEAGIEVTLHQRLGLAQWKAFARPAKKLKPGDTVRFGPDFTATVAEKGEAGEVTLAFDRAGPELMAALEEFGRMPLPPYIRKGVADQQDRADYQTLFAKEQGAVAAPTAGLHFTPALLAAIDAAGATRLTVTLHVGAGTFLPVKVDDTDDHRMHAESGVVTAEMADAINRARANGGRVVAIGTTSLRLLESAADPDGLIRPFDGSTDIFITPGYRFRAVDVLMTNFHLPRSTLFMLVSAFSGLDRMRTAYAHAIAGSYRFYSYGDACLLHRETFA

SEQ ID NO: 68481 - protein, 344 aa, Magnetospirillum sp.
  REGION 1..344: note = tr|A0A0U5MCR4|A0A0U5MCR4_9PROT S-adenosylmethionine:tRNA ribosyltransferase-isomerase; OS = Magnetospirillum sp. XM-1 OX=1663591 GN=queA PE=3 SV=1
MKVDDFDFDLPREMIAERPACPRDAARLLHVPANGGLVDLGIRDLPSLLAPGDILVFNDTRVIPARLFGKRGLAGVEVTLHQRTGLAQWKAFARPAKKLRPGDRVDFAEGFFASVAEKGEMGEVTLDFDRSGEDLMAALEAHGRLPLPPYIRQGEADERDRGDYQTVFARQKGAVAAPTAGLHFTPELLAALDARGIRRVTVTLHVGAGTFLPVKVDDTDDHRMHQEIGVVTPEAAAAINAAKTAGGRVVAVGTTSARLLESAADPLGTLRPFDGATDIFITPGHAFRLVDVLLTNFHLPRSTLFMLVSALCGLPRMKAAYEHAKAAGYRFYSYGDCCLLERKT

SEQ ID NO: 68482 - protein, 136 aa, Magnetospirillum sp.
  REGION 1..136: note = tr|A0A522W263|A0A522W263_9PROT S-adenosylmethionine:tRNA ribosyltransferase-isomerase (Fragment) OS=Magnetospirillum sp. OX=31872 GN=EPN20_18290; PE = 3 SV=1
SVSPSNGCRVPSGSVALSSRRSAEAAAAINTARAEGGRVVAVGTTALRLLESATDPLGTLHPFDGDTDIFITPGYRFRLVDVLMTNFHLPRSTLFMLVSAFCGLDRMRTAYAHAKESGYRFYSYGDSCLLDRSTSS

SEQ ID NO: 68483 - protein, 348 aa, unidentified
  source 1..348: note = Magnetovibrio blakemorei
  REGION 1..348: note = tr|A0A1E5QCH3|A0A1E5QCH3_9PROT S-adenosylmethionine:tRNA ribosyltransferase-isomerase; OS = Magnetovibrio blakemorei OX=28181 GN=queA PE=3 SV=1
MKVDLFDFELPQTSIAQHPASPKDTARLLVVGDQAFEDTCVLELAAHLRANDILVFNDTKVIPARLVGKRGEAGVEVTLHKRVSADTWYVFARPAKKLKIGDTVHFADDLSADVCEKTDSGEVLLHFSRTDDPLMETLQRVGVMPLPPYIKRPKTGEAQDGNDYQTLFATHLGAVAAPTAGLHFTERMMASLTDRGIKTARVTLHVGAGTFLPVKVEDTRDHKMHSEWGEISAETAAAINQARRNGGRVVAVGTTSLRLLESAAQDNGTLAAFSGDTDIFITPGYRFKIVDVLMSNFHLPKSTLFMLVSAFAGLKRMKAAYNHAIQSGYRFYSYGDACLLARDEDTSL

SEQ ID NO: 68484 - protein, 360 aa, unidentified
  source 1..360: note = Magnetovibrio sp.
  REGION 1..360: note = tr|A0A2E8U2H5|A0A2E8U2H5_9PROT S-adenosylmethionine:tRNA ribosyltransferase-isomerase; OS = Magnetovibrio sp. OX=2024836 GN=queA PE=3 SV=1
  VARIANT 138: note = Xaa can be any naturally occurring amino acid
  VARIANT 142: note = Xaa can be any naturally occurring amino acid
  VARIANT 148: note = Xaa can be any naturally occurring amino acid
  VARIANT 156: note = Xaa can be any naturally occurring amino acid
  VARIANT 181: note = Xaa can be any naturally occurring amino acid
  VARIANT 188: note = Xaa can be any naturally occurring amino acid
  VARIANT 190: note = Xaa can be any naturally occurring amino acid
  VARIANT 197: note = Xaa can be any naturally occurring amino acid
  VARIANT 200: note = Xaa can be any naturally occurring amino acid
  VARIANT 210..211: note = Xaa can be any naturally occurring amino acid
  VARIANT 227: note = Xaa can be any naturally occurring amino acid
  VARIANT 268: note = Xaa can be any naturally occurring amino acid
  VARIANT 270: note = Xaa can be any naturally occurring amino acid
  VARIANT 277: note = Xaa can be any naturally occurring amino acid
  VARIANT 288: note = Xaa can be any naturally occurring amino acid
  VARIANT 298: note = Xaa can be any naturally occurring amino acid
  VARIANT 321: note = Xaa can be any naturally occurring amino acid
  VARIANT 344: note = Xaa can be any naturally occurring amino acid
  VARIANT 352..353: note = Xaa can be any naturally occurring amino acid
  VARIANT 360: note = Xaa can be any naturally occurring amino acid
MHVSHFDFDLPHERIAQAPIEPRDAARLLHVGTTIADLGVRDLPSLLQFGDALVVNDTKVLPCRLTGKRREAKIDITLHKPFDGASWLAFARPARKLKTEDVIIFADGFEARVTEKRNAGEVALTFNHTGLDLMHALXAYGXMPLPPXIKRDTGGXDADKSHYQTLFAAKPGAVAAPTAGXHFTPDLXEXIKARGVXVIXVTLHVGAGTXXPIKVNDTDDHVMHSEXATLSADAAAALNAVRADGGKITAVGSTALRTLESAASEDGXLXPFSGDTXLFITPGYRFKXIDRMMTNFHXPKSTLFMLVSAFSGLDRMKSAYXHAIAAKYRFFSYGDACLLEPNRXTWGNTPEXXLGKRIDX

SEQ ID NO: 68485 - protein, 358 aa, unidentified
  source 1..358: note = Magnetovibrio sp.
  REGION 1..358: note = tr|A0A2D7AAP4|A0A2D7AAP4_9PROT S-adenosylmethionine:tRNA ribosyltransferase-isomerase; OS = Magnetovibrio sp. OX=2024836 GN=queA PE=3 SV=1
MRVDLFDFNLPVKNIAQYPVEPRDTAKLLHVGKNLRDLTVGDLPEILHAGDLIVVNDTKVLPCRLTGIRHSKVQSKLRKISVRVEVTLHKSKTPDTWLAFVRPARKLAIGDIIIFSPKFRATVRDKNNGGEIELQFNLGGITLLDQLEVCGVIPLPPYIKRNDPGVYNDADSYQTLFASELGAVAAPTAGLHFTPTLIDRLQNKGISISRVTLHVGAGTFLPVKVDDTRKHPMHGELGVLSDKTAETVNATRRSGGRVLAVGSTSMRLLESAADKLGEVQPFHGETNLFITPGYRFKVVNLMLTNFHLPRSTLFMLVAAFSGLDRMKKAYAYAIEKEYRFYSYGDACLLEPAFETWRN

SEQ ID NO: 68486 - protein, 342 aa, Mahella australiensis
  REGION 1..342: note = tr|F4A1F2|F4A1F2_MAHA5 S-adenosylmethionine:tRNA ribosyltransferase-isomerase OS=Mahella australiensis (strain DSM 15567 / CIP 107919 / 50-1 BON) OX=697281; GN = queA P E=3 SV=1
MWRLEDFDYDLPEELIAQKPLEQRDMSRLLVYDRKTKSIDHRIFHDIVEYLETGDTLVINDTRVIPARLIGYREDTGGKIEFLLLKRLEADKWEIIERPGRRAKIGTVFVFGNGELKARILEKTSQGGRIVEFMYDGIFEEILDKLGQMPLPPYIKEKLDDKERYQTVYAKNEGSAAAPTAGLHFTNELLQRIKNKGVNIVHITLHVGLGTFRPVKENDITKHQMHSEYYQVSRQAADAINDTHKAGHRVFAVGTTCVRTLETVTDEQGTTHAGDGWTDIFIYPGYRFKAIDALITNFHLPKSTLLMLISAFAGREEILRVYKEAVEQRYRFFSFGDAMLIL

SEQ ID NO: 68487 - protein, 341 aa, unidentified
  source 1..341: note = Maledivibacter halophilus
  REGION 1..341: note = tr|A0A1T5L292|A0A1T5L292_9CLOT S-adenosylmethionine:tRNA ribosyltransferase-isomerase; OS = Maledivibacter halophilus OX=36842 GN=queA PE=3 SV=1
MKTSDFYFDLPEELIAQVPLKERDKSRLMVLDKETGKVSHNSFRDVLGFLKAGDCLVLNDTRVIPARLFGVKDTGANVEFLLLKRIDKNKWQTLVKPGKRAKIGSKFFFGNGKELTGEIVDLAEEGTRIIEFTYEGIFEEVLDRLGNMPLPPYITRKLEDKERYQTVYSKHRGSAAAPTAGLHFTEDLLKELKNRGVKIAYITLHVGLGTFRPVKAENILEHKMHSEFYMVSKETADLINGTKADGRRIISVGTTATRTLETLGDSDGRIREGNGWTDIFIYPGYRFKVIDGLLTNFHLPESTLIMLVSALAGRENVLRAYNEAVKERYRFFSFGDAMLII

SEQ ID NO: 68488 - protein, 351 aa, Malikia granosa
  REGION 1..351: note = tr|A0A2S9K9J6|A0A2S9K9J6_9BURK S-adenosylmethionine:tRNA ribosyltransferase-isomerase; OS = Malikia granosa OX=263067 GN=queA PE=3 SV=1
MNPSASSATRAHNVSDFDFELPPELVAQHPAAERSSSRLLDNSGRSPVDRIFKELPGLLRAGDLLVFNDTKVVKARLYGEKASGGKVELLIERVLDGHEVVAHMKVSKKPLPGAVLHMVGGFSAELLGRWPEDKGPLFRFRLSAEPYALMEQHGHVPLPPYIEHGDSAEDERRYQTVFARAPGAVAAPTASLHFDEALLDALEARGIERASVTLHVGAGTFQPVKVEAIADHVMHSERYAVPEATQQAIADCRARGGRVVAVGTTTVRTLESWAQSGRASGETQIFITPGFDFKVVDLLVTNFHLPKSTLMMLVSAFAGYETIMALYARAVREGYRFFSYGDAMLLSRSGR

SEQ ID NO: 68489 - protein, 353 aa, Malikia spinosa; identical to SEQ ID NO: 64522
  REGION 1..353: note = tr|A0A2S9KGK5|A0A2S9KGK5_9BURK S-adenosylmethionine:tRNA ribosyltransferase-isomerase; OS = Malikia spinosa OX=86180 GN=queA PE=3 SV=1

SEQ ID NO: 68490 - protein, 351 aa, unidentified
  source 1..351: note = Maliponia aquimaris
  REGION 1..351: note = tr|A0A238L4R3|A0A238L4R3_9RHOB S-adenosylmethionine:tRNA ribosyltransferase-isomerase; OS = Maliponia aquimaris OX=1673631 GN=queA PE=3 SV=1
MKLSDFDFDLPDRLIATRPARPRTSARLLVAEGDGITDAHVYDLPRWLRPGDRLILNDTKVIPARLQGVRRRASDAGETEARIEVTLLEPRADGLWAALLKPLKKVRDGEEIRFSSELSATVEAREEGQGLLRFNLSGEDFDAALNAAGAMPLPPYIAAKRAADAQDRTDYQTVWARASGAVAAPTASLHFDEALLATLAAQGIGFTHVTLHVGAGTFLPVKVEDVTTHRMHGEWGEVTEAAAAKIAATRAAGGRIIPVGTTALRLIETAARASGRIAPFRGVTDIFIYPGFRFNVTDALMTNFHLPKSTLMMLVSALMGPERIRQIYAHAVASEYRFFSYGDASLLIPGD

SEQ ID NO: 68491 - protein, 344 aa, Malonomonas rubra
  REGION 1..344: note = tr|A0A1M6CDZ6|A0A1M6CDZ6_MALRU S-adenosylmethionine:tRNA ribosyltransferase-isomerase; OS = Malonomonas rubra DSM 5091 OX=1122189 GN=queA PE=3 SV=1
MQLTDFDFLLPEELIAQQPAARRDASRLMSLERQTGQVTCGDFSDLPSFFRPGDLLVLNDTQVIPARLLGQKLTGGKIEIFLVRRDMQAETEDWFCLTKSSRAPKPGAEVLLGDKLRATVLEEAEEPYRRVRFECDGDFMQQVEAIGHLPLPPYIKREDDQNDRSRYQTVFAREKGAVAAPTAGLHFTPEVLDKLRAGGVEIHSLTLHVGLGTFLPVRVDDVTEHKMHSEFYNVPQETADAVNKAKLEGRRVFALGTTSARTLETAATDEGMLQAGCGESDIFIYPGYRFKIIDALITNFHLPKSTLLMLVSAFAGREFILSAYRRAVEERFRFFSYGDCMLIY

SEQ ID NO: 68492 - protein, 351 aa, Mameliella alba
  REGION 1..351: note = tr|A0A0B3RZJ1|A0A0B3RZJ1_9RHOB S-adenosylmethionine:tRNA ribosyltransferase-isomerase; OS = Mameliella alba OX=561184 GN=queA PE=3 SV=1
MKLSDFDFDLPDGLIATRPARPRTSARLLVAEGDKITDAHVTDLVDWLRPGDRLVLNDTRVIPARLQGVRRRISDAGETEARIEVTLLEPRAGGTWAALIKPLKKVRDGEEIIFSSALSATLEAREEGQGLLRFNLEGDDFDAALNAAGAMPLPPYIAAKRPADAQDHEDYQTVWARHSGAVAAPTASLHFDDALLAQLRDRGLEFTHVTLHVGAGTFLPVKVEDVTTHRMHGEWGEVSEKAACEIAATRAAGGRIIPVGTTALRLIETAARGGEIAPFQGVTDIFIYPGFTFNVTDALMTNFHLPKSTLMMLVSALMGPDRIRAIYAHAVATEYRFFSYGDASLLIPPAG

SEQ ID NO: 68493 - protein, 351 aa, Mameliella sp.
  REGION 1..351: note = tr|A0A2E9I4W8|A0A2E9I4W8_9RHOB S-adenosylmethionine:tRNA ribosyltransferase-isomerase; OS = Mameliella sp. OX=1924940 GN=queA PE=3 SV=1
MKLSDFDFDLPDRLIATRPARPRSSARLLVAEGDAITDAHVFDIARWLRPGDRLILNDTKVIPARLQGVRKRVSDAGETEARIEVTLLEPQADGAWAALIKPLKKVRDGEEIIFSNDLSAVLEAREDGRGSLRFNLSGEDFDAALNAAGAMPLPPYIAAKRAADDRDREDYQTVWARNTGAVAAPTASLHFDDALLAALAAKGVSFTHVTLHVGAGTFLPVKVEDVTSHKMHGEWGEVTETAAAEIAATRAAGGRVIPVGTTALRLIETAARGGRIAPFQGVTDIFIYPGFTFKVTDALMTNFHLPKSTLMMLVSALMGSERIRAIYEHAVAEDYRFFSYGDASLLLPPRG

SEQ ID NO: 68494 - protein, 356 aa, unidentified
  source 1..356: note = Mangrovibacter phragmitis
  REGION 1..356: note = tr|A0A1B7L9Z1|A0A1B7L9Z1_9ENTR S-adenosylmethionine:tRNA ribosyltransferase-isomerase; OS = Mangrovibacter phragmitis OX=1691903 GN=queA PE=3 SV=1
MRVADFSFELPESLIAHYPQAQRSACRLLSLDGPTGALTHGTFTDLLDKLNPGDLLVFNNTRVIPARLFGKKASGGKIELLVERMLDEHRVLAHIRASKAPKPGAELLLGDDESIKATMVARHDALFEVVFEESRPVLDILNQIGHMPLPPYIDRPDEEADKELYQTVYSERPGAVAAPTAGLHFDEPLLAALREKGVEMAFVTLHVGAGTFQPVRVDSIEDHIMHSEYAEVPQEVVDAVMAAKARGNRVIAVGTTSVRSLESAATAAKEALIAPFFGDTQIFIYPGYQYQVIDALITNFHLPESTLIMLVSAFAGYQHTMHAYHEAVKSEYRFFSYGDAMFITYNPQAINERPGE

SEQ ID NO: 68495 - protein, 356 aa, Mangrovibacter plantisponsor
  REGION 1..356: note = tr|A0A317Q1Z1|A0A317Q1Z1_9ENTR S-adenosylmethionine:tRNA ribosyltransferase-isomerase; OS = Mangrovibacter plantisponsor OX=451513 GN=queA PE=3 SV=1
MRVADFSFELPESLIAHYPQAQRSACRLLSLDGPTGALTHGTFTDLLDKLNPGDLLVFNNTRVIPARLFGKKASGGKIELLVERMLDEHRVLAHIRASKAPKPGAELLLGDDESIKATMVARHDALFEVVFEESRPVLDILNQIGHMPLPPYIDRPDEEADKELYQTVYSERPGAVAAPTAGLHFDEPLLAALREKGVEMAFVTLHVGAGTFQPVRVDSIEDHIMHSEYAEVPQEVVDAVLAAKARGNRVIAVGTTSVRSLESAATAAKEALIAPFFGDTQIFIYPGYQYQVIDALITNFHLPESTLIMLVSAFAGYQHTMHAYHEAVKSEYRFFSYGDAMFITYNPEAINERPGK

SEQ ID NO: 68496 - protein, 356 aa, Mangrovibacter sp.; identical to SEQ ID NO: 68495
  REGION 1..356: note = tr|A0A071LMW9|A0A071LMW9_9ENTR S-adenosylmethionine:tRNA ribosyltransferase-isomerase; OS = Mangrovibacter sp. MFB070 OX=1224318 GN=queA PE=3 SV=1

SEQ ID NO: 68497 - protein, 349 aa, unidentified
  source 1..349: note = Mangrovibacterium diazotrophicum
  REGION 1..349: note = tr|A0A419WAW9|A0A419WAW9_9BACT S-adenosylmethionine:tRNA ribosyltransferase-isomerase; OS = Mangrovibacterium diazotrophicum OX=1261403 GN=queA; PE = 3 SV=1
MKLSKFKFKLPEELIALHPAQNRDESRLMVVDRKTKKIEHKLFKDVTDYFDDQDVLVFNDTKVFPARLYGNKEKTGAEIEVFLLRELNREQRLWDVLVDPARKIRIGNKLYFGEDDLLVAEVIDNTTSRGRTLRFLFDGPYDEFKQTLYSLGETPLPKFIQRPVQPEDKDRYQTIFAKHEGAVAAPTAGLHFSRELMKRLEIIGVDFSFVTLHVGLGNFRSVDVEDLTKHKMDSEQIWITEEACDVVNKAKTNKKNVCAVGTTVMRTLESSVSTQGFLKPYEGWTNKFIFPPYEFSVANRMITNFHLPLSTLMMMVAAFGGYDLTMEAYKEAIKEGYRFGTYGDAMLIL

SEQ ID NO: 68498 - protein, 464 aa, unidentified
  source 1..464: note = Mangrovibacterium diazotrophicum
  REGION 1..464: note = tr|A0A419W2Q5|A0A419W2Q5_9BACT S-adenosylmethionine:tRNA ribosyltransferase-isomerase; OS = Mangrovibacterium diazotrophicum OX=1261403; GN = BC643_0094 PE=3 SV=1
MTTSKFSLRAPRSNLKQDLATNVSSFEFQVSLLPALCSLPFAIRPFFVILPPMDNMNTNTSVFNLSAQALNYELPDERIAKYPLPQRDQSKLLVWQDGNITDSRFTSLPDFLPEGSLLVFNNTKVIRARLLFQKATGANIEIFCLDPLQPADYQIAFQQTESCSWNCMVGNLKKWKNEVLEKDLQLNGKTVAFKAEKLNQIDGSVQVRFSWDCPEADFASLIEAAGILPIPPYLHRDTEESDIERYQTIYSKIKGSVAAPTAGLHFTDAVFSSLKNKQVECEEVTLHVGAGTFKQVKADTIGEHEMHAEQIIVRRDLIEKLLDHQGKLLAVGTTSIRTLESLYWLGVKLLQKPDSALNELDIEQWLPYETEKSYSKQESLEAILAYMLKNGLPVIGAHTKIIIVPGYQFRIVEGMITNFHQPQSTLLLLISAFIGNDWLRVYDHALANDYRFLSYGDSNLYLKA

SEQ ID NO: 68499 - protein, 412 aa, unidentified
  source 1..412: note = Mangrovibacterium marinum
  REGION 1..412: note = tr|A0A2T5C0D5|A0A2T5C0D5_9BACT S-adenosylmethionine:tRNA ribosyltransferase-isomerase; OS = Mangrovibacterium marinum OX=1639118 GN=C8N47_11123; PE = 3 SV=1
MDKLKTETTVFDLSAQALNYNLPDKQIAKYPLPQRDQSKLLVWNSGNITDAQFRTLPDFLPEDSLLIFNNTKVIRARLMFQKATGANIEIFCLDPLEPADYQIAFQQTESCSWNCMVGNLKKWKTEVLEKELQFNGKTVVFKAEKLKQIDGSVQVKFSWDCPEADFASLIEAAGILPIPPYLHRETEESDLERYQTIYSKIKGSVAAPTAGLHFTDAVFESLKAKNIACDEVTLHVGAGTFKQVKAETIGEHEMHAEQIIVRRALIEKLLKHQGKLVAVGTTSIRTLESLYWLGVKLIEKPDSALNELDIEQWLPYQTEKSYSKQESLEAILTYMDQHNLPTIGAHTKIIIVPGYRFRIVEGMITNFHQPQSTLLLLISAFIGNDWLRVYEHALADGYRFLSYGDSNLYLKA

SEQ ID NO: 68500 - protein, 349 aa, unidentified
  source 1..349: note = Mangrovibacterium marinum
  REGION 1..349: note = tr|A0A2T5C693|A0A2T5C693_9BACT S-adenosylmethionine:tRNA ribosyltransferase-isomerase; OS = Mangrovibacterium marinum OX=1639118 GN=queA PE=3 SV=1
MKLSKFKFKLPEELIALHPADNRDESRLMVVDRKTRSIEHKLFKDVTDYFDDKDVMVFNDTKVFPARLYGNKEKTGAEIEVFLLRELNREQRLWDVLVDPARKIRIGNKLYFGEDDLLVAEVIDNTTSRGRTLRFLFDGPYDEFKNTLFGLGETPLPKFIQRPVQPDDKDRYQTIFAKHEGAVAAPTAGLHFSRELMKRLEIIGVDFGFVTLHVGLGNFRSVDVEDLTKHKMDSEQIWISEEACDIVNKAKEAKRNVCAVGTTVMRTLESSVSTQGFLKPFEGWTNKFIFPPYEFSVANRMITNFHLPLSTLMMMVAAFGGYDLTMEAYQVAIKEGYRFGTYGDAMLIL

SEQ ID NO: 68501 - protein, 349 aa, unidentified
  source 1..349: note = Mangrovimonas sp.
  REGION 1..349: note = tr|A0A1V1ZHI1|A0A1V1ZHI1_9FLAO S-adenosylmethionine:tRNA ribosyltransferase-isomerase; OS = Mangrovimonas sp. DI 80 OX=1779330 GN=queA PE=3 SV=1
MKLSNFNFKLPDELLADRPSDIRDEARLMVLNRKEQTIEHKLFKDVIDYFDEGDVMILNNTKVFPARLYGNKEKTGARIEVFLLRELNEEQRLWDVLVDPARKIRIGNKLYFGDDETLVAEVIDNTTSRGRTLRFLYDGSYAEFRNKLTELGETPLPKYIKRDVEPEDEERYQTIFAKNEGAVAAPTAGLHFSKHLLKRLEIKGIELPEITLHVGLGTFNPVEVEDLSKHKMDSEEVIIDKAAVDVINKGIMNKRRVCAVGTTSMRAIESSVSSNGTLNEFAGWTNKFIFPPYDFSIANCMITNFHTPKSTLLMMVSAFAGHDFIKRAYEEAVKEEYKFYTYGDAMLIL

SEQ ID NO: 68502 - protein, 349 aa, unidentified
  source 1..349: note = Mangrovimonas sp.
  REGION 1..349: note = tr|A0A3R9MSY0|A0A3R9MSY0_9FLAO S-adenosylmethionine:tRNA ribosyltransferase-isomerase; OS = Mangrovimonas sp. HN-E26 OX=2494697 GN=queA PE=3 SV=1
MKLSNFNFELPKELLAEYPSEHRDEARLMVLNREKKTIEHKLFKDLVDYFNEDDVMILNNTKVFPARLFGNKEKTGARIEVFLLRELNEEQRLWDVLVDPARKIRIGNKLYFGEDESLVAEVIDNTTSRGRTLRFLYDGSYTDFRKKLNELGETPLPKYIKREVEPEDEDRYQTIFAKNEGAVAAPTAGLHFSKHLLKRLEIKGINFAEITLHVGLGTFNPVEVEDLSKHKMDSEEITIDKLAVNTINQGIAEKRKICAVGTTVMRAVESSVSSSGTLNEFQGWSNKFIFPPYDFSIANCMVTNFHTPKSTLLMMASAFAGHDFIMEAYEEAVKEKYRFYTYGDAMLIL

SEQ ID NO: 68503 - protein, 349 aa, unidentified
  source 1..349: note = Mangrovimonas yunxiaonensis
  REGION 1..349: note = tr|A0A084TM28|A0A084TM28_9FLAO S-adenosylmethionine:tRNA ribosyltransferase-isomerase; OS = Mangrovimonas yunxiaonensis OX=1197477 GN=queA PE=3 SV=1
MKLSNFNFDLPKELLAEYPSEHRDEARLMVLNREKQTIEHKLFKDLVDYFDENDVLILNNTKVFPARLYGNKEKTGARIEVFLLRELNEEQRLWDVLVDPARKIRIGNKLYFGEDESLVAEVIDNTTSRGRTLRFLYDGPYRDFRNKLKELGETPLPKYIKREVEPEDEERYQTIFAKTEGAVAAPTAGLHFSKHLLKKLEIKGIDFAEVTLHVGLGTFNPVEVEDLSKHKMDSEEIIIDKLAVNTINKGIAEGRKVCAIGTTVMRAVESSVSSSGTLNEFQGWSNKFIFPPYDFSIANCMVTNFHTPKSTLLMMASAFAGHDFIMRAYEEAVKEKYRFYTYGDAMLIL

SEQ ID NO: 68504 - protein, 361 aa, Mannheimia granulomatis
  REGION 1..361: note = tr|A0A011MHD0|A0A011MHD0_9PAST S-adenosylmethionine:tRNA ribosyltransferase-isomerase; OS = Mannheimia granulomatis OX=85402 GN=queA PE=3 SV=1
MLVSDFHFDLPDELIARYPTAERSASRLLHLNGETGEFADQQFTDLYNHINAGDLLIFNNTRVIPARLYGRKPSGGKVEALVERVLDEHRCLAHVKASKAPKEGAELIFGEDKLGEGKGFIATMVARHDTLFELEFRAETPLFDLLQQAGHMPLPPYIDRPDEDADQERYQTVYSKVLGAVAAPTAGLHFDNAMLEKLKAKGVDIAFVTLHVGAGTFQPVRVDTIEAHKMHAEYAEVSQDVVNKILDTKARGKRVIAVGTTSVRSVESAAQAAEAEGKLIAPFFSDTAIFLYPGKTFKVIDALVTNFHLPESTLIMLVSAFAGYKNTMNAYAHAVEKQYRFFSYGDAMFINKNPNAFNDMP

SEQ ID NO: 68505 - protein, 225 aa, Mannheimia haemolytica
  REGION 1..225: note = tr|A0A378N7D9|A0A378N7D9_MANHA S-adenosylmethionine:tRNA ribosyltransferase-isomerase; OS = Mannheimia haemolytica OX=75985 GN=queA_2 PE=3 SV=1
MLVSDFHFNLPDELIARYPTAERSASRLLHLNGETGEFADQQFVDLYDHINEGDLLIFNNTRVIPARLYGRKPSGGKVEALVERVLDEHRCLAHVKASKAPKEGAELIFGEDKLGEGKGFTATMVARHDTLFELVFNEEQPLFELLQQAGHMPLPPYIDRPDEDADQERYQTVYSKVLGAVAAPTAGLHFDNAMLEKLKAKGVDTAFVTLHVGAGTFQPVRVENH

SEQ ID NO: 68506 - protein, 361 aa, Mannheimia haemolytica
  REGION 1..361: note = tr|A0A378N9B7|A0A378N9B7_MANHA S-adenosylmethionine:tRNA ribosyltransferase-isomerase; OS = Mannheimia haemolytica OX=75985 GN=queA PE=3 SV=1
MLVSDFHFNLPDELIARYPTAERSASRLLHLNGETGEFADQQFVDLYDHINEGDLLIFNNTRVIPARLYGRKPSGGKVEALVERVLDEHCCLAHVKASKAPKEGAELIFGEDKLGEGKGFTATMVARHDTLFELVFNEDQPLFELLQQAGHMPLPPYIDRPDEDADQERYQTVYSKVLGAVAAPTAGLHFDNAMLEKLKAKGVDTAFVTLHVGAGTFQPVRVETIEDHKMHAEYAEVSQEVVDKILATKAKGKRVIAIGTTSVRSVESAAQAAEKDGKLIAPFFSDTAIFLYPGKTFKVIDALVTNFHLPESTLIMLVSAFAGYRNTMNAYAHAVETKYRFFSYGDAMFINKNPNALSDVP

SEQ ID NO: 68507 - protein, 361 aa, Mannheimia sp.
  REGION 1..361: note = tr|W0Q867|W0Q867_9PAST S-adenosylmethionine:tRNA ribosyltransferase-isomerase OS=Mannheimia sp. USDA-ARS-USMARC-1261 OX=1432056 GN=queA PE=3 SV=1
MLVSDFHFDLPDELIARYPTAERSASRLLHLNGETGEFADQQFTDLYDHIHAGDLLIFNNTRVIPARLYGRKPSGGKVEALVERVLDEHRCLAHVKASKAPKEGAELIFGEDKLGEGNSFTATMVARHDTLFELEFNAQTPLFDLLQQAGHMPLPPYIDRPDEDADQERYQTVYSKVLGAVAAPTAGLHFDNVMLEKLKAKGVETAFVTLHVGAGTFQPVRVDTIEEHKMHAEYAEVSQEVVDKILATKAKGKRVIAVGTTSVRSVESAAKAADNEGKLIAPFFSDTSIFLYPGKTFKVVDALVTNFHLPESTLIMLVSAFAGYKNTMNAYAHAVEAKYRFFSYGDAMFINKNPNALNDVP

SEQ ID NO: 68508 - protein, 363 aa, unidentified
  source 1..363: note = Mannheimia succiniciproducens
  REGION 1..363: note = sp|Q65S95|QUEA_MANSM S-adenosylmethionine:tRNA ribosyltransferase-isomerase OS=Mannheimia succiniciproducens (strain MBEL55E) OX=221988 GN=queA PE=3; SV = 1
MHLSDFYFDLPDELIARYPKPERSSSRLLRLSGENGDISHHTFSDVYDLINEGDLLIFNNTRVIPARMYGRKASGGKIEVLIERVLTESRFLAHVRSSKAPKAGTELILGEDKLGEGKGVKAVMIGRQDALFELEITEKSTALLDILQKIGHMPLPPYIDRPDEDADQERYQTVYSKIPGAVAAPTAGLHFDEELLAKLKAKGVNFAFVTLHVGAGTFQPVRVNNIEEHHMHAEYVEVPQQVVDAIVATKAAGKRVIAVGTTSVRSVESAALAAQEKGFAQIIEPFFADTSIFIYPGKQFRVVDCLITNFHLPESTLIMLVSAFAGYKNTMNAYKSAVENRYRFFSYGDAMFITKNNHVKGLD

SEQ ID NO: 68509 - protein, 361 aa, Mannheimia varigena
  REGION 1..361: note = tr|W0QE88|W0QE88_9PAST S-adenosylmethionine:tRNA ribosyltransferase-isomerase OS=Mannheimia varigena USDA-ARS-USMARC-1296 OX=1433287 GN=queA PE=3 SV=1
MLVSDFHFDLPDELIARYPTAERSASRLLHLNGETGKFADQQFVDLYDHINEGDLLIFNNTRVIPARLYGRKPSGGKVEALVERVLDEHRCLAHVKASKAPKEGAELIFGEDKLGEGNGFTATMVARHDTLFELAFSAEQPLFDLLQQAGHMPLPPYIDRPDEDADQERYQTVYSKVLGAVAAPTAGLHFDNAMLEKLKAKGVDTAFVTLHVGAGTFQPVRVDTIEEHKMHAEYAEVSQEVVDKILATKANGKRVIAVGTTSVRSVESAAQAADKEGKLIAPFFSDTSIFLYPGKTFKVVDALVTNFHLPESTLIMLVSAFAGYKNTMNAYAHAVEKQYRFFSYGDAMFIHKNPNAINDLP

SEQ ID NO: 68510 - protein, 349 aa, Maribacter aquivivus
  REGION 1..349: note = tr|A0A1M6UXG1|A0A1M6UXG1_9FLAO S-adenosylmethionine:tRNA ribosyltransferase-isomerase; OS = Maribacter aquivivus OX=228958 GN=queA PE=3 SV=1
MKLSNFSFELPDELLAEHPSENRDESKLMVIHRETGKIEHKMFKDMIDYFDEGDVMVLNNTKVFPARLYGNKEKTGARIEVFLLRELNEEQRLWDVLVDPARKIRIGNKLYFGDDETLVAEVIDNTTSRGRTLRFLYDGAYVDFRRKLRELGETPLPKYIKRDVEPEDEGRYQTIYAKHEGAVAAPTAGLHFSKHLLKRLEIKGVDFAELTLHVGLGTFNPVEVEDLSKHKMDSEELFIDEKATDIVNNAKREKRRICAVGTTAMRGLESAVSSKHMLNTYEGWTNKFIFPPYDFSIANAMITNFHLPKSTLLMMVSAFMGHDLMNKAYKEAILENYKFYSYGDAMLII

SEQ ID NO: 68511 - protein, 349 aa, Maribacter arcticus
  REGION 1..349: note = tr|A0A1T5DG80|A0A1T5DG80_9FLAO S-adenosylmethionine:tRNA ribosyltransferase-isomerase; OS = Maribacter arcticus OX=561365 GN=queA PE=3 SV=1
MKLSNFSFELPKELLAEHPSENRDESKLMVIHRDTGKIEHKMFKDMIDYFEEGDVMVLNNTKVFPARLYGNKEKTGARIEVFLLRELNEEQRLWDVLVDPARKIRIGNKLYFGDDETLVAEVIDNTTSRGRTLRFLYDGAYVDFRRKLRELGETPLPKYIKREVEAEDESRYQTIYAKHEGAVAAPTAGLHFSKHLLKRLEIKGIDFAELTLHVGLGTFNPVEVEDLSKHKMDSEELFIDEKATHIVNNAKLKKRRICAVGTTAMRGLESAVSSKHTLNTFEGWTNKFIFPPYDFSLANAMITNFHLPKSTLLMMVSAFMGHDLMNKAYKEAILENYKFYSYGDAMLII

SEQ ID NO: 68512 - protein, 349 aa, unidentified
  source 1..349: note = Maribacter caenipelagi
  REGION 1..349: note = tr|A0A4R7CUJ8|A0A4R7CUJ8_9FLAO S-adenosylmethionine:tRNA ribosyltransferase-isomerase; OS = Maribacter caenipelagi OX=1447781 GN=queA PE=3 SV=1
MKLSNFSFELPDELLAEHPSENRDESKLMVIHRETGKIEHKMFKDMIDYFDEGDVMVLNNTKVFPARLYGNKEKTGARIEVFLLRELNEEQRLWDVLVDPARKIRIGNKLYFGDDETLVAEVIDNTTSRGRTLRFLYDGAYLDFRRKLRELGETPLPKYIKRDVEPEDEGRYQTIYAKHEGAVAAPTAGLHFSKHLLKRLEIKGVDFAELTLHVGLGTFNPVEVEDLSKHKMDSEELFIDEKATDIVNNAKLQKRRICAVGTTAMRGLESAVSSKHTLNTYEGWTNKFIFPPYDFSIANAMITNFHLPKSTLLMMVSAFMGHDLMNKAYKEAILENYKFYSYGDAMLII

SEQ ID NO: 68513 - protein, 350 aa, unidentified
  source 1..350: note = Maribacter cobaltidurans
  REGION 1..350: note = tr|A0A223VBW2|A0A223VBW2_9FLAO S-adenosylmethionine:tRNA ribosyltransferase-isomerase; OS = Maribacter cobaltidurans OX=1178778 GN=queA PE=3 SV=1
MKLSNFNFELPKELLAEHPSENRDESKLMVIDTKTGKIEHKMFKDMIDYFDEGDVMVLNNTKVFPARLYGNKEKTGARIEVFLLRELNEEQRLWDVLVDPARKIRIGNKLYFGDDETLVAEVIDNTTSRGRTLRFLYDGAYLDFRRKLRELGETPLPKYIKRDVEPEDEERYQTIYAKHEGAVAAPTAGLHFSKHLLKRLEIKGIDFAELTLHVGLGTFNPVEVEDLSKHKMDSEELIIDEKATEIVNNAIEKKRRICAVGTTAMRGLESAVSSNHTLNTFEGWTNKFIFPPYEFSIANSMITNFHLPKSTLLMMISAFMGHDLMKKAYKEAIMEGYKFYSYGDAMLILR

SEQ ID NO: 68514 - protein, 349 aa, Maribacter dokdonensis
  REGION 1..349: note = tr|A0A1H4JHN1|A0A1H4JHN1_9FLAO S-adenosylmethionine:tRNA ribosyltransferase-isomerase; OS = Maribacter dokdonensis OX=320912 GN=queA PE=3 SV=1
MKLSNFNFELPKELLAEHPSENRDESKLMVIHRDTGKIEHKMFKDMIDYFDEGDVMVLNNTKVFPARLYGNKEKTGARIEVFLLRELNEEQRLWDVLVDPARKIRIGNKLYFGDDETLVAEVIDNTTSRGRTLRFLYDGAYLDFRRKLRELGETPLPKYIKRDVEPEDENRYQTIYAKHEGAVAAPTAGLHFSKHLLKRLEIKGVDFAELTLHVGLGTFNPVEVEDLSKHKMDSEEMFIDEKAAEIVNNAKAKKRRICAVGTTAMRGLESAVSSKQTLNTYEGWTNKFIFPPYDFSIANAMITNFHLPKSTLLMMVSAFMGHDLMNKAYKEAILESYKFYSYGDAMLII

SEQ ID NO: 68515 - protein, 350 aa, unidentified
  source 1..350: note = Maribacter flavus
  REGION 1..350: note = tr|A0A5B2TQP6|A0A5B2TQP6_9FLAO S-adenosylmethionine:tRNA ribosyltransferase-isomerase; OS = Maribacter flavus OX=1658664 GN=queA PE=3 SV=1
MKLSNFNFELPKELLAEHPSENRDESKLMVIDTKTGKIEHKMFKDMIDYFDEGDVMVLNNTKVFPARLYGNKEKTGARIEVFLLRELNEEQRLWDVLVDPARKIRIGNKLYFGDDETLVAEVIDNTTSRGRTLRFLYDGAYLDFRRKLRELGETPLPKYIKRNVEPEDEERYQTIYAKHEGAVAAPTAGLHFSKHLLKRLEIKGINFAELTLHVGLGTFNPVEVEDLSKHKMDSEELIIDEKATEVVNNAIAKKKRICAVGTTAMRGLESAVSSNRTLNTFEGWTNKFIFPPYEFSIANSMITNFHLPKSTLLMMISAFMGHDLMKKAYKEAIMESYRFYSYGDAMLILR

SEQ ID NO: 68516 - protein, 349 aa, Maribacter orientalis
  REGION 1..349: note = tr|A0A1H7VR93|A0A1H7VR93_9FLAO S-adenosylmethionine:tRNA ribosyltransferase-isomerase; OS = Maribacter orientalis OX=228957 GN=queA PE=3 SV=1
MKLSNFSFELPKELLAEHPSENRDESKLMVIHRDTGKIEHKMFKDMIDYFDEGDVMVLNNTKVFPARLYGNKEKTGARIEVFLLRELNEEQRLWDVLVDPARKIRIGNKLYFGDDETLVAEVIDNTTSRGRTLRFLYDGAYVDFRRKLRELGETPLPKYIKREVEAEDELRYQTIYAKHEGAVAAPTAGLHFSKHLLKRLEIKGIDFAELTLHVGLGTFNPVEVEDLSKHKMDSEELFIDEKATQIVNNAKLKKRRICAVGTTAMRGLESAVSSKHTLNTFEGWTNKFIFPPYDFSLANAMITNFHLPKSTLLMMVSAFMGHDLMTRAYKEAILENYKFYSYGDAMLII

SEQ ID NO: 68517 - protein, 349 aa, Maribacter polysiphoniae
  REGION 1..349: note = tr|A0A316E0C9|A0A316E0C9_9FLAO S-adenosylmethionine:tRNA ribosyltransferase-isomerase; OS = Maribacter polysiphoniae OX=429344 GN=queA PE=3 SV=1
MKLSHFNFELPKELLAEYPSENRDESKLMVIHRETGKIEHKMFKDLINYFDEGDVMVLNNTKVFPARLYGNKEKTGARIEVFLLRELNEEQRLWDVLVDPARKIRIGNKLYFGEDESLVAEVIDNTTSRGRTLRFLYDGSYTDFRRKLRELGETPLPKYIKRDVEPEDEDRYQTIYAKHEGAVAAPTAGLHFSKHLLKRLEIKGIDFAEVTLHVGLGTFNPVEVEDLSKHKMDSEELIIDEKATEIVNTAKTNKRKVCAVGTTAMRGLESAVSSEHTLNTFNGWTNKFIFPPYEFSIATCMITNFHLPKSTLMMMVSAFAGHDLMKKAYKEAIMEGYKFYSYGDAMLIL

SEQ ID NO: 68518 - protein, 349 aa, Maribacter sp.
  REGION 1..349: note = tr|A4ATP3|A4ATP3_MARSH S-adenosylmethionine:tRNA ribosyltransferase-isomerase OS=Maribacter sp. (strain HTCC2170 / KCCM 42371) OX=313603 GN=queA PE=3 SV=1
MKLSHFNFELPNDLLAEYPAENRDESKLMVIHRETGKIEHKMFKDLINYFDEGDVMVLNNTKVFPARLYGNKEKTGARIEVFLLRELNEEQRLWDVLVDPARKIRIGNKLYFGEDESLVAEVIDNTTSRGRTLRFLYDGSYTDFRRKLRELGQTPLPKYIKRDVEEEDETRYQTIYAKHEGAVAAPTAGLHFSKHLLKRLEIKGVDFAELTLHVGLGTFNPVEVEDLSKHKMDSEELIIDEKATEIVNNAKSNKRKVCAVGTTAMRGLESAVSSEHTLNTFNGWTNKFVFPPYEFSIANCMVTNFHLPKSTLLMMVSAFIGHDLMKKAYKEAILESYKFYSYGDAMLII

SEQ ID NO: 68519 - protein, 349 aa, Maribacter sp.
  REGION 1..349: note = tr|A0A559NPJ6|A0A559NPJ6_9FLAO S-adenosylmethionine:tRNA ribosyltransferase-isomerase; OS = Maribacter sp. MAR_2009_72 OX=1250050 GN=queA PE=3 SV=1
MKLSNFNFELPKELLAEHPSENRDESRLMVIHRDTGKIEHRMFKDMIDYFDEGDVMVLNNTKVFPARLYGNKEKTGARIEVFLLRELNEEQRLWDVLVDPARKIRIGNKLYFGDDETLVAEVIDNTTSRGRTLRFLYDGAYLDFRRKLRELGETPLPKYIKREVEPEDENRYQTIYAKHEGAVAAPTAGLHFSKHLLKRLEIKGVDFAELTLHVGLGTFNPVEVEDLSKHKMDSEEMFIDEKAAEIVNNAKAKKRRICAVGTTAMRGLESAVSSKQTLNTYEGWTNKFIFPPYDFSIANAMITNFHLPKSTLLMMVSAFMGHDLMNKAYKEAILESYKFYSYGDAMLIL

SEQ ID NO: 68520 - protein, 349 aa, unidentified
  source 1..349: note = Maribacter spongiicola
  REGION 1..349: note = tr|A0A4R7JKX6|A0A4R7JKX6_9FLAO S-adenosylmethionine:tRNA ribosyltransferase-isomerase; OS = Maribacter spongiicola OX=1206753 GN=queA PE=3 SV=1
MKLSNFSFELPKELLAEHPSENRDESKLMVIHRDTGKIEHKMFKDMIDYFDEGDVMVLNNTKVFPARLYGNKEKTGARIEVFLLRELNEEQRLWDVLVDPARKIRIGNKLYFGDDETLVAEVIDNTTSRGRTLRFLYDGAYVDFRRKLRELGETPLPKYIKRDVEPEDEGRYQTIYAKHEGAVAAPTAGLHFSKHLLKRLEIKGVDFAELTLHVGLGTFNPVEVEDLSKHKMDSEELFIDEKATDIVNNAKREKRRICAVGTTAMRGLESAVSSKQTLNTYEGWTNKFIFPPYDFSIANAMITNFHLPKSTLLMMVSAFMGHDLMNKAYKEAILESYKFYSYGDAMLII

SEQ ID NO: 68521 - protein, 349 aa, Maribacter stanieri
  REGION 1..349: note = tr|A0A1I6KCP9|A0A1I6KCP9_9FLAO S-adenosylmethionine:tRNA ribosyltransferase-isomerase; OS = Maribacter stanieri OX=440514 GN=queA PE=3 SV=1
MKLSNFNFELPKELLAEHPSENRDESKLMVIHRDTGKIEHKMFKDMIDYFDEGDVMVLNNTKVFPARLYGNKEKTGARIEVFLLRELNEEQRLWDVLVDPARKIRIGNKLYFGDDETLVAEVIDNTTSRGRTLRFLYDGAYLDFRRKLRELGETPLPKYIKREVEPEDEGRYQTIYAKHEGAVAAPTAGLHFSKHLLKRLEIKGVDFAELTLHVGLGTFNPVEVEDLSKHKMDSEELFIDEKATDIVNNAKLEKRRICAVGTTAMRGLESAVSSKHTLNTYEGWTNKFIFPPYDFSIANAMITNFHLPKSTLLMMVSAFMGHDLMNKAYKEAILENYKFYSYGDAMLII

SEQ ID NO: 68522 - protein, 349 aa, Maribacter ulvicola
  REGION 1..349: note = tr|A0A1N6Y2T5|A0A1N6Y2T5_9FLAO S-adenosylmethionine:tRNA ribosyltransferase-isomerase; OS = Maribacter ulvicola OX=228959 GN=queA PE=3 SV=1
MKLSNFNFELPDELLAEHPSENRDESKLMVIHRDTGKIEHRMFKDMIDYFDEGDVMVLNNTKVFPARLYGNKEKTGARIEVFLLRELNEEQRLWDVLVDPARKIRIGNKLYFGDDETLVAEVIDNTTSRGRTLRFLYDGAYVDFRRKLRELGETPLPKYIKRDVEPEDEGRYQTIYAKHEGAVAAPTAGLHFSKHLLKRLEIKGVDFAELTLHVGLGTFNPVEVEDLSKHKMDSEELFIDEKATDIVNNAKLNKRRICAVGTTAMRGLESAVSSKHTLNTYEGWTNKFIFPPYDFSIANAMITNFHLPKSTLLMMVSAFIGHDLMNKAYKEAILESYKFYSYGDAMLII

SEQ ID NO: 68523 - protein, 349 aa, unidentified
  source 1..349: note = Maribacter vaceletii
  REGION 1..349: note = tr|A0A495DT22|A0A495DT22_9FLAO S-adenosylmethionine:tRNA ribosyltransferase-isomerase; OS = Maribacter vaceletii OX=1206816 GN=queA PE=3 SV=1
MKLSNFNFELPEELLAEYPAEHRDESKLMVVHRETGKIEHKMFKDLINYFDEGDVMVLNNTKVFPARLYGNKEKTGARIEVFLLRELNEEQRLWDVLVDPARKIRIGNKLYFGDDETLVAEVIDNTTSRGRTLRFLYDGSYLDFRRKLRDLGETPLPKYIKREVEENDEERYQTIYAKHEGAVAAPTAGLHFSKHLLKRLEIKGVDFAELTLHVGLGTFNPVEVEDLSKHKMDSEELIIDEKATEVVNNAKTNKRKVCAVGTTAMRGLESAVSSNQTLNTYEGWTNKFIFPPYDFSIANCMITNFHLPKSTLMMMVSAFAGHDLMKKAYKEAILESYKFYSYGDAMLII

SEQ ID NO: 68524 - protein, 350 aa, Maribius pelagius
  REGION 1..350: note = tr|A0A1H8B995|A0A1H8B995_9RHOB S-adenosylmethionine:tRNA ribosyltransferase-isomerase; OS = Maribius pelagius OX=387096 GN=queA PE=3 SV=1
MRLSEFDFDLPEDRIAVRPARPRSSARMLVARGDRIDDAVVRDLPDWLSPGDLLVLNDTKVIPARLSGHRTRQGAEGETTARIEATLLEPRADGTWSALLKPLKKVRDGEVVVFSDQLSATVEGRSDGTAHLRFNLAGDDFDAALADAGAMPLPPYIAAKRPADAQDHEDYQTIWAARSGAVAAPTASLHFDPPLMERLAARGIEIAHVTLHVGAGTFLPVKVDDVSEHKMHAEWGEVSQAAADAMMAARARGNRVIPVGTTALRLIETAATARGQIAAWSGDTDIFITPGFAFRMADALMTNFHLPKSTLMMLVSAFLGVERIRRVYDHAIGNDYRFFSYGDASLLIPE

SEQ ID NO: 68525 - protein, 350 aa, Maribius salinus
  REGION 1..350: note = tr|A0A1M6BIK4|A0A1M6BIK4_9RHOB S-adenosylmethionine:tRNA ribosyltransferase-isomerase; OS = Maribius salinus OX=313368 GN=queA PE=3 SV=1
MRLSEFDFDLPEDRIAVRPARPRSSARMLVARGDRIDDAVVRDLPDWLAPGDLLVLNDTKVIPARLSGQRTRHGAEGETTARIEATLLEPRADGTWSALLKPLKKVRDGEVVVFSDQLSAVVEGRSDGTAHLRFNLAGDDFDAALAQAGAMPLPPYIAAKRPADAQDHEDYQTIWAARSGAVAAPTASLHFDPFLMERLAARGIEIAYVTLHVGAGTFLPVKVDDVSEHKMHAEWGEVSQGAADAMMATRARGNRVIPVGTTALRLIETAATGRGEIAAWSGDTDIFITPGFDFRMADALVTNFHLPKSTLMMLVSAFLGADRIRRVYDHAIANDYRFFSYGDASLLIPE

SEQ ID NO: 68526 - protein, 353 aa, Maricaulis maris
  REGION 1..353: note = tr|A0A495D1F4|A0A495D1F4_9RHOB S-adenosylmethionine:tRNA ribosyltransferase-isomerase; OS = Maricaulis maris OX=74318 GN=queA PE=3 SV=1
MRVSDFDFHLPEERIALRPARPRDAARMLHVASNGVLADRGVRDLPDLLQPGDLMVFNDTRVIPAALKGVRPARAVGGGGPVELEVNLHKRIDASAWRAFVRPAKRLRTGDTITFSETLTAKVTGKSEGGDVRLVFNVTGAALDAAIAVAGEMPLPPYIARKRGVDEQDEADYQTLFATHEGSVAAPTAGLHFTPELMAALDARGVEQTRVTLHVGAGTFLPVKSDDTDDHQMHSEWCTVSEQAAAAINAAKAEGRRVIPVGTTALRTIESLASGPGVIKAGSRDTDIFLTPGSSFAITDMLMTNFHLPKSTLFMLVSALSGLDVMQRAYAHAIAAEYRFYSYGDACLLERRT

SEQ ID NO: 68527 - protein, 353 aa, Maricaulis maris
  REGION 1..353: note = sp|Q0ANH8|QUEA_MARMM S-adenosylmethionine:tRNA ribosyltransferase-isomerase OS=Maricaulis maris (strain MCS10) OX=394221 GN=queA PE=3 SV=1
MRVSDFDFHLPEARIALRPARPRDAARMLHVASNGVFADRGVRDLPDLLQPGDLMVFNDTRVIPAALKGIRPARAVGGGGPVEVEVNLHKRIDASAWRAFVRPAKRLRMGDEIAFGETLKAEVTGKSEGGDVRLVFNAAGAALDAAIAVAGEMPLPPYIARKRGVDEKDEADYQTLFATHEGSVAAPTAGLHFTPELMAALEARGVEQTRVTLHVGAGTFLPVKSDDTDDHQMHSEWCTVSAEAADAINAAKAEGRRVIPVGTTALRTIESLASGPGIVRAGSRDTDIFLTPGSDFAITDMLMTNFHLPKSTLFMLVSALSGLDVMQRAYAHAIAAEYRFYSYGDACLLERRT

SEQ ID NO: 68528 - protein, 311 aa, Maricaulis salignorans
  REGION 1..311: note = tr|A0A1G9PS44|A0A1G9PS44_9RHOB S-adenosylmethionine:tRNA ribosyltransferase-isomerase; OS = Maricaulis salignorans OX=144026 GN=SAMN04488568_10410; PE = 3 SV=1
MLDLPDLLRAGDLLVFNDTRVIPAALVGTRAARALGGGGDVSCEINLHKRAGPDRWRAFIRPAKRLKIGDSIAFGTFSAEVIEKGPGGDTLLAFDLSGAVLDEAIAATGVPPLPPYIARKRSVDAADVEDYQTLFAREDGSVAAPTAGLHFTERLFDALAARGVERCDVTLHVGAGTFLPVKAEDTADHRMHGEWCTVSEQAANAINTARLQGRRVIAVGTTALRTLESLAPEIGRIESGSRDTEIFITPGYDFRITDALLTNFHLPRSTLFMLVSALAGLETMQRAYAHAIENGYRFYSYGDTSLLERAR

SEQ ID NO: 68529 - protein, 355 aa, Maricaulis sp.
  REGION 1..355: note = tr|A0A2D8BTM6|A0A2D8BTM6_9RHOB S-adenosylmethionine:tRNA ribosyltransferase-isomerase; OS = Maricaulis sp. OX=1486257 GN=queA PE=3 SV=1
MRLSDFDYDLPDERIALRPARPRDSARLLHIRADGSLGDHGVKDLASLLRPGDLLVSNDTHVLRAALTGERAARAVGGGGAAKISVNLHTRDNARCWRAFVKPAKRLKVGDEIRFGSLKASIEAKRPGGEVVLEFDCEGEALDRAIAIAGQPPLPPYIASKRAPDAQDADDYQTVFADPDKTGSVAAPTAGLHFTDDLMAALRRAGVEFTAVTLHVGAGTFLPVKSENIAEHQMHSEWYEVSEAAAETINRARADGRRIIPVGTTALRTLESAASEDGELEACVGETEIFITPGYRFRAADALLTNFHLPKSTLLMLVSAMAGTDVIKRAYAHAVKVEYRFFSYGDACLIERADR

SEQ ID NO: 68530 - protein, 353 aa, Maricaulis sp.
  REGION 1..353: note = tr|A0A1Q8FJS7|A0A1Q8FJS7_9RHOB S-adenosylmethionine:tRNA ribosyltransferase-isomerase; OS = Maricaulis sp. W15 OX=1772333 GN=queA PE=3 SV=1
MRVSDFDFHLPEERIALRPARPRDAARMLHVASNGVLADRGVRDLPDLLQPGDLMVFNDTRVIPAALKGVRPARAVGGGGPVELEVNLHKRIDASAWRAFVRPAKRLRTGDTITFSETLTAKVTGKSEGGDVRLVFNATGAALDAAIAVAGEMPLPPYIARKRGVDEQDEADYQTLFATHEGSVAAPTAGLHFTPELMAALDARGVEQTRVTLHVGAGTFLPVKSDDTNDHQMHSEWCTVSEQAAAAINAAKAEGRRVIPVGTTALRTIESLASGPGVIKAGSRDTDIFLTPGSSFAITDMLMTNFHLPKSTLFMLVSALSGLDVMQRAYAHAIAAEYRFYSYGDACLLERRT

SEQ ID NO: 68531 - protein, 352 aa, Marichromatium gracile
  REGION 1..352: note = tr|A0A4R4AG82|A0A4R4AG82_MARGR S-adenosylmethionine:tRNA ribosyltransferase-isomerase; OS = Marichromatium gracile OX=1048 GN=queA PE=3 SV=1
MRRSDFHFDLPDELIAQYPLAERAASRLLVLEAGAERPSDRRFLDLPALLRPNDLLVFNNTRVMRARLFAVKETGGRVELLIERVVEPGVALAHLRASKSPKPGARLSIDGVPRIEVIGRDDDLFRLRALDDDFAVLMERFGHMPLPPYITRADEAADESRYQTVYARNAGAVAAPTAGLHFDEALLDRLDARGVERAEITLHVGAGTFRPVRVDDLDQHHMHSEWLEVDEALCARVAETRARGARVIAVGTTSVRALETAAAGGELRPYRGESRLFIRPGYRFRVVDAMVTNFHLPESTLLMLVCAFAGYQRMMAAYRHAVAERYRFFSYGDAMFLAAMREDPSRQPPLIE

SEQ ID NO: 68532 - protein, 352 aa, Marichromatium purpuratum
  REGION 1..352: note = tr|W0E713|W0E713_MARPU S-adenosylmethionine:tRNA ribosyltransferase-isomerase OS=Marichromatium purpuratum 984 OX=765910 GN=queA PE=3 SV=1
MRRSDFHFDLPDELIAQYPLAERAASRLLVLEAGAARPSDRRFLDLPELLRPNDLLVFNNTRVMRARLFAVKETGGRVELLIERVVEPGVALAHLRASKSPKPGARLLIDGVPCIEVIGRDDDLFRLRALDDDFTVLMERFGHMPLPPYITRADEAADESRYQTVYARNAGAVAAPTAGLHFDEALLDRLDAIGVERAEITLHVGAGTFRPVRVDDLDQHRMHSEWLEVDETLCARVAETRARGGRVVAVGTTSVRALETAAAAGELRPYRGESRLFIRPGYRFRVVDAMVTNFHLPESTLLMLVCAFAGYQRMMAAYRHAVAERYRFFSYGDAMFLAARREDRSRQAPLIE

SEQ ID NO: 68533 - protein, 334 aa, unidentified
  source 1..334: note = Unknown
  REGION 1..334: note = tr|A0A0C1UB74|A0A0C1UB74_9ACTN S-adenosylmethionine:tRNA ribosyltransferase-isomerase; OS = marine actinobacterium MedAcidi-G2B OX=1550401 GN=queA; PE = 3 SV=1
MGPDDFDYELPEDLIAQHPLEERTAARMLVDLGNGPEHLRISDFPKLLKSGDIVVVNNTRVLPARLFLKKETGGNVEVLLLKALNQMTWEALVRPSRKVSPGTKFTVSPEMTIYIGEDLGAGKRLVQIKTKSDFLPLLEKYGKVPLPPYIKNDLEDGERYQTVFANRSNSSAAPTAGLHFTEDLVAECKDSGAQVEEIELAIGLDTFRPLTVNNLDDHDMHSEFYSVSEEVIHRCKEANRVIAIGTTTVRALESAVRFELSGQTNLFIRDPFEFKIVDLLLTNFHLPKSTLLVMLEAFIGPYWRDLYTEAQINRYRFLSFGDSMLVSDRSTRKL

SEQ ID NO: 68534 - protein, 339 aa, unidentified
  source 1..339: note = Unknown
  REGION 1..339: note = tr|A0A0C1UNU2|A0A0C1UNU2_9ACTN S-adenosylmethionine:tRNA ribosyltransferase-isomerase; OS = marine actinobacterium MedAcidi-G3 OX=1550402 GN=queA; PE = 3 SV=1
MREFDYGLPEGAIAQSPAEPRDSAKLLVDCGIGQPVQHLTVANLPGLIAEGDVVVVNETSVIPARLHLRKVTGGAVEVLLLEPAEDGWSALVKPGRRVKSGTELRSERDTDLQVLVGDEISEDGQREVVVRHRGELISNPSEAQKLSRAGEQPLPPYITSKGHSPDRYQTVYARTPGSVAAPTAGLHLTEGVLQEIRDKGAQIKKIDLVVGIDTFRPVTVDDPANHVMHSESYKVDESTWEACQAAQRVVAIGTTTVRALESAARGALSGRTDLFLRRGARFEIVDALMTNFHMPKSTLLMMIDAFIGQRWKNLYREALENNYRFLSFGDAMFMDKTPS

SEQ ID NO: 68535 - protein, 411 aa, unidentified
  source 1..411: note = Unknown
  REGION 1..411: note = tr|A0A1Q3GXB8|A0A1Q3GXB8_9BACT S-adenosylmethionine:tRNA ribosyltransferase-isomerase; OS = marine bacterium AO1-C OX=1905359 GN=queA PE=3 SV=1
MNPQNTHHLSPVYLRDYDYTLPEERIAKSPLAQRDHSKLLVYRSGNINHQHFYDLPQHLPGDTLLAFNDTKVIPARLYFQKPTGAVIEVFLLQPTNPPEIAAAMHKSQGCTWHCMIGNKRKWNQDLVLEQTLADGLVLKANLINREKNEVEFTWNDAQMSFAEILAKIGELPLPPYLKRKATQKDADQYQTVYSKFEGAVAAPTAGLHFTNEVIEALEQKGVQTEYLTLHVSAGTFQPVKVDNVLEHEMHSEQIVVQRKNIEHLAQHASQVVAVGTTSMRVLESIYWLGVRIIKENYQPQLDKPFQIEKLYPYQWENETLPTRQESMQAILTFMQTQGLEKLWGATEIFIFPGYDFKMCNGLITNYHLPKTTLILLIAAFVGEDWRKVYDEALASDYRFLSYGDSSLLWRN

SEQ ID NO: 68536 - protein, 350 aa, unidentified
  source 1..350: note = Unknown
  REGION 1..350: note = tr|A0A1Q3GIW3|A0A1Q3GIW3_9BACT S-adenosylmethionine:tRNA ribosyltransferase-isomerase; OS = marine bacterium AO1-C OX=1905359 GN=queA PE=3 SV=1
MKLSEFKFDFPNSLLALHPTENRDESRLMVVHRESGKIEHKVFKDIVSYFDEGDVFVVNNTKVFPARLFGSKEKTGAQIEVFLLRELNQEAHLWDVLVDPARKIRVGNKLFFGNGELVAEVIDNTTSRGRTIRFLTDRSDEEFYQLIDELGETPLPKHIYQHRKTDPNDRERFQTIFAEHVGAVAAPTAGLHFTKQLIKRLELKGIDMTPITLHIGLGTFREVDVEDLTKHKADSENFSVPTITTEKVNNALAQKRKVCAIGTTAIKALESSVSANGLLKENEGWSDKFIFPPYEFKIPNALVTNFHLPESTLLMTACAFGGYELIMEAYSQAVKEKYRFFSYGDAMLIL

SEQ ID NO: 68537 - protein, 352 aa, unidentified
  source 1..352: note = Unknown
  REGION 1..352: note = tr|B7RY81|B7RY81_9GAMM S-adenosylmethionine:tRNA ribosyltransferase-isomerase OS=marine gamma proteobacterium HTCC2148 OX=247634 GN=queA PE=3 SV=1
MKRTDFSYHLPEELVAQYPLPERSDSRLLCLDGSDGAMAHRNFTDFPGLLTSDDLLVFNNTRVIPARLWGQKETGGKLEILIERVTGTHSALAHIRCSKSPRPGTRILLAEREGASPGDYRLEVTGREGALFMLSSESGLPLTDIMRDIGHMPLPPYIARQDEEADQERYQTVFAEREGAVAAPTAGLHFTDDLLRQIAELDVRTAKVTLHVGAGTFQPVREDNILDHIMHSEFVEVGEDVCAAVSDARARGGRVVAVGTTAVRSLESASTTGEIRPFVGDTDIFIYPGYQFRSVDAMVTNFHLPESTLLMLVSAFAGKEHIMNAYEEAVARSYRFFSYGDAMFLSAGESSQ

SEQ ID NO: 68538 - protein, 349 aa, unidentified
  source 1..349: note = Unknown
  REGION 1..349: note = tr|A0YHN5|A0YHN5_9GAMM S-adenosylmethionine:tRNA ribosyltransferase-isomerase OS=marine gamma proteobacterium HTCC2143 OX=247633 GN=queA PE=3 SV=1
MQLSDFNFQLPNHLIARYPTTNRTDSRLLVLDGQSGDIQHQQFNDLSELLNDGDLLVFNDTRVIPARLWGKKSTGGRIEILVERIIDSQRVLAHIRSSKSPKAGAVLHLHQNANSDETMATVTVVGRHDALFELMFDGEKEALSVLNSIGHMPLPPYIDRSDELADRERYQTVYGKKDGAVAAPTAGLHFSEQFIQHCQNKGVDTAFVTLHVGAGTFQPVRVSNITEHKMHAEWLEVSEQVCEKVRLTRQRGGRVIAVGTTSVRSLETASHSGELQPFSGDSEIFIYPGYQFKSVDAMLTNFHLPESTLIMLVSAFANREHVLEAYRTAVEHNYRFFSYGDAMFVLPQR

SEQ ID NO: 68539 - protein, 367 aa, unidentified
  source 1..367: note = Mariniblastus fucicola
  REGION 1..367: note = tr|A0A5B9P8V1|A0A5B9P8V1_9PLAN S-adenosylmethionine:tRNA ribosyltransferase-isomerase; OS = Mariniblastus fucicola OX=980251 GN=queA PE=3 SV=1
MSLTQPVPFEISMPNETQPKLATSDYDYELPKDLIAQHPLRNREDARLMMVSRERDFIDHYHVRDLAELLKPGDCLVLNNTRVLPAKLVGKRTQTGGRWQGLFLESDGNGNWKLLCKTRGKMQPGETVTVTDRHGVDRATLKMIARLDDGAWAVRPEAEGDYETLLSQMGRVPLPHYIRDGNMVDADLKDYQTIYAKTAGAVAAPTAGLHLTKRLIKELIDEGIRIAQVTLHVGIGTFRPVTADDLNEHVMHYETGEINQKSVDLINQTRADGGRIVAVGTTSVRVLETAGSDGELKPWVGDTNLFIKPPYEFKVVDGLMTNFHLPRSTLLVMIRTLGGDELLKRAYAEAVDEKYRFFSYGDAMLIL

SEQ ID NO: 68540 - protein, 354 aa, unidentified
  source 1..354: note = Marinicauda algicola
  REGION 1..354: note = tr|A0A4S2H249|A0A4S2H249_9RHOB S-adenosylmethionine:tRNA ribosyltransferase-isomerase; OS = Marinicauda algicola OX=2029849 GN=queA PE=3 SV=1
MKLSDFDFVLPEDRIALRPVRPRDAAKLLQVASDGTLSDHGVVDLPGLLQPGDLLVFNDTKVIPAALEGVRPARAVGGGGEARIEINLHKRETENAWRAFARPAKRLKEKDTLTFTGGLSARVTGKGEGGEIALEFDRSGIELDRAIVAAGAPPLPPYIASKRAPDAADLTDYQTIYADPEKSGSVAAPTAGLHFTDRLMAALDARGVKKTWVTLHVGAGTFLPVKTENVAGHKMHAEWYEISDAAAAAINAARAAGGRIIPVGTTSLRTLESAAASDGRIEAGSADTAIFITPGYRFRVTDALMTNFHLPRSTLFMLVSALAGLDTMQRAYAHAIESGYRFFSYGDSSLIWRA

SEQ ID NO: 68541 - protein, 355 aa, unidentified
  source 1..355: note = Marinicauda pacifica
  REGION 1..355: note = tr|A0A4S2HFP2|A0A4S2HFP2_9RHOB S-adenosylmethionine:tRNA ribosyltransferase-isomerase; OS = Marinicauda pacifica OX=1133559 GN=queA PE=3 SV=1
MNLSDFDFDLPEDRIALRPARPRDSARLLHVGADGALSDRGVLELPDLLAPGDLLVFNDTRVIPAALEGLRPARAVGGGGPAHIEINLHKRESEAVWRAFARPAKRLREGDTLAFEGGLGAVVEGKTDGGEVTLRFDRAGPALDRAIVEAGAPPLPPYIASKRKPDAADLEDYQTIYAAPDKTGSVAAPTAGLHFTDRLMEALRLRGVKSAQVTLHVGAGTFLPVKTENVAEHTMHSEWYEIGEEAAQAIAETRAAGGRIIAVGTTSLRTLESAAGEDGTIRAGSAETAIFITPGYRFRLVDGLMTNFHLPKSTLFMLVSALAGLDTMQAAYAHAIAQGYRFFSYGDSSLIWRAE

SEQ ID NO: 68542 - protein, 355 aa, unidentified
  source 1..355: note = Marinicauda sp.
  REGION 1..355: note = tr|A0A2U2BRI2|A0A2U2BRI2_9RHOB S-adenosylmethionine:tRNA ribosyltransferase-isomerase; OS = Marinicauda sp. WD6-1 OX=2135793 GN=queA PE=3 SV=1
MKLADFDFDLPEDLIALRPARPRDSARLLHVAADGALADRGVLDLPALLNPGDLLVFNDTRVIPAALAGVRPARPVGGGGDSTVEINLHKRAGEAAWLAFARPAKRLREGDEIRFDGGLAATVTDKREGGEIALSFDRSGVDLDRAIVAAGAPPLPPYIASKRAPDETDLADYQTIYADPEKAGSVAAPTAGLHFTDRLFAALDDRGVKRARVTLHVGAGTFLPVKTEDVSEHRMHAEWYEIGADAAAAINETRAAGGRIIPVGTTSLRTLESAADADGTVRAEARDTDIFITPGYRFRVVDALLTNFHLPKSTLFMLVSALAGLETMQRAYAHAIAEKYRFFSYGDACFIERAG

SEQ ID NO: 68543 - protein, 351 aa, unidentified
  source 1..351: note = Marinicaulis flavus
  REGION 1..351: note = tr|A0A2S7K3Q4|A0A2S7K3Q4_9PROT S-adenosylmethionine:tRNA ribosyltransferase-isomerase; OS = Marinicaulis flavus OX=2058213 GN=queA PE=3 SV=1
MRVDLFDFELPPERIAMEPVSPRDSARLLCVRPEGLEDRIVRDLPGLLRPGDLLVANDTKVIPAQLFGQRPPRDGQTGGAPVAVEATLHKDLGRNVWRAFVRPAKRLKEGDAITFAAGLAARVIARDGAEADLQFETQGDHFFAALEKAGVMPLPPYIARKRPAGEDDKASYQTMFADEAGSVAAPTAGLHFTPDLIAALRDKGVEQTTVTLHVGAGTFLPVTAEDTADHKMHAEWGEITHSQAAKINEARAAGGRIIAVGTTSLRLLESAAGEDGKIAPFADETDIFITPGYRFKAADMLMTNFHLPRSTLFMLVSAFAGTDRMKAAYAHAVEQGYRFYSYGDACLLERI

SEQ ID NO: 68544 - protein, 341 aa, Marinicella litoralis
  REGION 1..341: note = tr|A0A4R6XWV3|A0A4R6XWV3_9GAMM S-adenosylmethionine:tRNA ribosyltransferase-isomerase; OS = Marinicella litoralis OX=644220 GN=queA PE=3 SV=1
MKKKDFDFTLPSELIAQEPLPDRSASRLLKLHKSTGQTTDLQFKDILCELNPGDLLVFNNTKVIPARLLAQKSTGGKIEVFIERVLNEQQAKALLKSNKSVKLGSTIEFDGMAKMTVTAKQGMFYLVETINGHHLSDLMQQHGHMPLPPYITREADSHDDERYQTVYADNKQTGAVAAPTAGLHFDNDLLAQIEAKGIQSAFVTLHVGAGTFQPVKTDEIESHQMHKEWLSVDQQVCDLVKQTHAKGCRVIAVGTTAVRCLETAAANGEIEPFVGDTQIFIYPGYEFKIIDGLITNFHLPESTLVMLVSSLAGRKNILAAYQHAIDEQYRFFSYGDAMLIV

SEQ ID NO: 68545 - protein, 402 aa, unidentified
  source 1..402: note = Marinifilaceae bacterium
  REGION 1..402: note = tr|A0A434B002|A0A434B002_9BACT S-adenosylmethionine:tRNA ribosyltransferase-isomerase; OS = Marinifilaceae bacterium T3-2 S1-C OX=2487017; GN = DLK05_01930 PE=3 SV=1
MKAQQIQIKEFTYDLPEERIAKYPLQNRDLSKLLIYKNGEIKEAVFQSLSQHIEANCSMVFNNTKVIQARLIFYKDTGARVEIFCLEPLNPADYNLAFQAQTRSSWKCIVGNLRKWKTGVLKMPFYVDGKTYHLRAERLSQVDGAHEVQFSWDPIDLSFGEVLDQTGKIPIPPYLNRDSEDSDTIRYQTVYSKFEGSVAAPTAGLHFTEEVLAELGGKGIFREELTLHVGAGTFKPVKAENIGEHEMHTEHIQVDLKTLVSLSECQHKIIAVGTTSVRSLESLYWMGVKLLCNVENPNLLKQWEAYQLPQFYNYQEAYQAICKYMQQHELSLFNAATQIIIAPGYDFKVISGLVTNFHQPKSTLLLLISALVGEDWKKIYQYALQNDFRFLSYGDSSLLMRS

SEQ ID NO: 68546 - protein, 349 aa, unidentified
  source 1..349: note = Marinifilaceae bacterium
  REGION 1..349: note = tr|A0A434AW98|A0A434AW98_9BACT S-adenosylmethionine:tRNA ribosyltransferase-isomerase; OS = Marinifilaceae bacterium T3-2 S1-C OX=2487017 GN=queA; PE = 3 SV=1
MKLSKFKYNLPTELIALHPAYNRDESRLMVLHKDTGEVEHRIFKDIIEYFDDEDVMVFNNTKVFPARLYGNKEKTGAEIEVFLLRELNREQRLWDVLVDPARKIRIGNKLYFGEDDLLVAEVIDNTTSRGRTLRFLYDGPYEEFKKTLYSLGETPLPKFIDRAVEPEDADRYQTIFAKHEGAVAAPTAGMHFSRELMKRLEIKGVDFAEVTLHVGLGNFRNVDVEDLTKHKMDSEQIIINNTAVEKVNLAKKQKKNVCAVGTTVMRTLESSVSTMGMLKPFEGWTNKFIFPPYEFHVPNRMITNFHLPLSTLMMMACAFGGYDNVMSCYQQAIKEKYRFGTYGDAMLIL

SEQ ID NO: 68547 - protein, 415 aa, unidentified
  source 1..415: note = Marinifilum breve
  REGION 1..415: note = tr|A0A2V4A2R2|A0A2V4A2R2_9BACT S-adenosylmethionine:tRNA ribosyltransferase-isomerase; OS = Marinifilum breve OX=2184082 GN=queA PE=3 SV=1
MEINTENKTLETQQIEIANFTYDLPDHRIAKHPLQNRDLSKLLIYRNGEINESVFNQLPEEIEAGTKMVYNNTKVIQARLIFHKETGARVEIFCLEPLNPADYNLAFQATQKSTWKCIVGNSKKWKSGVLSMSFFVDEKEYQLQAERVQLLDGAQEIQFSWNHDELSFSEVLEQTGKIPIPPYLNRDTEEGDLVRYQTVYSKFEGSVAAPTAGLHFTDKVFAEMDTKGIEREELTLHVGAGTFKPVKSDQIGDHEMHTEHIQVTAESLRSIAAAKNGVIAVGTTSVRTLESLYWMGVKILNKAEDPKLLKQWEAYELPKNYTVEESFQAICTYMDENEISLFNAATQIIIAPGYDFKVIKGLVTNFHQPQSTLLLLISALVGDDWRKIYQYALENEFRFLSYGDSSLLMRRERFA

SEQ ID NO: 68548 - protein, 349 aa, unidentified
  source 1..349: note = Marinifilum breve
  REGION 1..349: note = tr|A0A2V4A6U3|A0A2V4A6U3_9BACT S-adenosylmethionine:tRNA ribosyltransferase-isomerase; OS = Marinifilum breve OX=2184082 GN=queA PE=3 SV=1
MKLSKFKYKLPTELIALHPAYNRDESRLMVLHKDTGEIEHKIFKDLIEYFDDEDVMVFNNTKVFPARLYGNKEKTGAEIEVFLLRELNREQRLWDVLVDPARKIRIGNKLYFGDDDLLVAEVIDNTTSRGRTLRFLYDGPYDEFKKTLFGLGETPLPKFIDRSVEPEDAERYQTIFAKHEGAVAAPTAGMHFSRELMKRLEIKGIDFAEVTLHVGLGNFRTVDVEDLTKHKMDSEQIFIEDEAVEKVNSAKKKKKNVCAVGTTVMRTLESSVSTMGTLKPYEGWTNKFIFPPYEFHVPNRMITNFHLPLSTLMMMVCAFGGYDNVMAAYEEAIKEKYRFGTYGDAMLII

SEQ ID NO: 68549 - protein, 415 aa, unidentified
  source 1..415: note = Marinifilum flexuosum
  REGION 1..415: note = tr|A0A419XA45|A0A419XA45_9BACT S-adenosylmethionine:tRNA ribosyltransferase-isomerase; OS = Marinifilum flexuosum OX=1117708 GN=queA PE=3 SV=1
MEINTENKTLETQQIEIANFTYDLPDHRIAKHPLQNRDLSKLLIYRNGEINESVFNQLPEEIESGTKMVYNNTKVIQARLIFHKETGARVEIFCLEPLNPADYNLAFQATQKSTWKCIVGNSKKWKSGVLSMSFFVDEKEYQLQAERIQLLEGAQEIQFSWNHEELSFSEVLEQTGKIPIPPYLNRDTEEGDLVRYQTVYSKFEGSVAAPTAGLHFTDKVFAEMDAKGIEREELTLHVGAGTFKPVKSDQIGDHEMHTEHIQVTAESLRSIAATKNGVIAVGTTSVRTLESLYWMGVKILTKAEDPKLLRQWEAYQLPKNYTVEESFQAICAYMEENEISLFNAATQIIIAPGYDFKVIKGLVTNFHQPQSTLLLLISALVGEDWRKIYQHALDNEFRFLSYGDSSLLMKREIVG

SEQ ID NO: 68550 - protein, 349 aa, unidentified
  source 1..349: note = Marinifilum flexuosum
  REGION 1..349: note = tr|A0A419X671|A0A419X671_9BACT S-adenosylmethionine:tRNA ribosyltransferase-isomerase; OS = Marinifilum flexuosum OX=1117708 GN=queA PE=3 SV=1
MKLSKFKYKLPTELIALHPAYNRDESRLMVLHKDTGKVEHKIFKDLIEYFDDEDVMVFNNTKVFPARLYGNKEKTGAEIEVFLLRELNREQRLWDVLVDPARKIRIGNKLYFGDDDLLVAEVIDNTTSRGRTLRFLYDGPYDEFKKTLFGLGETPLPKFIDRSVEPEDAERYQTIFAKHEGAVAAPTAGMHFSRELMKRLEIKGIDFAEVTLHVGLGNFRTVDVEDLTKHKMDSEQIFIEDEAVEKVNLAKKKKKNVCAVGTTVMRTLESSVSTMGTLKPFEGWTNKFIFPPYEFHVPNRMITNFHLPLSTLMMMVCAFGGYDNVMAAYEEAIKEKYRFGTYGDAMLII

SEQ ID NO: 68551 - protein, 366 aa, Marinifilum sp.
  REGION 1..366: note = tr|A0A4V4R9H5|A0A4V4R9H5_9BACT S-adenosylmethionine:tRNA ribosyltransferase-isomerase; OS = Marinifilum sp. JC120 OX=2302941 GN=queA PE=3 SV=1
MKTEKMNINTEDFFLKSYDFELPEGQIAQCPAVMRHGSKLLVLDQKSGETEIKNFTDIVDLLPEGALLVANNSKVVPARIFGKKPTGGRVEFLLLTPLPLIEAEEVPGGFKAQARGLLRASKGPKTGNEIFFEGGLKLTVLGKGRFGLSKVELEWNGDLKKIFEECGKIPLPPYIRRAADETDNERYQTIYACDEKAGSVAAPTAGLHFSEEINEKMKAKNIERAEVTLYVGYGTFSPVRAEDIRDHEMHHEYIEIPEETAAAVIKAKQEGRPVIAVGTTSARTLEGAFQQAGEICEFKGETNIFIYPGYEFKVVDRMITNFHLPESSLVIMISALAGRKNVLNAYSKAVDNEFRFFSYGDSMYIK

SEQ ID NO: 68552 - protein, 349 aa, Mariniflexile fucanivorans
  REGION 1..349: note = tr|A0A4R1RCD4|A0A4R1RCD4_9FLAO S-adenosylmethionine:tRNA ribosyltransferase-isomerase; OS = Mariniflexile fucanivorans OX=264023 GN=queA PE=3 SV=1
MKLSHFGFNLPEELLAEYPAENRDESRLMVLDRKKQTIEHKMFKDIIDYFDEDDVLILNNTKVFPARLYGNKEKTGARIEVFLLRELNEEQRLWDVLVDPARKIRIGNKLYFGDDDTLVAEVIDNTTSRGRTLRFLYDGSYKEFRRKLNELGETPLPKYIKREVQPEDEDRYQTIYAKNEGAVAAPTAGLHFSRHLLKRLEIKGVKFAEVTLHVGLGTFNPVEVEDLSKHKMDSEELKIETPAVEIVNTAKKNKRRICAVGTTAMRAIESSVSSNGELNEVEGWTNKFIFPPYDFSIANCMITNFHTPKSTLLMMVSAFAGHDFIKKAYEEAVKEKYKFYSYGDAMLII

SEQ ID NO: 68553 - protein, 349 aa, Mariniflexile sp.
  REGION 1..349: note = tr|A0A385BQ16|A0A385BQ16_9FLAO S-adenosylmethionine:tRNA ribosyltransferase-isomerase; OS = Mariniflexile sp. TRM1-10 OX=2027857 GN=queA PE=3 SV=1
MKLSHFGFNLPEELLAEYPAENRDESRLMVLDRKKQTIEHKMFKDIINYFDEDDVLILNNTKVFPARLYGNKEKTGARIEVFLLRELNEEQRLWDVLVDPARKIRIGNKLYFGDDDTLVAEVIDNTTSRGRTLRFLYDGSYKEFRRKLNELGETPLPKYIKREVQPEDEERYQTIYAKNEGAVAAPTAGLHFSKHLLKRLEIKGVKFAEVTLHVGLGTFNPVEVEDLSKHKMDSEELKIDEKAVEIVNKGIQNKKRVCAVGTTAMRAIESSVSSGGRLNEVDGWTNKFIFPPYDFSIANCMITNFHTPKSTLLMMVSAFAGHDFIKKAYEEAVKEKYKFYSYGDAMLII

SEQ ID NO: 68554 - protein, 398 aa, Marinilabilia salmonicolor
  REGION 1..398: note = tr|A0A368UN69|A0A368UN69_9BACT S-adenosylmethionine:tRNA ribosyltransferase-isomerase; OS = Marinilabilia salmonicolor OX=989 GN=queA PE=3 SV=1
MHISIDQYTYNLPTEKIAKYPLTERDQSKLLLFSDGSIDNKTFSDLPNLIPADAMLLFNNTKVIRARLPFRKATGARIEIFCLEPASPTDVATAFEQTQEVTWNCMVGNLKKWKEGALEMEVDTGKTPVVVKAEKVSKTNDGFVIRFRWENPEYTFSELMEAMGKTPIPPYLERESEEIDTERYQTVYSREQGSVAAPTAGLHFTPEVMNSLKNKGVLLTNLTLHVGAGTFRPVKSETIADHKMHTEHFRVPLETLKQLKNHTGPKVAVGTTTLRTLESLYWAGVLAHRGKAFHHIEQWTPYNNEGIISFEDAISHLIEATEKEGKSHFEGSTAIIIVPGYEVRSIKGLVTNFHQPGSTLLLLVAAIVGENWKKIYDHALKNDYRFLSYGDSSLLWKA

SEQ ID NO: 68555 - protein, 398 aa, Marinilabilia salmonicolor
  REGION 1..398: note = tr|A0A2T0X4K7|A0A2T0X4K7_9BACT S-adenosylmethionine:tRNA ribosyltransferase-isomerase; OS = Marinilabilia salmonicolor OX=989 GN=queA PE=3 SV=1
MHISIDQYTYNLPTEKIAKYPLTERDQSKLLLFSDGSIDNKTFSDLPNLIPADAMLLFNNTKVIRARLPFRKATGARIEIFCLEPASPTDVAIAFEQTQEVTWNCMVGNLKKWKEGALEMEVDTGKTPVVVKAEKVSKTNDGFVIRFRWENPEYTFSELMEAMGKTPIPPYLERESEELDTERYQTVYSREQGSVAAPTAGLHFTPEVMNSLKNKGVLLTNLTLHVGAGTFRPVKSETIADHKMHTEHFRVPLETLKQLKNHTGPKVAVGTTTLRTLESLYWAGVLAHRGKAFHHIEQWTPYNNEGMISFEDAISHLIEATEKEGKSHFEGSTAIIIVPGYEVRSIKGLVTNFHQPGSTLLLLVAAIVGENWKKIYDHALKNDYRFLSYGDSSLLWKA

SEQ ID NO: 68556 - protein, 349 aa, Marinilabilia sp.
  REGION 1..349: note = tr|A0A2U2B9I7|A0A2U2B9I7_9BACT S-adenosylmethionine:tRNA ribosyltransferase-isomerase; OS = Marinilabilia sp. WTE OX=2162893 GN=queA PE=3 SV=1
MKLSKFKYKLPEELIALHPSQNRDESRLMVVHKETGKIEHKVFKDIIDYFDEKDVMVFNNTKVFPARLYGNKEKTGAEIEVFLLRELNKEQRLWDVLVDPARKIRIGNKLYFGENDSLVAEVIDNTTSRGRTLRFLFDGSHEEFKETLYSLGETPLPKFINRKVEPEDRERYQTIFAKHEGAVAAPTAGMHFSRELLKRFEIKGVDFSYVTLHVGLGSFRSVDVEDLTKHKMDSEQIIIPEDSSKVINHAKDERKRVCAVGTTVMRTIESSVSTNGHVNPFEGWTNKFIFPPYEFSVADSMVSNFHLPYSTLLMMVAAFGGYDLIMKAYKTAVKEKYRFGTYGDAMLII

SEQ ID NO: 68557 - protein, 402 aa, Marinilabilia sp.
  REGION 1..402: note = tr|A0A2U2BCJ2|A0A2U2BCJ2_9BACT S-adenosylmethionine:tRNA ribosyltransferase-isomerase; OS = Marinilabilia sp. WTE OX=2162893 GN=queA PE=3 SV=1
MDISIEQYNYSLPDERIAKYPLKRRDHSRLLFYKNNRITDKQFYNLPDLLPSTAMMIFNNTKVIRARLPFHKHTGARVEIFCLEPASPTDVALAFGQTEEVTWNCMVGNNKKWKVGTLEKELQINSKTIVLKASKEQKTSDGFIIRFSWNNSDFTFSELMEEIGKTPIPPYLERESEEIDTERYQTVYSKAQGSVAAPTAGLHFTPEILENLKSDGIKLENLTLHVGAGTFRPVKSETIADHEMHTEHFRISLNTLKSLRSHRGPKISVGTTSLRTLESLYWAGALAAKSKPFHHIEQWTPYNNKDVKLSFREAIDYLISAISSENKNYYEGSTAIIIVPGYQIRAVDGLLTNFHQPKSTLLLLVAALVGEKWKEIYKHALENDYRFLSYGDSSLLWASTSI

SEQ ID NO: 68558 - protein, 400 aa, unidentified
  source 1..400: note = Marinilabiliaceae bacterium
  REGION 1..400: note = tr|A0A353TYD8|A0A353TYD8_9BACT S-adenosylmethionine:tRNA ribosyltransferase-isomerase; OS = Marinilabiliaceae bacterium OX=2053574 GN=queA PE=3 SV=1
MSIPQINISDYQYILPPERIARYPLEKRDDSKLLVYNKGHIAHSAFRQLADFLPDNTLLVFNNTRVIRARLQFKKQSGARVEIFCLEPYQPSDTALAFQSRSQVQWICMVGNQKKWKEGPVYAQAELGGVTLEIKALVIERLTDGSVIEFSWGNKDYSFADILENLGHTPIPPYLEREDEEIDIERYQTVYSKYQGSVAAPTAGLHFTDGIMKILTEKGIASAELTLHVGAGTFKPVKADSISEHEMHTEHFEVNLPTLRKIASHSGPVIAVGTTSVRTLESLYCAAALLQKQEPYRHIKQWDGLELTSTMTRTDALGHLISELEKQELKSFKASTSIIIAPGYSFKTVDGIITNFHQPRSTLLLLIAALIGDNWKEVYKQALAHDYRFLSYGDSSLLLR

SEQ ID NO: 68559 - protein, 400 aa, unidentified
  source 1..400: note = Marinilabiliaceae bacterium
  REGION 1..400: note = tr|A0A359FZ11|A0A359FZ11_9BACT S-adenosylmethionine:tRNA ribosyltransferase-isomerase; OS = Marinilabiliaceae bacterium OX=2053574 GN=queA PE=3 SV=1
MSIPEINISDYQYILPPERIARYPLEKRDDSKLLVYNKGHIAHSAFRQLADFLPDNTLLVFNNTRVIRARLQFKKQSGARVEIFCLEPYQPSDTVLAFQSRSQVQWICMVGNQKKWKEGPVYAQAELGGVTIEIKALVIERLTDGSVIEFSWENKDYSFADILENLGHTPIPPYLEREDEEIDIERYQTVYSKYQGSVAAPTAGLHFTDSIMQVLAEKGIASAELTLHVGAGTFKPVKADSISEHEMHTEHFEVNLPTLTKIASHSGPVIAVGTTSVRTLESLYGAAALLQKQGPYRHIKQWDGLELTSTMTRTDALGHLISELEKQGLKSFKASTSIIIAPGYSFKTVDGIITNFHQPRSTLLLLIAALIGDNWKEVYKQALAHDYRFLSYGDSSLLLR

SEQ ID NO: 68560 - protein, 349 aa, unidentified
  source 1..349: note = Marinilabiliales bacterium
  REGION 1..349: note = tr|A0A2J6IBW1|A0A2J6IBW1_9BACT S-adenosylmethionine:tRNA ribosyltransferase-isomerase; OS = Marinilabiliales bacterium OX=2053303 GN=queA PE=3 SV=1
MKLSQFKFNLPRELIADHPPKNRDESRLMIVNRKDQTIEHKSFKDIIDYFDDGDIFAINNTKVFPARLNGEKEKTGAKIEVFLLRELNRESRLWDVMVDPARKIRIGNKLYFGEDDALVAEVIDNTTSRGRTLRFLFDGPYEDFKRTLQELGETPLPKIHEREIEPEDEERYQTIYAKHEGAVAAPTAGLHFSRELMKRLEIKGVEFAELTLHTGLGNFRTIEVEDLTKHKVDSEQMILTPESAARMNAAKAKRHKVVAVGTTTMKALETAVSITGQVKPYSGWTNKFIFPPYEFGFADAMVTNLHMPMSPMMMMISAFVGYDFLFDVYKEAVKEKYKFFTYGDAMLII

SEQ ID NO: 68561 - protein, 405 aa, unidentified
  source 1..405: note = Marinilabiliales bacterium
  REGION 1..405: note = tr|A0A359FKM8|A0A359FKM8_9BACT S-adenosylmethionine:tRNA ribosyltransferase-isomerase; OS = Marinilabiliales bacterium OX=2053303 GN=DCY97_03945; PE = 3 SV=1
MMQKIKNISIGHYNYHLPDELIAKYPLPKRDGSKLLVYRQGEITERQFHEIEQLIPPKSLMVFNNTKVIRARLEFFKNTGARIEVFCLEPHQPSDYSQAFAQTSQCQWSCIVGNVKKWKEGIIEKKVKMPQGEVSITVKRLSTLNGEHIIEFKWNNPNTTFGELLESQGNIPIPPYLNRDAEDSDLKTYQTIYSKNEGSVAAPTAGLHFTNEVLNALQKRQITLHEVTLHVGAGTFKPVKSNEIGGHPMHPEHFLITTETIPILISHLGKITAVGTTTVRTLESLYWLGVKLLSSQNHPKLELGQWECYELPQQVPLEDALLALHARVLESGNPYVMAATSIMIAPGYSFKMVDRLITNFHQPKSTLLLLIAAFIGDDWKNIYQFALDHQFRFLSYGDSNLLLRT

SEQ ID NO: 68562 - protein, 345 aa, Marinilactibacillus piezotolerans
  REGION 1..345: note = tr|A0A1I4ABC3|A0A1I4ABC3_9LACT S-adenosylmethionine:tRNA ribosyltransferase-isomerase; OS = Marinilactibacillus piezotolerans OX=258723 GN=queA; PE = 3 SV=1
MTLVTDDFDFNLPEELIAQTPLKDRSSSRMMVLSKTRQSVKDKQFENIVDELNAGDALVMNNTRVLPARLHGEKVETGAHIELLLLKNIDGDQWETLAKPAKKVKAGSKIKFGDGRLIGTVLEELDHGGRIIEFDYEGIFLETLESLGEMPLPPYIKERLDDPDRYQTVYAKENGSAAAPTAGLHFTQDILAKLKSKGVQIVFLTLHVGLGTFRPVNVDNLEEHKMHEEFYQLTEEAAQVLNKTRENNGKIVAVGTTSIRTLETIGTKFDGKLEADSGWTDIFISPGYNFKVVDAFLTNFHLPKSTLIMLVSAFAGREFVLEAYNHAVEEQYRFFSFGDAMFLKK

SEQ ID NO: 68563 - protein, 345 aa, Marinilactibacillus psychrotolerans
  REGION 1..345: note = tr|A0A1R4JDH3|A0A1R4JDH3_9LACT S-adenosylmethionine:tRNA ribosyltransferase-isomerase; OS = Marinilactibacillus psychrotolerans 42ea OX=1255609; GN = queA PE=3 SV=1
MTLVTDDFDFNLPEELIAQTPLKDRSSSRMMVLSKNEKVVKDKQFENIVDELNPGDALVMNNTRVLPARLHGEKLETGAHIELLLLKNIDGDQWETLAKPAKKVKVGSKIKFGDGRLTGTVRKELDHGGRIIEFDYQGIFLETLESLGEMPLPPYIKERLDDPDRYQTVYAKENGSAAAPTAGLHFTEDILTALKSKGVQIVFLTLHVGLGTFRPVNVDNLEEHKMHEEFYQLTEEAAQVLNKTRENNGKIVAVGTTSIRTLETIGTKFDGKLKADSGWTDIFISPGYNFKVVDAFLTNFHLPKSTLIMLVSAFAGREFVLEAYNHAVKERYRFFSFGDAMFLKK

SEQ ID NO: 68564 - protein, 345 aa, Marinilactibacillus psychrotolerans; identical to SEQ ID NO: 68563
  REGION 1..345: note = tr|A0A511H2T7|A0A511H2T7_9LACT S-adenosylmethionine:tRNA ribosyltransferase-isomerase; OS = Marinilactibacillus psychrotolerans OX=191770 GN=queA; PE = 3 SV=1

SEQ ID NO: 68565 - protein, 345 aa, Marinilactibacillus sp.; identical to SEQ ID NO: 68562
  REGION 1..345: note = tr|A0A1L4BZ13|A0A1L4BZ13_9LACT S-adenosylmethionine:tRNA ribosyltransferase-isomerase; OS = Marinilactibacillus sp. 15R OX=1911586 GN=queA PE=3 SV=1

SEQ ID NO: 68566 - protein, 350 aa, unidentified
  source 1..350: note = Marinimicrobia bacterium
  REGION 1..350: note = tr|A0A117MAA2|A0A117MAA2_9BACT S-adenosylmethionine:tRNA ribosyltransferase-isomerase; OS = Marinimicrobia bacterium 46_43 OX=1635280 GN=queA PE=3; SV = 1
MYKESTNPLIYRDTYNYELPEELIAQYPLKDRDHSRLLTLKRQTGHIDHLTFDVLPDLLQPGDVLVFNETKVISARLKGHKMSGGKAEIFLLNQKDDSHWECLVKPGRRLQPGTVVTFSDTFKAEIINVLEDGGRLVKFTWEGDFWNTLEVHGQIPLPPYVHREPEPSDKDHYQTVYARTYGSVAAHTAGLHFTQEILDKLSTKGVETAFVNLRVGLGTFRPVKTKRIDQHIMHREYCEISTHTANIVNKALDQGRRVIAVGTTSTRTLESFAENGRVHSGGHFTDIFIYPGGRPIQIISGLITNFHMPKSTLLMLVSAFAGYENIMNAYKIAVQEKYRFFSYGDAMMIL

SEQ ID NO: 68567 - protein, 350 aa, unidentified
  source 1..350: note = Marinimicrobia bacterium
  REGION 1..350: note = tr|A0A101G4T4|A0A101G4T4_9BACT S-adenosylmethionine:tRNA ribosyltransferase-isomerase; OS = Marinimicrobia bacterium 46_47 OX=1635279 GN=queA PE=3; SV = 1
MYKESANPLIYRDTYNYELPEELIAQYPLKDRDHSRLLTLKRQTGHIDHLTFDVLPDLLQPGDVLVFNETKVISARLKGHKMSGGKAEIFLLNQKDDSHWECLVKPGRRLQPGTVVTFSDTFKAEIINVLEDGGRLVKFTWEGDFWNTLEVHGQIPLPPYVHREPEPSDKDHYQTVYARTYGSVAAHTAGLHFTQEILDKLSTKGVETTFVNLRVGLGTFRPVKTKRIDQHIMHREYCEISTHTANIVNKALDQGRRVIAVGTTSTRTLESFAENGRVHSGGHFTDIFIYPGGRPIQIISGLITNFHMPKSTLLMLVSAFAGYENIMNAYKIAVQEKYRFFSYGDAMMIL

SEQ ID NO: 68568 - protein, 359 aa, Marinimicrobium koreense
  REGION 1..359: note = tr|A0A3N1NUE6|A0A3N1NUE6_9GAMM S-adenosylmethionine:tRNA ribosyltransferase-isomerase; OS = Marinimicrobium koreense OX=306545 GN=queA PE=3 SV=1
MRRQDFYYDLPESLIAREPAAERRGSRLLGLDGPTGKVTHGQFPDLLEQVRPGDLMVFNDTKVIPARLFGMKDTGGKVEILVERLLTDARVLAHTRASKSPKIGSLIVLEDGTRLAVTGRRDDLFELNFPPEETALSVLERLGHMPLPPYIDREDEELDRERYQTVYGRKAGAVAAPTAGLHFDDDLLAQLQAKGVNLAFVTLHVGAGTFQPVRVDNIAEHKMHSEVMDLNEQVAEQVRATRATGGRVIAVGTTSVRCLETAAARAESGQGMAAYQGETDIFITPGFEFKAVDALLTNFHLPESTLMMLVSAFAGYRHIMDAYREAVAQEYRFFSYGDAMFITRNPDAPRDLPGSPSEG

SEQ ID NO: 68569 - protein, 359 aa, Marinimicrobium sp.
  REGION 1..359: note = tr|A0A2D8WHZ4|A0A2D8WHZ4_9GAMM S-adenosylmethionine:tRNA ribosyltransferase-isomerase; OS = Marinimicrobium sp. OX=2024837 GN=queA PE=3 SV=1
MRRQDFYYDLPESLIAREPAAERRGSRLLGLDGPTGKVTHGQFPDLLEQVRPGDLMVFNDTKVIPARLFGMKDTGGKVEILVERLLTDARVLAHTRASKSPKIGSLIVLEDGTRLAVTGRRDDLFELNFPPEETSLSVLERLGHMPLPPYIDREDEELDRERYQTVYGRKAGAVAAPTAGLHFDDDLLAQLQAKGVNLAFVTLHVGAGTFQPVRVDNIAEHKMHSEVMDLNEQVAEQVRATRATGGRVIAVGTTSVRCLETAAARAEPGQGMAAYQGETDIFITPGFEFRAVDALLTNFHLPESTLMMLVSAFAGYRHIMDAYREAVAQEYRFFSYGDAMFITRNPDAPRDLPGSPSEG

SEQ ID NO: 68570 - protein, 343 aa, unidentified
  source 1..343: note = Marininema halotolerans
  REGION 1..343: note = tr|A0A1I6R1T4|A0A1I6R1T4_9BACL S-adenosylmethionine:tRNA ribosyltransferase-isomerase; OS = Marininema halotolerans OX=1155944 GN=queA PE=3 SV=1
MDVSLFDFDLPQELIAQTPLLNRSSSRLLVLDRKTEEIEHGTFADLLGYLKAGDVLVLNDTRVRPARLIGVKEETGAQIELLLLKPLGEDRWEALVKPAKRVKEGTVISFGEGRLKAIAQEEADMAGGRVFQLHYTASDLEELLVDLGQMPLPPYIREELAEKERYQTVYSRETGSAAAPTAGLHFTPELLQAAKEKGVEVTFLTLHVGLGTFRPVNVETLEAHQMHAEFYSLGEESANRIHRAKEEGRRVIAVGTTAVRTLETIARDHGEIRATSGWTDIFIYPGVKFQVVDALLTNFHLPKSTLIMLVSAFAGRELTLHAYQEAVEEQYRFFSFGDAMFIL

SEQ ID NO: 68571 - protein, 343 aa, Marininema mesophilum
  REGION 1..343: note = tr|A0A1H2SB26|A0A1H2SB26_9BACL S-adenosylmethionine:tRNA ribosyltransferase-isomerase; OS = Marininema mesophilum OX=1048340 GN=queA PE=3 SV=1
MDVSLFNFHLPEELIAQTPLLDRSSSRLLVLDRETEEIKHASFPDLLGYLHAGDVLVLNDTRVRPARLIGVKEETGAQIELLLLKPLGEDRWEALVKPAKRVKEGSVISFGDGRLKAVAQEAADMAGGRVFRLEYTASDLEELLVELGEMPLPPYIREELAEKERYQTVYSRETGSAAAPTAGLHFTPELLNAAKEKGVEVTFLTLHVGLGTFRPVSVENVEEHQIHAEFYSLNEDSAAQIHQAKAEGRRVIAVGTTTVRTLETIARDYGKIQAANGWTDIFIYPGVRFRVVDAMLTNFHLPKSTLIMLVSAFAGREATLRAYREAVAKRYRFFSFGDAMLIT

SEQ ID NO: 68572 - protein, 402 aa, unidentified
  source 1..402: note = Mariniphaga anaerophila
  REGION 1..402: note = tr|A0A1M4SJT2|A0A1M4SJT2_9BACT S-adenosylmethionine:tRNA ribosyltransferase-isomerase; OS = Mariniphaga anaerophila OX=1484053 GN=queA PE=3 SV=1
MSDFKNIKISDFSYELPDDRIAKYPLKERDSSKLLIWKNGNIKKEQFRNIAEYVPENSMLVFNNTRVIHARLFFRKETGAKIEIFCLEPVDPADHQLAFQQTKQVVWKCMLGNAKKWKEGELCRETELNAETVSLKAKKLKQEGNSFFIEFSWNGNFTFSEIIENSGVLPIPPYLHRETEPADEETYQTVYAKSNGSVAAPTAGLHFTEQVINRLADKNIALREITLHVGAGTFQPVKSETIAGHNMHSEKVIIPKRFIEELLNNHREIIAVGTTSVRSLESIYWVGVQLDPGSNCQNIEVGQWEPYEQTTNITVQKSLSNILGYLENNNLNSLQFSTQIIIVPGYQFKLIQGMVTNFHQPQSTLLLLIGAFLGNDWKKVYDFALKNDFRFLSYGDSNLYLK

SEQ ID NO: 68573 - protein, 349 aa, unidentified
  source 1..349: note = Mariniphaga anaerophila
  REGION 1..349: note = tr|A0A1M4YIM4|A0A1M4YIM4_9BACT S-adenosylmethionine:tRNA ribosyltransferase-isomerase; OS = Mariniphaga anaerophila OX=1484053 GN=queA PE=3 SV=1
MKLSKFKYDLDEKKIALHPAYNRDEAKMMVLDRAKRTIEHKVFKDIVNYFDDGDVFVFNDTKVFPARLYGNKEKTGAEIEVFLLRELNREMRLWDVLVDPARKIRIGNKLYFGEDDTLVAEVIDNTTSRGRTLRFLFDGPYDEFKSTLYSLGETPLPKFINRAVVPEDKERYQTIFAKHEGAVAAPTAGLHFSRELMKRLEINGTEFAYVTLHVGLGNFRSVDVEDLTKHKMDSEQIWIKDEACEKINKAKTERRNVCAVGTTVMRTLESSVSTQGFVKPFEGWTNKFIFPPYEFNVANRMVTNFHLPYSTLLMMVAAFGGYDFVMEAYNVAMKNDYRFGTYGDAMLIL

SEQ ID NO: 68574 - protein, 404 aa, unidentified
  source 1..404: note = Mariniphaga sediminis
  REGION 1..404: note = tr|A0A399D2J7|A0A399D2J7_9BACT S-adenosylmethionine:tRNA ribosyltransferase-isomerase; OS = Mariniphaga sediminis OX=1628158 GN=D1164_06210 PE=3; SV = 1
MLSDYKKIKISDFSYSLPDNRIARYPLKERDGSNLLVWQNGHIEKDIFKNITEYIPKDSMLVFNNTRVIHARLFFWKETGAKIEIFCLEPVHPSDYQVAFQQTERAVWKCMVGNAKKWKETELSADIEIGGKTVKLKARKAGEQNNTLLIEFTWNGRFSFAEIIEKAGTLPLPPYLKRETEPADEVTYQTVYARNDGSVAAPTAGLHFTEQVLNQLAAKNIQPREITLHVGAGTFQPVKSENIGMHSMHHEKVVVPKSFIEELFSNQQKIIAVGTTSVRSLESLYWLGLKLGENQIDTESLEIEQWEPYEKKETVSLQQALENILKYLEKQKQENLSFSTQIIIVPGYQFKLVGGMITNFHQPQSTLLLLISAFLGSKWKDVYQFALENGFRFLSYGDSNLYLK

SEQ ID NO: 68575 - protein, 349 aa, unidentified
  source 1..349: note = Mariniphaga sediminis
  REGION 1..349: note = tr|A0A399D3E7|A0A399D3E7_9BACT S-adenosylmethionine:tRNA ribosyltransferase-isomerase; OS = Mariniphaga sediminis OX=1628158 GN=queA PE=3 SV=1
MKLSKFKYDLDEKKIALHPAYNRDESKLMVLDRASRKIEHKAFKDIVDYFDDGDVFVFNDTKVFPARLYGNKEKTGAEIEVFLLRELNREMRLWDVLVDPARKIRIGNKLYFGDDDMLVAEVIDNTTSRGRTLRFLFDGPYDEFKSTLYSLGETPLPKFIKRAVVPEDKERYQTIFAKHEGAVAAPTAGLHFSRELLKRLEIKGAEFSFVTLHVGLGNFRSVDVEDLTKHKMDSEQIWIREESCEKINDAKTKRKNVCAVGTTVMRTLESSVSTQGFVKPFEGWTNKFIFPPYDFSVANRMITNFHLPYSTLLMMVAAFGGYDFVMEAYNVALKEDYRFGTYGDAMLII

SEQ ID NO: 68576 - protein, 321 aa, unidentified
  source 1..321: note = Mariniradius saccharolyticus
  REGION 1..321: note = tr|M7Y0C8|M7Y0C8_9BACT S-adenosylmethionine:tRNA ribosyltransferase-isomerase OS=Mariniradius saccharolyticus AK6 OX=1239962 GN=C943_04020 PE=3 SV=1
MVVHKKTGQIEHRVFKDIIEYFGDGDVFVINDTKVFPARLYGNKEKTGAKIEVFLLRELNQDLRLWDVLVDPARKIRVGNKLYFGDSDLVAEVIDNTTSRGRTIRFLFDGSDEEFYKTIDSLGETPLLKEYIERKIEAEDRDRYQTIFAKHVGAVAAPTAGMHFTPHLLKRLELRGVDVTPITLHVGLGTFRQVDVEDLTKHKMDSENYDIPQKTVDLVNEALDNKKRVVAVGTTSLKTLESSVTANARLKISKGWTDKFIIPPYDFKIANALISNFHLSESTLLMTVAAFGGYDLVMKAYKEAIKEKYRFFSYGDAMLIL

SEQ ID NO: 68577 - protein, 404 aa, unidentified
  source 1..404: note = Mariniradius saccharolyticus
  REGION 1..404: note = tr|M7XCW2|M7XCW2_9BACT S-adenosylmethionine:tRNA ribosyltransferase-isomerase OS=Mariniradius saccharolyticus AK6 OX=1239962 GN=queA PE=3 SV=1
MAKSIAEIRLSDYEYILPEERIAKFPLEKRDHSKLLQLKDGKISHHHFFDLPDLVPGDCMMVFNNTKVIPARLIFQRESGAKIEIFLLKPVYPSSLINEVMLETKRVVWECMIGNLKKWKSNEKLRGEILINGQSCTVFANLEYRDSKAVAFEWNDEKIPFVSIVEAAGEVPLPPYLNRKPTELDKPRYQTVYSEKEGAVAAPTAGLHFTQDVLENLKRKGVKEEFLTLHVSAGTFAPVKVDQVANHAMHSEQMVVNKETVAALARHSEKIIAVGTTSMRTLESLYWFGVMLGSEANAQFWIPKLYPYDSHSALPNRQQSFEAILKMMEKRGLHEITGHTEIMIMPGYEFKVCDGLITNFHQPSSTLILLVAAFTKGKWREVYHAALDNDYRFLSYGDSSILWY

SEQ ID NO: 68578 - protein, 351 aa, unidentified
  source 1..351: note = Marinirhabdus gelatinilytica
  REGION 1..351: note = tr|A0A370Q7A9|A0A370Q7A9_9FLAO S-adenosylmethionine:tRNA ribosyltransferase-isomerase; OS = Marinirhabdus gelatinilytica OX=1703343 GN=queA PE=3; SV = 1
MGMKLSNFNFNLPQELLAEHPAPNRDEARLMVLNRKEQTIEHKMFKDLIDYFDEDDVLVLNNTKVFPARLYGNKEKTGARIEVFLLRELNPETRLWDVLVDPARKIRIGNKLYFGEDESLVAEVIDNTTSRGRTLRFLFDGSYEEFRNKLTELGETPLPKYIKRDVEPEDAERYQTIFAKKEGAVAAPTAGLHFSKHLLKRLEIKGVNFAEVTLHVGLGTFSPVEVEDLSKHKMDSEEIAIDKQAAKIINEGIAQKRRVCAVGTTVMRALESSVSSSATLNDYEGWTNKFIFPPYDFSIANMMVTNFHTPKSTLLMMVSAFAGHEFVKKAYAEAVKEKYRFYTYGDAMLII

SEQ ID NO: 68579 - protein, 341 aa, unidentified
  source 1..341: note = Marinisporobacter balticus
  REGION 1..341: note = tr|A0A4R2L2H6|A0A4R2L2H6_9CLOT S-adenosylmethionine:tRNA ribosyltransferase-isomerase; OS = Marinisporobacter balticus OX=2018667 GN=queA PE=3 SV=1
MKTSDYYFDLPEELIAQTPLINRDASRLMVVDRRTGEIQHQLFKNIIEYLKPGDCLVLNNTRVLPARLFGVKENTGGKVEFLLLKRIDKDRWETLVKPGKKAKIGDTIVFGDGILKAHIIDMGEEGSRIVAFEYEGIFEEILDKLGTMPLPPYIKETLNDQERYQTVYSKHEGSAAAPTAGLHFTNELLRKIEEKGVEIVYITLHVGLGTFRPVKCEDILQHKMHSEFYMVSKETADTINHTKENGGRIISVGTTSTRTLESIADEEGIVRECQGWTDIFIYPGYKFKVIDGLITNFHLPESTLIMLVSAFCDRNSILGAYEEAVKDKYRFFSFGDAMCII

SEQ ID NO: 68580 - protein, 342 aa, Marinithermus hydrothermalis
  REGION 1..342: note = tr|F2NQA7|F2NQA7_MARHT S-adenosylmethionine:tRNA ribosyltransferase-isomerase OS=Marinithermus hydrothermalis (strain DSM 14884 / JCM 11576 / T1); OX = 869210 GN=queA P E=3 SV=1
MPRMADGTRLEDYAYDLPPERIAQQGAEPRDSARMMVLHRETGRLEHRIFREIPAYLRPGDVLVLNQTKVIPARTVARKPTGAVLEVLLLREEVAGRWRALVRPGRRARVGAELHFDEGLRAVVEGIGEGGERILRFAGDVWAHLERIGRTPLPPYIHAEVRPERYQTVFARVPGSVAAPTAGLHFTPELLARLEGMGVEVRYLTLHVGPGTFKPVKDSIERHVMHEEAYHVPEETARAVNRAKAEGRRVVAVGTTVVRALESAWRAGEGVRAGEGATRLFIRPPYTFHAVDALVTNFHLPRSTLLMLVAAFAGYETTMRAYRTAVAEGYRFYSLGDAMLIL

SEQ ID NO: 68581 - protein, 344 aa, Marinitoga hydrogenitolerans
  REGION 1..344: note = tr|A0A1M4SF02|A0A1M4SF02_9BACT S-adenosylmethionine:tRNA ribosyltransferase-isomerase; OS = Marinitoga hydrogenitolerans DSM 16785 OX=1122195; GN = queA PE=3 SV=1
MRKPLYTVNDFDYELPEDYIAQKPVEPRDSSKLMVLNRDKRSIEHRKFRDIVDYLTPNDLLVINNTKVIPARLYGQKTTGANVEVLLLEKTPEENTWKALVKPGSKLKKGAEIKFSEYLYAKIIQHNSDGSRIIHFVSKKDVWEEIEKIGNMPLPPYIKNYNGPKERYQTTYAKKQGAVAAPTAGLHFTNELIEKIKNKGIKIAEVTLHVGLGTFRPVKADSIEKHEMHEEYYEVPNETVKIINEYKNNKGRIISVGTTVVRTLETIATLPKQKAYMGTTNIFIYPPYEFKLIDALITNFHLPKSTLLMLVSAFGGYDFIMNAYKTAVNERYRFFSFGDSMFIY

SEQ ID NO: 68582 - protein, 344 aa, Marinitoga piezophila
  REGION 1..344: note = tr|H2J4X7|H2J4X7_MARPK S-adenosylmethionine:tRNA ribosyltransferase-isomerase OS=Marinitoga piezophila (strain DSM 14283 / JCM 11233 / KA3) OX=443254 GN=queA; PE = 3 SV =1
MRKPLYKVEDFDYHLPEEYIAQKPAEPRDSSRLMVLNRNIRTIEHKIFRNIIDYLKPGDLMVLNNTKVIPARLYGRKTTGAKVEVLLLEKTHEENTWKALVKPGSKLKKGAEIKFSDHLYAKIIEHNSDGSRIIHFTSDKDVWEEIERVGNMPLPPYIKSTDVPGERYQTEYAKIQGAVAAPTAGLHFTKELLNKIKEKGIEFAEVTLHVGLGTFRPVKVDNIEEHEMHEEYYEVPAETMKKIREYRQNKGRIISVGTTVVRTLETIAQLPEQESYMGTTDIFIYPPYEFKLIDALITNFHLPKSTLLMLVAAFGGYDFIMEAYKKAVEEKYRFFSFGDSMFIY

SEQ ID NO: 68583 - protein, 340 aa, Marinitoga sp.
  REGION 1..340: note = tr|A0A0H2SGK6|A0A0H2SGK6_9BACT S-adenosylmethionine:tRNA ribosyltransferase-isomerase; OS = Marinitoga sp. 1197 OX=1428449 GN=queA PE=3 SV=1
MYEVNDFDYYLPEEYIAQKPANPRDSSRLMVLNRKKQNIEHKIFRDIIDYLKPGDLMVINNTKVIPARLYGQKTTGAKVEVLLLEKTHEDNTWKALVRPGSKLKKGAEIRFSDDLYAKIIEHNSDGSRIINFISDKDVWEEIEKIGNMPLPPYIKNQDVPKDRYQTEYAKIQGAVAAPTAGLHFTKELLEKIKNKGIEFAEVTLHVGLGTFRPVKVERIEEHEMHEEYYEVPENTVKKIKEYKKNNGRIISVGTTVVRTLETIALLPEQKAYMGTTDIFIYPPYEFKLIDALITNFHLPKSTLLMLVSSFGGYDFIMKAYKTAVEEKYRFFSFGDSMFIY

SEQ ID NO: 68584 - protein, 344 aa, Marinitoga sp.
  REGION 1..344: note = tr|A0A0H2SN79|A0A0H2SN79_9BACT S-adenosylmethionine:tRNA ribosyltransferase-isomerase; OS = Marinitoga sp. 1155 OX=1428448 GN=queA PE=3 SV=1
MKKPLYEVNDFEYYLPEEYIAQKPANPRDSSRLMVLNRKKQSIEHKIFRDIIDYLKPGDLMVINNTKVIPARLYGQKTTGAKVEVLLLEKTHEDNTWKALVRPGSKLKKGAEIRFSDDLYAKIIEHNSDGSRIINFISDKVVWEEIEKIGNMPLPPYIKNQDVPKDRYQTEYAKIQGAVAAPTAGLHFTKELLEKIKNKGIEFAEVTLHVGLGTFRPVKVERIEEHEMHEEYYEVPENTVKKIEEYKKNNGRIISVGTTVVRTLETIALLPKQKAYMGTTDIFIYPPYEFKLIDALITNFHLPKSTLLMLVSSFGGYDFIMKAYKTAVEEKYRFFSFGDSMFIY

SEQ ID NO: 68585 - protein, 367 aa, Marinobacter adhaerens
  REGION 1..367: note = tr|E4PKE5|E4PKE5_MARAH S-adenosylmethionine:tRNA ribosyltransferase-isomerase OS=Marinobacter adhaerens (strain DSM 23420 / HP15) OX=225937 GN=queA PE=3 SV=1
MNVSDFHFDLPDELIARYPLKDRSASRLLCLDGLSGKLDHRIFSELPDLLQPGDLLVFNNTRVIPARLFGKKETGGQVEVLVERVTGEPDIIAHVRASKALKQGQKVILEDGTSLRMAGRDEALFHLVCESEEPVLEVLERIGHMPLPPYVDRPDESTDRERYQTVYAREAGAVAAPTAGLHFDESLLEKLAACGIESAFVTLHVGAGTFQPVRVDKIEDHTMHSEVVNVPQDAVDAIERTRARGGRVVAVGTTSVRSLESASRGGRLRAFTGETDIFIYPGYRFQTVDALITNFHLPESTLIMLVSAFAGYDNVMSAYREAVKERYRFFSYGDAMFINGQEPSRGMLLGATVESNEAGNDNAGEAL

SEQ ID NO: 68586 - protein, 367 aa, Marinobacter adhaerens
  REGION 1..367: note = tr|A0A1E3C5A1|A0A1E3C5A1_9ALTE S-adenosylmethionine:tRNA ribosyltransferase-isomerase; OS = Marinobacter adhaerens OX=1033846 GN=queA PE=3 SV=1
MNVSDFHFDLPDELIARYPLKDRSASRLLCLDGLSGKLDHRVFSELPDLLQPGDLLVFNNTRVIPARLFGKKETGGQVEVLVERVTGEHEIVAHVRASKALKEGQKVILEDGTCLRMSDRNEALFYLVCESEEPVLDVLERIGHMPLPPYVDRPDEATDRERYQTVYAREAGAVAAPTAGLHFDESLLEKLAACGIESTFVTLHVGAGTFQPVRVDRIEDHTMHSEVVNVPQDAVDAVERTRARGGRVVAVGTTSVRSLESASRGGRLRAFTGETDIFIYPGYRFQTVDALITNFHLPESTLIMLVSAFAGYDNVMAAYREAVKERYRFFSYGDAMFIAGQEPSRGMLLGAAVESNESGTDNAGEAL

SEQ ID NO: 68587 - protein, 364 aa, Marinobacter algicola
  REGION 1..364: note = tr|A6EWH8|A6EWH8_9ALTE S-adenosylmethionine:tRNA ribosyltransferase-isomerase OS=Marinobacter algicola DG893 OX=443152 GN=queA PE=3 SV=1
MNVSDFHFDLPDELIARYPLKERSASRLLSLDGLSGDIRHLRFTDLPSLLQPGDLLVFNDTRVIPARLFGRKETGGQVEVLVERVLGEHDILAHVRASKALKEGQKVLLEDGTPLRMSGRDDALFHLHCDSDEPVLDVLERIGHMPLPPYVDRPDESSDRERYQTVYAREAGAVAAPTAGLHFDDRILAELESMGVETAFVTLHVGAGTFQPVRVEGIEDHVMHSEVAHVPQATVDAVNAARARGGRVVAVGTTSVRSLESASRGGVVRPFQGETDIFIYPGYRFQTVDAMVTNFHLPESTLIMLVSAFAGYQNVMSAYQAAVAECYRFFSYGDAMFISAQEPSLGALSSCSGKGSQNPENNDE

SEQ ID NO: 68588 - protein, 370 aa, unidentified
  source 1..370: note = Marinobacter antarcticus
  REGION 1..370: note = tr|A0A1M6U1S0|A0A1M6U1S0_9ALTE S-adenosylmethionine:tRNA ribosyltransferase-isomerase; OS = Marinobacter antarcticus OX=564117 GN=queA PE=3 SV=1
MNVSDFHFDLPNELIARYPLRERSASRLLCLEGNTGDIAHRLFTDLPDLLQPGDLLVFNNTRVIPARLFGIKETGGQVEVLVERVTGEHDLVAHVRASKALKEGQKVILEDGTALRMTGRSDALFHLESEADEPVLDMLERIGHMPLPPYVDRPDESTDRERYQTVYAKEPGAVAAPTAGLHFDDDVLEALRARGVESAFVTLHVGAGTFQPVRVDRIDEHIMHSEIVHVPEEVVEAVNRVRARGGRVVAVGTTSVRSLESASRGGYLRAFRGETDIFIHPGYRFQAVDALVTNFHLPESTLIMLVSAFAGYEHVMHAYRDAVAEKYRFFSYGDAMFITGQEPSRGMLLGAPDEPAQAVSPSPLNSGDKP

SEQ ID NO: 68589 - protein, 362 aa, unidentified
  source 1..362: note = Marinobacter confluentis
  REGION 1..362: note = tr|A0A4Z1BG80|A0A4Z1BG80_9ALTE S-adenosylmethionine:tRNA ribosyltransferase-isomerase; OS = Marinobacter confluentis OX=1697557 GN=queA PE=3 SV=1
MNVSDFHFDLPDELIARYPLEKRSASRLLTLDGSTGDIGHRSFENLLDLLHSGDLLVFNDTRVIPARLFGKKETGGQVEILMERLTGDHQMLAHVKASKALRPGQIIILEDGSRVTMRGREGALFQLDNSGPETLLALLERIGHMPLPPYVDRPDESTDRERYQTVYARESGAVAAPTAGLHFDDELLARLADKGVESTFVTLHVGAGTFQPVRVDRIEDHVMHSEVVRVTGQTVRAVQAARERGGRVVAVGTTSVRSLESASRNGVLSAFQGETDIFIHPGYRFNTVDALITNFHLPESTLIMLVSAFAGYDHTMAAYRAAVADRYRFFSYGDAMFITGQQPSLGACQTDTDTQPESGAAQ

SEQ ID NO: 68590 - protein, 356 aa, Marinobacter daqiaonensis
  REGION 1..356: note = tr|A0A1I6GL37|A0A1I6GL37_9ALTE S-adenosylmethionine:tRNA ribosyltransferase-isomerase; OS = Marinobacter daqiaonensis OX=650891 GN=queA PE=3 SV=1
MNVSDFHFDLPDELIARYPMPERSGSRLLVLEGVSGNVSHRYFRDLPALLEPEDLLIFNDTRVIPARLLGTKETGGKLEVLVERVIADDTVLAHVRASKALKPGQRVYLEDGSVLVMLDRDDTLFRLRTESGEPVLDLLERTGHMPLPPYVDRPDETADRERYQTVYAREAGAVAAPTAGLHFDDAMFEALATKGIETAFVTLHVGAGTFQPVRVEKVEDHVMHSEVATVPEATVAAIARARARGGRVIAVGTTSVRSLESASRGGVVRPFQGETDIFISPGYRFQTVDAMITNFHLPESTLIMLVSAFAGYQNTMNAYDEAVRERYRFFSYGDAMFITGEGPSLGALAGPGARDD

SEQ ID NO: 68591 - protein, 361 aa, Marinobacter excellens
  REGION 1..361: note = tr|A0A137SBG5|A0A137SBG5_9ALTE S-adenosylmethionine:tRNA ribosyltransferase-isomerase; OS = Marinobacter excellens LAMA 842 OX=1306954 GN=queA PE=3; SV = 1
MNVSDFHFDLPDELIARYPLKQRSASRLLALEGLTGQTQHLNFTDLPGLLQPGDLLVFNNTRVIPARLFGQKESGGRVEILVERLLGEFELLAHARASKAVKEGQKVLLEDGSALRMVGREDALFRFVYEGLEPVLDVLERIGHMPLPPYMERDDDQSDRERYQTVYAKEAGAVAAPTAGLHFDDEILEVLKSNGIEFAYVTLHVGAGTFQPVRVDKIEDHLMHSEVAHVPQETVDAVERTRARGGRVVAVGTTSVRSLESASRAGQLNTFRGETDIFIYPGYRFQTVDAMITNFHLPESTLIMLVSAFAGYRNIMSAYQEAVEQRYRFFSYGDAMFLTAQEPSLGMLAGANQTESRGESL

SEQ ID NO: 68592 - protein, 366 aa, Marinobacter excellens
  REGION 1..366: note = tr|A0A0P8CWJ6|A0A0P8CWJ6_9ALTE S-adenosylmethionine:tRNA ribosyltransferase-isomerase; OS = Marinobacter excellens HL-55 OX=1305731 GN=queA PE=3; SV = 1
MNVSDFHFDLPDELIARYPLEQRSASRLLSLDGLSGQAQHLQFTDLPDLLQPGDLLVFNNTRVIPARLFGQKETGGRVEVLVERLMGEREILAHARTSKALKEGQKVILEDGSSLTMVGRNDALFKFVYDGAEAILDVLERIGHMPLPPYIEREDEVSDRERYQTVYAREAGAVAAPTAGLHFDDPLLASLKDQGIEFAYVTLHVGAGTFQSVRVDKIEDHVMHSEVAHVPQETVDAVNRTRARGGRVVAVGTTSVRSLESASRGGHLGPFRGETNIFIYPGYRFQTVDAMVTNFHLPESTLIMLVSAFSGYTNILSAYREAVAQRYRFFSYGDAMFLTAQEPSRGMLAGADVSGAQNTESSGESL

SEQ ID NO: 68593 - protein, 367 aa, Marinobacter flavimaris
  REGION 1..367: note = tr|A0A3D8H025|A0A3D8H025_9ALTE S-adenosylmethionine:tRNA ribosyltransferase-isomerase; OS = Marinobacter flavimaris OX=262076 GN=queA PE=3 SV=1
MNVSDFHFDLPDELIARYPLKDRSASRLLCLDGLSGKLDHRIFSELPELLQPGDLLVFNNTRVIPARLFGKKETGGQVEVLVERVTGEHDIIAHVRASKALKQGQKVILEDGTSLRMAGRDEALFHLVCESEEPVLEVLERIGHMPLPPYVDRPDESTDRERYQTVYAREAGAVAAPTAGLHFDEGLLEKLAACGIESAFVTLHVGAGTFQPVRVDKIEDHTMHSEVVNVPQDAVDAIERTRARGGRVVAVGTTSVRSLESASRGGRLRAFTGETDIFIYPGYRFQTVDALITNFHLPESTLIMLVSAFAGYDNVMSAYREAVKERYRFFSYGDAMFINGQEPSRGMLLGATVESNEAGNDNAGEAL

SEQ ID NO: 68594 - protein, 363 aa, unidentified
  source 1..363: note = Marinobacter fuscus
  REGION 1..363: note = tr|A0A2T1K6Q5|A0A2T1K6Q5_9ALTE S-adenosylmethionine:tRNA ribosyltransferase-isomerase; OS = Marinobacter fuscus OX=2109942 GN=queA PE=3 SV=1
MNVSDFHFDLPDELIARYPLEQRSASRLFKLDGPSGQTSHLNFTDLPGLLQPGDLLVFNNTRVIPARLFALKETGGKVEVLVERVLSDSSIIAHTRSSKSPKPGQKLVLEDGSELEMTGREGALFQFEYRADESVLDLLERVGHMPLPPYMERDDELSDRERYQTVYAREAGAVAAPTAGLHFDDDILAELERGGVEFAYVTLHVGAGTFQPVRVDRIEDHEMHSEIAHVPAETVAAVARTRARGGRVVAVGTTSVRSLESASQAGRLEEFRGDTNIFIYPGYQFQTVDAMITNFHLPESTLIMLVSAFAGFENVMAAYAEAVEQRYRFFSYGDAMFISSREPSSGSVAAAGKPDTDSSGDIL

SEQ ID NO: 68595 - protein, 350 aa, Marinobacter gudaonensis
  REGION 1..350: note = tr|A0A1I6G7M5|A0A1I6G7M5_9ALTE S-adenosylmethionine:tRNA ribosyltransferase-isomerase; OS = Marinobacter gudaonensis OX=375760 GN=queA PE=3 SV=1
MNVSDFHFDLPDELIARYPLKERSASRLLCLDGPTGELTHRVFSDLPSMLRPGDLLVFNDTRVIPARLFGRKETGGQVEVLVERVTGEHEMLAHVRASKALKPGQRVFLEDGSALRMTGRNDALFQLETESAEPLLAVLERIGHMPLPPYVDRPDESTDRERYQTVYAREAGAVAAPTAGLHFDEPLLETLAAAGVESTFVTLHVGAGTFQPVRVDRIEDHTMHSEIVKVSQQTVDAVERTRARGGRVVAVGTTSVRSLESASADGRLSAFQGETDIFIYPGYRFQTVDALITNFHLPESTLIMLVSAFAGYDNVMAAYREAVSERYRFFSYGDAMFITGQQPSRGAEAM

SEQ ID NO: 68596 - protein, 367 aa, Marinobacter guineae
  REGION 1..367: note = tr|A0A2G1VBC3|A0A2G1VBC3_9ALTE S-adenosylmethionine:tRNA ribosyltransferase-isomerase; OS = Marinobacter guineae OX=432303 GN=queA PE=3 SV=1
MNVSDFHFDLPDELIARYPLKERSASRLLCLDGLSGRLDHRIFSDLPELLQPGDLLVFNNTRVIPARLFGKKETGGQVEVLVERITGERDIIAHVRASKALKEGQKVILEDGTSLSMSGRDEALFHLVCDSEEPILDVLERIGHMPLPPYIDRSDESTDRDRYQTVYARESGAVAAPTAGLHFDEALLEKLAACGIESTFVTLHVGAGTFQPVRVDKIEDHAMHSEVVHVPQEAVDAVERTRARGGRVVAVGTTSVRSLESASRGGRLKAFTGETDIFIYPGYRFQAVDALVTNFHLPESTLIMLVSAFAGYDNVMGAYKEAVRERYRFFSYGDAMFITGQEPSRGMLLGPAVESTDTGIDNAGEAL

SEQ ID NO: 68597 - protein, 366 aa, unidentified
  source 1..366: note = Marinobacter halophilus
  REGION 1..366: note = tr|A0A2T1KI45|A0A2T1KI45_9ALTE S-adenosylmethionine:tRNA ribosyltransferase-isomerase; OS = Marinobacter halophilus OX=1323740 GN=queA PE=3 SV=1
MNVSDFHFDLPDELIARYPLKQRSASRLLGLDGLSGQTQHLQFTDLPELLQPGDLLVFNNTRVIPARLFGQKESGGRVEVLVERLLGEREILAHARASKALKAGQKVILEDGTSMTMVGRDDALFRFVYDGEEVILDVLDRIGHMPLPPYIEREDDLSDRERYQTVYAREAGAVAAPTAGLHFDDALLEILKARGIEFAYVTLHVGAGTFQPVRVDKIEDHVMHSEVAHVPQETVDAVHQARARGGRVVAVGTTSVRSLESASRAGHLSTFRGDTDIFIYPGYRFQTVDAMVTNFHLPESTLIMLVSAFSGYTNIKAAYREAVDQEYRFFSYGDAMFLTAQEPSRGMLAGVDDTGTNLTESSGESL

SEQ ID NO: 68598 - protein, 366 aa, Marinobacter hydrocarbonoclasticus
  REGION 1..366: note = sp|A1TZN6|QUEA_MARHV S-adenosylmethionine:tRNA ribosyltransferase-isomerase OS=Marinobacter hydrocarbonoclasticus (strain ATCC 700491 / DSM 11845 / VT8) OX=351348 GN =queA PE=3 SV=1
MNVSDFHFDLPDELIARYPLKERSASRLLSLDGLSGQTTHLKFTDLPDLLQPGDLLVFNNTRVIPARLFGQKETGGKVEILVERLLGEKELLAHTRSSKSPKEGQRLLLEDGAALRMLARKDALFHFVYEGDEAFLDVLERIGHMPLPPYMEREDEQSDRERYQTVYAKEAGAVAAPTAGLHFDDVVLSALKAKGIEFAYVTLHVGAGTFQPVRVDKIEDHVMHSEIAHVPEETVKAVNEARARGGRVVAVGTTSVRSLESASRAGRLQEFRGDTDIFIYPGYRFQTVDAMITNFHLPESTLIMLVSAFAGYNNIMSAYREAVEQKYRFFSYGDAMFLTAQEPSRGMMLGTDSAEPHQTESRGESQ

SEQ ID NO: 68599 - protein, 361 aa, Marinobacter hydrocarbonoclasticus
  REGION 1..361: note = tr|A0A455W5N1|A0A455W5N1_MARHY S-adenosylmethionine:tRNA ribosyltransferase-isomerase; OS = Marinobacter hydrocarbonoclasticus OX=2743 GN=queA PE=3; SV = 1
MNVSDFHFDLPDELIARYPLKQRSASRLLTLDGLTGQSQHLNFTDLPGLLQPGDLLVFNNTRVIPARLFGQKETGGRVEILVERLLGEFELLAHARASKAVKEGQKVILEDGSALRMVGRDDALFRFVYEGSEPVLDVLERIGHMPLPPYMERDDDQSDRERYQTVYAKEAGAVAAPTAGLHFDDELLEAISSQGVEFAYVTLHVGAGTFQPVRVDKIEDHLMHSEVAHVPQETVDAVGRTRARGGRVVAVGTTSVRSLESASRGGRLNAFRGETDIFIYPGYRFQTVDAMITNFHLPESTLIMLVSAFAGYRHIMSAYQEAVEQRYRFFSYGDAMFLTAQEPSRGMLAGANQTESRGESL

SEQ ID NO: 68600 - protein, 360 aa, Marinobacter lipolyticus
  REGION 1..360: note = tr|R8B185|R8B185_9ALTE S-adenosylmethionine:tRNA ribosyltransferase-isomerase OS=Marinobacter lipolyticus SM19 OX=1318628 GN=queA PE=3 SV=1
MNVSDFHFDLPDELIARYPLKERTASRLLSLNGLSGDIDHLQFTDLPDLLQPGDLLVFNDTRVIPARLFGRKETGGQVEVLVERVLGEHEILAHVRASKALKPGQKILLEDGTALQMTGRDDALFRLICDSDEEVLDVLERIGHMPLPPYVDRPDESSDRERYQTVYAREAGAVAAPTAGLHFDESMLERLKAQGVDVAWVTLHVGAGTFQPVRVDRIEDHVMHSEVAHVPEQTVDAVNRARARGGRVVAVGTTSVRSLESATRGGVLRSFRGETDIFIHPGYRFQAVDAMVTNFHLPESTLIMLVSAFAGYNNVMAAYAEAVREKYRFFSYGDAMFITGQEPSLGMLKGHVGETSQKAE

SEQ ID NO: 68601 - protein, 366 aa, Marinobacter litoralis
  REGION 1..366: note = tr|A0A3M2R9U6|A0A3M2R9U6_9ALTE S-adenosylmethionine:tRNA ribosyltransferase-isomerase; OS = Marinobacter litoralis OX=187981 GN=queA PE=3 SV=1
MNVSDFHFDLPDELIARYPLKQRSASRLLTLEGVSGHTQHLQFTNLPDLLEPGDLLVFNNTRVIPARLFGQKETGGRVEVLVERLVGEREILAHARASKALKQGQKVILEDGSSLTMIGREDALFRFVNEGDEPILDLLERIGHMPLPPYMERDDDLSDRERYQTVYAQEAGAVAAPTAGLHFDDALLETLKAKGVEFAYVTLHVGAGTFQPVRVDKIEEHVMHSEVAHVPEETVEAVRKTRARGGRVVAVGTTSVRSLESASQSGELGTFRGETDIFIFPGYRFNTIDAMVTNFHLPESTLIMLVSAFAGYDNIMAAYREAVEQQYRFFSYGDAMFLTAQEPSRGRLTSSDQADTASSDSSGENL

SEQ ID NO: 68602 - protein, 369 aa, Marinobacter lutaoensis
  REGION 1..369: note = tr|A0A1V2DUD1|A0A1V2DUD1_9ALTE S-adenosylmethionine:tRNA ribosyltransferase-isomerase; OS = Marinobacter lutaoensis OX=135739 GN=queA PE=3 SV=1
MNVSDFYFDLPDELIARYPLKERSASRLLSLNGLTGEVRHLQFRNLLDLVQAGDLLVFNNTRVIPARLFGRKATGGQVEILVERITGEREVLAHVRASKALKPDQTVILEDGSVLRMLDRHDALFRLALESAEPMLDLLERIGHMPLPPYVDRPDESSDRERYQTVYAREAGAVAAPTAGLHFDEAMLQALPERGVETAFVTLHVGAGTFQPVRVENIEDHVMHSEVAHVPEATVAAIERTRARGGRVIAVGTTSVRSLESASRGGRVHPFRGETDIFIRPGYRFETVDAMITNFHLPESTLIMLVSAFAGHANVMAAYREAVAERYRFFSYGDAMFVTSQEPSRGMLLGGDAARVTGEEKPESAGGAS

SEQ ID NO: 68603 - protein, 367 aa, unidentified
  source 1..367: note = Marinobacter manganoxydans
  REGION 1..367: note = tr|G6YV85|G6YV85_9ALTE S-adenosylmethionine:tRNA ribosyltransferase-isomerase OS=Marinobacter manganoxydans MnI7-9 OX=1094979 GN=queA PE=3 SV=1
MNVSDFHFDLPDELIARYPLKDRSASRLLCLDGLSGKLNHRIFSELPDLLQPGDLLVFNDTRVIPARLFGKKETGGQVEVLVERVTGEHEIIAHVRASKALKDGQKIILEDGTCMRMSGREEALFHLVCEAEEPVLDVLERIGHMPLPPYVDRPDESTDRERYQTVYAREAGAVAAPTAGLHFDESLLEKLAACGIESTFVTLHVGAGTFQPVRVDKIEDHTMHSEVVNVPQDAVDAIERTRARGGRVVAVGTTSVRSLESASRGGRLRPFTGETDIFIYPGYRFQTVDALITNFHLPESTLIMLVSAFAGYDNVMAAYREAVKERYRFFSYGDAMFITGQEPSRGMLLGSAVESNEAGTDNAGEAL

SEQ ID NO: 68604 - protein, 357 aa, Marinobacter mobilis
  REGION 1..357: note = tr|A0A1H3BS12|A0A1H3BS12_9ALTE S-adenosylmethionine:tRNA ribosyltransferase-isomerase; OS = Marinobacter mobilis OX=488533 GN=queA PE=3 SV=1
MNVSDFHFDLPDELIARYPLAERSASRLLTLDGLSGAIDHRGFTDLPAFLQPGDLLVFNNTRVIPARLFGRKETGGQLEILVERVLDEHEVLAHVRASKSPKPGQAIIAEDGTVLRMIERQDALFRLRCEAAEPVLDVLDRIGHMPLPPYVDRPDEEADRERYQTVYAEQAGAVAAPTAGLHFDNAIIERLRSQGINTAFVTLHVGAGTFQPVRVERIEDHVMHSEIAQVPEETVEAVRRTREQGGRVIAVGTTSVRSLESASRGGKLRTFHGETDIFIHPGYRFQTVDAMVTNFHLPESTLIMLVSAFAGYENVMAAYHEAIRERYRFFSYGDAMFVTGQEPSLGALAGLSHGGDR

SEQ ID NO: 68605 - protein, 357 aa, unidentified
  source 1..357: note = Marinobacter nanhaiticus
  REGION 1..357: note = tr|N6VUI2|N6VUI2_9ALTE S-adenosylmethionine:tRNA ribosyltransferase-isomerase OS=Marinobacter nanhaiticus D15-8W OX=626887 GN=queA PE=3 SV=1
MKVSDFHYDLPDELIARYPLEDRTASRMLHLAGPTGAINHGHFRDILGLLEPGDLLVFNNTRVIPARVFGQKETGGKLEILVERVLDQRELLAHIRSSKSPKAGQLIHVEGDGAFRMVERQGALFRLALEKGADSVLDLLEAVGHMPLPPYVDRPDESADRERYQTVYARDPGAVAAPTAGLHFDESILSELAERGIEQAFVTLHVGAGTFQPVRVDSIEDHQMHSEVAEVPHVTVDAIRRTRERGGRVVAVGTTSVRSLESASRDGELKPYQGETDIFIYPGYRFQCIDALVTNFHLPESTLIMLVSAFAGYEAVMKAYREAVDERYRFFSYGDAMFVTGQRASEQAERAQQESER

SEQ ID NO: 68606 - protein, 367 aa, unidentified
  source 1..367: note = Marinobacter nitratireducens
  REGION 1..367: note = tr|A0A072N6K0|A0A072N6K0_9ALTE S-adenosylmethionine:tRNA ribosyltransferase-isomerase; OS = Marinobacter nitratireducens OX=1137280 GN=queA PE=3; SV = 1
MNVSDFHFDLPDELIARYPLKDRTASRLLCLDGLSGSTSHRQFSDLPGLLQPGDLLVFNDTRVIPARLFGKKETGGQVEILVERVTGEHEIMAHVRASKALKEGQAVILEDGTVMRMAGRHDALFDLFCESSEPVLDVLERIGHMPLPPYVDRPDESSDRERYQTVYAREAGAVAAPTAGLHFDEAMLATLREKGVETAFVTLHVGAGTFQPVRVDRIEDHVMHSEVVQVPQETVDAVERARSRGGRVVAVGTTSVRSLESASRGGQLRTFQGETDIFIHPGYRFQTVDALITNFHLPESTLIMLVSAFAGYDHVMNAYREAVAERYRFFSYGDAMFITGQEPSRGMLLGASETTNESRAQRDGEAE

SEQ ID NO: 68607 - protein, 367 aa, Marinobacter pelagius
  REGION 1..367: note = tr|A0A1I4VZK8|A0A1I4VZK8_9ALTE S-adenosylmethionine:tRNA ribosyltransferase-isomerase; OS = Marinobacter pelagius OX=379482 GN=queA PE=3 SV=1
MNVSDFYFDLPDELIARYPLEERSASRLLYLEGLTGKVDHLRFTDLQNLVQEGDLLVFNDTRVIPARLFGRKETGGQVEVLVERVTGEHEILAHVRASKALKADQKVILEDGSVLRMVEREDALFRLMAETAEPILELLERIGHMPLPPYVDRPDESSDRERYQTVYAREAGAVAAPTAGLHFDEAMLEQLRAKGIETTFVTLHVGAGTFQPVRVERIEDHVMHSEVAHVPEETVEAIERTRARGGRVIAVGTTSVRSLESASRGGRVRPFRGETDIFIHPGYRFQTVDALITNFHLPESTLIMLVSAFAGYDNVMAAYREAVAERYRFFSYGDAMFITSQEPSRGMLLGASASAATTESDESGESS

SEQ ID NO: 68608 - protein, 367 aa, Marinobacter pelagius
  REGION 1..367: note = tr|A0A366GNY8|A0A366GNY8_9ALTE S-adenosylmethionine:tRNA ribosyltransferase-isomerase; OS = Marinobacter pelagius OX=379482 GN=queA PE=3 SV=1
MNVSDFYFDLPDELIARYPLKERSASRLLHLDGLTGKVDHLRFTDLQELVHEGDLLVFNDTRVIPARLFGKKETGGQVEVLVERVTGEYEILAHVRASKALKADQKVILEDGSVLRMVEREDALFRLMADTAEPVLELLERIGHMPLPPYVDRPDESSDRERYQTVYAREAGAVAAPTAGLHFDEAMLEQLRAKGVETTFVTLHVGAGTFQPVRVERIEDHVMHSEVAHVPEQTVEAIERTRARGGRVIAVGTTSVRSLESASRGGRVRPFRGETDIFIHPGYRFQTVDALITNFHLPESTLIMLVSAFAGYDNVMAAYREAVAERYRFFSYGDAMFITSQEPSRGMLLGASASAATTESDESGESS

SEQ ID NO: 68609 - protein, 364 aa, unidentified
  source 1..364: note = Marinobacter persicus
  REGION 1..364: note = tr|A0A1I3WUJ1|A0A1I3WUJ1_9ALTE S-adenosylmethionine:tRNA ribosyltransferase-isomerase; OS = Marinobacter persicus OX=930118 GN=queA PE=3 SV=1
MNVSDFHFDLPDELIARYPLEQRSASRLLNLDGATGQTRHLQFTDLPDLLEPGDLLVFNNTRVIPARLFGRKQTGGQIEILVERLLGEQEFLAHTRASKSPKQGQTVILEDGTELRMVERRDALFRFVHDGPEPVLDLLERVGHMPLPPYMERDDEQSDRERYQTVYAREAGAVAAPTAGLHFDDAILAQLKERGIEFAYVTLHVGAGTFQPVRVDNVKDHVMHSEVAHVPEDTVDAVRRIRERGGRVVAVGTTSVRSLESASRAGRLQPFRDETDIFIYPGYRFQTVDALITNFHLPESTLIMLVSAFSGYDNIMAAYREAVAQRYRFFSYGDAMFLTGQQPSQGRLATGLPTGHTDSTGEPS

SEQ ID NO: 68610 - protein, 360 aa, unidentified
  source 1..360: note = Marinobacter persicus
  REGION 1..360: note = tr|A0A2S6G7J0|A0A2S6G7J0_9ALTE S-adenosylmethionine:tRNA ribosyltransferase-isomerase; OS = Marinobacter persicus OX=930118 GN=queA PE=3 SV=1
MNVSDFHFDLPDELIARYPLEQRSASRLLNLDGATGQTRHLQFTDLPDLLEPGDLLVFNNTRVIPARLFGRKETGGQVEILVERLLGEQEFLAHTRASKSPKVGQAIVLEDGSKLRMVERQDALFRFVHEGQEAVLDLLERIGHMPLPPYMEREDEQSDRERYQTVYAREAGAVAAPTAGLHFDDPLLARLKEKGIEFAYVTLHVGAGTFQPVRVDNVEDHVMHSEVAQVPEETVEAVRRTRERGGRVVAVGTTSVRSLESASRDGQLQPFRDETNIFIYPGYRFQTVDALITNFHLPESTLIMLVSAFAGYDNTMAAYREAVAQRYRFFSYGDAMFLIGQQPSLGRLAAGHTDSKGEPS

SEQ ID NO: 68611 - protein, 369 aa, Marinobacter psychrophilus
  REGION 1..369: note = tr|A0A0H4I3L0|A0A0H4I3L0_9ALTE S-adenosylmethionine:tRNA ribosyltransferase-isomerase; OS = Marinobacter psychrophilus OX=330734 GN=queA PE=3 SV=1
MNVSDFRFDLPDELIARYPLSERSASRLFCLDGLSGDINHRRFTDLPDFLQPGDLLVFNNTKVIPARLFGKKQSGGAVEILVERITGDQQMLAHVRASKSPKPGQQVLLEDGTALNVIARADALFELQADGSESLLDILDRLGHMPLPPYIDRADEASDRERYQTVYAREAGAVAAPTAGLHFDEALLQKLAAMGVDSTFVTLHIGAGTFQPVRVDKLEDHVMHHELMHVRQDTVDAVARTRARGGRVIAVGTTSVRSLESASRHGDLRPFTGDTDIFIYPGYNFQAVDALITNFHLPESTLIMLVSAFAGYEHVMGAYKEAVREGYRFFSYGDAMFITGQVPSRGMLQHSATEPQGGPETQEFRGETR

SEQ ID NO: 68612 - protein, 364 aa, unidentified
  source 1..364: note = Marinobacter salarius
  REGION 1..364: note = tr|A0A1W6KAY9|A0A1W6KAY9_9ALTE S-adenosylmethionine:tRNA ribosyltransferase-isomerase; OS = Marinobacter salarius OX=1420917 GN=queA PE=3 SV=1
MNVSDFYFDLPDELIARYPLKERSASRLLSLDGLSGDTRHLRFTDLPGLLQPGDLLVFNDTRVIPARLFGRKETGGQVEVLVERVLGEHDILAHVRASKALKEGQKVLLEDGTALRMSGRDDALFHLHCDSDEPVLEVLERIGHMPLPPYVDRPDESSDRERYQTVYAREAGAVAAPTAGLHFDDRILAELESRGIETAFVTLHVGAGTFQPVRVEGIEDHVMHSEVAHVSQETVDAVNAARARGGRVVAVGTTSVRSLESASRGGVVRPFQGETDIFIYPGYRFQAVDAMVTNFHLPESTLIMLVSAFAGYQNVMSAYQAAVAERYRFFSYGDAMFITAQEPSLGALSSCSGKGSQNPENDDE

SEQ ID NO: 68613 - protein, 367 aa, unidentified
  source 1..367: note = Marinobacter salinus
  REGION 1..367: note = tr|A0A1D9GKB4|A0A1D9GKB4_9ALTE S-adenosylmethionine:tRNA ribosyltransferase-isomerase; OS = Marinobacter salinus OX=1874317 GN=queA PE=3 SV=1
MNVSDFHFDLPDELIARYPLPERTASRLLCLNGLSGDTAHRHFTDLTDLLQSGDLLVFNDTRVIPARLFGKKETGGQIEILVERVTGEHGITAHVRASKALRSGQNVILEDGTVMRMTGRDEALFHLVCESSEPVLDVLERIGHMPLPPYVDRPDEGSDRERYQTVYAKEAGAVAAPTAGLHFDEKLLEHLREMGVETTFVTLHVGAGTFQPVRVDRIEDHVMHSEVVHVPQDAVDAVERTRARGGRVVAVGTTSVRSLESASRGGRLRAFRGETDIFISPGYRFETVDALVTNFHLPESTLIMLVSAFAGYENVMNAYRAAVAEEYRFFSYGDAMFITGQAPSRGMLLGASEPITDSKQDNAGEAV

SEQ ID NO: 68614 - protein, 367 aa, Marinobacter santoriniensis
  REGION 1..367: note = tr|M7D7D4|M7D7D4_9ALTE S-adenosylmethionine:tRNA ribosyltransferase-isomerase OS=Marinobacter santoriniensis NKSG1 OX=1288826 GN=queA PE=3 SV=1
MNVSDFYFDLPDELIARYPLKERSASRLLDLDGLTGQIHHRHFTDLPDLVQDGDLLVFNNTRVIPARLFARKETGGQVEILVERLTGEHEFLAHVRASKSPKAGQVLILEDGTRLTMVERQDALFRLAAPEAEPVLELLERIGHMPLPPYVDRPDESSDRERYQTVYAREAGAVAAPTAGLHFDEALMDRLRDRGVEIAFVTLHVGAGTFQPVRVDRIEDHVMHSEVAHVPEETVAAVERARSRGGRVIAVGTTSVRSLESASRGGRVCAFRGETDIFIHPGYRFQTVDALITNFHLPESTLIMLVTAFAGYDNVMGAYREAVKERYRFFSYGDAMFITPQDPSRGMLLGASDTSAGVDSDESGDPQ

SEQ ID NO: 68615 - protein, 353 aa, Marinobacter segnicrescens
  REGION 1..353: note = tr|A0A1H9YDP4|A0A1H9YDP4_9ALTE S-adenosylmethionine:tRNA ribosyltransferase-isomerase; OS = Marinobacter segnicrescens OX=430453 GN=queA PE=3 SV=1
MKVSDFHFDLPAELIARYPMAERSASRLLCLDGVSGALAHRQFRDLPDLLEPDDLLVFNDTRVIPARLFGTKDTGGRVEVLVERVESTDTVLAHVRASKALKPGQRVVLEDGSALVMLDREDALFRLKTESGEAMLDLLERAGHMPLPPYVDRPDESTDRERYQTVYAREAGAVAAPTAGLHFDQSIFDRLAAKGIQTAFVTLHVGAGTFQPVRVEKVEDHVMHSEVATVPEATVEAIRAARQRGGRVIAVGTTSVRSLESASRGGVVRPFQGETDIFIRPGYRFQTVDGMITNFHLPESTLIMLVSAFADYHHTMSAYRVAVAESYRFFSYGDAMFITGQEPSLGALAGPGA

SEQ ID NO: 68616 - protein, 361 aa, unidentified
  source 1..361: note = Marinobacter shengliensis
  REGION 1..361: note = tr|A0A2T1KNH0|A0A2T1KNH0_9ALTE S-adenosylmethionine:tRNA ribosyltransferase-isomerase; OS = Marinobacter shengliensis OX=1389223 GN=queA PE=3 SV=1
MNVSDFHFDLPDELIARYPLKQRSASRLLALEGLTGQTQHLNFTDLPGLLQPGDLLVFNNTRVIPARLFGQKESGGRVEILVERLLGEFELLAHARASKAVKEGQKVLLEDGTALRMVGREDALFRFVYEGLEPVLDVLERIGHMPLPPYMERDDDQSDRERYQTVYAKEAGAVAAPTAGLHFDDEILEVLKSNGIEFAYVTLHVGAGTFQPVRVDKIEDHLMHSEVAHVPQEAVDAVERTRARGGRVVAVGTTSVRSLESASRAGQLNTFRGETDIFIYPGYRFQTVDAMITNFHLPESTLIMLVSAFAGYRNIMSAYQEAVEQRYRFFSYGDAMFLTAQEPSRGMLAGANQTESRGESL

SEQ ID NO: 68617 - protein, 360 aa, Marinobacter sp.
  REGION 1..360: note = tr|A0A1E7PZP9|A0A1E7PZP9_9ALTE S-adenosylmethionine:tRNA ribosyltransferase-isomerase; OS = Marinobacter sp. X15-166B OX=1897620 GN=queA PE=3 SV=1
MNVSDFQFELPDELIARYPLEQRSASRLLVLDGLTGNTTHSSFSALADQLHPDDLLVINNTKVIPARLLGRKETGGRVEVLVERVVGEHEILAHVRASKAPKPGQRLLFEGGYALTMVERQEALFRLVTETGSPILDILDRIGHMPLPPYMEREDELADRERYQTVYAAQAGAVAAPTAGLHFDQAVFDRLAAMGVETATVTLHVGAGTFQPVRVERLEDHVMHSEIAQVPEETVAAVARARARGGRVIAVGTTSVRSLESASRGGVLRAFHGETDIFIYPGYRFQTVDAMVTNFHLPESTLIMLVSAFAGYNHVMAAYAEAVRERYRFFSYGDAMFVTGQEPSLGSLLIQPDSGESSEQ

SEQ ID NO: 68618 - protein, 364 aa, Marinobacter sp.
  REGION 1..364: note = tr|A0A3S1BX56|A0A3S1BX56_9ALTE S-adenosylmethionine:tRNA ribosyltransferase-isomerase; OS = Marinobacter sp. NP-6 OX=2488666 GN=queA PE=3 SV=1
MNVSDFHFDLPDELIARYPLKERSASRLLSLDGLSGDIRHLRFTDLPGLLQPGDLLVFNDTRVIPARLFGRKETGGQVEVLVERVLGEQDILAHVRASKALKEGQKVLLEDGTSLRMNGRDDALFHLHCDSDEPVLDVLERIGHMPLPPYVDRPDESSDRERYQTVYAREAGAVAAPTAGLHFDDRILTELESMGVETAFVTLHVGAGTFQPVRVEGIEDHVMHSEVAHVPQATVDAVNAARARGGRVIAVGTTSVRSLESASRGGMVRPFQGETDIFIYPGYRFQAVDVMVTNFHLPESTLIMLVSAFAGYQNVMSAYQAAVAERYRFFSYGDAMFITAQEPSLGALSSCSGKGSRNPENNDE

SEQ ID NO: 68619 - protein, 367 aa, unidentified
  source 1..367: note = Marinobacter subterrani
  REGION 1..367: note = tr|A0A0J7LZ89|A0A0J7LZ89_9ALTE S-adenosylmethionine:tRNA ribosyltransferase-isomerase; OS = Marinobacter subterrani OX=1658765 GN=queA PE=3 SV=1
MNVSDFHFDLPDELIARYPLKERSASRLLCLDGLSGGLDHRVFGDLPNLLQPGDLLVFNNTRVIPARLFGKKETGGQVEVLAERVTGEHEIIAHVRASKALKEGQAVILEDGTSLRMVGRDDALFHLVCESEESILDVLERIGHMPLPPYVDRPDESVDRERYQTVYAREAGAVAAPTAGLHFDEALLDKLAARGIESTFVTLHVGAGTFQPVRVDKIEDHAMHSEVVHVPQEAVDAVERTRARGGRVVAVGTTSVRSLESASRGGRLQAFTGETEIFIYPGYRFQSVDALVTNFHLPESTLIMLVSGFAGYDNVMAAYREAVQARYRFFSYGDAMFITGQEPSRGMLLGPALESTSTGTDETGEAL

SEQ ID NO: 68620 - protein, 366 aa, Marinobacter vinifirmus
  REGION 1..366: note = tr|A0A558BEK6|A0A558BEK6_9ALTE S-adenosylmethionine:tRNA ribosyltransferase-isomerase; OS = Marinobacter vinifirmus OX=355591 GN=queA PE=3 SV=1
MNVSDFHFDLPDELIARYPLKQRSASRLLNLDGPTGRTRHLRFTDLPDLLQPGDLLVFNNTRVIPARLFGQKETGGRVEVLVERVVGEHEILAHTRSSKSPKPGQRVLLEDGTALRMTGREDALFRFVCESEEPILDVLERIGHMPLPPYMERDDDQSDRERYQTVYAKEAGAVAAPTAGLHFDDDLLGLLKEKGVEFAYVTLHVGAGTFQPVRVDNVKDHVMHSEVAHVPQETVDAVNQARARGGRVVAVGTTSVRSLESASHNGVLSAFRGETDIFIYPGYRFQTVDAMVTNFHLPESTLIMLVSAFSGYEHIMSAYRKAVQERYRFFSYGDAMFLTGQQPSLGRQAASGQADTDQPESRGESL

SEQ ID NO: 68621 - protein, 358 aa, Marinobacter zhejiangensis
  REGION 1..358: note = tr|A0A1I4P871|A0A1I4P871_9ALTE S-adenosylmethionine:tRNA ribosyltransferase-isomerase; OS = Marinobacter zhejiangensis OX=488535 GN=queA PE=3 SV=1
MNVSDFHFDLPDELIARYPLPERSASRLLTLDGLSGAIGHRGFTDLPTFLQPGDLLVFNNTRVIPARLFGKKETGGQVEILVERVLDEHELLAHVRASKAPKPGQAIIVEDGTVFRMKERQDALFLLRCEAVEPVLDVLERTGHMPLPPYVDRPDEEADRERYQTVYAEQAGAVAAPTAGLHFDKAMIASLQEQGVNTAFVTLHVGAGTFQPVRVERIEDHVMHTEIAQVPEETVEAVRRTREQGGRVIAVGTTSVRSLESASRGGKLRSFQGETDIFIHPGYRFQTVDAMVTNFHLPESTLIMLVSAFAGYEHVMSAYHDAVQQRYRFFSYGDAMFITGQEPSLGALAGPSQTGDRS

SEQ ID NO: 68622 - protein, 348 aa, unidentified
  source 1..348: note = Marinobacterium aestuarii
  REGION 1..348: note = tr|A0A1A9F238|A0A1A9F238_9GAMM S-adenosylmethionine:tRNA ribosyltransferase-isomerase; OS = Marinobacterium aestuarii OX=1821621 GN=queA PE=3 SV=1
MQVKDFSFELPDELIARFPLERRSASRLLCLEGNSGAIEHRAFSDILELLNPGDLLVFNDTRVIPARLFGEKASGGKVEVLIERVLDAGQALAHVRASRAPKPGTGLLLEGAVRATVTGRRGNLFELSFDIDRHLVEVLEEFGHMPLPPYMKRDDQQSDRERYQTVYNRKPGAVAAPTAGLHFDNELLAQLEARGVQQAFVTLHVGAGTFQPVKVEQVQDHQMHAEFIEVSEAVCQAVRDTRARGGRVVAVGTTSVRCLETASRSGEIAPYSGDTDIFIYPGYEYRTVDVLITNFHLPESTLLMLVSAFAGYDGIMQAYREAVAERYRFFSYGDAMFLTRRGAALEDK

SEQ ID NO: 68623 - protein, 350 aa, Marinobacterium georgiense
  REGION 1..350: note = tr|A0A1H4GRC1|A0A1H4GRC1_9GAMM S-adenosylmethionine:tRNA ribosyltransferase-isomerase; OS = Marinobacterium georgiense DSM 11526 OX=1122198 GN=queA; PE = 3 SV=1
MQVKDFYFELPEELIARYPLEQRSASRLLCLDGNTGERTHRQFTDLLTLLQPGDLLVFNDTRVIPARLFGQKESGGQIEMLVERVTSENTALAHIRASRAPRPGARLLFEGGLEAEVTGRQENLFQLRFTNLDDHLVSALERHGHMPLPPYMKREDQLSDRERYQTVYNRKPGAVAAPTAGLHFDQALLQQLKDKGIEQTFVTLHVGAGTFQPVKVDTIAEHHMHAEYIEVSDEACAAVKAAQARGNKVVAVGTTSVRCLETASRSGEIAPFYGDTDIFIYPGYRFRTVDRLITNFHLPESTLMMLVSAFAGHQSIMQAYADAVAERYRFFSYGDAMFLTRRDAADEDAL

SEQ ID NO: 68624 - protein, 350 aa, Marinobacterium halophilum
  REGION 1..350: note = tr|A0A2P8EQP5|A0A2P8EQP5_9GAMM S-adenosylmethionine:tRNA ribosyltransferase-isomerase; OS = Marinobacterium halophilum OX=267374 GN=queA PE=3 SV=1
MQVKDFHFELPEELIARYPLEQRSASRLLCVDGNTGERAHRQFSDLPSLLQPGDLLVFNDTRVIPARLFGQKASGGKIEMLIERVTSESEALAHIRSSRAPKPGTCLQLEGGLEAEVTGRQQNLFEVRFTNLDGHLVSALEQHGHMPLPPYMNREDQLSDRERYQTVYNRKPGAVAAPTAGLHFDEPLLQQLRDMGVEQAFVTLHVGAGTFQPVKVDNITDHHMHAEYIEVSEETCAAVKAAQARGSRVIAVGTTSVRCLETASQSGEIAPFYGDTDIFIYPGYRYRTVEALVTNFHLPESTLLMLVSAFTGHKAMMQAYADAVAERYRFFSYGDAMFLTRREAADEESL

SEQ ID NO: 68625 - protein, 347 aa, Marinobacterium lutimaris
  REGION 1..347: note = tr|A0A1H6CT88|A0A1H6CT88_9GAMM S-adenosylmethionine:tRNA ribosyltransferase-isomerase; OS = Marinobacterium lutimaris OX=568106 GN=queA PE=3 SV=1
MQLKDFYFDLPEELIARYPLEQRSASRMLCVDGNSGELNHRVFSDILDLLEPGDLLVFNDTRVIPARLFGQKESGGKVELLIERVTGEHEALAHIRSSRSPKPGARLLLEGGLKAEVTGRRENLFELRFDIEGHLVAALEEFGHIPLPPYMKRDDQLSDRERYQTVYNRKPGAVAAPTAGLHFDQPLLDKLKEKGIETAFVTLHVGAGTFQPVKVDKIEDHHMHAEYIEVSAEVCEAVKAARARGKRVVAVGTTSVRSLESASRSGEIAPFYGDTEIFIYPGYQYVSVDALITNFHLPESTLLMLVSAFAGYEHMMHAYEQAVAERYRFFSYGDAMFLTRRDAQENP

SEQ ID NO: 68626 - protein, 347 aa, unidentified
  source 1..347: note = Marinobacterium mangrovicola
  REGION 1..347: note = tr|A0A4R1GG21|A0A4R1GG21_9GAMM S-adenosylmethionine:tRNA ribosyltransferase-isomerase; OS = Marinobacterium mangrovicola OX=1476959 GN=queA PE=3; SV = 1
MQLKDFYFDLPEELIARYPLEQRSASRMLCVDGNSGELNHRVFSDILDLLEPGDLLVFNDTRVIPARLFGQKESGGKVELLIERVTGEHEALAHIRSSRSPKPGATLLLEGGLKAEVTGRQENLFELRFDIEGHLVAALEEFGHIPLPPYMKRDDQLSDRERYQTVYNRKPGAVAAPTAGLHFDQPLLDKLKEKGIETAFVTLHVGAGTFQPVKVDKIEDHHMHAEYIEVSPEVCEAVNAARARGKRVVAVGTTSVRSLESASRSGEIAPFYGDTEIFIYPGYQYVSVDALITNFHLPESTLLMLVSAFAGYEHMMYAYEQAVAERYRFFSYGDAMFLTRRDAQENP

SEQ ID NO: 68627 - protein, 347 aa, Marinobacterium sp.
  REGION 1..347: note = tr|A0A081G1E1|A0A081G1E1_9GAMM S-adenosylmethionine:tRNA ribosyltransferase-isomerase; OS = Marinobacterium sp. AK27 OX=1232683 GN=queA PE=3 SV=1
MQVKDFYFELPDELIARYPLEQRSASRLLCVDGNSGALHHRVFSDILELLDPGDLLVFNDTRVIPARLFGQKESGGKIELLIERVTGEHEALAHVRSSRSPKPGARLLLEGGLIAQVTGRRENLFELHFEIEGHLVEALERFGHMPLPPYMKREDQSSDRERYQTVYNRKPGAVAAPTAGLHFDQPLLDKLAEKGIETAFVTLHVGAGTFQPVKVDRIEDHHMHAEYIEVPPAVCEAVKATRARGNRVIAVGTTSVRCLESASHSGEIEPMYGDTDIFIYPGYRFRSVDALITNFHLPESTLLMLVSAFAGYDHMMNAYREAVAERYRFFSYGDAMFLTRREAQENE

SEQ ID NO: 68628 - protein, 350 aa, Marinobacterium stanieri
  REGION 1..350: note = tr|A0A1N6U767|A0A1N6U767_9GAMM S-adenosylmethionine:tRNA ribosyltransferase-isomerase; OS = Marinobacterium stanieri OX=49186 GN=queA PE=3 SV=1
MQVKDFYFELPEELIARYPLEQRSASRLLCVDGNTGERTHRQFSDLPSMLQPGDLLVFNDTRVIPARLFGQKASGGKIEMLIERVTSDSEALAHIRSSRAPKPGTALTLEGGLEAEVVGRQQNLFEVRFTNLEGHLVSALEEYGHMPLPPYMNREDQLSDRERYQTVYNRKPGAVAAPTAGLHFDEPLLEQLKAMGVEQAFVTLHVGAGTFQPVKVDNIHDHHMHAEYIEVSEEACAAVKAAQARGNRVIAVGTTSVRCLETASQSGEIEPFYGDTDIFIYPGYRYRTVEALITNFHLPESTLLMLVSAFSGHKAMMDAYAEAVAERYRFFSYGDAMFLTRREATDEESA

SEQ ID NO: 68629 - protein, 347 aa, Marinococcus halophilus
  REGION 1..347: note = tr|A0A510Y809|A0A510Y809_MARHA S-adenosylmethionine:tRNA ribosyltransferase-isomerase; OS = Marinococcus halophilus OX=1371 GN=queA PE=3 SV=1
MNINEFDFELPEELIAQQPLKERDQSRLLVMNTGARTIAHERFHQIEDHLEAGDCLVLNNTKVWPARLIGEKKETGAGIEVLLLQQEGDTWETLVKPAKRVKPGTVVTFGDGRLTAECTKVLEHGGREMVFTYDGIFLEILQELGEMPLPPYIKEKIEDQDRYQTVYAEHYGSAAAPTAGLHFTTELLERLKAKGVQTAHLTLHVGLGTFRPVSAETVEEHDMHAEFYHLPQETAEILNETKSAGKRIIAVGTTSARTLETVAGKQENEFMEARGWTDIFIYPGYTFRGIDALLTNFHLPKSTLVMLVSALAGKEFLFRAYEEAIRERYRFFSFGDAMLIHSGGNNE

SEQ ID NO: 68630 - protein, 347 aa, Marinococcus luteus
  REGION 1..347: note = tr|A0A1H2S8Z2|A0A1H2S8Z2_9BACI S-adenosylmethionine:tRNA ribosyltransferase-isomerase; OS = Marinococcus luteus OX=1122204 GN=queA PE=3 SV=1
MNINEFDFELPEELIAQQPLKERDQSRLLVMNTKEETIAHEQFHQIEDYLEAGDCLVLNNTKVWPARLIGEKKETGAGIEVLLLQQEGDKWETLVKPAKRVKPGTVVTFGDGRLTAECTKVLEHGGREMVFTYDGIFLEILQELGEMPLPPYIKEKLEDQDRYQTVYAEHYGSAAAPTAGLHFTTALLERLKAKGVRTAHLTLHVGLGTFRPVSAETVEEHDMHAEFYHLPQETAEILNETKSAGKRIIAVGTTSARTLETVAGKQENKFMEARGWTDIFIYPGYTFQGIDALLTNFHLPKSTLVMLVSALAGKEFLFRAYGEAIRERYRFFSFGDAMLIHSGGNNE

SEQ ID NO: 68631 - protein, 353 aa, Marinomonas alcarazii
  REGION 1..353: note = tr|A0A318V732|A0A318V732_9GAMM S-adenosylmethionine:tRNA ribosyltransferase-isomerase; OS = Marinomonas alcarazii OX=491949 GN=queA PE=3 SV=1
MLVSDYHFDLPDSLIANYPTPDRTASRLLHLDGPTGDVVHRQFPDVLDLVQPGDLMVFNNTRVIPARVFGQKESGGKVEILVERVINGNEALAHVRASKSPKENSKLILGQDKGEQIEATMVGRSGALFHLVFNESVLDVLSRAGHMPLPPYIERPDEDSDQERYQTVYNQKPGAVAAPTAGLHFDDALLEKLKAKGVETAFVTLHVGAGTFQPMKVENVKDHVMHAEYVEVEPSVVEQVKATKARGGRVIAVGTTSVRSLESASQSGEIAPMQGDTSIFIYPGYEFKTVDALVTNFHLPESTLIMLISAFAGYDHVMAAYKTAVEQKYRFFSYGDAMFITRNAQAKGPQGEE

SEQ ID NO: 68632 - protein, 353 aa, Marinomonas aquimarina
  REGION 1..353: note = tr|A0A1A8TKG8|A0A1A8TKG8_9GAMM S-adenosylmethionine:tRNA ribosyltransferase-isomerase; OS = Marinomonas aquimarina OX=295068 GN=queA PE=3 SV=1
MRVSDYRFELPEELIARYPMPERSASRLLKLDGPTGELSHNTFKDVLDFVEPGDLMVFNNTRVIPARLYGQKASGGKLELLVERLLSEHEILAHVRCSKSPKVGNRLELGTDRGAAHGAEMVGRDDTLFHLRFDEPVLEVLEKVGHMPLPPYIERPDDESDQERYQTVYNKTPGAVAAPTAGLHFDDGLLAKLKDKGVDTAFVTLHVGAGTFQPVRVDDVKDHVMHSEYAEVSQEVVDKVRATKAAGKRVIAVGTTSVRSLESASQSGQIEPFATDTSIFIYPGYEFKTVDVLVTNFHLPESTLIMLISAFAGYNNVMNAYHVAVAEKYRFFSYGDAMFITRNPKAKGPTAEE

SEQ ID NO: 68633 - protein, 353 aa, Marinomonas aquiplantarum
  REGION 1..353: note = tr|A0A366CVV4|A0A366CVV4_9GAMM S-adenosylmethionine:tRNA ribosyltransferase-isomerase; OS = Marinomonas aquiplantarum OX=491951 GN=queA PE=3 SV=1
MLVSDYHFDLPDSLIANYPTPDRTASRLLHLDGPSGEVVHRQFPDVLDLVQAGDLMVFNNTRVIPARVFGQKESGGKVEILVERVTSSHEVLAHVRASKSPKEGTKIFLGQDKGEQIEATMLGRSGALFHLAFQEPVLDILTRVGHMPLPPYIERPDEDSDQERYQTVYNEKPGAVAAPTAGLHFDDALLAKLKDKGVEVAFVTLHVGAGTFQPMKVDNVEDHIMHAEYVEVDEQVVQQVQATKARGGRVIAVGTTSVRSLESASQSGEIAPMQGDTSIFIYPGYEFKTVDALVTNFHLPESTLIMLISAFAGYQQVMSAYRVAVEQKYRFFSYGDAMFITRNAQAKGPQSEE

SEQ ID NO: 68634 - protein, 353 aa, Marinomonas balearica
  REGION 1..353: note = tr|A0A4R6MHS0|A0A4R6MHS0_9GAMM S-adenosylmethionine:tRNA ribosyltransferase-isomerase; OS = Marinomonas balearica OX=491947 GN=queA PE=3 SV=1
MKVSDYQFDLPDELIARYPMPERTSSRLLKLNGQSGELEHGQFADILSLVEPGDLMVFNNTRVIPARIFGQKESGGKIEVLVERLVSPTEILAHVRASKSPKPGNELVLGTDRGVSFKAVMVERQANLFRLQFEEPVLEVLDKVGHMPLPPYIERPDEESDQERYQTVYNEKPGAVAAPTAGLHFDDELLKQLSEIGVDTAFVTLHVGAGTFQPVKVDNVKDHIMHSEYAEVSQDVVDKVRLAKSKGKRVIAVGTTSVRSLESASQSGSIQPMADDTSIFIYPGYEFKTVDALVTNFHLPESTLIMLISAFAGYANVMAAYKTAVSEQYRFFSYGDAMFITRNSKADGPQSEE

SEQ ID NO: 68635 - protein, 353 aa, Marinomonas communis
  REGION 1..353: note = tr|A0A4R6X9L7|A0A4R6X9L7_9GAMM S-adenosylmethionine:tRNA ribosyltransferase-isomerase; OS = Marinomonas communis OX=28254 GN=queA PE=3 SV=1
MRVSDYRFELPEELIARYPMPERTASRLLKLDGPSGELTHNTFKDVLDFVEPGDLMVFNNTRVIPARLYGQKESGGKLELLVERLLSEHEILAHVRCSKSPKVGNRLMLGTDRGAAHGAEMVGREDTLFHLRFDEPVLEVLEKVGHMPLPPYIERPDDESDQERYQTVYNKTPGAVAAPTAGLHFDDELLAALKDKGVDTAFVTLHVGAGTFQPVRVDDVKDHVMHSEYAEVSQEVVDKVRATKAAGKRVIAVGTTSVRSLESASQSGQIEPFATDTSIFIYPGYEFKTVDVLVTNFHLPESTLIMLISAFAGYESVMNAYRVAVEEKYRFFSYGDAMFITRNPKAEGPTTEE

SEQ ID NO: 68636 - protein, 353 aa, Marinomonas foliarum
  REGION 1..353: note = tr|A0A369ADG0|A0A369ADG0_9GAMM S-adenosylmethionine:tRNA ribosyltransferase-isomerase; OS = Marinomonas foliarum OX=491950 GN=queA PE=3 SV=1
MLVSDYHFDLPDSLIANYPMPDRTASRLLHLDGPTGDVVHRQFPDVLDLVQPGDLMVFNNTRVIPARVFGQKESGGKVEILVERVINTNEALAHVRASKSPKENSKLILGQDKGEQIEATMIGRSGALFHLVFNEPVLDVLTRAGHMPLPPYIERPDEDSDQERYQTVYNQKPGAVAAPTAGLHFDDALLEKLKAKGVEMAFVTLHVGAGTFQPMKVENVQDHIMHAEYVEVEPSVVEQVKATKARGGRVIAVGTTSVRSLESASQSGEIAPMQDDTSIFIYPGYEFKTVDALVTNFHLPESTLIMLISAFAGYDHVMAAYKKAVEQKYRFFSYGDAMFITRNAQAKGPQCEE

SEQ ID NO: 68637 - protein, 353 aa, unidentified
  source 1..353: note = Marinomonas fungiae
  REGION 1..353: note = tr|A0A0K6IRT3|A0A0K6IRT3_9GAMM S-adenosylmethionine:tRNA ribosyltransferase-isomerase; OS = Marinomonas fungiae OX=1137284 GN=queA PE=3 SV=1
MRVSDYRFELPEELIARYPMPERTASRLLKLDGPTGELSHHTFKDVLDFVEPGDLMVFNNTRVIPARLYGQKASGGKLELLVERLLSEHEILAHVRCSKSPKVGNRLELGTDRGACHGAEMIGRDDTLFHLRFDEPVLEVLEKVGHMPLPPYIERPDDESDQERYQTVYNKTPGAVAAPTAGLHFDDALLAKLKEKGVDTAFVTLHVGAGTFQPVRVDDIKDHVMHSEYAEVSQEVVDKVRATKAAGKRVIAVGTTSVRSLESASQTGQIEPFATDTSIFIYPGYEFKTVDVLVTNFHLPESTLIMLISAFAGYSNVMNAYRVAVAEKYRFFSYGDAMFITRNPKAEGPTAEE

SEQ ID NO: 68638 - protein, 353 aa, unidentified
  source 1..353: note = Marinomonas gallaica
  REGION 1..353: note = tr|A0A1C3JT47|A0A1C3JT47_9GAMM S-adenosylmethionine:tRNA ribosyltransferase-isomerase; OS = Marinomonas gallaica OX=1806667 GN=queA PE=3 SV=1
MRVSDYRFELPEELIARYPMPERTASRLLKLDGPSGELAHKHFTDVLECVEPGDLMVFNNTRVIPARLFGQKASGGKLELLVERLLSEHEILAHVRCSKSPKVGNRLELGIDRGASHGAEMVGRDDTLFHLRFDEPVLEVLEKVGHMPLPPYIERPDDESDQERYQTVYNKTPGAVAAPTAGLHFDDALLEKLKAKGVDTAFVTLHVGAGTFQPVRVDDIKDHVMHSEYAEVSQEVVDKVRATKANGKRVIAVGTTSVRSLESASQSGQIEPFATDTSIFIYPGYEFKTVDVLVTNFHLPESTLIMLISAFAGYDNVMNAYRVAVAEKYRFFSYGDAMFITRNPKAEGPTAEE

SEQ ID NO: 68639 - protein, 353 aa, unidentified
  source 1..353: note = Marinomonas hwangdonensis
  REGION 1..353: note = tr|A0A3M8Q7A4|A0A3M8Q7A4_9GAMM S-adenosylmethionine:tRNA ribosyltransferase-isomerase; OS = Marinomonas hwangdonensis OX=1053647 GN=queA PE=3 SV=1
MLVSDYHFDLPDSLIAHYPTPDRTASRLLHLDGPSGEVAHRHFPDLLDLVQPGDLMVFNNTRVIAARVFGQKASGGKIEILIERVINSTEALAHIRASKSPKEGAKLFLGQDKGEEIEATMIGRSGALFHLSFNESVLDILSRVGHMPLPPYIERPDEDSDQERYQTVYNEKPGAVAAPTAGLHFDEILLEKLKAKGVEIAFVTLHVGAGTFQPMKVENVKDHIMHAEYVEVEPSVVEQVKATKGRGGRVIAVGTTSVRSLESASQSGEIAPMQDDTSIFIYPGYEFKTVDALVTNFHLPESTLIMLISAFAGYDHVMAAYKVAVEQKYRFFSYGDAMFITRNAQAKGPQGEE

SEQ ID NO: 68640 - protein, 353 aa, Marinomonas mediterranea
  REGION 1..353: note = tr|F2JY79|F2JY79_MARM1 S-adenosylmethionine:tRNA ribosyltransferase-isomerase OS=Marinomonas mediterranea (strain ATCC 700492 / JCM 21426 / NBRC 103028 / MMB-1); OX = 7 17774 GN=queA PE=3 SV=1
MKVSDYHFNLPDELIARYPMPERSSSRLLQLHGQTGELKHGVFSDVLSLVEPGDLMVFNNTRVIPARVFGQKASGGKVEVLVERLLSSTEILAHVRASKSPKPGNELYLGTDRNESFKAVMVERDANLFRLQFENPVLEVLEKVGHMPLPPYIERPDEDSDQERYQTVYNEKPGAVAAPTAGLHFDDELLEKLAEKGVDTAFVTLHVGAGTFQPVKVDDVKDHIMHSEYAEVSQEVVDKVRQAKANGKRVIAVGTTSVRSLESASQSGQIEPMADDTSIFIYPGYEFKTVDALVTNFHLPESTLIMLISAFAGYSNVMAAYKAAVDEKYRFFSYGDAMFITRNPEASGPQSEE

SEQ ID NO: 68641 - protein, 353 aa, Marinomonas polaris
  REGION 1..353: note = tr|A0A1M5G895|A0A1M5G895_9GAMM S-adenosylmethionine:tRNA ribosyltransferase-isomerase; OS = Marinomonas polaris DSM 16579 OX=1122206 GN=queA PE=3; SV = 1
MLVSDYHFDLPDSLIANYPMPDRTASRLLHLDGPSGDVVHRQFPDVLDLVQPGDLMVFNNTRVIPARVFGQKESGGKVEVLVERVINTNEALAHVRASKSPKENSKLILGQDKGEQIEATMVGRSGALFHLVFNEPVLDVLTRAGHMPLPPYIERPDEDSDQERYQTVYNQKPGAVAAPTAGLHFDEVLLEKLQAKGVEIAFVTLHVGAGTFQPMKVENVKDHIMHAEYVEVEPSVVEQVKAAKARGGRVIAVGTTSVRSLESASQSGEIAPMQDDTSIFIYPGYEFKTVDALVTNFHLPESTLIMLISAFAGYDHVMAAYKKAVEQKYRFFSYGDAMFITRNAQAKGPQGEE

SEQ ID NO: 68642 - protein, 353 aa, Marinomonas pollencensis
  REGION 1..353: note = tr|A0A3E0DGA2|A0A3E0DGA2_9GAMM S-adenosylmethionine:tRNA ribosyltransferase-isomerase; OS = Marinomonas pollencensis OX=491954 GN=queA PE=3 SV=1
MRVSDYHFDLPEKLIATYPMPDRTASRLLHLDGESGNLAHLQFPNILDLVRPGDLMVFNNTRVIPARVFGQKESGGKIEILIERIVDEKQALAHIRASKSPKPGNKLILGQDKGEAIDAVMLDRSGPLFRVAFAEPVLDVLARIGHMPLPPYIERPDEDSDQERYQTVYNQKPGAVAAPTAGLHFDETILAKLKEKGVDTAFVTLHVGAGTFQPVKVEDVKDHIMHAEYVEVEDSVVEQVRATKARGGRVIAVGTTSVRSLESASQSGELQAMKDDTSIFIYPGYKFKTVDCMVTNFHLPESTLIMLISAFAGYDQVMAAYRSAVENEYRFFSYGDAMFITRNEQAKGPQSEE

SEQ ID NO: 68643 - protein, 353 aa, Marinomonas posidonica
  REGION 1..353: note = tr|F6CXB2|F6CXB2_MARPP S-adenosylmethionine:tRNA ribosyltransferase-isomerase OS=Marinomonas posidonica (strain CECT 7376 / NCIMB 14433 / IVIA-Po-181) OX=491952; GN = q ueA PE=3 SV=1
MLVSDYHFDLPDSLIANYPTPDRTASRLLHLDGPSGEVIHRQFPNVLELVQAGDLMVFNNTRVIPARVFGQKESGGKVEILVERVIASHEVLAHVRASKSPKEGTKIFLGQDKGEQIEATMLGRSGALFHLAFQEPVLDILTRVGHMPLPPYIERPDEDSDQERYQTVYNQKPGAVAAPTAGLHFDDALLAKLKDKGVEVAFVTLHVGAGTFQPMKVDNVEDHIMHAEYVEVGEQVVQQVQATKARGGRVVAVGTTSVRSLESASQSGEIAPMQGDTSIFIYPGYEFKTVDALVTNFHLPESTLIMLISAFAGYQQVMSAYRVAVEQKYRFFSYGDAMFITRNAQAKGPQGEE

SEQ ID NO: 68644 - protein, 353 aa, Marinomonas primoryensis
  REGION 1..353: note = tr|A0A2Z4PUA0|A0A2Z4PUA0_9GAMM S-adenosylmethionine:tRNA ribosyltransferase-isomerase; OS = Marinomonas primoryensis OX=178399 GN=queA PE=3 SV=1
MLVSDYHFDLPDSLIANYPTPDRTASRLLHLDGPSGEVVHRQFPDVLDLVQPGDLMVFNNTRVIPARVFGQKESGGKIEVLVERVIGTNEALAHIRASKSPKENSKLILGQDKGEQIEVTMLGRSGALFHLAFNEPVLDVLSRVGHMPLPPYIERPDEDSDQERYQTVYNQKPGAVAAPTAGLHFDDELLEKLKAKGIETAFVTLHVGAGTFQPMKVDNVKDHIMHAEYVEVEPSVVEQVKAAKARGGRVIAVGTTSVRSLESASQSGEIAPMQGDTSIFIYPGYEFKTVDALVTNFHLPESTLIMLISAFAGYDHVMSAYQAAVEQKYRFFSYGDAMFITRNTQASGPQSEE

SEQ ID NO: 68645 - protein, 353 aa, unidentified
  source 1..353: note = Marinomonas profundimaris
  REGION 1..353: note = tr|W1RWW7|W1RWW7_9GAMM S-adenosylmethionine:tRNA ribosyltransferase-isomerase OS=Marinomonas profundimaris; OX = 1208321 GN=queA PE=3 SV=1
MLVSDYHFDLPDSLIANYPTPDRTASRLLHLDGPSGDVIHRHFPDVLDLVQPGDLMVFNNTRVIPARVFGQKESGGKVEILVERVIGANEALAHVRASKSPKENTKLFLGQDKGEQIEVTMLGRSGALFHLAFNEPVLDVLSRVGHMPLPPYIERPDEDSDQERYQTVYNQKPGAVAAPTAGLHFDDALLEKLKAKGVETAFVTLHVGAGTFQPMKVDNVKDHIMHAEYVEVEQSVVDQVNATKARGGRVIAVGTTSVRSLESASQSGEIAPMQGDTSIFIYPGYEFKTVDALVTNFHLPESTLIMLISAFAGYDHVMLAYKKAVEEQYRFFSYGDAMFITRNAQAKGPQSEE

SEQ ID NO: 68646 - protein, 353 aa, Marinomonas rhizomae
  REGION 1..353: note = tr|A0A366JC03|A0A366JC03_9GAMM S-adenosylmethionine:tRNA ribosyltransferase-isomerase; OS = Marinomonas rhizomae OX=491948 GN=queA PE=3 SV=1
MLVSDYHFDLPDSLIANYPMPDRTASRLLHLDGPSGEVVHRQFPDVLDLVQPGDLMVFNNTRVIPARVFGQKESGGKVEILVERVINANEAMAHVRASKSPKENSRLILGQDKGESIEATMIGRSGALFHLVFNEPVLDVLTRVGHMPLPPYIERPDEDSDQERYQTVYNEKPGAVAAPTAGLHFDEALLEKLKIKGVETAFVTLHVGAGTFQPMKVENVKDHIMHAEYVEVEPSVVEQVKATKARGGRVIAVGTTSVRSLESASQSGEIAPMQDDTSIFIYPGYEFKTVDALVTNFHLPESTLIMLISAFAGYDHVMAAYKAAVEQQYRFFSYGDAMFITRNSQAKGPQGEE

SEQ ID NO: 68647 - protein, 353 aa, Marinomonas sp.
  REGION 1..353: note = sp|A6VYN2|QUEA_MARMS S-adenosylmethionine:tRNA ribosyltransferase-isomerase OS=Marinomonas sp. (strain MWYL1) OX=400668 GN=queA PE=3 SV=1
MLVSDYHFDLPDSLIANYPMPDRTASRLLHLDGHSGEVVHRQFPDVLDLVQPGDLMVFNNTRVIPARVFGQKESGGKVEILVERVINVNEALAHVRASKSPKESSKLILGQDKGEHIEATMIGRSGALFHLVFDEPVLDVLMRAGHMPLPPYIERPDEDSDQERYQTVYNQKPGAVAAPTAGLHFDEALLEKLKAKGVETAFVTLHVGAGTFQPMKVENVKDHIMHAEYVEVEPSVVEQVKAAKARGGRVIAVGTTSVRSLESASQSGEIAPMQGDTSIFIYPGYEFKTVDALVTNFHLPESTLIMLISAFAGYDHVMAAYKKAVEQKYRFFSYGDAMFVTRNPQAKGPQGEE

SEQ ID NO: 68648 - protein, 353 aa, Marinomonas sp.
  REGION 1..353: note = tr|A0A166MBB8|A0A166MBB8_9GAMM S-adenosylmethionine:tRNA ribosyltransferase-isomerase; OS = Marinomonas sp. TW1 OX=1561203 GN=queA PE=3 SV=1
MLVSDYHFDLPDSLIANYPMPDRTASRLLHLDGPSGEVVHRQFPEILDLVQAGDLMVFNNTRVIPARVFGQKESGGKVEILVERVTSSHEVLAHVRASKSPKEGTKIFLGQDKGEQIEATMLGRSGALFHLAFQEPVLDILTRVGHMPLPPYIERPDEDSDQERYQTVYNEKPGAVAAPTAGLHFDDALLAKLKDKGVEVAFVTLHVGAGTFQPMKVDNVEDHIMHAEYVEVDEQVVQQVQATKARGGRVIAVGTTSVRSLESASQSGDIAPMQGDTSIFIYPGYEFKTVDALVTNFHLPESTLIMLISAFAGYQQVMSAYRVAVEQKYRFFSYGDAMFITRNAQAKGPQSEE

SEQ ID NO: 68649 - protein, 371 aa, unidentified
  source 1..371: note = Marinomonas spartinae
  REGION 1..371: note = tr|A0A1A8TB67|A0A1A8TB67_9GAMM S-adenosylmethionine:tRNA ribosyltransferase-isomerase; OS = Marinomonas spartinae OX=1792290 GN=queA PE=3 SV=1
MEKNSLKYWVIFLGRFLRMRVSDYHFDLPDSLIATYPAPDRTSSRLLKLDGPTGELTHLQFSNVLDLVQPGDLMVFNNTRVIPARVFGEKESGGKIEILIERITSETEALAHIRASKSPKPGSKLFLGQDKSESIEVTMVERSGALFCLAFGEPVLQVLSRVGHMPLPPYIERPDEDSDQERYQTVYNQKPGAVAAPTAGLHFDEGLLDKIQAKGVDLAFVTLHVGAGTFQPVKVDHVKDHIMHAEYVEVEETVVEQVKATKARGGRVIAVGTTSVRSLESASQSGEIAPMKDDTSIFIYPGYKFKTVDCLVTNFHLPESTLIMLISAFAGYDQVMSAYKSAVENDYRFFSYGDAMFITRNAQAKGPQSKE

SEQ ID NO: 68650 - protein, 353 aa, Marinomonas ushuaiensis
  REGION 1..353: note = tr|X7E180|X7E180_9GAMM S-adenosylmethionine:tRNA ribosyltransferase-isomerase OS=Marinomonas ushuaiensis DSM 15871 OX=1122207 GN=queA PE=3 SV=1
MLVSDYHFDLPDSLIANYPTPDRTASRLLHLDGPSGELAHRQFPDVLDLVQPGDLMVFNNTRVIPARVFGQKESGGKVEILVERVVATNEALAHVRASKSPKENSKIFLGQDKGEQIEATMIGRSGALFHLVFEEPVLDVLSRVGHMPLPPYIERPDEESDQERYQTVYNQKPGAVAAPTAGLHFDDELLEKLKSKGVETAFVTLHVGAGTFQPMKVDNVKDHIMHAEYVEVEQSVVDQVKATKARGGRVIAVGTTSVRSLESASQSGEIAPMQGDTSIFIYPGYEFKTVDALVTNFHLPESTLIMLISAFAGYDHVMAAYQAAVEQKYRFFSYGDAMFITRNAQAKGPQSEE

SEQ ID NO: 68651 - protein, 348 aa, Marinoscillum furvescens
  REGION 1..348: note = tr|A0A3D9KWQ6|A0A3D9KWQ6_9BACT S-adenosylmethionine:tRNA ribosyltransferase-isomerase; OS = Marinoscillum furvescens DSM 4134 OX=1122208 GN=queA; PE = 3 SV=1
MKLSAFKFDLPSSHIALRPTENRDESRLMVIHKDTGEIEHKIFKDIVDYFDEGDMMVINNTKVFPARLYGNKEKTGAKIEVFLLRELNKEMKLWDVLVDPARKIRVGNKLYFGEGELVAEVIDNTTSRGRTIRFLFDGDETDFYKMIDRLGETPLPKRIERAAEPEDRERFQTIYAEHVGAVAAPTAGLHFTQQVMKRLEIKGIDIDPITLHVGLGTFRPVDVEDLTKHKMDSENYIVPESTADRVNRALDEKRRVVSVGTTVMRTLESSVSASGRLKANEGWTDKFIFPQYDFKICNALVTNFHLPESTLLMMAAAFGGYDLIMDAYQTAIKEKYRFFTYGDAMLII

SEQ ID NO: 68652 - protein, 394 aa, Marinoscillum furvescens
  REGION 1..394: note = tr|A0A3D9L2I9|A0A3D9L2I9_9BACT S-adenosylmethionine:tRNA ribosyltransferase-isomerase; OS = Marinoscillum furvescens DSM 4134 OX=1122208 GN=queA; PE = 3 SV=1
MQPESLDLRNYTYELPDEKIAKYPLEDRASSKLLCYDNGQITHGHFRDISQKLPSGSFLVFNDTKVIPARLIFYKETGARIEIFLLDPIAPTNVYESVMSGKESCTWHAMIGNAKKWKEHALTMQVGDNLLKATRVADDQVKFEWTSDDTFSDVLTAIGKIPLPPYLGREATDKDIPRYQTIYSKHEGAVAAPTAGLHFTEEVMNSLKARKIAIDYLTLHVSAGTFQPIKTDNVADHPMHREQVVLSKTNIENLLNNDILIPVGTTSMRTMESLFWYGQLLSENPEAPFFVEKSTPYRKVPVISKQESLQNVLSYMERNQLETLIGHTEIFIYPGYSFKLCKGLITNFHLPGSTLILLVAALIGDDWRKVYQEALNANYRFLSYGDSSLLLPNQ

SEQ ID NO: 68653 - protein, 385 aa, Marinoscillum sp.
  REGION 1..385: note = tr|A0A2D7TFN9|A0A2D7TFN9_9BACT S-adenosylmethionine:tRNA ribosyltransferase-isomerase; OS = Marinoscillum sp. OX=2024838 GN=CMG94_03260 PE=3 SV=1
  VARIANT 10: note = Xaa can be any naturally occurring amino acid
  VARIANT 16: note = Xaa can be any naturally occurring amino acid
  VARIANT 18: note = Xaa can be any naturally occurring amino acid
  VARIANT 20: note = Xaa can be any naturally occurring amino acid
  VARIANT 23: note = Xaa can be any naturally occurring amino acid
  VARIANT 37..38: note = Xaa can be any naturally occurring amino acid
  VARIANT 65: note = Xaa can be any naturally occurring amino acid
  VARIANT 72: note = Xaa can be any naturally occurring amino acid
  VARIANT 77: note = Xaa can be any naturally occurring amino acid
  VARIANT 84: note = Xaa can be any naturally occurring amino acid
  VARIANT 86: note = Xaa can be any naturally occurring amino acid
  VARIANT 115: note = Xaa can be any naturally occurring amino acid
  VARIANT 122: note = Xaa can be any naturally occurring amino acid
  VARIANT 134: note = Xaa can be any naturally occurring amino acid
  VARIANT 221: note = Xaa can be any naturally occurring amino acid
  VARIANT 246: note = Xaa can be any naturally occurring amino acid
  VARIANT 266: note = Xaa can be any naturally occurring amino acid
  VARIANT 270: note = Xaa can be any naturally occurring amino acid
  VARIANT 273: note = Xaa can be any naturally occurring amino acid
  VARIANT 305: note = Xaa can be any naturally occurring amino acid
  VARIANT 364: note = Xaa can be any naturally occurring amino acid
  VARIANT 368: note = Xaa can be any naturally occurring amino acid
  VARIANT 371: note = Xaa can be any naturally occurring amino acid
MIKNIHNLNXYDYELXKXYXSSXPVDKRAESKLLVYXXKKIIDSSFKLISNYLPKNSTLFFNDSXVINGRLXFENKXGAKIEIXIXDEKISSLLKSKSPLLLKVLIGNKKKWKGXERLEKKXNGITIKIQKIKXKVSFEWDKDLSFDDILVKSGIIPLPPYIKRDTESSDYYNYQTVYSKNKGSIAAPTAGLHFNNDLIYDLKKNHKVDFFTLHVGLGTFXPIDSENIENHNMHSEEVIINKENIXNIYNSENITAVGTTSLRVLXSIYXLGXIIEKKKYNYEISQEIQKKKFKLNLKESCKKIXDHFNFNKTNELRFNSKIFIYPGYSFKVCDQLITNFHYPKSSLILLIASFIGKDWREVYXFAKXKNXRFLSYGDSSLLFRK

SEQ ID NO: 68654 - protein, 348 aa, Marinoscillum sp.; identical to SEQ ID NO: 66576
  REGION 1..348: note = tr|A0A2D7TGN2|A0A2D7TGN2_9BACT S-adenosylmethionine:tRNA ribosyltransferase-isomerase; OS = Marinoscillum sp. OX=2024838 GN=queA PE=3 SV=1
  VARIANT 68: note = Xaa can be any naturally occurring amino acid

SEQ ID NO: 68655 - protein, 348 aa, Marinospirillum alkaliphilum
  REGION 1..348: note = tr|A0A1K1VY41|A0A1K1VY41_9GAMM S-adenosylmethionine:tRNA ribosyltransferase-isomerase; OS = Marinospirillum alkaliphilum DSM 21637 OX=1122209; GN = queA PE=3 SV=1
MQRSDFHFDLPDELIARFPTAERRGSRLLVLKDQQLEHRQFPDLLDYLQPGDLMVFNNTRVIPARLFGQKATGGKIEVLIERPLDEHRALAHIRASKAPKQGSRLLLEGGIEAECTGRQGALFCLTFLGDTPLLQLLEQHGHLPLPPYIDRADAEEDRERYQTVYAQRPGAVAAPTAGLHFDEALLQQIRDKGVQTAFVTLHVGAGTFQPVKADRLEDHEMHSEWLEVTAEVAAQVQATQAAGGRIIAVGTTSVRCLETASQSGEIHPYTGETSIFIYPGYRWRCVDLLVTNFHLPESTLLMLVSSFAGYQLVMQAYQAAVAEQYRFFSYGDAMLLFRNPDQTHPEKG

SEQ ID NO: 68656 - protein, 345 aa, Marinospirillum celere
  REGION 1..345: note = tr|A0A1I1J6B1|A0A1I1J6B1_9GAMM S-adenosylmethionine:tRNA ribosyltransferase-isomerase; OS = Marinospirillum celere OX=1122252 GN=queA PE=3 SV=1
MQRSDFHFELPDELIARYPAAERRGSRLLVLEGQQVSHRQFPDLLDYLKPGDLMVFNNTRVIPARLFGQKETGGKIEVLIERPLDEHRALAHIRSSKSPKAGTRLLLEGGIEAECTGREGALFCLTFLNQEPLLELLENHGHLPLPPYIDREDQQEDKERYQTVYAQHPGAVAAPTAGLHFDDQLLEQIRKKGIETAFVTLHVGAGTFQPVKVDKLEEHQMHSEWLEVTPQVAEQVRTTQQRGGRVIAVGTTSVRCLETASRSGEIQAYTGDTQIFIYPGYQWQCVDLLITNFHLPESTLLMLVSSFAGHQPIMQAYQEAVRNKYRFFSYGDAMLLSRNSAQESQ

SEQ ID NO: 68657 - protein, 356 aa, unidentified
  source 1..356: note = Marinosulfonomonas sp.
  REGION 1..356: note = tr|A0A2G2B6S4|A0A2G2B6S4_9RHOB S-adenosylmethionine:tRNA ribosyltransferase-isomerase; OS = Marinosulfonomonas sp. OX=2030815 GN=queA PE=3 SV=1
  VARIANT 312: note = Xaa can be any naturally occurring amino acid
MKLSDFDFDLPENLIATRPARPRSASKMLVAGPDAIEDANAFDLPRFLQPDDRLILNDTKVIPARLFGTRNRGQGAGQTNARMNVTLLEPLPGDHWRALIKPLKKIRIGEEIHFKGGLIAALINKEDGVATLEFNLSGYAFDAALLEVGAMPLPPYIAAKRAADALDMDDYQTVWARHSGAVAAPTASLHFDHDLLEQLRAKGVKFTHVTLHVGAGTFLPVKVDNIKDHKMHAEWGEVTKQAADEINQTRASGGRIIPVGTTALRLIETAANQNGEITPWAGDTDIFISPGYRFRVADALITNFHLPKSTLXMLVSALMGSERIQEIYAHAIAGNYRFFSYGDASLLSPRAETRQS

SEQ ID NO: 68658 - protein, 361 aa, unidentified
  source 1..361: note = Marinosulfonomonas sp.
  REGION 1..361: note = tr|A0A0P9CLD3|A0A0P9CLD3_9RHOB S-adenosylmethionine:tRNA ribosyltransferase-isomerase; OS = Marinosulfonomonas sp. PRT-SC04 OX=1527300 GN=queA PE=3; SV = 1
MKLSDFDFDLPEDLIATRPASPRTSARLLVATGTELRDQQVSDLPDIFRAGDRLVLNDTKVIPARLFGLRHRDSAQGAVAAKIEVTLLEPQPDGCWMALVKPLRKLKIGEDVVFSDDLSARLIDKVDGTAMLKFNLTGDDFDAALAQSGAMPLPPYIAAKRPADAQDHHDYQTVFARHKGAVAAPTASLHFDTDLLAEIAEKGVTFSHVTLHVGAGTFLPVKVDDVSQHKMHSEWGEVTQQAADEINATHKAGGRIIAVGTTALRLIESAGTEDGQLHPWRGSTDIFICPGYKFRISDALMTNFHLPKSTLMMLVSALMGSDAVRAIYRHAIDQGYRFFSYGDASILFPSGESRREGETRR

SEQ ID NO: 68659 - protein, 351 aa, Marinovum algicola
  REGION 1..351: note = tr|A0A0H4KUN0|A0A0H4KUN0_9RHOB S-adenosylmethionine:tRNA ribosyltransferase-isomerase; OS = Marinovum algicola DG 898 OX=988812 GN=queA PE=3 SV=1
MQLSDFDFDLPQDRIATRPARPRSSARLLVAEGDAVTDAHVFDLPDWLRPGDRLVLNDTRVIPARLSGSRRREGAQGPTEARIGVTLLEPQADGTWSALIKPLKKVADGEVIRFSDALSAVMEARAEGQGLLRFNLEGEDFDAALAEAGAMPLPPYIEALRPADAQDREDYQTVWAARKGAVAAPTASLHFDAALLAALEARGIGFTKVTLHVGAGTFLPVKVEDVTTHKMHAEWGEVSEEAAAEIAATKAAGGRVIPVGTTALRLIETAARDTGAIRPWQGETDIFIYPGFAFRVTDALMTNFHLPRSTLMMLVAALMGRDRILRVYDHAIASGYRFFSYGDASLLIPQR

SEQ ID NO: 68660 - protein, 352 aa, Marinovum sp.
  REGION 1..352: note = tr|A0A2D7SGI2|A0A2D7SGI2_9RHOB S-adenosylmethionine:tRNA ribosyltransferase-isomerase; OS = Marinovum sp. OX=2024839 GN=queA PE=3 SV=1
MRLEDFDFELPTELIALRPQKPRTSAKLLVANEKSINDYCVNDLVRLLRPGDRLVLNNTKVIPARLLGTRTRKIDLTNVAEAKINVNLIERKASDTWIALVKPLRKLNLGESLDFGSGLKAQLIDKQNGTAKFLFNKKGQELEESLSVVGSMPLPPYIANKRPVDVRDDVDYQTIWAEEAGSVAAPTASLHFDKKLLLELEEIGILITFVTLHVGAGTFLPVKVDKISEHKMHPEIGYISEAAALEINETKSQGNRVIPVGTTALRLIESAAREYGIINEWSGETDIFIYPGFQFKITDGLVTNFHLPKSTLLMLVSALMGSDCIRKIYAHAIQKKYRFFSYGDASLLLKKL

SEQ ID NO: 68661 - protein, 352 aa, Marinovum sp.
  REGION 1..352: note = tr|A0A2D7LE45|A0A2D7LE45_9RHOB S-adenosylmethionine:tRNA ribosyltransferase-isomerase; OS = Marinovum sp. OX=2024839 GN=queA PE=3 SV=1
MKLEDFDFELPTDLIALRPKTPRVSARLLVATDNTIDDLIVSDLVNLLRPGDRLVLNNTKVIPARLSGTRTRTISPKKIVTAKIAINLIERVAKDTWVALVKPLRKLDLGEIIDLGLGLNAKITHKSNGTATLCFNKCGQELDESLYAIGSMPLPPYIEKKRSADSRDVVDYQTIWAKEPGSVAAPTASLHFDKELLTKLKRLGVTTTFVTLHVGAGTFLPVKANYISEHQMHPEIGYISETAATEINETKSSGNRVIPVGTTALRLIESAAQDDGLVNAWSGQTDIFIYPGFNFKVADGLMTNFHLPKSTLLMLVSALMGADRIKKIYAHALQKKYRFFSYGDASLLLKKL

SEQ ID NO: 68662 - protein, 344 aa, unidentified
  source 1..344: note = Mariprofundus aestuarium
  REGION 1..344: note = tr|A0A2K8KWE7|A0A2K8KWE7_9PROT S-adenosylmethionine:tRNA ribosyltransferase-isomerase; OS = Mariprofundus aestuarium OX=1921086 GN=queA PE=3 SV=1
MQVSDFDFELPEHLIAKKPLQQRDASRLLCLASSDDAIVDAMIRDLPALVKPGDLWVLNDTRVIPARLVGVKPSGGKVEVLLLEPAGENHIWLAWGKSNKPLKPGTVVNFSDEFSAEVLSRDGKNIEVLLRADDVAAAIEVHGHMPLPPYIDRPDSEEDKERYQTVFARHAGAVAAPTAGLHLTAELMAAMQDAGASFAHVTLHVGPGTFQPVQVDDVDSHVMHEEAYIVPAETAAQVNLAKAEGRRVVAVGTTSLRTLEAASAGGELKAGAGRTSIFIYPGYHFQIVDALLTNFHLPKSTLIMLVAALAGRDRVLAAYAHAREEEYRFYSYGDAMFVPRRCES

SEQ ID NO: 68663 - protein, 344 aa, unidentified
  source 1..344: note = Mariprofundus ferrinatatus
  REGION 1..344: note = tr|A0A2K8L593|A0A2K8L593_9PROT S-adenosylmethionine:tRNA ribosyltransferase-isomerase; OS = Mariprofundus ferrinatatus OX=1921087 GN=queA PE=3 SV=1
MQVSDFDFELPEYLIAKRPLEARDASRLLCIPEDGGALVDSMIRDLPLLVKPGDVWVLNDTRVIPARLVGNKPSGGRVEILLLEPAGENNVWLAWGKSNKPLKPGTIVVFSDSFSAEVLTRDGKNVEVLLCADDVPAAIESHGHMPLPPYIDRPDSREDRERYQTVFARHAGAVAAPTAGLHLTSELMAAMQQAGATFAHVTLHVGPGTFQPVQVDDVNSHVMHEEAYIVPEQTAETVNRAKAEGRRIVAVGTTSLRTLEAASAAGELKAGAGRTSIFIYPGYHFRTVDALLTNFHLPKSTLIMLVAALAGRARVLDAYTHARESGYRFYSYGDAMFVPKLSDA

SEQ ID NO: 68664 - protein, 342 aa, Mariprofundus ferrooxydans
  REGION 1..342: note = tr|Q0EXQ8|Q0EXQ8_9PROT S-adenosylmethionine:tRNA ribosyltransferase-isomerase OS=Mariprofundus ferrooxydans PV-1 OX=314345 GN=SPV1_00902 PE=3 SV=1
MRVSDYDFDLPEKSIASQPLRQRDASRLLTLSGEDGQLTDRWIRDLPQLVEPGDVWVVNDTRVIPARLIGQKSSGGKVEVLLLEPSDKTDVWRAWGKSNKPLKAGTVITFTNTFSALVLSRDGKDILVHLLADDVPAAIEAHGHMPLPPYINRPDSEEDKQRYQTVFARHAGAVAAPTAGLHLTTELMAAMEEAGAVFAHVTLHVGPGTFQPVQVENLDEHVMHEEGYIVPEETATLVNMARSQGRRIVAVGTTSLRTLEAAGASGELLAGSDRTSIFITPGYHFSYGRCAVDQLSPAQIHIDYAGVCTGRAGACAGSIYACQRGRLPLLLLRGCDVCTGLS

SEQ ID NO: 68665 - protein, 65 aa, Mariprofundus ferrooxydans
  REGION 1..65: note = tr|Q0EXQ7|Q0EXQ7_9PROT S-adenosylmethionine:tRNA ribosyltransferase-isomerase OS=Mariprofundus ferrooxydans PV-1 OX=314345 GN=SPV1_00907 PE=3 SV=1
MVDALLTNFHLPKSTLIMLVSALAGRERVLAAYTHAREEGYRFYSYGDAMFVPVYPDTAAMEAST

SEQ ID NO: 68666 - protein, 344 aa, unidentified
  source 1..344: note = Mariprofundus micogutta
  REGION 1..344: note = tr|A0A1L8CK18|A0A1L8CK18_9PROT S-adenosylmethionine:tRNA ribosyltransferase-isomerase; OS = Mariprofundus micogutta OX=1921010 GN=queA PE=3 SV=1
MQVSDFDFELPERLIAKKPLEQRDASRLLCLSDSDDAFVDGLIRDLSRYVQPGDVWVLNDTKVIPARLVGRKKSGGKVEVLLLEPMDQPNVWLAWGKSNKPLKPDTEIEFADGFYAKVISREGKNIEVLLLAEDVGHAIENYGHMPLPPYIDRPDTEEDKARYQTVFARHAGAVAAPTAGLHLTDALMHKMQIAGASFAHVTLHVGPGTFQPVQVDDVNSHVMHEEAYIVPAETARMVNQAKAEGRRVIAVGTTSLRTLEAASADGELQAGAGRTSIFIYPGYHFQIVDALLTNFHLPKSTLIMLVAALAGRERVLNAYDFARVHDYRFYSYGDAMFVPRSTNS

SEQ ID NO: 68667 - protein, 342 aa, Mariprofundus sp.
  REGION 1..342: note = tr|A0A498DY31|A0A498DY31_9PROT S-adenosylmethionine:tRNA ribosyltransferase-isomerase; OS = Mariprofundus sp. EBB-1 OX=2650971 GN=queA PE=3 SV=1
MQVSDFNFELPEHLIAKQPLKQRDASRLLCLSDSGCTDARISDLAALVQPGDVWVLNDTKVIPARLTGTKPSGGKVEVLLLEPTGDDNCWIAWGKCNKPLKPDTIIHFSDNFSAKVLRRDGKQIEVQLFADDVGTAIETHGHMPLPPYINRPDTEEDKARYQTVFARHSGAVAAPTAGLHLTTALMAAMQQAGAEFVHLTLHVGPGTFQPVQVDSLSEHIMHEEAYIVPAETAKTINQAKADGKRIVAVGTTSLRTLEAASQHGTLQAGAARTSIFIYPGYHFQMVDALLTNFHLPKSTLIMLVAALAGQDRVLAAYEHAKAHDYRFYSYGDAMFVPRLESA

SEQ ID NO: 68668 - protein, 348 aa, unidentified
  source 1..348: note = Marisediminitalea aggregata
  REGION 1..348: note = tr|A0A1M5GXB3|A0A1M5GXB3_9ALTE S-adenosylmethionine:tRNA ribosyltransferase-isomerase; OS = Marisediminitalea aggregata OX=634436 GN=queA PE=3 SV=1
MKLSDFSFTLPEHLIAKYPTPDRTASRLLHLNGTTGDVHHKQFQQMLDLVEPGDLLVFNNTRVIPARLLGQKASGGKVEVLIERIVDDNNALAHVRASKAPKPGTDLLLEGAVSVTVTGRQDALFELRFNGDATVLEQLEQYGHMPLPPYIDRPDEQADKERYQTVYNQAPGAVAAPTAGLHFDDALLERLQQKGVNLAYVTLHVGAGTFQPVRVDNILEHKMHSEFAIVPEHVVNAVRATKAAGKRVIAVGTTSVRSLESSALEASKGEVLVPYQSDTDIFIYPGFEFKVVDAMFTNFHLPESTLIMLISAFAGKDNVLAAYEQAIEQEYRFYSYGDSMFIEKATNA

SEQ ID NO: 68669 - protein, 337 aa, unidentified
  source 1..337: note = Marispirochaeta aestuarii
  REGION 1..337: note = tr|A0A1Y1S152|A0A1Y1S152_9SPIO S-adenosylmethionine:tRNA ribosyltransferase-isomerase; OS = Marispirochaeta aestuarii OX=1963862 GN=queA PE=3 SV=1
MLTRDFSFDLPEHLIAQFPPEHRGESRLLLLDRKTGTSSDHVMAEFPELLPENSLVVFNNTRVRKSRIFGRTENGGSVEFLLLKEREPGLWDAVVQRRKRQKIGRRYSFPEGVEAVLVDKPGDRGILRFDPPLDKAYLERNGAIPLPPYIRRSADESDSERYQTVYSREEGSVAAPTAGLHFTPAILHRIRERAEIRYVTLHVGIGTFAPIRTEHLSDHRMHTEEYEVSVETADAVNRARREKRPVVAVGTTTVRTLESAFSEGKLAAGRNSTDLFISPGYRFKIVDHMFTNFHTPGSSLLVMVSAFAGREVILEAYAEAVRKEYRFFSYGDAMFIQ

SEQ ID NO: 68670 - protein, 357 aa, Maritalea mobilis
  REGION 1..357: note = tr|A0A4R6VQK3|A0A4R6VQK3_9RHIZ S-adenosylmethionine:tRNA ribosyltransferase-isomerase; OS = Maritalea mobilis OX=483324 GN=queA PE=3 SV=1
MRVDEFDFTLPDDLVALHPAVPRDSARMLVVNPATDLQDRSVSELTDFLTENDVLVVNNTKVLPAELVGTRTRGEAVAKISVNLHKRVDPQQWRAFARPAKKLAIGDQVEFLRESVDPLRAEVVEKADAGEVQLKFAEKGAELDEAIKARGAMPLPPYIGAKRDHEDQDDTDYQTIYAKHDGAVAAPTAGLHFTDRLLDAIRAKGVKIEEVTLHVGAGTFLPVKVDDTEDHKMHAEWGEITSSTIETINEAKAKGGRVIAVGTTSLRLLESASMDGELKPFCGETDIFITPGYQFNAVDVLMTNFHLPKSTLFMLVSAFSGFETMQKAYKHAIDSKYRFYSFGDASLLFRADLAAKD

SEQ ID NO: 68671 - protein, 358 aa, Maritalea myrionectae
  REGION 1..358: note = tr|A0A2R4MFG0|A0A2R4MFG0_9RHIZ S-adenosylmethionine:tRNA ribosyltransferase-isomerase; OS = Maritalea myrionectae OX=454601 GN=queA PE=3 SV=1
MRVDDFDFTLPDDLVALHPAVPRDSARMLVVDPAKEIQDRSVSELLEFLSENDVLVVNNTKVLPAELVGTRTRGDAVAKISVNLHKRVDPSQWRAFARPAKKLAIGDHVEFLREGVDPLRAEVVEKADAGEVQLKFAEKGAELDEAIKARGAMPLPPYIGAKRDHEDQDDTDYQTIYAKHDGAVAAPTAGLHFTDRLLDAIRAKGVKIEEVTLHVGAGTFLPVKVDNTEDHKMHAEWGEITPATIDTIKNARTKGGRVFAVGTTSLRLLESAAFDGELKPFCGETDIFITPGYRFNAVDVLMTNFHLPKSTLFMLVSAFSGFETMQKAYKHAIDNKYRFYSFGDASLLFRDDSADKDK

SEQ ID NO: 68672 - protein, 355 aa, Maritimibacter alkaliphilus
  REGION 1..355: note = tr|A3VE41|A3VE41_9RHOB S-adenosylmethionine:tRNA ribosyltransferase-isomerase OS=Maritimibacter alkaliphilus HTCC2654 OX=314271 GN=queA PE=3 SV=1
MTTDAIGTRLSDYDFDLPEDLIATRPARPRSSARLLVAERARITDGVVTDLVDWLRPGDRLVLNDTRVIPARLEGTRTRGEAQARIEVTLLAPDAQPGAWSALVKPLRKVKDGETIDFAAGLSATVLSRSEGQAVLTFNLTGAAFDAALAEAGRMPLPPYIEAKRRADAQDREDYQTVWARQTGAVAAPTASLHFDDALLAALDARGVARTHVTLHVGAGTFLPVKVDDVSDHKMHAEWGEVTEAAAAEINATRAAGGRIIPVGTTALRLIESAAAAPGRIEPWRGPTDIFIRPGYAFKITDGLMTNFHLPKSTLMMLVSALMGMERMREVYAHAIENRYRFFSYGDASLLLPNG

SEQ ID NO: 68673 - protein, 357 aa, Maritimibacter sp.
  REGION 1..357: note = tr|A0A1X7PZ98|A0A1X7PZ98_9RHOB S-adenosylmethionine:tRNA ribosyltransferase-isomerase; OS = Maritimibacter sp. HL-12 OX=1162418 GN=queA PE=3 SV=1
MNDQDRAEGSRLSDYDFDLPEHLIATRPARPRSSARLLVATPGSLTDATAIELPDFLRPGDRLVLNDTRVIPARLRGTRQRGEAVAGIDVTLLEPLPGGAWLALLKPLRKVAEGEEIVFSDQLSARLVAKEGGEARLAFNLSGPDFDAALEEAGQMPLPPYIEARRKPDARDRDDYQTVWAEKPGAVAAPTASLHFDDALLAALVARGVATTRVTLHVGAGTFLPVKTDDLTDHRMHAEWGEVTPEAAAEINATKAAGGRIIPVGTTALRLIESAADAPGRIAPWRGPTDIFIRPGFPFRLSDGLMTNFHLPKSTLMMLVSALMGIGRMREVYAHAIARDYRFFSYGDASLLLPNED

SEQ ID NO: 68674 - protein, 356 aa, Maritimibacter sp.
  REGION 1..356: note = tr|A0A2D9YMW8|A0A2D9YMW8_9RHOB S-adenosylmethionine:tRNA ribosyltransferase-isomerase; OS = Maritimibacter sp. OX=2003363 GN=queA PE=3 SV=1
MKLSDFDFDLPDDLIATRPARPRSSARLLVAGPDWTEDAHVFDLVNWLQPGDRLVLNDTKVIPARLFGTRTRQTGQGPATARIEATLVEPTASGTWQALIKPLRKVAEGEEIVFSDALTARLVTRGDGMGELAFNLTGDDFDAALAQAGAMPLPPYIAAKRPADEADREDYQTVWAERSGAVAAPTASLHFDQPLLAALAERGVGFTHVTLHVGAGTFLPVKVDDVSQHKMHAEWGEVSATAAAEIAGTKAAGGRVIPVGTTALRLIETAARDSGAIAPWTGDTDIFIRPGFDFHVADALMTNFHLPKSTLLMLVSALMGRDRILDIYDHAVRGGYRFFSYGDASLLLPKGGKRHD

SEQ ID NO: 68675 - protein, 348 aa, unidentified
  source 1..348: note = Marivirga lumbricoides
  REGION 1..348: note = tr|A0A2T4DVA4|A0A2T4DVA4_9BACT S-adenosylmethionine:tRNA ribosyltransferase-isomerase; OS = Marivirga lumbricoides OX=1046115 GN=queA PE=3 SV=1
MKLSEFKFDLPLKLVAQHPAEDRDLSKLLVLHKDTGKIEHKVFKDIVDYFDDGDVLVTNNTKVFPARLYGNKEKTGAQIEVFLLRELNKEMHLWDVLVDPARKIRVGNKLYFGDGELVAEVIDNTTSRGRTIRFLYDGDDEAFYKMVDTLGETPLPKYIKRPVEEADRDRFQTIYAEEIGAVAAPTAGMHFTRQILKRMELKGVKTSPITLHIGLGTFRPVDVEDLTKHKMDSENYKVPSKTAEIVNEALDNKKRVCAVGTTSMRSMESSVNANNRLKGNEGWTDRFIFPPYDFKICNALLTNFHMPESTLLMMACAFGGYENVINAYKVAIKENYRFLSYGDAMLII

SEQ ID NO: 68676 - protein, 348 aa, Marivirga sericea
  REGION 1..348: note = tr|A0A1X7LHR1|A0A1X7LHR1_9BACT S-adenosylmethionine:tRNA ribosyltransferase-isomerase; OS = Marivirga sericea OX=1028 GN=queA PE=3 SV=1
MKLSEFKFELPLKLVAQHPAEDRDLAKLMVLHKDTGEIEHKTFKDIVDYFDEGDILVTNNTKVFPARLYGNKEKTGAQIEVFLLRELNKEMHLWDVLVDPARKIRVGNKLYFGDGELVAEVIDNTTSRGRTIKFLYDGDDQDFYKLVDSLGETPLPKYIKRPVEEADRERFQTIYAEEVGAVAAPTAGMHFTRQVLKRMELKGIKTSPITLHIGLGTFRPVDVEDLTKHKMDSENFKVPKKTAELVNESLDSKKRVCAVGTTAMRSMESSVTANNHLKENEGWTDRFIFPPYEFKICNALLTNFHMPESTLLMMAAAFGGYDNVMKAYQEAIKHKYRFLSYGDAMLII

SEQ ID NO: 68677 - protein, 406 aa, Marivirga sericea
  REGION 1..406: note = tr|A0A1X7INI5|A0A1X7INI5_9BACT S-adenosylmethionine:tRNA ribosyltransferase-isomerase; OS = Marivirga sericea OX=1028 GN=queA PE=3 SV=1
MNLLEIASKIDLQKYQYTLPEERIAKFPLEERDHSQLLVYQNGDIEHQHFYDLANHLPKNCSLIFNNTKVIPARIHFKKQSGANIEIFLLSPLKPTPEVAQAMLVKNKCVWHCMVGNRKRWKAGDALERFFETDYGKIKVIATYANFDKNEIQFEWDNEAVPFVEIVELMGTTPLPPYLNRSATEEDKPRYQTVYSKNEGAVAAPTAGLHFTDAIVENIQKTHAIHELTLHVGAGTFQPIKTENVLEHDMHCEQIQIEKSTIEFLATTDNPIVAVGTTSIRSLESAYWFGIELLKKEQDTFHIKKLYPYENGFDNLPTRKESFQAILEFMESQQMESLHGDTEIFIFPGYQFQVVNGLITNFHQPESTLILLIAALIGENWQKVYHEALNNSYRFLSYGDSSLLLP

SEQ ID NO: 68678 - protein, 406 aa, Marivirga tractuosa
  REGION 1..406: note = tr|E4TRG8|E4TRG8_MARTH S-adenosylmethionine:tRNA ribosyltransferase-isomerase OS=Marivirga tractuosa (strain ATCC 23168 / DSM 4126 / NBRC 15989 / NCIMB 1408 / VKM B- 1430 / H-43) OX=643867 GN=queA PE=3 SV=1
MNLLEKASQIDLNKYQYELPEERIAKFPLEKRDHSQLLVYQKGNIQHQHFYDIKSHLPENSSLIFNNTKVIPARIHFQKQSGAKIEIFLLSPLEPTPEVAQAMLAKKKCIWHCMVGNRKRWKIQDQLERFFETEYGKIQVTATYADYEQNHIQFEWDNDAVPFVEIVELMGTTPLPPYLNRTATDEDKPRYQTVYSKNEGAVAAPTAGLHFTDTILKDIQKSHSIHELTLHVGAGTFQPIKAENVLEHDMHCEQIQIDKSTIEFLAQSENPITAVGTTSIRSLESAYWFGVQLINKEARTFHITKLYPYEKGFDELPRRKESFQAILNYMKAENVESLHGDTEIFIFPGYEFQVVNGLITNFHQPESTLILLIAAFIGEKWQKVYDEALKNDYRFLSYGDSSLLLP

SEQ ID NO: 68679 - protein, 348 aa, Marivirga tractuosa
  REGION 1..348: note = tr|E4TTF0|E4TTF0_MARTH S-adenosylmethionine:tRNA ribosyltransferase-isomerase OS=Marivirga tractuosa (strain ATCC 23168 / DSM 4126 / NBRC 15989 / NCIMB 1408 / VKM B- 1430 / H-43) OX=643867 GN=queA PE=3 SV=1
MKLSEFKFELPLKLVAQHPAEDRDLAKLMVLHKDTGEIEHKTFKDIVDYFDEGDILVTNNTKVFPARLYGNKEKTGAQIEVFLLRELNKEMHLWDVLVDPARKIRVGNKLYFGDGELVAEVIDNTTSRGRTIKFLYDGDDQDFYKLVDSLGETPLPKYIKRPVEEADRERFQTIYAEEVGAVAAPTAGMHFTRQVLKRMELKGIKTSPITLHIGLGTFRPVDVEDLTKHKMDSENFKVPVKTAELVNESLNSKKRVCAVGTTAMRSMESSVTANNRLKENEGWTDRFIFPPYEFKICNALLTNFHMPESTLLMMAAAFGGYDNVMNAYQEAIKHKYRFLSYGDAMLII

SEQ ID NO: 68680 - protein, 348 aa, Marivita cryptomonadis
  REGION 1..348: note = tr|A0A1X4NTA4|A0A1X4NTA4_9RHOB S-adenosylmethionine:tRNA ribosyltransferase-isomerase; OS = Marivita cryptomonadis OX=505252 GN=queA PE=3 SV=1
MKLSDFDFHLPEDLIATRPASPRSSARLLHVEAGVIADRIVNHLPDILRPTDRLVLNDTKVIPARLFGVRHRVGEAGATEAKIEVTLLEPQADGTWSALVKPLKKLREGEDVVFSSDLTACLEDRRDGQALLRFNLTGDDFDAALAEAGAMPLPPYIAAKRPADAQDKQDYQTIWARNSGAVAAPTASLHFDEALVAALNARGVGMSFVTLHVGAGTFLPVKVEDVTTHKMHAEWGRVSETAAAEIAATKAAGGRVIPVGTTALRLIESAARGGSIQQWEGDTDIFIYPGFEFQVTDGLMTNFHLPKSTLMMLVSALMGQDRVREIYAHAIEERYRFFSYGDSSLLIP

SEQ ID NO: 68681 - protein, 348 aa, unidentified
  source 1..348: note = Marivita geojedonensis
  REGION 1..348: note = tr|A0A1X4NLN3|A0A1X4NLN3_9RHOB S-adenosylmethionine:tRNA ribosyltransferase-isomerase; OS = Marivita geojedonensis OX=1123756 GN=queA PE=3 SV=1
MKLSDFDFDLPEDLIATRPASPRSSARLLHAEAGGIADRIVNQLPDILRPTDRLVLNDTKVIPARLFGVRHRHGAAGATEAKIEVTLLEPQASGLWAALVKPLKKLRDGEEVVFSRDLSATLEGRSEGQALLRFNLAGQDFDEALAQAGAMPLPPYIAAKRPADEKDKEDYQTIWARNAGAVAAPTASLHFDEPLVAALRARGVGMSFVTLHVGAGTFLPVKVEDVTTHRMHAEWGHVSEAAAAEIAATKASGGRVIPVGTTALRLIESAARGGSIRPWEGDTDIFIYPGFEFRVADGLMTNFHLPKSTLMMLVSALMGQTRIKEIYAHAIEHRYRFFSYGDSSLLIP

SEQ ID NO: 68682 - protein, 348 aa, Marivita hallyeonensis
  REGION 1..348: note = tr|A0A1M5VYU1|A0A1M5VYU1_9RHOB S-adenosylmethionine:tRNA ribosyltransferase-isomerase; OS = Marivita hallyeonensis OX=996342 GN=queA PE=3 SV=1
MKLSDFDFDLPDDLIATRPASPRSSARLLHAEAGGIADRIVSDLPEILRPSDRLILNDTRVIPARLFGVRKRSGEAGPSEAKIEVTLLEPQANGSWSALVKPLKKVKDGETITFSPDLSARVDSRAEGQAFLRFNLTGEDFDNALAHAGAMPLPPYIAAKRHADDRDKEDYQTIWARNAGAVAAPTASLHFDEALVAALKARGVGMTFVTLHVGAGTFLPVKVEDVTTHKMHAEWGHVSEDAAAEIRATKAAGGRIIPVGTTALRLIESAARDEGIAPWEGDTDIFIYPGFEFRVTDGLMTNFHLPKSTLMMLVSALMGQERIREIYAHAIAERYRFFSYGDSSLLIP

SEQ ID NO: 68683 - protein, 348 aa, Marivita sp.
  REGION 1..348: note = tr|A0A316KLW7|A0A316KLW7_9RHOB S-adenosylmethionine:tRNA ribosyltransferase-isomerase; OS = Marivita sp. XM-24bin2 OX=2133951 GN=queA PE=3 SV=1
MKLSDFDFHLPEELIATRPASPRSSARLLYAEAGGIADRIVNQLPEILRPTDRLVLNDTKVIPARLFGVRRRMGDTGLTEAKIEVTLLEPQADGTWSALVKPLKKLREGEVVEFSSDLSASLEGRSDGQALLRFNLTGDDFDAALAEAGAMPLPPYIAAKRPADEKDKEDYQTIWARNAGAVAAPTASLHFDEALVAALKARGVGMSFVTLHVGAGTFLPVKVEDVTTHKMHAEWGRVSETAAAEIAETKAAGGRVIPVGTTALRLIESAARGGSIQPWEGDTDIFIYPGFEFQVTDGLMTNFHLPKSTLMMLVSALMGQERVREIYAHAIENRYRFFSYGDSSLLIP

SEQ ID NO: 68684 - protein, 349 aa, unidentified
  source 1..349: note = Marivivens niveibacter
  REGION 1..349: note = tr|A0A251WVY6|A0A251WVY6_9RHOB S-adenosylmethionine:tRNA ribosyltransferase-isomerase; OS = Marivivens niveibacter OX=1930667 GN=queA PE=3 SV=1
MKLSDFDFDLPENLIATRPAKPRSSARLLVAQGGQISDLTVMDLVDQLGAGDRLVLNDTRVIPARLTGLRHRVSAQGDVSAKIEVTLLEPRADGTWAALIKPLKKVKDGEDIVFSDDLSAKVEGRDEGQAHIRFNLTGDDFDAALAAAGAMPLPPYIAALRAPDDQDKEDYQTIWARNTGAVAAPTASLHFDDTLLAALRDKGVEFTYVTLHVGAGTFLPVKVDDISDHKMHSEWGHVSEKAAAEINATKAAGKRVVPVGTTALRLIESAAKDGAIAPWSAPTDIFITPGFEFQIADGLMTNFHLPKSTLMMLVSALAGVQEIKDIYAHAILQGYRFFSYGDASLLWRK

SEQ ID NO: 68685 - protein, 349 aa, Marixanthomonas ophiurae
  REGION 1..349: note = tr|A0A3E1QEG1|A0A3E1QEG1_9FLAO S-adenosylmethionine:tRNA ribosyltransferase-isomerase; OS = Marixanthomonas ophiurae OX=387659 GN=queA PE=3 SV=1
MKLSNFNFELPEELLAEYPASNRDEARLMVLNRKEKTIEHKMFKDLIDYFEEDDVMVLNNTKVFPARLFGNKEKTGARIEVFLLRELNPETRLWDVLVDPARKIRIGNKLYFGEDESLVAEVIDNTTSRGRTLRFLFDGSYEEFRSKLTELGETPLPKYIKRDVEPEDAERYQTIFAKEEGAVAAPTAGLHFSKHLLKRLEIKGINFAEVTLHVGLGTFSPVEVEDLSKHKMDSEEIAIPQESVDIINGGNNRKKRVCAVGTTVMRALESSVSSNLMLNPYAGWTNKFIFPPYDFSIANCMVTNFHTPKSTLLMMVAAFAGHDFVKEAYAEAVKEKYRFYTYGDAMLII

SEQ ID NO: 68686 - protein, 349 aa, Marixanthomonas sp.
  REGION 1..349: note = tr|A0A2U0I8L1|A0A2U0I8L1_9FLAO S-adenosylmethionine:tRNA ribosyltransferase-isomerase; OS = Marixanthomonas sp. HN-E44 OX=2174845 GN=queA PE=3 SV=1
MKLSNFNFDLPAELLAEYPASNRDEARLMVLNRKEKTIEHKMFKDLIDYFEEDDVLVLNNTKVFPARLFGNKEKTGARIEVFLLRELNPETRLWDVLVDPARKIRIGNKLYFGEDESLVAEVIDNTTSRGRTLRFLFDGSYEEFRNKLTELGETPLPKYIKREVEPEDADRYQTIYAKEEGAVAAPTAGLHFSKHLLKRLEIKGINFAEVTLHVGLGTFSPVEVEDLSKHKMDSEEIVLPQNSVDIINQGINRKKRVCAVGTTVMRALESSVSSNSMLNPYAGWTNKFIFPPYDFSIANCMVTNFHTPKSTLLMMVAAFAGHDFVKEAYAEAIKEKYRFYTYGDAMLII

SEQ ID NO: 68687 - protein, 351 aa, unidentified
  source 1..351: note = Marmoricola ginsengisoli
  REGION 1..351: note = tr|A0A3N0CNY2|A0A3N0CNY2_9ACTN S-adenosylmethionine:tRNA ribosyltransferase-isomerase; OS = Marmoricola ginsengisoli OX=661483 GN=EFK50_03385 PE=3; SV = 1
MRILDEHPSTVFSSPADATAPAPPESRGLERDAVRLLVAGPDGVSHARVRDLASYLEPGDLVVVNDSATVAGELDAERLGAGPVVLHLATPLDDGTWVVEVRTAPSAERAILDAAPGDRFLAGSVVVDLVAPYPRTGSSPTGHGNRLWRASVSGPLPDRLAAHGRPIAYGYLPRRYPLSAYQTIFGTRPGSAEMPSAGRPFTPRVVTDLVARGVTIAPVTLHTGVSSQEAGEAPQAERYQVPETTARLVNTVRAGGGRIVAVGTTVTRALESAVEGDRVVARSGWTDRVVTPLHPPRIVTGLVTGWHDPQASHLLLVEAVAGRELSQRAYDEAVAHGYQWHEFGDTALLLP

SEQ ID NO: 68688 - protein, 350 aa, unidentified
  source 1..350: note = Marmoricola pocheonensis
  REGION 1..350: note = tr|A0A3N0GUQ8|A0A3N0GUQ8_9ACTN S-adenosylmethionine:tRNA ribosyltransferase-isomerase; OS = Marmoricola pocheonensis OX=661485 GN=EFL26_07140 PE=3; SV = 1
MLEERSTIHFEPAPDAVAPAPAEARGLSREDVRLLVASPEGLVHGRFRDLPDHLRAGDLVVVNDSATIPGEVDAESATRGPVVLHLATPLDDGTWVSEVRTPGDAARAILDAEPGDRFDAGPVTVTLVEPYPRTGSSPTGRGNRLWRAQVDGPLESHLDRHGRPIAYGYLSRRHPLSAYQTVFATRPGSAEMPSAGRPFTHGLVTRLVSKGVAIAPITLHTGVSSQEAGEAPQPERFAVPAATARLVNAVRAGGGRVVAVGTTVTRALESAVAEDGTVVARRGWTDRVVTPADPPRVVAGLVTGWHDPMASHLLLVEAVAGRELAQRAYEAAVAQEYLWHEFGDAALLLP

SEQ ID NO: 68689 - protein, 345 aa, Marmoricola sp.
  REGION 1..345: note = tr|A0A3L8P3A9|A0A3L8P3A9_9ACTN S-adenosylmethionine:tRNA ribosyltransferase-isomerase; OS = Marmoricola sp. 4Q3S-7 OX=2478913 GN=D9V37_10110 PE=3; SV = 1
MRTLETPTTRFAAASFAPSPPARRDDVRLLVARPSGVAHARFADLPDQLRAGDVVVVNDSATVNGEIDARSARHGPVVLHAATPLDDETWVVEVRTAPHAARAVLDAVPGERFTIGPHTVVLQAPYPEEGSSPTGQGDRLWRASVNGDLAAYLAAHGRPIAYGYLDRRYPLSAYQTVFGIRAGSAEMPSAGRPFTTALVTSLVARGVAVAPITLHTGVSSQEVGEGPQPERFSVPDATARLVNAVRAGGGRVVAVGTTVTRALESAVAADGRLVAASGWTTRVVTPAEPPRVVTGLVTGWHDPQASHLLLVEAVAGAELSQLAYDAAVSQRYAWHEFGDSCLMLP

SEQ ID NO: 68690 - protein, 359 aa, unidentified
  source 1..359: note = Martelella endophytica
  REGION 1..359: note = tr|A0A0D5LU80|A0A0D5LU80_9RHIZ S-adenosylmethionine:tRNA ribosyltransferase-isomerase; OS = Martelella endophytica OX=1486262 GN=queA PE=3 SV=1
MRVDLFDFDLPDENIALRPANPRDSARLLVVRPERADGVLEDHVVTDLPSFLRPGDALVFNDTKVIPAQLEGIRHRAGGEEVPVSATLHLRKADNIWHAFARPGKRIKPGDMLRFTSPDGETALEATVEEKREGGEVVLTFNARGAALDEALMRVGHVPLPPYIASKRAEDGKDRDDYQTVYARENGAVAAPTAGLHFTPRLMKALEEVGIEQHFVTLHVGAGTFLPVKADDTDDHVMHFERGIVSPETAEALNAVKARGGRIVSVGTTSLRLLESAAAEEGGIQPWEGETGIFITPGYRFRAVDMLMTNFHLPKSTLFMLVSAFSGLETMRSAYAHAIETGYRFYSYGDSSLLFRKDP

SEQ ID NO: 68691 - protein, 356 aa, Martelella mediterranea
  REGION 1..356: note = tr|A0A1U9Z3P6|A0A1U9Z3P6_9RHIZ S-adenosylmethionine:tRNA ribosyltransferase-isomerase; OS = Martelella mediterranea DSM 17316 OX=1122214 GN=queA; PE = 3 SV=1
MRVDLFDFDLPDENIALRPASPRDSARLLVVRPGEGLGDHVVSELPTFLRPGDALVFNDTKVIPAQLEGVRLREGGEEVPVSATLHLRKADNLWHAFARPGKRIKLGDVLRFVSADGATTLVATVDEKRDGGEVVLTFDAHGGVLDEAMMRVGHVPLPPYIASKRAEDGKDRDDYQTIYARENGAVAAPTAGLHFTPRLMQALEQAGIERHFVTLHVGAGTFLPVKADDTDDHVMHFERGIVSAETAAALNAVKARGGRIVSVGTTSLRLLESAATEDGRIAPWEGETGIFITPGYHFRAVDILMTNFHLPKSTLFMLVSAFSGLETMRAAYAHAIETGYRFYSYGDSSLLFRKDR

SEQ ID NO: 68692 - protein, 321 aa, Martelella mediterranea
  REGION 1..321: note = tr|A0A4R3NSM2|A0A4R3NSM2_9RHIZ S-adenosylmethionine:tRNA ribosyltransferase-isomerase; OS = Martelella mediterranea OX=293089 GN=queA PE=3 SV=1
MTEDHSVLDLPSFLNPGDALVFNDTKVIPAQLEGVRKRPGGQDVSVSVTLHLRSADNIWHAFAKPGKRIKAHDQMVFTSADGSMTLEATVAEKREGGEVALSFNARGGALDEALMQVGHVPLPPYIAAKRAEDDRDRDDYQTIYAREDGAVAAPTAGLHFTPRLFDALDKAGIERHFVTLHVGAGTFLPVKADDTDNHKMHFERGYVSEEAAAALNAVRARGGRIVSVGTTSLRLLESAATDNGVLQPWHGETGIFIQPGYRFKAVDVLMTNFHLPKSTLFMLVSAFCGLDTMQAAYAHAIKTGYRFYSYGDSSLLFRKDR

SEQ ID NO: 68693 - protein, 356 aa, Martelella sp.
  REGION 1..356: note = tr|A0A127CIR9|A0A127CIR9_9RHIZ S-adenosylmethionine:tRNA ribosyltransferase-isomerase; OS = Martelella sp. AD-3 OX=686597 GN=queA PE=3 SV=1
MRVDLFDFDLPDENIALRPASPRDSARLLVVRPGEGLADHVVSELPTFLKPGDALVFNDTKVIPAQLEGVRHREGGEEVPVSATLHLRKADNVWHAFARPGKRIKPGDVLRFVSADRATTLSATVEEKREGGEVALTFDARGGALDEALMRVGHVPLPPYIASKRAEDGRDRDDYQTIYARENGAVAAPTAGLHFTPRLLTALEEAGIEQYFVTLHVGAGTFLPVKAEDTDDHKMHFERGIVTTETAEALNAVKARGGRIISVGTTSLRLLESAAAEDGTLGAWEGETGIFITPGYRFRAVDMLMTNFHLPKSTLFMLVSAFCGLETMRAAYAHAIETGYRFYSYGDSSLLFRKDV

SEQ ID NO: 68694 - protein, 356 aa, Martelella sp.
  REGION 1..356: note = tr|A0A506UID4|A0A506UID4_9RHIZ S-adenosylmethionine:tRNA ribosyltransferase-isomerase; OS = Martelella sp. BGMRC2036 OX=2590451 GN=queA PE=3 SV=1
MRVDLFDFDLPDERIALRPANPRDSARLLLVEPGGEPMLSDHQVFDLPKFLRAGDALVFNDTKVIPAQLEGFRIRAGAQETPVSATLHLRSADNVWHAFAKPGKRIKQGDRLVFQKDGAQLEAEVTEKREAGEVVLTFSERGGALDEALMAVGHIPLPPYIASKRAEDGRDRDDYQTIYARERGAVAAPTAGLHFTPSLFEALDKAGIERHFVTLHVGAGTFLPVKADDTDDHKMHFERGYITDETASALNAVKARGGRIVSVGTTSLRLLESAARDDGTIPSWHGETGIFIQPGYRFKAVDALMTNFHLPKSTLFMLVSAFSGLETMQAAYAHAIASGYRFYSYGDSSLLMRKDR

SEQ ID NO: 68695 - protein, 341 aa, Marvinbryantia formatexigens
  REGION 1..341: note = tr|C6LJ54|C6LJ54_9FIRM S-adenosylmethionine:tRNA ribosyltransferase-isomerase OS=Marvinbryantia formatexigens DSM 14469 OX=478749 GN=queA PE=3 SV=1
MKTSDFYFDLPQELIAQDPLEDRSSSRLLVLDRRTGQMEHHIFKEIVHYLNPGDCLVINDTKVIPARLFGSKVGTDAKIEILLLKRREGDVWETLVKPGKKAKPGTQISFGDGILMGEVLEVAEDGNRLIRFTYEGIFEEILDRLGQMPLPPYITHQLKDKNRYQTVYAKHDGSAAAPTAGLHFTPELLQEIRDKGVNIAHVTLHVGLGTFRPVKVEEVTQHHMHSEFYMVEEEQAELINRTKANGGKIICVGTTSCRTIESAADENGILHAGSGWTDIFIYPGYRFKILDELITNFHLPESTLLMLVSALAGKENIEKAYAEAVKERYRFFSFGDAMLIK

SEQ ID NO: 68696 - protein, 341 aa, Massilia albidiflava
  REGION 1..341: note = tr|A0A411X731|A0A411X731_9BURK S-adenosylmethionine:tRNA ribosyltransferase-isomerase; OS = Massilia albidiflava OX=321983 GN=queA PE=3 SV=1
MYSLSDFDFNLPPERIAQFPLPDRSASRLLHVDETRLHDRRFTDILDLLQPGDLLVMNDTRVLKARFFGVKDSGGKVEVLVERVLDTRTVLAQVRASKSPGPGVRIRLADAFDVTVGERAGEFFTLKFEADVFDLIEQYGRLPLPPYIEHAPGEVDETRYQTVFNKVPGAVAAPTAGLHFDEALLQKLRDKGVNFAYVTLHVGAGTFQPVRTENLAEHKMHTEWYTMPQATVDAVKAARAAGRDVIAVGTTSLRALESASQSGTIEAGSADTALFITPGYRFKSVTRLITNFHLPKSTLLMLVSAFAGFDEIRAAYAHAIASEYRFFSYGDAMLLTTPNRA

SEQ ID NO: 68697 - protein, 341 aa, unidentified
  source 1..341: note = Massilia armeniaca
  REGION 1..341: note = tr|A0A2R4C5E7|A0A2R4C5E7_9BURK S-adenosylmethionine:tRNA ribosyltransferase-isomerase; OS = Massilia armeniaca OX=2072590 GN=queA PE=3 SV=1
MYSLSDFDFNLPPERIAQFPLPDRSASRLLHVDGPRLADRQFTDILELLQPGDLLVMNDTRVLKARFFGVKDSGGKVEVLVERVLDTRTVLAQVRASKSPGPGVKIRLAEAFDVTVGERAGEFYTLNFEADVFDLIEQYGRLPLPPYIEHAPGEVDENRYQTVFNKVPGAVAAPTAGLHFDEALLQKLKDKGVNFAYVTLHVGAGTFQPVRTENLSEHKMHTEWYTMPQETVDAVRATRAAGRDVIAVGTTSLRALESASQTGELVAGSADTALFITPGYLFKTVTRLITNFHLPKSTLLMLVSAFAGYDEIRAAYAHAIAHEYRFFSYGDAMLLTTPNRA

SEQ ID NO: 68698 - protein, 340 aa, Massilia aurea
  REGION 1..340: note = tr|A0A422QJC7|A0A422QJC7_9BURK S-adenosylmethionine:tRNA ribosyltransferase-isomerase; OS = Massilia aurea OX=373040 GN=queA PE=3 SV=1
MYSLSDFDFELPPERIAQLPLPDRSASRLLQLDGDQITDRHFADIVGQLQPGDLLVMNNTRVLKARFFGVKETGGQVEVLVERVLDNRTVLAQVRASKSPKPGNRIRLADAFDVTTGERAGEFFTLHFEGDVFELIEAHGRLPLPPYIEHTADEFDEQRYQTVYSKEPGAVAAPTAGLHFDQPLLDKLAQKGVKFAYVTLHVGAGTFQPVRVEDLSEHKMHTEWYTIAQETVDAVRAAKAAGRDVVAVGTTSLRALESASQSGELQAGSADTALFITPGYTFKTVSRLVTNFHLPKSTLLMLVSAFAGYAPIRKAYAHAIANEYRFFSYGDAMLLTTTSR

SEQ ID NO: 68699 - protein, 340 aa, unidentified
  source 1..340: note = Massilia eurypsychrophila
  REGION 1..340: note = tr|A0A2G8TKD8|A0A2G8TKD8_9BURK S-adenosylmethionine:tRNA ribosyltransferase-isomerase; OS = Massilia eurypsychrophila OX=1485217 GN=queA PE=3 SV=1
MYSLSDFDFNLPPERIAQVPLPDRSASRLLLLDGDAIADRQFADIVDLLSPGDLLVMNDTRVLKARFFGVKETGGSVEVLVERVLDSRTVLAQVRASKSPKPGNRIRLADAFDVVAGERAGEFFTLHFDADVFELIEAHGRLPLPPYIDHAADEFDEQRYQTVYSKEPGAVAAPTAGLHFDDALLARLAARGVRFAYVTLHVGAGTFQPVRVEVLAEHNMHTEWYTVPQATVDAVGAARAAGKDVVAVGTTSLRALESASQSGALVAGSADTALFITPGYTFKTVSRLITNFHLPKSTLLMLVSAFAGYEPIRRAYAHAIASEYRFFSYGDAMLLTTKSL

SEQ ID NO: 68700 - protein, 341 aa, Massilia flava
  REGION 1..341: note = tr|A0A562PCL3|A0A562PCL3_9BURK S-adenosylmethionine:tRNA ribosyltransferase-isomerase; OS = Massilia flava OX=871742 GN=queA PE=3 SV=1
MYSLSDFDFNLPPERIAQFPLPDRSASRLLHVDETRLADRKFTDIVDLLQPGDLLVMNDTRVLKARFYGVKDSGGKVEVLVERVLDTRTVLAQMKASKSPGPGVKIRLADAFDVTVGERAGEFFTLHFDADVFELIERHGRLPLPPYIEHAPGEVDENRYQTVFGKVPGAVAAPTAGLHFDDALLEKLRDKGVRFAYVTLHVGAGTFQPVRTENLAEHKMHTEWYTMPQETVDAVRAARAAGRDVVAVGTTSLRALESASQSGELVAGSADTALFITPGYRFKTVTRLITNFHLPKSTLLMLVSAFAGYDEIRAAYQHAIDNEYRFFSYGDAMLLTTRNRA

SEQ ID NO: 68701 - protein, 346 aa, unidentified
  source 1..346: note = Massilia glaciei
  REGION 1..346: note = tr|A0A2U2HH78|A0A2U2HH78_9BURK S-adenosylmethionine:tRNA ribosyltransferase-isomerase; OS = Massilia glaciei OX=1524097 GN=queA PE=3 SV=1
MYSLSDFDFILPPERIAQTPLPERSASRLLHLDGAAIVDRQFADIVDLLAPGDLLVMNDTRVLKARFFGVKETGGNVEVLVERVLDNRTVLAQVRASKSPKPGNRIRLADAFDVTTGERAGEFFTLTFDGDVFELIEAHGRLPLPPYIDHAADAFDETRYQTVYSKAPGAVAAPTAGLHFDQALLDRLAAKGVQSATVTLHVGAGTFQPVRVEVLAEHNMHTEWYTVPQATVDAVCAARARGNAVVAVGTTSLRALESASQSGQLAAGSADTALFITPGYRFKTVTRLITNFHLPKSTLLMLVSAFAGYEEIRAAYAHAIAHDYRFFSYGDAMLLTTQSLAGPDHA

SEQ ID NO: 68702 - protein, 341 aa, unidentified
  source 1..341: note = Massilia lurida
  REGION 1..341: note = tr|A0A562QXA7|A0A562QXA7_9BURK S-adenosylmethionine:tRNA ribosyltransferase-isomerase; OS = Massilia lurida OX=1036180 GN=queA PE=3 SV=1
MYSLSDFDFNLPPERIAQFPLPDRSASRLLHVDESRLVDRKFTDILDLLVGGDLLVMNDTRVLKARFFGIKDSGGKVEVLVERVLDTRTVLAQVRASKSPGPGVKIRLADAFDVTVGERAGEFFTLKFDADVFDLIEQYGRLPLPPYIEHAPGEVDETRYQTVFNKVPGAVAAPTAGLHFDEALLQKLKDKGVQFAYVTLHVGAGTFQPVRTENLAEHKMHTEWYTMPQATADAVKATRAAGRDVIAVGTTSLRALESASQSGTIEAGSGDTNLFITPGYCFKAVTRLITNFHLPKSTLLMLVSAFAGYDEIRAAYAHAIAHEYRFFSYGDAMLLTTPNRA

SEQ ID NO: 68703 - protein, 341 aa, Massilia lutea
  REGION 1..341: note = tr|A0A4P6KYC4|A0A4P6KYC4_9BURK S-adenosylmethionine:tRNA ribosyltransferase-isomerase; OS = Massilia lutea OX=321985 GN=queA PE=3 SV=1
MYSLSDFDFNLPPERIAQFPLPDRSASRLLHVDGSRLVDRKFTDILDLLQPGDLLVMNDTRVLKARFFGIKDSGGKVEVLVERVLDTRTVLAQVRASKSPGPGVKIRLADAFDVTVGERAGEFFTLKFDADVFDLIEQYGRLPLPPYIEHAPGEVDETRYQTVFNKVPGAVAAPTAGLHFDEALLQKLRDKGVNFAYVTLHVGAGTFQPVRTENLAEHKMHTEWYTMPQATVDAVKATRAAGRDVIAVGTTSLRALESASQSGTIEAGSADTALFITPGYAFKSVTRLITNFHLPKSTLLMLVSAFAGFDEIRAAYAHAIANEYRFFSYGDAMLLTTPNRA

SEQ ID NO: 68704 - protein, 345 aa, unidentified
  source 1..345: note = Massilia namucuonensis
  REGION 1..345: note = tr|A0A1I7LA54|A0A1I7LA54_9BURK S-adenosylmethionine:tRNA ribosyltransferase-isomerase; OS = Massilia namucuonensis OX=1035707 GN=queA PE=3 SV=1
MSSFLYSLSDFDFNLPPERIAQFPLPDRSASRLLHVDGARLHDRKFTDILDQLQAGDLLVMNDTRVLKARFFGVKESGGKVEALVERVLDTRTVLAQVRASKSPGPGVKIRLADAFDVTVGERAGEFYTLHFEADVFELIEAHGRLPLPPYIEHAADAVDETRYQTVFNKVPGAVAAPTAGLHFDEALLQKLRDKGVNFAYVTLHVGAGTFQPVRTENLAEHKMHTEWYTMPQATVDAARAARAAGRDVVAVGTTSLRALESASQSGRLEAGSADTALFITPGYRFKTVTRLITNFHLPKSTLLMLVSAFAGYDEIRAAYAHAIAHEYRFFSYGDAMLLTTQARA

SEQ ID NO: 68705 - protein, 340 aa, Massilia oculi
  REGION 1..340: note = tr|A0A2S2DK16|A0A2S2DK16_9BURK S-adenosylmethionine:tRNA ribosyltransferase-isomerase; OS = Massilia oculi OX=945844 GN=queA PE=3 SV=1
MYSLSDFDFELPPERIAQLPLPDRSASRLLQLDGDQILDRHFSDIVDQLQPGDLLVMNNTRVLKARFFGVKETGGQVEVLVERVLDERTVLAQVRASKSPKPGNRIRLADAFDVTVGERAGEFFTLHFEGDVFELIEAHGRLPLPPYIEHTADEFDEQRYQTVYSKEPGAVAAPTAGLHFDQPLLDKLAQKGVRFAYVTLHVGAGTFQPVRVEDLSEHKMHTEWYTISQETVDAVRAAKAAGRDVVAVGTTSLRALESASQSGELVAGSADTALFITPGYTFKTVTRLVTNFHLPKSTLLMLVSAFAGFAPIRKAYAHAIANEYRFFSYGDAMLLTTTSR

SEQ ID NO: 68706 - protein, 347 aa, unidentified
  source 1..347: note = Massilia phosphatilytica
  REGION 1..347: note = tr|A0A2S8H0U6|A0A2S8H0U6_9BURK S-adenosylmethionine:tRNA ribosyltransferase-isomerase; OS = Massilia phosphatilytica OX=2026176 GN=queA PE=3 SV=1
MSKTYSLSDFDFDLPPERIAQVPLPDRSASRLLQLDGDRITDRHFADIVGQLQAGDTLVMNNTRVLKARFFGQKDTGGQVEVLVERVLDPRTVLAQVRASKSPKPGSRIRLADAFVVGVGERAGEFFTLHFDGDVFELIEAHGRLPLPPYIEHDADDFDEQRYQTVYSKEPGAVAAPTAGLHFDQALLDKVAAKGVRIAYVTLHVGAGTFQPVRVENLAEHKMHSEWYTIPQETVDAVRAAREAGRDVVAVGTTSLRALESASQSGALVAGSGDTNLFITPGYLFKTVTRLITNFHLPKSTLMMLVSAFAGYDEIRAAYAHAIASEYRFFSYGDAMLLTTHSRATRN

SEQ ID NO: 68707 - protein, 341 aa, Massilia plicata
  REGION 1..341: note = tr|A0A4P7BEV2|A0A4P7BEV2_9BURK S-adenosylmethionine:tRNA ribosyltransferase-isomerase; OS = Massilia plicata OX=321984 GN=queA PE=3 SV=1
MYSLSDFDFNLPPERIAQFPLPDRSASRLLHVDGARLVDRQFTDILELLQPGDLLVMNDTRVLKARFFGVKDSGGKVEVLVERVLDTRTVLAQVRASKSPGPGVKIRLAEAFDVTVGERAGEFFTLKFEADVFDLIEQYGRLPLPPYIEHAPGEFDETRYQTVFNKVPGAVAAPTAGLHFDEALLQKLKDKGVNFAYVTLHVGAGTFQPVRTENLAEHKMHTEWYTMPQETVDAARAARAAGRDVIAVGTTSLRALESASQSGELVAGSADTALFITPGYLFKTVTRLITNFHLPKSTLLMLVSAFAGYDEIRAAYAHAIANEYRFFSYGDAMLLTTPNKA

SEQ ID NO: 68708 - protein, 345 aa, unidentified
  source 1..345: note = Massilia psychrophila
  REGION 1..345: note = tr|A0A2G8T636|A0A2G8T636_9BURK S-adenosylmethionine:tRNA ribosyltransferase-isomerase; OS = Massilia psychrophila OX=1603353 GN=queA PE=3 SV=1
MYSLSDFDFDLPPERIAQIPLAQRSASRLLQLDGDAIVDRQFGDIVDLLAPGDLLVMNDTRVLKARFFGVKQTGGNVEVLVERVLDSRTVLAQVRASKSPKPGNRMRLADAFDVVVGERAGEFFTLTFDADVFALIEAHGRLPLPPYIDHAADAFDERRYQTVYAKQPGAVAAPTAGLHFDDALLAKLAAKGVDFAYVTLHVGAGTFQPVRVEVLAEHNMHTEWYTVPQATVDAVGAAKAAGRAVVAVGTTSLRALESASQSGVLAAGSADTALFITPGYTFKTVTRLITNFHLPKSTLLMLVSAFAGYQPIRRAYAHAIASQYRFFSYGDAMLLTTGQHKNPDA

SEQ ID NO: 68709 - protein, 341 aa, Massilia sp.
  REGION 1..341: note = tr|A0A0Q5HQY2|A0A0Q5HQY2_9BURK S-adenosylmethionine:tRNA ribosyltransferase-isomerase; OS = Massilia sp. Leaf139 OX=1736272 GN=queA PE=3 SV=1
MYSLSDFDFHLPPERIAQLPLPNRSASRLLQLDGDQILDRHFADIVDQLQPGDLLVMNNTRVLKARFFGVKETGGQVEVLVERVLDNRTVLAQVRASKSPKPGNRIRLADAFDVTTGERAGEFFTLHFEGDVFELIEAHGRLPLPPYIEHTADEFDEQRYQTVYSKEPGAVAAPTAGLHFDQPLLDKLKEKGVNFAYVTLHVGAGTFQPVRVEDLSQHHMHTEWYTIGQETVDAVCAAKAAGRDVVAVGTTSLRALESASQTGELVAGSADTALFITPGYKFKTVTRLITNFHLPKSTLLMLVSAFAGYAEIRKAYAHAIANEYRFFSYGDAMLLTTQSRQ

SEQ ID NO: 68710 - protein, 341 aa, Massilia sp.
  REGION 1..341: note = tr|A0A344JIU8|A0A344JIU8_9BURK S-adenosylmethionine:tRNA ribosyltransferase-isomerase; OS = Massilia sp. YMA4 OX=1593482 GN=queA PE=3 SV=1
MYSLSDFDFNLPPERIAQFPLPDRSASRLLHVDGPRLADRQFTDILALLQPGDLLVMNDTRVLKARFFGVKDSGGKVEVLVERVLDTRTVLAQVRASKSPGPGVRIRLAEAFDVTVGERAGEFYTLKFEADVFDLIEQYGRLPLPPYIEHAPGEVDETRYQTVFNKVPGAVAAPTAGLHFDEALLQKLRDKGVNFAYVTLHVGAGTFQPVRTENLAEHKMHTEWYTMPQETVDAVRATRAAGRDVIAVGTTSLRALESASQTGELVAGSADTALFITPGYRFKTVTRLITNFHLPKSTLLMLVSAFAGYDEIRAAYAHAIAHEYRFFSYGDAMLLTTPNRA

SEQ ID NO: 68711 - protein, 340 aa, Massilia timonae
  REGION 1..340: note = tr|A0A1S2NDR7|A0A1S2NDR7_9BURK S-adenosylmethionine:tRNA ribosyltransferase-isomerase; OS = Massilia timonae OX=47229 GN=queA PE=3 SV=1
MYSLSDFDFELPPERIAQLPLPDRSASRLLQLDGDQILDRHFSDIVDQLQPGDLLVMNNTRVLKARFFGVKETGGQVEVLVERVLDDRTVLAQVRASKSPKPGNRIRLADAFDVTTGERAGEFFTLHFEGDVFELIEAHGRLPLPPYIEHSADEFDEQRYQTVYSKEPGAVAAPTAGLHFDQPLLDKLAQKGVKFAYVTLHVGAGTFQPVRVEDLSEHKMHTEWYTISQETVDAVRAAKAAGRDVVAVGTTSLRALESASQSGELVAGSADTALFITPGYTFKTVSRLVTNFHLPKSTLLMLVSAFAGFEPIRKAYAHAIANEYRFFSYGDAMLLTTTSR

SEQ ID NO: 68712 - protein, 340 aa, Massilia timonae
  REGION 1..340: note = tr|K9DY01|K9DY01_9BURK S-adenosylmethionine:tRNA ribosyltransferase-isomerase OS=Massilia timonae CCUG 45783 OX=883126 GN=queA PE=3 SV=1
MYSLSDFDFELPPERIAQLPLPDRSASRLLQLDGDQILDRHFSDIVDQLQPGDLLVMNNTRVLKARFFGVKETGGQVEVLVERVLDDRTVLAQVRASKSPKPGNRIRLADAFDVTTGARAGEFFTLHFEGDVFELIEAHGRLPLPPYIEHSADEFDEQRYQTVYSKEPGAVAAPTAGLHFDQPLLDKLAQKGVKFAYVTLHVGAGTFQPVRVEDLSEHKMHTEWYTIAQETVDAVRAAKAAGRDVVAVGTTSLRALESASQSGELVAGSADTALFITPGYTFKTVTRLVTNFHLPKSTLLMLVSAFAGFEPIRKAYAHAIANEYRFFSYGDAMLLTTESR

SEQ ID NO: 68713 - protein, 341 aa, unidentified
  source 1..341: note = Massilia umbonata
  REGION 1..341: note = tr|A0A4P8I239|A0A4P8I239_9BURK S-adenosylmethionine:tRNA ribosyltransferase-isomerase; OS = Massilia umbonata OX=864828 GN=queA PE=3 SV=1
MYSLSDFDFNLPPERIAQFPLPDRSASRLLHVDETRLVDRKFTDILDLLQPGDLLVMNDTRVLKARFFGVKDSGGKVEVLVERVLDTHTVLAQVRASKSPGPGVKIRLAEAFDVTVGERAGEFFTLKFDADVFDLIEQYGRLPLPPYIEHAPGEVDETRYQTVFNKVPGAVAAPTAGLHFDEALLQKLKDKGVNFAYVTLHVGAGTFQPVRTENLAEHKMHTEWYTMPQATVDAVKAARAAGRDVIAVGTTSLRALESASQSGTIEAGSADTALFITPGYRFKSVTRLITNFHLPKSTLLMLVSAFAGFDEIRAAYAHAIANEYRFFSYGDAMLLTTPNRA

SEQ ID NO: 68714 - protein, 340 aa, unidentified
  source 1..340: note = Massilia yuzhufengensis
  REGION 1..340: note = tr|A0A1I1T6Z5|A0A1I1T6Z5_9BURK S-adenosylmethionine:tRNA ribosyltransferase-isomerase; OS = Massilia yuzhufengensis OX=1164594 GN=queA PE=3 SV=1
MYSLSDFDFDLPPERIAQLPLPDRSASRLLQLDGDRITDRHFADIVDQLQPGDLLVMNNTRVLKARFFGVKETGGQVEVLVERVLDNRTVLAQVRASKSPKPGNRIRLANAFDVVTGERAGEFFTLHLEGDVFDLIEAHGRLPLPPYIEHSADEFDEQRYQTVYSKEPGAVAAPTAGLHFDQPLLDRLAAKGVQFAYVTLHVGAGTFQPVRVEDLSAHQMHTEWYTIPQETVDAVRAAKLAGREVVAVGTTSLRALESGSQTGELLAGSADTALFITPGYTFKTVTRLVTNFHLPKSTLLMLVSAFAGYEAIRKAYAHAIANEYRFFSYGDAMLLTTTSR

SEQ ID NO: 68715 - protein, 341 aa, unidentified
  source 1..341: note = Massilimicrobiota sp.
  REGION 1..341: note = tr|A0A1Y4R3U8|A0A1Y4R3U8_9FIRM S-adenosylmethionine:tRNA ribosyltransferase-isomerase; OS = Massilimicrobiota sp. An142 OX=1965564 GN=queA PE=3 SV=1
MKISEFDYDLPEELIAQTPLQKRDTSRLMVLDRKTKTIEDKHFYDILDYLHAGDILVRNNTKVIPARLYGIKEETGGHVEVLLLKDLGEDVWECLVGNARIVKMDTIITFGDGSLKAKCVHIGEEGIRHFQMMYEGIFYEVLDHLGTMPLPPYIKEKLDDPHRYQTVYAKVEGSAAAPTAGLHFTEDILKKAQDKGVEILDVTLHVGLGTFRPVKVDDVLEHHMHSEFYMIDEDTAQKLNQAKANGQRIISVGTTSTRTLEANFKKYGKFQATQESTDIFIYPGYQFEAIDALITNFHLPKSTLVMLVSAFADKDYIMKAYHHAVEEKYRFFSFGDCMFIQ

SEQ ID NO: 68716 - protein, 341 aa, unidentified
  source 1..341: note = Massilimicrobiota sp.
  REGION 1..341: note = tr|A0A1Y3TFI3|A0A1Y3TFI3_9FIRM S-adenosylmethionine:tRNA ribosyltransferase-isomerase; OS = Massilimicrobiota sp. An80 OX=1965658 GN=queA PE=3 SV=1
MKISEFDYDLPEELIAQTPLQKRDTSRLMVLDRKTKTIEDKHFYDILDYLHAGDILVRNNTKVIPARLYGIKEETGGHVEVLLLKDLGEDVWECLVGNARIVKMDTVITFGDGSLKAKCVHIGEEGIRHFQMMYEGIFYEVLDHLGTMPLPPYIKEKLDDPHRYQTVYAKVEGSAAAPTAGLHFTEDILKKVQDKGVEILDVTLHVGLGTFRPVKVDDVLEHHMHSEFYMIDEDTAQKLNQAKANGQRIISVGTTSTRTLEANFKKYGKFQATQESTDIFIYPGYQFEAIDALITNFHLPKSTLVMLVSAFADKDYIMKAYHHAVEEKYRFFSFGDCMFIQ

SEQ ID NO: 68717 - protein, 341 aa, unidentified
  source 1..341: note = Massilimicrobiota timonensis
  REGION 1..341: note = tr|A0A1Y4T1W4|A0A1Y4T1W4_9FIRM S-adenosylmethionine:tRNA ribosyltransferase-isomerase; OS = Massilimicrobiota timonensis OX=1776392 GN=queA PE=3; SV = 1
MKLSEFDYNLPEELIAQTPLQKRDTSRLMVLNRKERTIEDKHFYDILDYLHAGDILVRNNTKVIPARLYGTKEETNGHVEVLLLKDLGNNVWECLVGNARIVKMGTIITFGDGSLKAKCIYIGEEGIRHFEMIYDGIFYEILDHLGMMPLPPYIKEKLEDSSRYQTVYAKIEGSAAAPTAGLHFTDEILEKVQEKGVEILDVTLHVGLGTFRPVKVDDVLEHHMHSEFYMIDEETAQKLNTAKANGQRIISVGTTSTRTLEANYKKYGQFKVTQESTDIFIYPGYQFEAIDALITNFHLPKSTLVMLVSAFADKEFIMKAYHHAVEEKYRFFSFGDCMFIQ

SEQ ID NO: 68718 - protein, 328 aa, unidentified
  source 1..328: note = Massilioclostridium sp.
  REGION 1..328: note = tr|A0A316TAY7|A0A316TAY7_9CLOT S-adenosylmethionine:tRNA ribosyltransferase-isomerase (Fragment) OS=Massilioclostridium sp. OX=1935928; GN = DBX37_01915 PE=3 SV=1
MKTSDFYFDLPQELIAQTPIEPRDHSRMLVLSRETGEITHKHFYDVIDYLNEGDTLIVNDSRVLPARIYGEKVDTGSKIEFLLLEQKQQDVWEILCKPGKKAKPGVRFNFHNLLEAEVLEVLEDGNRIVKFHYEGNFFHILDQIGQMPLPPYITEKLQDQERYQTVYSHEVGSAAAPTAGLHFTKELMEKIRQKGVNIAAVTLHVGLGTFRPVKVDDVTKHKMHSEHYEISPKTAELIRKTKQNGKRVFAVGTTSCRTLESVGTAHNGEIVAEDGYTDIFIYPGYQFKVIDGLITNFHLPESTLIMLVSAFAGYDSIMNAYQTAVKEK

SEQ ID NO: 68719 - protein, 390 aa, Mastigocladus laminosus
  REGION 1..390: note = tr|A0A4D9C8I2|A0A4D9C8I2_MASLA S-adenosylmethionine:tRNA ribosyltransferase-isomerase; OS = Mastigocladus laminosus UU774 OX=1594576 GN=queA PE=3; SV = 1
MQEQLAKTNSHLISKQTSENSELDFSLAGYDYELPTELIAQNPAVPRDGSRLLVVNSQNVGTETAPQHYIFRDLPQILRPGDLLVMNNTRVLPARLYGHKSTGAEVEVLLLEERQHNRWLALVKPGKRFKRGSQIVFTAKVNTDGDHPTTPVPSHSLTATVIATDAATGGRLLQFELPEEVSLLQLLDAFGEIPLPPYITTTEAQSEQYQTVYAQNPGAVAAPTAGLHFTPELLQKLCEQNINQAFVTLHVGVGTFRPVEVENVTTHTMHEEWIEVPQNTVEQIRATKAAGGRIIAVGTTVVRALEGAATKGELQPFCGKTNLFIYPGYQWRVVEGMITNFHLPRSSLLMLVSALIGRQRLLNIYQEAIASQYRFYSFGDAMLILPEATI

SEQ ID NO: 68720 - protein, 381 aa, Mastigocoleus testarum
  REGION 1..381: note = tr|A0A0V7ZNW2|A0A0V7ZNW2_9CYAN S-adenosylmethionine:tRNA ribosyltransferase-isomerase; OS = Mastigocoleus testarum BC008 OX=371196 GN=queA PE=3 SV=1
MQQHTPDLLRENHELDFNLQGYDYELPPEFIAQNPVVPRDSSKLLLVNTLSAEEEKANGHYIFRDLPEILKPGDLLVMNNTQVIPARLYGRKSTGAEVEVLLLQEQQSNCWLALVKPGKRFKLGTKIIFTTGGNQPENGGGTFPNSLTAKVLETDEATGGRLLQFDLPSDVSLLQCLDKFGEVPFPPYITDTKAASEQYQTVYAKNPGAVAAPTAGLHFTPELLEKLSQKGIGSSFVTLHVGVGTFRPVEVENVTTHKMHEEWIDVPRETVEKIRQTKAAGGRVIAVGTTVARSLEGAAIGGEIQPFTGKTDIFIYPGYKWQAIDGLITNFHLPRSSLMMMVSALIGRQRLLDVYQEAIALKYRFYSFGDAMLILPYVSKE

SEQ ID NO: 68721 - protein, 409 aa, unidentified
  source 1..409: note = Mediterranea sp.
  REGION 1..409: note = tr|A0A1Y4HPQ5|A0A1Y4HPQ5_9BACT S-adenosylmethionine:tRNA ribosyltransferase-isomerase; OS = Mediterranea sp. An20 OX=1965586 GN=queA PE=3 SV=1
MTQDPKHIRISDFSYNLPDERIAKFPLPVRDESKLLLYRHGEVSEDHFYHLPQYIPAGALMVFNNTKVIQARLHFRKDTGAFIEVFCLEPLEPHDYALNFQQTGHVSWLCLIGNLKKWKEGTLHREMTVKGMNVTLSATRGECRGTSHRVDFEWNNSQVSFADILEVFGELPIPPYLNRKTEASDLETYQTVYSKIKGSVAAPTAGLHFTPRVLDALKEKGIELEELTLHVGAGTFRPVKSEEIEGHEMHTEYISVSRHTIARLIAHGGQAIAVGTTSVRTLESLYHIGLTLMKHPDASDEELTVRQWQPYECSPDELATPATQALSAVLAYLDRHGLETLHTSTQIIIAPGYDYKIVKAMVTNFHQPQSTLLLLVSAFVHNDWRTIYNYALKHDFRFLSYGDSSLLVP

SEQ ID NO: 68722 - protein, 352 aa, unidentified
  source 1..352: note = Mediterranea sp.
  REGION 1..352: note = tr|A0A1Y4HVK8|A0A1Y4HVK8_9BACT S-adenosylmethionine:tRNA ribosyltransferase-isomerase; OS = Mediterranea sp. An20 OX=1965586 GN=queA PE=3 SV=1
MKLSQFKFKLPEEKIALHPAKYRDESRLMVLHRKTGEIEHRVFKDILDYFDDQDVFIFNDTKVFPARLYGNKEKTGARIEVFLLRELNEELRLWDVLVDPARKIRIGNKLYFGEDDSMVAEVIDNTTSRGRTLRFLYDGPHDEFKKALYALGETPLPHSIINRPVEPEDAERFQSIFACNEGAVTAPTANLHFSRELMKRMEIKGINFAFVTLHAGLGNFREIDVEDLTKHKTDSEQMFVTSEAVEIVNRAKDLHKQVCAVGTTVMRAIESTVSTDGHLKPYEGWTNKFIFPPYDFTVANAMVANFQMPLSTLLMIIAAFGGYEQVMNAYDVALKEDYRFGTYGDAMLITDK

SEQ ID NO: 68723 - protein, 359 aa, unidentified
  source 1..359: note = Mediterraneibacter butyricigenes
  REGION 1..359: note = tr|A0A391PE89|A0A391PE89_9FIRM S-adenosylmethionine:tRNA ribosyltransferase-isomerase; OS = Mediterraneibacter butyricigenes OX=2316025 GN=queA; PE = 3 SV=1
MKTSDFYYDLPEELIAQDPLEDRSSSRMLVLNKVTGEWEHRVFKDIIDYLNPGDCLVINDTKVIPARLIGVKPDTGAKIEVLLLKRKEKDVWEALVRPGRKLRPGAKVSFGEGLLTGEILEIAEEGNRLIKFHYDGIFEEILDQLGQMPLPPYIKHQLKERERYNTVYAVHEGSAAAPTAGLHFTPELLEQIEKKGIDIARITLHVGLGTFRPVKADEIQDHHMHSEYYEISEEAAQKVNATKERGGRVICVGTTSCRTVESAADENGRLKACSGWTEIFIYPGYKFKILDGLITNFHLPESTLVMLVSALAGREHILAAYEEAVKERYRFFSFGDAMYIGTTPNQTNVGSSQESEKSK

SEQ ID NO: 68724 - protein, 341 aa, unidentified
  source 1..341: note = Mediterraneibacter sp.
  REGION 1..341: note = tr|A0A4Q8U155|A0A4Q8U155_9FIRM S-adenosylmethionine:tRNA ribosyltransferase-isomerase; OS = Mediterraneibacter sp. gm002 OX=2527876 GN=queA PE=3; SV = 1
MKTSDFYYDLPEELIAQDPLEDRSSSRLLILDKETGKTEHHIFKEIIDYLNPGDCLVINDTKVIPARLIGEKIGTGAKIEVLLLKRKEKDVWETLVKPGKKMKVGAQVSFGNGLLIGEVIEVVEEGNRLIKFHYEGIFEEVLDQLGEMPLPPYITHQLQDRNRYNTVYAKNEGSAAAPTAGLHFTPELLDAIQKKGVDIARVTLHVGLGTFRPVKVEDVTEHHMHSEFYQVDEEAAEKINRAKDGAGRVICVGTTSCRTIESAADETGHLKPCSGWTEIFIYPGYKFKMLDCLITNFHLPESTLIMLVSALAGKEHVMAAYEEAVKDRYRFFSFGDAMFIK

SEQ ID NO: 68725 - protein, 341 aa, Megamonas funiformis
  REGION 1..341: note = tr|H3KA11|H3KA11_9FIRM S-adenosylmethionine:tRNA ribosyltransferase-isomerase OS=Megamonas funiformis YIT 11815 OX=742816 GN=queA PE=3 SV=1
MLLNEFDYNLPEELIAQTPCAKRDHSRLMVLNRKEKTIEHKHFYDIKQYLRKGDTLVFNDTKVMPARLIGHRAKTGGKVEVFLLKRLTNTNQWEVLVKPGKKAQLGNIIEFSDELACEVVGHTNFGGRIVEFKFDGIFEEILDRLGETPLPPYIHEKLEDKNRYQTVYAREEGSAAAPTAGLHFTKELLAEIKEMGVNLAFVTLHVGLGTFRPVNVDNIEDHVMHKEFYHIEKEAADIINQTKANGGRVIAVGTTSIRTLESAAKEDGTISPIAEETGIFIYPGYKFKIVDSIITNFHLPKSTLIMLISAFAGREYVLSAYEEAVKEKYRFFSFGDAMFIE

SEQ ID NO: 68726 - protein, 340 aa, Megamonas hypermegale
  REGION 1..340: note = tr|A0A239T7B9|A0A239T7B9_9FIRM S-adenosylmethionine:tRNA ribosyltransferase-isomerase; OS = Megamonas hypermegale OX=158847 GN=queA PE=3 SV=1
MLLSDFDYNLPEELIAQTPCQQRDHSRLMVLNRKDKSISHKHFYDLKQYLKKGDTLVFNDTKVIPARLIGHRAKTGGKVEVFLLRRTEGNRWETLVKPGKKAQIGNIIEFSDELSCEVIDHTDFGGRIVEFKFDGIFEEILDRLGETPLPPYIHEKLADKNRYQTVYARENGSAAAPTAGLHFTKELLEEIKAMGVNLAFVTLHVGLGTFRPVNVDNIEDHVMHKEFYHIEKEAADIINNTKKNGGRVIAVGTTSIRTLESAAKEDGTIEPIADETGIFIYPGYKFKIVDAIVTNFHLPKSTLIMLISAFAGREYVLSAYEEAVREKYRFFSFGDAMFIE

SEQ ID NO: 68727 - protein, 341 aa, Megamonas hypermegale
  REGION 1..341: note = tr|A0A378P1A2|A0A378P1A2_9FIRM S-adenosylmethionine:tRNA ribosyltransferase-isomerase; OS = Megamonas hypermegale OX=158847 GN=queA PE=3 SV=1
MLLNEFDYNLPEELIAQTPCAKRDHSRLMVLNRKEKTIEHKHFYDIKQYLRKGDTLVFNDTKVMPARLIGHRAKTGGKVEVFLLKRLTNTNQWEVLVKPGKKAQLGNVIEFSDELACEVVGHTDFGGRIVEFKFDGIFEEILDRLGETPLPPYIHEKLEDKNRYQTVYAREEGSAAAPTAGLHFTKELLAEIKEMGVNLAFVTLHVGLGTFRPVNVDNIEDHVMHKEFYHIEKEAADIINQTKANGGRVIAVGTTSIRTLESAAKEDGTISPIAEETGIFIYPGYKFKIVDSIITNFHLPKSTLIMLISAFAGREYVLSAYEEAVKEKYRFFSFGDAMFIE

SEQ ID NO: 68728 - protein, 341 aa, Megamonas rupellensis
  REGION 1..341: note = tr|A0A411ZV58|A0A411ZV58_9FIRM S-adenosylmethionine:tRNA ribosyltransferase-isomerase; OS = Megamonas rupellensis OX=491921 GN=queA PE=3 SV=1
MLLNEFDYNLPEELIAQTPCAKRDHSRLMVLNRKEKTIEHKHFYDIKQYLRKGDTLVFNDTKVMPARLIGHRAKTGGKVEVFLLKRLTNTNQWEVLVKPGKKAQLGNIIEFSDELACEVVGHTDFGGRIVEFKFDGIFEEILDRLGETPLPPYIHEKLEDKNRYQTVYAREEGSAAAPTAGLHFTKELLAEIKEMGVNLAFVTLHVGLGTFRPVNVDNIEDHVMHKEFYHIEKEAADIINQTKANGGRVIAVGTTSIRTLESAAKEDGSISPIAEETGIFIYPGYKFKIVDSIITNFHLPKSTLIMLISAFAGREYVLSAYEEAVKEKYRFFSFGDAMFIE

SEQ ID NO: 68729 - protein, 341 aa, Megamonas rupellensis
  REGION 1..341: note = tr|A0A412CH06|A0A412CH06_9FIRM S-adenosylmethionine:tRNA ribosyltransferase-isomerase; OS = Megamonas rupellensis OX=491921 GN=queA PE=3 SV=1
MLLNEFDYNLPEELIAQTPCAKRDHSRLMVLNRKEKTIEHKHFYDIKQYLRKGDTLVFNDTKVMPARLIGHRAKTGGKVEVFLLKRLTNTNQWEVLVKPGKKAQLGNVIEFSDELACEVVGHTDFGGRIVEFKFDGIFEEILDRLGETPLPPYIHEKLEDKNRYQTVYAREEGSAAAPTAGLHFTKELLAEIKEMGVNLAFVTLHVGLGTFRPVNVDNIEDHVMHKEFYHIEKEAADIINQTKANGGRVIAVGTTSIRTLESAAKEDGSISPIAEETGIFIYPGYKFKIVDSIITNFHLPKSTLIMLISAFAGREYVLSAYEEAVKEKYRFFSFGDAMFIE

SEQ ID NO: 68730 - protein, 341 aa, Megamonas sp.
  REGION 1..341: note = tr|A0A1H8CT71|A0A1H8CT71_9FIRM S-adenosylmethionine:tRNA ribosyltransferase-isomerase; OS = Megamonas sp. Calf98-2 OX=1855330 GN=queA PE=3 SV=1
MLLNEFDYNLPEELIAQTPCAKRDHSRLMVLNRKEKTIEHKHFYDIKQYLRKGDTLVFNDTKVMPARLIGHRAKTGGKVEVFLLKRLTNTNQWEVLVKPGKKAQLGNVIEFSDELACEVVGHTDFGGRIVEFKFDGIFEEILDRLGETPLPPYIHEKLEDKNRYQTVYAREEGSAAAPTAGLHFTKELLAEIKEMGVNLAFVTLHVGLGTFRPVNVDNIEDHVMHKEFYHIEKKAADIINQTKANGGRVIAVGTTSIRTLESAAKEDGSISPIAEETGIFIYPGYKFKIVDSIITNFHLPKSTLIMLISAFAGREYVLSAYEEAVKEKYRFFSFGDAMFIE

SEQ ID NO: 68731 - protein, 339 aa, Megasphaera cerevisiae
  REGION 1..339: note = tr|A0A0J6WUB6|A0A0J6WUB6_9FIRM S-adenosylmethionine:tRNA ribosyltransferase-isomerase; OS = Megasphaera cerevisiae DSM 20462 OX=1122219 GN=queA; PE = 3 SV=1
MKLTDFSYDLPKELIAQHPAEPRDHARLMMYDRKSGAVEHRHFYDLAEELHEGDVLVFNDSRVIPARLYGKRLPTGGKVEVLLLTPVAEDSWEVLVKPGKKALPGTTLAFDGGMTAEVIDKTEFGGRILKFHYDGVFDDIIDAIGEMPLPPYIHEKMENPEEYQTVYARERGSAAAPTAGLHFTDELLEKIRAKGVEEVFITLHVGLGTFRPVEEENIEDHAMHSEFYSITKSAADTINQARTEGRRVIAVGTTSIRTLESAGTTGKLQAGSGWTNIFIYPGFTFHIVDALVTNFHLPESTLLMLISALSDRDKILHAYTLAVAEKYRFFSFGDAMFIR

SEQ ID NO: 68732 - protein, 339 aa, Megasphaera elsdenii
  REGION 1..339: note = tr|G0VPU2|G0VPU2_MEGEL S-adenosylmethionine:tRNA ribosyltransferase-isomerase OS=Megasphaera elsdenii DSM 20460 OX=1064535 GN=queA PE=3 SV=1
MKLTDFYYDLPKELIAQHPAEPRDHARLMLYDRQTGAVEHKYFYDLVDELHEGDVLVFNDSRVIPARLHGKRTPTGGKVEVLLLTPVGDDRWEVLVKPGKKALPGTVIEFPEGLTGTVEDRTDFGGRIIKFAYEGDFDAIIDKIGEMPLPPYIHEKMEDPDEYQTVYANERGSAAAPTAGLHFTEELLQKIRDKGVEEVFVTLHVGLGTFRPVEEENIEDHQMHSEFYSITPEAAATINKAKAEGRRVIAVGTTSIRTLESAGTTGTLQAGSGWTNIFIYPGFTFHIVDALVTNFHLPESTLLMLISALSTREKILKAYEIAVQEKYRFFSFGDAMFIH

SEQ ID NO: 68733 - protein, 339 aa, Megasphaera elsdenii; identical to SEQ ID NO: 68732
  REGION 1..339: note = tr|R7MW42|R7MW42_9FIRM S-adenosylmethionine:tRNA ribosyltransferase-isomerase OS=Megasphaera elsdenii CAG:570 OX=1263087 GN=queA PE=3 SV=1

SEQ ID NO: 68734 - protein, 339 aa, unidentified
  source 1..339: note = Megasphaera genomosp.
  REGION 1..339: note = tr|A0A2J8BBG8|A0A2J8BBG8_9FIRM S-adenosylmethionine:tRNA ribosyltransferase-isomerase; OS = Megasphaera genomosp. type_2 OX=699193 GN=queA PE=3 SV=1
MKLVDFNYELPEELIAQHPVEPRDHARLMIYDKETGEVGHRHFYDLVDELKQGDVLVFNDSRVIPARLHGKKKETGGKVEVLLLTPLGDDRWEVLVKPGKKALPGTEIVFSSALRGVVEARTDFGGRIVRFIYDGVFDELLDAVGEMPLPPYIHEKPDDPEDYQTVYARERGSAAAPTAGLHFTETLLQKIRDKGVKTVFVTLHVGLGTFRPVSEETIENHRMHSEFYSVTPEAAACINMAKKEGRRVIAVGTTSIRTLESAGKSGVVQAGSAWTDIFIYPGYTYRIADALVTNFHLPESTLLMLISALSTREKILHAYAIAVAERYRFFSFGDAMFIR

SEQ ID NO: 68735 - protein, 339 aa, unidentified
  source 1..339: note = Megasphaera genomosp.
  REGION 1..339: note = tr|D3LT20|D3LT20_9FIRM S-adenosylmethionine:tRNA ribosyltransferase-isomerase OS=Megasphaera genomosp. type_1 str. 28L OX=699218 GN=queA PE=3 SV=1
MKLSDFSYELPKELIAQHPAEPRDHARLMVYDKITGAVAHRYFYDLAAELHKGDVLVFNDSRVIPARLHGKKKETGGKVEVLLLTPVGEDCWEVLVKPGKKALPGTTIEFSSRLCATVKERTDFGGRIVQFHYDGVFDEILDQIGEMPLPPYIHEKMKNPDEYQTVYARERGSAAAPTAGLHFTRNLMEKIRAKGVETVFVTLHVGLGTFRPVEEENVEDHEMHSEFYSVTPAAAAAVNRAKAEGRRVVAVGTTSIRTLESAGKEGVVQAGSGWTDIFIYPGYTYRIADALVTNFHLPESTLLMLISAMSKREKILQAYRIAVAEGYRFFSFGDAMFIR

SEQ ID NO: 68736 - protein, 339 aa, unidentified
  source 1..339: note = Megasphaera hexanoica
  REGION 1..339: note = tr|A0A344MIH0|A0A344MIH0_9FIRM S-adenosylmethionine:tRNA ribosyltransferase-isomerase; OS = Megasphaera hexanoica OX=1675036 GN=queA PE=3 SV=1
MKLTDFSYELPKELIAQHPAEPRDHARLMLYDKKTGAVEHKHFYDLADELQAGDVLVFNDSKVIPARLYGKRVPTGGKVEVLLLTPVGEDRWEVLVKPGKKALPGTTIEFPGGLQAEVLDRTDFGGRVVHFTYDGVFDDIIDQIGEMPLPPYIHEKMEDPDEYQTVYARERGSAAAPTAGLHFTDELLQKIRDKGVEEVFVTLHVGLGTFRPVEEENIEDHQMHSEFYSITPEAADAINRAKAEGRRIIAVGTTSIRTLESAGTTGTLKAGSGWTNIFIYPGFTFHIVDALVTNFHLPESTLLMLISALSTREQILHAYDIAVREKYRFFSFGDAMFIH

SEQ ID NO: 68737 - protein, 341 aa, Megasphaera micronuciformis
  REGION 1..341: note = tr|E2Z9B5|E2Z9B5_9FIRM S-adenosylmethionine:tRNA ribosyltransferase-isomerase OS=Megasphaera micronuciformis F0359 OX=706434 GN=queA PE=3 SV=1
MILKLSDFSYELPQELIAQHPAEPRDTARLMLYDKKTGETENKIFRQLTDELHQGDVLVFNDSKVIPARLHGTRVPTGGKVEVLLLTPVGEDRWEVLVKPGKKALPGSTLSFGERLTGVVEDRTDYGGRVIHFTYDGVFDHIIEEIGEMPLPPYIHKKPENPDDYQTVYAREKGSAAAPTAGLHFTDELLEKIRDKGVETVFVTLHVGLGTFRPVEEENIEDHVMHSEYYSITPEAAAAVNRAKEEGRRIVAVGTTSVRTLESAAEKGRLKAGAGKTNIFIYPGYTFRIVDALVTNFHLPESTLLMLISALSDREHILKAYETAVREKYRFFSFGDAMFIH

SEQ ID NO: 68738 - protein, 339 aa, Megasphaera paucivorans
  REGION 1..339: note = tr|A0A1G9UVB7|A0A1G9UVB7_9FIRM S-adenosylmethionine:tRNA ribosyltransferase-isomerase; OS = Megasphaera paucivorans OX=349095 GN=queA PE=3 SV=1
MKLSDFTYELPKELIAQHPAEPRDHARLMVYDKKTGDVAHHYFYDLVDELQSGDVLVFNDSKVIPARLFGHRIPTGGKVEVLLLTPCGEDTWEVLVKPGKKALPGTQLAFEGGMTADILDKTDFGGRIVKFNYDGVFDDIIDTIGEMPLPPYIHEKLEDKEQYQTVYAREKGSAAAPTAGLHFTEELLKKIRDKGVQEVFVTLHVGLGTFRPVEEENIEDHEMHSEFYSITPEAAAVVNRAKMEGRRVIAVGTTSIRTLESAGTSGELKAGSGWTNIFIYPGFTFHIVDALVTNFHLPESTLLMLISALSEREKILKAYEIAVQEQYRFFSFGDAMFIR

SEQ ID NO: 68739 - protein, 339 aa, Megasphaera sp.
  REGION 1..339: note = tr|S7HKS1|S7HKS1_9FIRM S-adenosylmethionine:tRNA ribosyltransferase-isomerase OS=Megasphaera sp. NM10; OX = 1273103 GN=queA PE=3 SV=1
MKLTDFYYDLPKELIAQHPAEPRDHARLMLYDRQTGAVEHKYFYDLVDELHPGDVLVFNDSRVIPARLHGKRVPTGGKVEVLLLTPVGDDRWEVLVKPGKKALPGTTIEFPEGLTGTVEDRTDFGGRIIKFAYQGNFDDIIDKIGEMPLPPYIHEKMEDPNEYQTVYANERGSAAAPTAGLHFTEELLQKIRDKGVEEVFVTLHVGLGTFRPVEEENIEDHQMHSEFYSITPEAAAKINKAKAEGRRVIAVGTTSIRTLESAGTTGTLQAGSGWTNIFIYPGFTFHIVDALVTNFHLPESTLLMLISALSTREKILKAYEIAVQEKYRFFSFGDAMFIH

SEQ ID NO: 68740 - protein, 339 aa, Megasphaera sp.
  REGION 1..339: note = tr|A0A3C1CRC6|A0A3C1CRC6_9FIRM S-adenosylmethionine:tRNA ribosyltransferase-isomerase; OS = Megasphaera sp. OX=2023260 GN=queA PE=3 SV=1
MKLTDFSYELPKELIAQHPAEPRDHARLMLYDKKTGAVEHKHFYDLVDELQAGDVLVFNDSKVIPARLYGKRVPTGGKVEVLLLTPVGEDRWEVLVKPGKKALPGTTIEFPGGLQAEVLDRTDFGGRVVHFTYDGVFDDIIDQIGEMPLPPYIHEKMEDPDEYQTVYARERGSAAAPTAGLHFTDELLQKIRDKGVEEVFVTLHVGLGTFRPVEEENIEDHQMHSEFYSITPEAADAINRAKAEGRRIIAVGTTSIRTLESAGTTGTLKAGSGWTNIFIYPGFTFHIVDALVTNFHLPESTLLMLISALSTREQILHAYDIAVREKYRFFSFGDAMFIH

SEQ ID NO: 68741 - protein, 339 aa, unidentified
  source 1..339: note = Megasphaera stantonii
  REGION 1..339: note = tr|A0A346AXK8|A0A346AXK8_9FIRM S-adenosylmethionine:tRNA ribosyltransferase-isomerase; OS = Megasphaera stantonii OX=2144175 GN=queA PE=3 SV=1
MKLSDFYYDLPKELIAQHPAEQRDHARLMLYDRQSGAVEHKHFYDLIDELHQGDVLVFNDSRVIPARLYGKKSPTGGKVEVLLLTPVGEDTWEVLVKPGKRALPGAVIEFPEGLTCQILDRTDFGGRIVKFEYDGVFDDIIDKIGEMPLPPYIHEKLEDPDEYQTVYARERGSAAAPTAGLHFTDELLERIKAKGVELVFVTLHVGLGTFRPVEEENIEDHEMHSEFYSITEEAAQTINRAKAEGRRIVAVGTTSIRTLESAGTTGVLQAGSGWTNIFIYPGYTFHIVDALVTNFHLPESTLLMLISAMSTREKILKAYEIAVQEKYRFFSFGDAMFIR

SEQ ID NO: 68742 - protein, 342 aa, unidentified
  source 1..342: note = Mehylophilales bacterium
  REGION 1..342: note = tr|A0A258LB50|A0A258LB50_9PROT S-adenosylmethionine:tRNA ribosyltransferase-isomerase; OS = Mehylophilales bacterium 35-46-6 OX=1970535 GN=queA; PE = 3 SV=1
MKTQDFDFYLPSHLIAQHPTQERTASRMLCLDGNSGNLQDKLFLDFPARCNAGDLLIFNDTRVIKARLFGHKESGGNVEVLIERVINSHTAYAHVRASRSPKIGSRIRLSDAFDVTVTARHDDLFELQFLSEVSVFDLLEQHGALPLPPYITHAATGDDEERYQTVFAKNLGAVAAPTAGLHFNENVLEALQQKGVNIAYVTLHVGAGTFQPVRVDDIAEHKMHSEWFSIPQSTVDLINSTKANGGRVTAIGTTALRALESAAQSGVLKAGDGDTDIFITPGYQFKVVDRLFTNFHLPKSTLLMLVSAFAGAEHIKKAYAHAVANEYRFFSYGDAMLLEKQS

SEQ ID NO: 68743 - protein, 338 aa, Meiothermus cateniformans
  REGION 1..338: note = tr|A0A399EB07|A0A399EB07_9DEIN S-adenosylmethionine:tRNA ribosyltransferase-isomerase; OS = Meiothermus cateniformans OX=482825 GN=queA PE=3 SV=1
MNLEDFDYPLPPELIAQSGAEPRDTSRLMVIERSSGQMAHRIFRDLPQYLRAGDVLVLNQSKVIPARTFATNPHGTALEVLLVREIPSSPGLWEALLKPAKRAKVGSRLTFPDGLFATVEAIEADGTRLLRFSGNVWEHLENIGKMPLPPYIHASVDPARYQTVYAKTPGSVAAPTAGLHFTPELLDRVRGLGVDIHYVTLHVGPGTFKPVHDDPDRHVMHLEPYEVSPQTAEAINRAKAEGRRVIAVGTTVVRTLETAYSAELSGVRAGSGETQLFIRPGFRFNVIDALITNFHLPKSTLLMLVSAFMGHGLMKQAYQTAVAERYRFYSLGDAMLIL

SEQ ID NO: 68744 - protein, 334 aa, Meiothermus granaticius
  REGION 1..334: note = tr|A0A399F704|A0A399F704_9DEIN S-adenosylmethionine:tRNA ribosyltransferase-isomerase; OS = Meiothermus granaticius NBRC 107808 OX=1227551 GN=queA; PE = 3 SV=1
MSGLSYHYALPPELIAQEGVEPRDASRLMVLHRDSGRLEHRIFREIPLYLRPGDVLVLNESKVIPARLYARKPTGARIETFLVRDLGENRWEVLLRPAHKAPVGTELWFPDGLRARVEGVEADGTRVLRFSESVWEHLERLGQTPLPPYIHAAVDPQRYQTVYAKTPGSVAAPTAGLHFTPELLERIQAMGVELHTVTLHVGPGTFKPVKGDPEAHPMHTEPYEIPAESARAINQAKAEGRRVIAVGTTVVRTLESAWGREGLEAGVGQTQLFIRPGFTFRAVDALVTNFHLPNSTLLMLVSAFAGHERVLQAYQTAVEERYRFYSLGDAMLIL

SEQ ID NO: 68745 - protein, 339 aa, Meiothermus hypogaeus
  REGION 1..339: note = tr|A0A511R6D2|A0A511R6D2_9DEIN S-adenosylmethionine:tRNA ribosyltransferase-isomerase; OS = Meiothermus hypogaeus NBRC 106114 OX=1227553 GN=queA; PE = 3 SV=1
MNLEDFDYHLPPELIAQSGAEPRDASRLMVIHRSTGQIEHRIFRDLPGYLQAGDVLVLNESRVIPARTFATNPYGTLLEVLLVREIPTDAGSGGLWEALLKPARRARVGSVLTFADGLQAMVEAVEEDGTRLLRFAGNVWEHLENIGKTPLPPYIRASVDPERYQTVYAKTPGSVAAPTAGLHFTPELLDRIRGLGVTICYVTLHVGPGTFKPVQGDPNQHHMHLEPYEVPRPTAQAINQAKAEGRRVIAVGTTVVRTLETAWNGTQVRAGAGETQLFIRPGFQYHVVDALVTNFHLPKSTLLMLVSAFMGHELMQWAYQTAVAERYRFYSLGDAMLIL

SEQ ID NO: 68746 - protein, 336 aa, unidentified; identical to SEQ ID NO: 65798
  source 1..336: note = Meiothermus luteus
  REGION 1..336: note = tr|A0A399EBL7|A0A399EBL7_9DEIN S-adenosylmethionine:tRNA ribosyltransferase-isomerase; OS = Meiothermus luteus OX=2026184 GN=queA PE=3 SV=1

SEQ ID NO: 68747 - protein, 339 aa, unidentified
  source 1..339: note = Meiothermus roseus
  REGION 1..339: note = tr|A0A399F3N1|A0A399F3N1_9DEIN S-adenosylmethionine:tRNA ribosyltransferase-isomerase; OS = Meiothermus roseus OX=1644118 GN=queA_1 PE=3 SV=1
MNRLDDYDYHLPPELIAQAGVEPRDASRLMVLHRDDGGLEHRVFRDVVEYLREGDVLVLNQSKVIPARLFATNPHGTPIEVLLVRELSLLAEGRGSVWEAMLKPAKRAKGGLRFADGLEAEVIAVEEDGTRVLRFSDNVWEHLEALGQTPLPPYIHASVDPRRYQTVYARTPGSVAAPTAGLHFTPELLERIRAMGVETRYVTLHVGPGTFKPVKDDPERHTMHAEPYEVPLETAEAVGRAKAEGRRVVAVGTTVVRTLESAWQEGKLRAGQGETQLFIRPGFTFNVVDALITNFHLPRSTLLMLVSAFAGHELTMRAYRTAVEQRYRFYSLGDAMLIL

SEQ ID NO: 68748 - protein, 359 aa, unidentified
  source 1..359: note = Meiothermus roseus
  REGION 1..359: note = tr|A0A399ETE4|A0A399ETE4_9DEIN S-adenosylmethionine:tRNA ribosyltransferase-isomerase; OS = Meiothermus roseus OX=1644118 GN=queA_2 PE=3 SV=1
MRVGSLEPGLEFSLPPELEAHAPPEARGLARDEVRLLVSHKQGDRLVHARFRELGEFLREGDVLVINTSGTLPAALPAFRDDGSEFRLHLSTRLPGGVWSVELRQLEGGATKPFFEVRAGEVLALPGSATVHLLAPYRMEGHPPSRRLWIAVFSFPQPYTLNPLPYLLEHGKPIRYGYVAEEWPLEFYQSVYATLPGSAEMPSAGRAFTPELITRLVAQGVLVVPLLLHTGVASLESHEPPYEEFYRVPPGTAQVVNQARAEGRRVIAVGTTVVRALETVADALGRVHPGEGWTRLVITPQRGVRVVDGILTGWHEPKATHLAMLEAIAGRRHLELAYCAALEHRYLWHEFGDLHLILP

SEQ ID NO: 68749 - protein, 338 aa, Meiothermus ruber
  REGION 1..338: note = tr|A0A0S7AGK6|A0A0S7AGK6_MEIRU S-adenosylmethionine:tRNA ribosyltransferase-isomerase; OS = Meiothermus ruber H328 OX=1297799 GN=queA PE=3 SV=1
MNLEDFDYHLPPELIAQSGAEPRDASRLMVIDRQTGQITHRIFRDLPQYLRAGDVLVLNQSKVIPARTFATNPHGTGLEVLLVREIPSGEGLWEALLKPARRAKVGSRLTFPDGLFATVEAIEADGTRLLRFSGNVWEHLENIGKMPLPPYIQASVDPARYQTVYAKTPGSVAAPTAGLHFTPELLDRVRGLGVDIQYVTLHVGPGTFKPVHDDPDRHVMHLEPYEVSPQTAEAVNRARAEGRRVIAVGTTVVRTLETAYSAELGGVQAGAGETQLFIRPGFKYNVIDTLITNFHLPKSTLLMLVSAFMGHGLMKQAYQTAVAERYRFYSLGDAMLIL

SEQ ID NO: 68750 - protein, 338 aa, Meiothermus ruber; identical to SEQ ID NO: 68749
  REGION 1..338: note = tr|D3PP30|D3PP30_MEIRD S-adenosylmethionine:tRNA ribosyltransferase-isomerase OS=Meiothermus ruber (strain ATCC 35948 / DSM 1279 / VKM B-1258 / 21) OX=504728; GN = queAPE=3 SV=1

SEQ ID NO: 68751 - protein, 336 aa, Meiothermus silvanus
  REGION 1..336: note = tr|A0A4Q4KZY2|A0A4Q4KZY2_9DEIN S-adenosylmethionine:tRNA ribosyltransferase-isomerase; OS = Meiothermus silvanus OX=52022 GN=queA PE=3 SV=1
MLLEDYDYLLPPALIAQSGAEPRDSSRLMVVHRGTGQLEHRIFRDIPEYLRPGDLLVLNQSKVIPARTFAANAHGTPIEVLLVRELEPDLWEALLKPAKRAKGLLRFAGGLTAEVVKVEEDGTRVLRFTGGLWEHLERIGQTPLPPYIHASVDPERYQTVYAKTPGSVAAPTAGLHFTPELLERIRGMGVEVRFVTLHVGPGTFKPVKEDPERHVMHLEPYEISPETAQAVNRAKAEGRRVIAVGTTVVRTLESAWEDSSAGGGVKAGVGETRLFIRPGFEFKATDALITNFHLPRSTLLMLVSAFAGHDLTMRAYRTAVEERYRFYSLGDAMLIL

SEQ ID NO: 68752 - protein, 362 aa, Meiothermus silvanus
  REGION 1..362: note = tr|D7BG87|D7BG87_MEISD S-adenosylmethionine:tRNA ribosyltransferase-isomerase OS=Meiothermus silvanus (strain ATCC 700542 / DSM 9946 / VI-R2) OX=526227; GN = Mesil_0061PE=3 SV=1
MTLKEPSLDFVLPAELEAREPPEARGLERDQVRLMVSYRSSDRLVHTQFREIPQHLRAGDVLVINTSGTLPAALPATREDGKELRLHLSSRLPGGLWTVELRRVEEGASKPFSEGQAGETLRLPGRASVRLLTRYKLQPSETQVPTPSQGKTLSRLWIATFSFPDPIPYLLEHGQPIRYGYVPRSWPLEFYQSVYTTEMGSAEMPSAGRAFTAEIITRLVAQGVQVAPLLLHTGVASLEDHEPPYEEFYRVPPETARAVNQARADGRRVIAVGTTVVRALETVTDVYGVVHPGEGWTQLVITPQRGVRAVDGILTGWHEPKATHLMMLEAIAGREPLAVAYRAALERRYLWHEFGDLHLILP

SEQ ID NO: 68753 - protein, 336 aa, Meiothermus sp.
  REGION 1..336: note = tr|A0A370K156|A0A370K156_9DEIN S-adenosylmethionine:tRNA ribosyltransferase-isomerase; OS = Meiothermus sp. QL-1 OX=2058095 GN=queA PE=3 SV=1
MRLEDFDYHLPPELIAQQGAEPRDAARLMVVERQSGRIEHRVFRELPHYLRPGDVLVLNESKVIPARTFAQNPQGTPIEVLLVRELPGGDGRWEALLRPARRARVGTRLTFPEGLCATVEAVQADGSRLLRFEGDIWAHLERIGQTPLPPYIRAPVEPTRYQTVYARTPGSVAAPTAGLHFTPELLACLQAMGVEISYLILHVGPGTFKPVKESPETHVMHREPYEIPPSTAAAVNQAKAQGRRVIAVGTTVVRALETAWSETGLQPGAGETQLFIRPGFHYRVVDALITNFHLPRSTLLMLVSAFMGHELMRRAYQTAVAERYRFYSLGDAMLIL

SEQ ID NO: 68754 - protein, 378 aa, Meiothermus sp.
  REGION 1..378: note = tr|A0A323UB03|A0A323UB03_9DEIN S-adenosylmethionine:tRNA ribosyltransferase-isomerase; OS = Meiothermus sp. Pnk-1 OX=873128 GN=DNA98_02915 PE=3 SV=1
MRLRETSLDFVLPAELEAHEPPEARGLERDQVRLMVSYRSSDRLVHTRFREIPQYLGAGDVLVINTSGTLPAALPATAEDGRELRLHLSSRLPGGVWTVELRTPVSATEGGEQALTTKPFFGGRVGETLGLPGGASATLLARYRLGLEGATETPGPERFTPLHSGESRLWIAALEIPHGLQPTAYLLEHGQPIRYSYVPQPWPLEFYQTVYATELGSAEMPSAGRAFTPQIITRLVAQGVQVAPLLLHTGVASLEEHEPPYEEFYRVPPETARLVNQARADGRRVIAVGTTVVRALETVTDVYGVLHPGEGWTKLVITPQRGVRAVDGILTGWHEPKATHLLMLEAIAGKRHVEIAYRAALREQYLWHEFGDLHLILP

SEQ ID NO: 68755 - protein, 358 aa, unidentified
  source 1..358: note = Meiothermus terrae
  REGION 1..358: note = tr|A0A399EIC6|A0A399EIC6_9DEIN S-adenosylmethionine:tRNA ribosyltransferase-isomerase; OS = Meiothermus terrae OX=1408545 GN=queA_1 PE=3 SV=1
MTLKGPSLEFALPEELEAHEPPEARGLSRDGVRLMVSYRQGDRLAHARFRDLPEFLREGDVLVVNTSGTLPAALPAFREDGSELRLHLSTRLPGGVWTVELRRLEDGATKPYGGGQAGETLRLPGGASVTLLARHRMEGAGKAGSRLWVASFSFPEPYAPDPLPYLLEHGKPIRYGYVGQEWPLEFYQTVYATEMGSAEMPSAGRAFTPEVLTRLLSQGVLVVPLLLHTGVASLESHEPPYEEFYRVPPVTAQAVSQAKAEGRRVVAVGTTVVRALETVADPLGRVHPGEGWTRLLVTPERGVRAVDGILTGWHEPKATHLMMLEAIAGRGHLEAAYQAALEQRYLWHEFGDLHLILP

SEQ ID NO: 68756 - protein, 348 aa, unidentified
  source 1..348: note = Meiothermus terrae
  REGION 1..348: note = tr|A0A399EDP5|A0A399EDP5_9DEIN S-adenosylmethionine:tRNA ribosyltransferase-isomerase; OS = Meiothermus terrae OX=1408545 GN=queA_2 PE=3 SV=1
MLGGVGASYTLENFDYHLPPELIAQQGAEPRDASRLMVLHRAGGRLEHRVFRDVVEYLRPGDVLVLNQSKVIPARLFATNPQGTPVEVLLVRELSPEGMAEGRGSVWEAMLKPAKRAKGGLRFADGLGAEVIAVEEDGTRVLRFSGNVWEHLEALGQTPLPPYIHASVDPRRYQTVYARTPGSVAAPTAGLHFTPGLLERIRATGVETRYVTLHVGPGTFKPVKDDPDRHTMHAEPYEVPLETAEAVGRAKAEGRRVVAVGTTVVRTLESAWQGQGLRAGGGETRLFIRPGFAFRAVDALITNFHLPKSTLLMLVSAFAGYDLTMQAYRTAVEERYRFYSLGDAMLIL

SEQ ID NO: 68757 - protein, 362 aa, unidentified
  source 1..362: note = Melaminivora alkalimesophila
  REGION 1..362: note = tr|A0A317R9U7|A0A317R9U7_9BURK S-adenosylmethionine:tRNA ribosyltransferase-isomerase; OS = Melaminivora alkalimesophila OX=1165852 GN=queA PE=3; SV = 1
MATPARPYTLSDFDFDLPEGLIAQHPASERSGSRLLDGRSAPPVDRVFRELPALLAPGDLLVFNDTRVLRARIFGEKASGGRLELLIERVLDAGEVVAHMKVSKKPRPGARLHLAGGSTGGGFDATLLSRWPDEDGPLFRLALHAPDGASAWELMERHGHLPLPPYIERRQGDGEDPDAAEDAQRYQTIFAARPGAVAAPTAALHFDEGVLAALAARGIERASVTLHVGAGTFQPVKTENLAEHRMHSEWYDIPPGTLAALERCRQRGGRVVAVGTTTVRTLESWARTGQATGDTRIFITPGFAFQVVQLLVTNFHLPRSTLMMLVSAFAGHAHVMDLYRYAIAQRYRFFSYGDAMLLERRP

SEQ ID NO: 68758 - protein, 362 aa, unidentified
  source 1..362: note = Melaminivora sp.
  REGION 1..362: note = tr|A0A2R3QBB7|A0A2R3QBB7_9BURK S-adenosylmethionine:tRNA ribosyltransferase-isomerase; OS = Melaminivora sp. SC2-9 OX=2109913 GN=queA PE=3 SV=1
MTDTARVFSLSDFDFELPETLIAQHPVPERSASRLLDGRHSSPADRIFRDLPALLSAGDLLVFNDTRVLRARIFGEKASGGRLELLIERVLEGNEVVAHMKVSKKPRPGATLHLAGGSARGGFDATLLSRWPDEDGPLFRLALRAPDGATAWELMERHGHLPLPPYIERRQDGDHDPDEAEDAERYQTVFAARPGAVAAPTAALHFDAGVLEQLAARGVQTASVTLHVGAGTFQPVKTENLAEHRMHSEWYDIPAATLAALERCRQRGGRVVAVGTTTVRTLESWARSGQATGDTAIFITPGFAFQVVDLLITNFHLPRSTLMMLVSAFAGYEHVMRLYRHAVEQRYRFFSYGDAMLLERRP

SEQ ID NO: 68759 - protein, 367 aa, unidentified
  source 1..367: note = Melaminivora sp.
  REGION 1..367: note = tr|A0A2P1NH22|A0A2P1NH22_9BURK S-adenosylmethionine:tRNA ribosyltransferase-isomerase; OS = Melaminivora sp. SC2-7 OX=2116657 GN=queA PE=3 SV=1
MPHAPARAFHLSDFDFELPEALIAQHPAPERSASRLLDGRAAPAADRIFRELPQLLQPGDLLVFNDTRVVRARIFGEKASGGRLELLIERVLAGNQVVAHMKVSKKPPPGATLHLAGGSAGGGFDATLLSRWPDADGPLFRLALHAPDGATPWQLMERHGHLPLPPYIERQQSSGSDPDAAEDEQRYQTVFAAHPGAVAAPTAALHFDEAVLAALAGRGVERASVTLHVGAGTFQPVKTENLHEHRMHSEWYDIPQATLAALERCRARGGRVVAVGTTTVRTLESWACTGQATGDTSIFITPGFSFQVVQLLITNFHLPKSTLMMLVSALAGYEHVMALYRHAINQRYRFFSYGDAMLLERAPERAP

SEQ ID NO: 68760 - protein, 341 aa, unidentified
  source 1..341: note = Melghiribacillus thermohalophilus
  REGION 1..341: note = tr|A0A4R3NDU6|A0A4R3NDU6_9BACI S-adenosylmethionine:tRNA ribosyltransferase-isomerase; OS = Melghiribacillus thermohalophilus OX=1324956 GN=queA; PE = 3 SV=1
MNIADFDFELPEQLIAQQPLKDRSSSRLMVLTRDNHEIRHTSFTQIKHYLRPGDCLVLNDTKVLPARLFGIKKDTGAKIEVLLLHQREKDHWEVLVKPAKRVKKGTIIEFGEGLLTAECVRELEHGGRVLSFHYKGIFLEILNELGEMPLPPYIKTQLDDQDRYQTVYAREEGSAAAPTAGLHFTAELLKEIQQMGVHLAYITLHVGLGTFRPVNVENIEEHDMHAEFYRMNQETASLINRVRTNGGRIIAVGTTSTRTLETIVQKHGHFQEDSGWTDIFIYPPYEFQGIDGLLTNFHLPKSTLIMLVSALAGRDFILKAYREAVKQEYRFFSFGDAMLIL

SEQ ID NO: 68761 - protein, 343 aa, unidentified
  source 1..343: note = Melghirimyces algeriensis
  REGION 1..343: note = tr|A0A521AUR4|A0A521AUR4_9BACL S-adenosylmethionine:tRNA ribosyltransferase-isomerase; OS = Melghirimyces algeriensis OX=910412 GN=queA PE=3 SV=1
MDVTMFDFHLPEELIAQEPIRERSNSRLMVVDREEGTVTNRKFPDLLNYLIPGDVLVVNDTRVRPARLVGMKKDTGAKVELLLLNPLGNNRWEALVKPAKRVREGTEICFGDGVLTAVAEQKTEAAGGRIFHLQYDAPDIEQLLKSLGEMPLPPYIRKQLDEPERYQTVYSKNVGSAAAPTAGLHFTPELLEQMKEMGVQIAPITLHVGLGTFRPVTAEKVAEHQMHAEYYEVSDRSAKIIQKAKAEGRRVVAVGTTSVRTLESVAQEHGEIVATSGWTDIFIYPGFRFQVVDALLTNFHLPRSTLLMLVSAFASRELILSAYHEAVREKYRFFSFGDAMLIL

SEQ ID NO: 68762 - protein, 343 aa, unidentified
  source 1..343: note = Melghirimyces profundicolus
  REGION 1..343: note = tr|A0A2T6BH07|A0A2T6BH07_9BACL S-adenosylmethionine:tRNA ribosyltransferase-isomerase; OS = Melghirimyces profundicolus OX=1242148 GN=queA PE=3 SV=1
MDVSLFDFELPEELIAQEPAAERSGSRLMVVDRDRGTVSHRRFPDLLEYMNPGDVLVLNDTRVRPARLIGTKEGTGARVELLLLNPLGEDRWEALVKPAKRVKEGTVIRFGDGLLSAVAKEKTEAAGGRVFQLRYGSSDLDKLLEDLGEMPLPPYIRKQLDEPERYQTVYSRVVGSAAAPTAGLHFTPQLLDRAKQKGIRLAPITLHVGLGTFRPVTAENVEDHRMHAEYYEVSETSAGVIRSAGQEGKRVVAVGTTSVRTLESVAREHGEIRAARGWTDIFIYPGYRFRVVDALLTNFHLPRSTLLMLVSAFASRELILQAYRTAVRKRYRFFSFGDAMLIL

SEQ ID NO: 68763 - protein, 339 aa, unidentified
  source 1..339: note = Melghirimyces thermohalophilus
  REGION 1..339: note = tr|A0A1G6JJC6|A0A1G6JJC6_9BACL S-adenosylmethionine:tRNA ribosyltransferase-isomerase; OS = Melghirimyces thermohalophilus OX=1236220 GN=queA PE=3; SV = 1
MFDYPLPEDLIAQEPTEERSASRLMVVDRETEKIQHRRFPDILDYLGAGDVLVLNDTRVRPARLIGTKEGTGARIELLLLNPLGEDRWESLVKPAKRIREGTIVHFGEGDLTAVAEEKTEAAGGRVFRLHYNTSDLERLLDKLGEMPLPPYIRKQLDEPERYQTVYSREVGSAAAPTAGLHFTRELLEQAKEKGVEIVPITLHVGLGTFRPVTAENVEEHQMHAEFYEVSEVSATAIQKAKERGNRVVAVGTTSVRTLESVAREHGEVRATRGWTDIFIYPGFPFRVVDTLLTNFHLPKSTLLMLVSAFASRELMLEAYRTAVSERYRFFSFGDAMLIL

SEQ ID NO: 68764 - protein, 345 aa, unidentified
  source 1..345: note = Melioribacter roseus
  REGION 1..345: note = tr|I6YWW6|I6YWW6_MELRP S-adenosylmethionine:tRNA ribosyltransferase-isomerase OS=Melioribacter roseus (strain JCM 17771 / P3M-2) OX=1191523 GN=queA PE=3 SV=1
MKLSDFKYNLPKTAIAKFPVTPRDAAKLMVLNRATEEIEHKVFSDIIDYMDKGDVVVINKTKVMQARLIGKKERTNAKIEVFVLRELNKEENIWDVIVDPARKVRIGNRIYFNDNLWCEVIDNTTSRGRTVRFNEDAGDIFKAIEEIGNTPLPPYIKREPVPEDRENYQTIFAEIDGSVAAPTAGLHFTPQLVKKIEKKGIKFVPVILHIGLGTFRPVEVEDLTKHRMDSEYYEIPEETAETINKALKSKKNVFVVGTSTCRALESSVTAEGFSKPNRGWTDKFIFPPYDFKITKKLITNFHAPESTLMMLVAAFAGYDFTMKAYKKALKEGYRFLSYGDAMLIL

SEQ ID NO: 68765 - protein, 345 aa, unidentified; identical to SEQ ID NO: 67537
  source 1..345: note = Melioribacter sp.
  REGION 1..345: note = tr|A0A1G1BDF9|A0A1G1BDF9_9BACT S-adenosylmethionine:tRNA ribosyltransferase-isomerase; OS = Melioribacter sp. GWF2_38_21 OX=1801612 GN=queA PE=3; SV = 1

SEQ ID NO: 68766 - protein, 343 aa, Melissococcus plutonius
  REGION 1..343: note = tr|F3YC30|F3YC30_MELPT S-adenosylmethionine:tRNA ribosyltransferase-isomerase OS=Melissococcus plutonius (strain ATCC 35311 / CIP 104052 / LMG 20360 / NCIMB 702443)OX=940190 GN=queA PE=3 SV=1
MLNTEEFDFYLPEELIAQTPLENRESSRLLVLNKKTKEMEDKHFYEIIDELNSGDALVMNDTKVLPARLYGEKKETGGHLEVLLLNNTAGDNWEVLIKPARRAKVGTEITFGDGRLKATVKEELEHGGRIVTFDYNGIFLEIIESLGEMPLPPYIKERLEDPDRYQTVYAKETGSAAAPTAGLHFTEELLEKIEKKGIKLVYLTLHVGLGTFRPVNVAHIEEHKMHSEFYRLTEDAAAQLNEVRQTGGRIVAVGTTSIRTLETIGSKFNGEIHADSGWTDIFIKPGYTFKIVQAFITNFHLPKSTLIMLVSAFSDREFIFSAYTHAVKENYRFFSFGDAMFIH

SEQ ID NO: 68767 - protein, 343 aa, Melissococcus plutonius
  REGION 1..343: note = tr|A0A2Z5Y1D1|A0A2Z5Y1D1_9ENTE S-adenosylmethionine:tRNA ribosyltransferase-isomerase; OS = Melissococcus plutonius OX=33970 GN=queA PE=3 SV=1
MLNTEEFDFYLPEELIAQTPLENRESSRLLVLNKKTKEMEDKHFYEIIDELNSGDALVMNDTKVLPARLYGEKKETGGHLEVLLLNNTAEDNWEVLIKPARRAKVGTEITFGDGRLKATVKEELEHGGRIVTFDYNGIFLEIIESLGEMPLPPYIKERLEDPDRYQTVYAKETGSAAAPTAGLHFTEELLEKIEKKGIKLVYLTLHVGLGTFRPVNVAHIEEHKMHSEFYRLTGDAAAQLNEVRQTGGRIVAVGTTSIRTLETIGSKFNGEIHADSGWTDIFIKPGYTFKIVQAFITNFHLPKSTLIMLVSAFSDREFILSAYTHAVKENYRFFSFGDAMFIH

SEQ ID NO: 68768 - protein, 344 aa, Melissococcus sp.
  REGION 1..344: note = tr|A0A374JFP9|A0A374JFP9_9ENTE S-adenosylmethionine:tRNA ribosyltransferase-isomerase; OS = Melissococcus sp. OM08-11BH OX=2293110 GN=queA PE=3 SV=1
MTLKTSDFDFDLPEELIAQTPLENRAASKLLILDSKTGAIEDTQFPAIIDELNEGDALVMNDTRVLPARLHGEKPDTGGHLEVLLLTNTTGDTWETLIKPAKRAKKGTVISFGNGALKAVVEEELEHGGRMITFSYDGVFLEILESLGEMPLPPYIKERLNDNDRYQTVYAKENGSAAAPTAGLHFTPDVLKKIEDKGVKLVYLTLHVGLGTFRPVSVDDVENHKMHSEFYRLTKDAADTLNEVKEQGGKVVAVGTTSIRTLETIGTKFDGKLQEDNGWTDIFIKPGYEFKIVDAFLTNFHLPMSTLIMLVSAFAGKDNVLNAYEHAVKEKYRFFSFGDAMFVK

SEQ ID NO: 68769 - protein, 361 aa, Melittangium boletus
  REGION 1..361: note = tr|A0A250ITJ1|A0A250ITJ1_9DELT S-adenosylmethionine:tRNA ribosyltransferase-isomerase; OS = Melittangium boletus DSM 14713 OX=1294270 GN=queA PE=3; SV = 1
MSSLLSDYDFALPEAQIAQTPLATRDASRLLVVSRASGAWTHRHFAELPGLLREGDLLVVNDARVIPARLLGSKADTGGRVELLVVRPASSTLTSHALGGDAEALEWICLGQASKGLKPGARLSFSGGLAAEVLEALGGGEYRVRFLAAPGTSLAEVLNQAGRLPLPPYITRAPEAADAERYQTVYARASGAVAAPTAGLHFTDAIFQALAARGIQRVEVTLDVGPGTFLPVREENLEKHRMHPERYFVPEATARAVNAAKAEGRRVVAVGTTVVRTLESAWDAAAGSLREGPGETEIFIRPGFDFRAVDVLLTNFHLPRSTLVVLVSALLGRERTLAAYREAVAAGYRFFSYGDAMLVTE

SEQ ID NO: 68770 - protein, 349 aa, Meridianimaribacter sp.
  REGION 1..349: note = tr|A0A4Q9RMY1|A0A4Q9RMY1_9FLAO S-adenosylmethionine:tRNA ribosyltransferase-isomerase; OS = Meridianimaribacter sp. CL38 OX=2213021 GN=queA PE=3; SV = 1
MKLSHFNFKLPEELLADRPSDIRDEARLMVLNRKEQTIEHKLFKDVIDYFDEGDVMILNNTKVFPARLYGNKEKTGARIEVFLLRELNEEQRLWDVLVDPARKIRIGNKLYFGDDDTLVAEVIDNTTSRGRTLRFLYDGSYKEFRNKLTELGETPLPKYIKRDVEPEDEERYQTIFAKNEGAVAAPTAGLHFSKHLLKRLEIKGVELPEITLHVGLGTFNPVEVEDLSKHKMDSEEIFIGPDAVETINKGISTKKRVCAVGTTSMRAIESSVSSSGTLNEFSGWTNKFIFPPYDFSIANCMITNFHTPKSTLLMMVSAFAGHDFMKKAYEEAVKEKYRFYTYGDAMLIL

SEQ ID NO: 68771 - protein, 367 aa, Merismopedia glauca
  REGION 1..367: note = tr|A0A2T1C8B8|A0A2T1C8B8_9CYAN S-adenosylmethionine:tRNA ribosyltransferase-isomerase; OS = Merismopedia glauca CCAP 1448/3 OX=1296344 GN=queA PE=3; SV = 1
MCDEGERLDYFLTSYDYELPAELIAQTPAVPRDSSRLLVVESLNEPQHSIFKDLPQWLKAGDLLVVNNTKVLPARIYGQKSTGGLVEILLLEEKQHNCWVVLAKRGRRLPIGTQIVFKPIQMGAIPLVDGVAIATLPAVVVGQDEATGGRLLQFTLPPGISLLSVLDGFGEMPLPPYITSKQSQPEQYQTIYAESLGAVAAPTAGLHFTPELLAKLQEHGVKIATVTLHVGVGTFRPVEVEDITTHKMHGEWIEVSAETVEQIQATKSSGGRVIGVGTTVARSLESAAQAGEIRAFAGKTQLFIYPGYQWRVVDGLITNFHLPRSSLMMMVSSLIGRERLLSLYREAIAHRYRFYSFGDAMLILPSG

SEQ ID NO: 68772 - protein, 328 aa, unidentified
  source 1..328: note = Mesoaciditoga sp.
  REGION 1..328: note = tr|A0A2J6WHU8|A0A2J6WHU8_9BACT S-adenosylmethionine:tRNA ribosyltransferase-isomerase; OS = Mesoaciditoga sp. OX=2060323 GN=queA PE=3 SV=1
MKIEDFDYYLPESLIAQSPTNPRDHSKLMVIHKDTGKIDHRIFYNIVDYLNKDDLLILNETKVIRARLIGKKETGANVEVFLLKKVDDKRWQTLVKPGGKIKEGTKIIFKGAEGICVKHLSDGTRYFEFNVGDEELEKIGEIPLPPYIKKPLEDPSRYQTVYARDPGSVAAPTAGLHFTDRLLDEISTKGVKILKVTLDVGLDTFRPIHEKEIEEHKMHTENYRIPEETIEEIKHKKGRVIAVGTTVVRTLESWAKTGQLHGDTSLYIYPPYKFKVVEGLVTNFHLPKSSLIVLVSAFAGRDLVMKAYKMAIENSYRFFSFGDACLFI

SEQ ID NO: 68773 - protein, 363 aa, unidentified
  source 1..363: note = Mesocricetibacter intestinalis
  REGION 1..363: note = tr|A0A4R6VCD1|A0A4R6VCD1_9PAST S-adenosylmethionine:tRNA ribosyltransferase-isomerase; OS = Mesocricetibacter intestinalis OX=1521930 GN=queA PE=3; SV = 1
MRVSDFYFDLPDELIARYPKPDRKSSRLLHLNGVNGEIAHRTFSDIIDLINPGDLLVFNNTRVIPARMFGHKLSGGKIEVLVERLLSETRCLAHIRASKAPKEGAELCLGEDKLGAGRGIKVKMLGRQGSLFELEVEDNRGGFLQVLQKIGHMPLPPYIDRPDEEADQERYQTVYNKVPGAVAAPTAGLHFDQELLDQLSRKGVNFAFVTLHVGAGTFQPVRVENIEDHHMHSEYAEVPQQTVDAILAAKAAGKRVIAVGTTSVRSLESAALAAQQRHAASLLEPYFSDTSIFIYPGKKFLVTDCLITNFHLPESTLIMLVSAFAGYSNIMRAYQSAVQNRYRFFSYGDAMFIHKNPEVRGLE

SEQ ID NO: 68774 - protein, 349 aa, unidentified
  source 1..349: note = Mesoflavibacter aestuarii
  REGION 1..349: note = tr|A0A2T1NEB6|A0A2T1NEB6_9FLAO S-adenosylmethionine:tRNA ribosyltransferase-isomerase; OS = Mesoflavibacter aestuarii OX=1266046 GN=queA PE=3 SV=1
MKLSHFEFNLPDELLAEYPAEHRDESRLMVLNREKQTIEHRQFKDIIEYFDEKDVLLLNDTKVFPARLFGNKEKTGARIEVFLLRELNEEQRLWDVLVDPARKIRIGNKLYFGEDESLVAEVIDNTTSRGRTLRFLYDGSYDAFRKKLTELGETPLPKYIKRDVQPEDEERYQTIFAKNEGAVAAPTAGLHFSKHLLKRLEIKGVDFAEVTLHVGLGTFNPVEVEDLSKHKMDSEEVFIGPKTVETVNKALKDKRRICAVGTTAMRAVESAVSSSLTLNEIDGWTNKFIFPPYDFSIANCMITNFHTPKSTLLMMVSAFAGHDFIMKAYEEAVKEKYKFYSYGDAMLII

SEQ ID NO: 68775 - protein, 349 aa, unidentified
  source 1..349: note = Mesoflavibacter sabulilitoris
  REGION 1..349: note = tr|A0A2T1N7Z7|A0A2T1N7Z7_9FLAO S-adenosylmethionine:tRNA ribosyltransferase-isomerase; OS = Mesoflavibacter sabulilitoris OX=1520893 GN=queA PE=3; SV = 1
MKLSHFNFDLPEELLAEYPAENRDESRLMVLHRDTQKIEHRMFKDLIDYFDEKDVMILNNTKVFPARLFGNKEKTGARIEVFLLRELNEEQRLWDVLVDPARKIRIGNKLYFGDDESLVAEVIDNTTSRGRTLRFLYDGSYQEFRRKLNELGETPLPKYIKREVEPEDEERYQTIFAKEEGAVAAPTAGLHFSKHLLKRLEIKGVDFAEVTLHVGLGTFNPVEVEDLSKHKMDSEELKIGPEAVKIINNAKAEKRRVCAVGTTAMRAIESSVSSSGTLNEIEGWTNKFIFPPYDFSIANSMITNFHTPKSTLLMMISAFAGHDFVKHAYEEAVKEKYKFYSYGDAMLIL

SEQ ID NO: 68776 - protein, 349 aa, Mesoflavibacter sp.
  REGION 1..349: note = tr|A0A2T1NSA2|A0A2T1NSA2_9FLAO S-adenosylmethionine:tRNA ribosyltransferase-isomerase; OS = Mesoflavibacter sp. HG96 OX=2109944 GN=queA PE=3 SV=1
MKLSHFNFDLPEELLAEYPAENRDESRLMVLHRDTQKIEHRMFKDLIDYFDEKDVMILNNTKVFPARLFGNKEKTGARIEVFLLRELNEEQRLWDVLVDPARKIRIGNKLYFGEDESLVAEVIDNTTSRGRTLRFLYDGSYQEFRQKLKDLGETPLPKYIKREVEPEDEDRYQTIYAKNEGAVAAPTAGLHFSKHLLKRLEIKGVDFAEVTLHVGLGTFNPVEVEDLSKHKMDSEELIIGPEAVNIINNAKAEKRRVCAVGTTAMRAIESSVSSSGTLNEIEGWTNKFIFPPYDFSIANSMITNFHTPKSTLLMMISAFAGHDFVKHAYEEAVKEKYKFYSYGDAMLIL

SEQ ID NO: 68777 - protein, 351 aa, Mesonia algae
  REGION 1..351: note = tr|A0A2W7IPS8|A0A2W7IPS8_9FLAO S-adenosylmethionine:tRNA ribosyltransferase-isomerase; OS = Mesonia algae OX=213248 GN=queA PE=3 SV=1
MGMKLSQFSFELPNELLAEYPSEHRDEARLMVVNRKENTIEHKMFKDLIEYFEPEDVMVLNNTKVFPARLFGNKEKTGARIEVFLLRELNPETRLWDVLVDPARKIRIGNKLYFGDDESLVAEVIDNTTSRGRTLRFLYDGSYEEFRKKLNKLGETPLPKYIKRDVEPEDADRYQTIYAKTEGAVAAPTAGLHFSKHLLKRLEIKGVNFAEVTLHVGLGTFNPVEVEDLSKHKMDSEEAEIALPAVDTINEAIKNKRRICAVGTTVMRSLESSVSSNGTLNEFKGWTNKFIFPPYDFSIANCMITNFHTPKSTLLMMISAFAGHDLMERAYDEAIKEKYKFYSYGDAMLII

SEQ ID NO: 68778 - protein, 351 aa, Mesonia phycicola
  REGION 1..351: note = tr|A0A1M6GRB8|A0A1M6GRB8_9FLAO S-adenosylmethionine:tRNA ribosyltransferase-isomerase; OS = Mesonia phycicola OX=579105 GN=queA PE=3 SV=1
MGMKLSQFNFELPNNLLAEYPSEDRDEARLMVLNRKENTIEHKKFKDLINYFEPDDVMVLNNTKVFPARLFGNKEKTGARIEVFLLRELNSETRLWDVLVDPARKIRIGNKLYFGDDESLVAEVIDNTTSRGRTLRFLYDGSYEEFRNKLNELGETPLPKYIKRDVEPEDADRYQTIYAKNEGAVAAPTAGLHFSKHLLKRLEIKGVDLAEVTLHVGLGTFNPVEVEDLSKHKMDSEEAEIEKAATVVINNAIENKRRICAVGTTVMRALESSVSSNGRLNEFKGWTNKFIFPPYDFSIANCMITNFHTPKSTLLMMVSAFAGHDLMERAYKEAIKEEYQFYSYGDAMLII

SEQ ID NO: 68779 - protein, 349 aa, Mesonia sp.
  REGION 1..349: note = tr|A0A5C8LNC8|A0A5C8LNC8_9FLAO S-adenosylmethionine:tRNA ribosyltransferase-isomerase; OS = Mesonia sp. K4-1 OX=2602760 GN=queA PE=3 SV=1
MKLSQFSFELPNELLAEYPSEHRDEARLMVVNRKENTIEHKMFKDLIEYFEPEDVMVLNNTKVFPARLFGNKEKTGARIEVFLLRELNPETRLWDVLVDPARKIRIGNKLYFGDDESLVAEVIDNTTSRGRTLRFLYDGSYEEFRKKLNKLGETPLPKYIKRDVEPEDADRYQTIYAKTEGAVAAPTAGLHFSKHLLKRLEIKGVNFAEVTLHVGLGTFNPVEVEDLSKHKMDSEEAEIALPAVDTINEAIKNKRRICAVGTTVMRSLESSVSSNGTLNEFKGWTNKFIFPPYDFSIANCMITNFHTPKSTLLMMISAFAGHDLMERAYDEAIKEKYKFYSYGDAMLII

SEQ ID NO: 68780 - protein, 349 aa, Mesonia sp.
  REGION 1..349: note = tr|A0A2W1JVJ6|A0A2W1JVJ6_9FLAO S-adenosylmethionine:tRNA ribosyltransferase-isomerase; OS = Mesonia sp. K7 OX=2218606 GN=queA PE=3 SV=1
MKLSQFNFELPKELLAEYPSEHRDEARLMVVNRKEGTIEHKMFKDLINYFDTDDVMVLNNTKVFPARLFGNKEKTGARIEVFLLRELNPETRLWDVLVDPARKIRIGNKLYFGDDESLVAEVIDNTTSRGRTLRFLYDGSYEDFRKKLTELGETPLPKYIKREVEPEDAERYQTIYAKNEGAVAAPTAGLHFSKHLLKRLEIKGVNLAEVTLHVGLGTFSPVEVEDLSKHKMDSEEAIIDKTATQIVNKAIVEKRKVCAVGTTVMRTLESAVSSNGQLNEFQGWTNKFIFPPYDFSIANCMITNFHTPKSTLLMMISAFAGHDLMEKAYAEAIKEKYKFYSYGDAMLIL

SEQ ID NO: 68781 - protein, 358 aa, Mesorhizobium albiziae
  REGION 1..358: note = tr|A0A1I4BY15|A0A1I4BY15_9RHIZ S-adenosylmethionine:tRNA ribosyltransferase-isomerase; OS = Mesorhizobium albiziae OX=335020 GN=queA PE=3 SV=1
MRVDLFDFELPEDRIALRPAEPRDAARLLVVKPRQPLADRTVGDLPGLLEPGDVLVFNDTRVIPAQLTGIRQRGEAMANVDATLHMRVAPDRWLAFMRPAKRLAEGDRIRFGHDGNACFLGNLDATVLEKRDAGEVLLGFDLSGAFLDEALHAVGHIPLPPYIASKRPDDARDLTDYQTVYAKDEGAVAAPTAGLHFTEDLFSALDARGIERRFVTLHVGAGTFLPVKADDTADHKMHAEIGHISRETADALNAARAQGRRIVAVGTTSLRLIESAAQGDGAIEPWSGPTSIFITPGYRFKAVDVLMTNFHLPRSTLFMLVSAFAGLETMRDAYRHAIENRYRFYSYGDASLLFRAEE

SEQ ID NO: 68782 - protein, 358 aa, Mesorhizobium albiziae
  REGION 1..358: note = tr|A0A5D4H2H2|A0A5D4H2H2_9RHIZ S-adenosylmethionine:tRNA ribosyltransferase-isomerase; OS = Mesorhizobium albiziae OX=335020 GN=queA PE=3 SV=1
MRVDLFDFDLPEGHIALRPAEPRDTARLLVVRPGEPLEDRIVRELPGLLKAGDALVFNDTRVIPAQLTGLRRRGDAVAQVDATLHMRVAPDRWKAFMRPAKRLAVGDRIQFGHDDSACLLGTLDATVVEKGDGGEVTIAFDLAGPALDDALREVGHIPLPPYIAGKRPEDERDRSDYQTIYAREEGAVAAPTAGLHFTPELFAALDEAGIERHFVTLHVGAGTFLPVKADDTADHRMHAEIGHVSAATAAALNEVKARGGRIVAVGTTSLRLLESAAAPDGSLAEWSGATDIFITPGYRFRTANVLMTNFHLPRSTLFMLVSAFSGMETMRAAYDHAIADGYRFYSYGDGSLLFRSDD

SEQ ID NO: 68783 - protein, 359 aa, Mesorhizobium alhagi
  REGION 1..359: note = tr|H0HVH8|H0HVH8_9RHIZ S-adenosylmethionine:tRNA ribosyltransferase-isomerase OS=Mesorhizobium alhagi CCNWXJ12-2 OX=1107882 GN=queA PE=3 SV=1
MRVDLFDFDLPEDRIALRPAEPRDAARLLVVRPGEGVEDRGVVELPALLQPGDVMIFNDTKVIPAQLKGVRRRGDASAQVDATLHMRVAPDRWLAFVRPGKRVAAGDRIHFGHDGNSCFLGALDATVIEKREGGEALLAFDLSGPFLDEALHAVGHIPLPPYIASKRPDDERDRTDYQTIFARDEGAVAAPTAGLHFTPELFAALDARGIERHFVTLHVGAGTFLPVKVDDTADHKMHAESGSVSAQTAAAVNAARARGSRVVSVGTTSLRLLESAARDDGTLTEWSGATSIFITPGYRFRIVDVLMTNFHLPRSTLFMLVSAFSGLETMRAAYAHAIENGYRFYSYGDACLLFRAQNQ

SEQ ID NO: 68784 - protein, 362 aa, Mesorhizobium amorphae
  REGION 1..362: note = tr|G6Y9D3|G6Y9D3_9RHIZ S-adenosylmethionine:tRNA ribosyltransferase-isomerase OS=Mesorhizobium amorphae CCNWGS0123 OX=1082933 GN=queA PE=3 SV=1
MRVDLFDFELPEERIALRPAEPRDSARMLVVKPGEGLGDRTVRDLPSFLEAGDVLVFNDTKVIPAQLKGIRRRGEAQAQVEATLHMRVAPDRWQAFMRPGKRVAAGDRIHFGHDGNSCFLGQLDATVIEKGEAGEVLLGFDLSGAFLDEALHAVGHIPLPPYIASKRDDDDRDRSDYQTIYAREEGAVAAPTAGLHFTPELFAALDAKGIERRFVTLHVGAGTFLPVKADDTADHKMHAETGSVSQDTAEALNAAKVRGGRIIAVGTTSLRLLESAANPDGMLAAWSGPTDIFITPGYRFRTADMLMTNFHLPRSTLFMLVSAFSGLETMRAAYAHAIDNSYRFYSYGDASLLYRAETSDGR

SEQ ID NO: 68785 - protein, 349 aa, Mesorhizobium amorphae
  REGION 1..349: note = tr|A0A2W4YX69|A0A2W4YX69_9RHIZ S-adenosylmethionine:tRNA ribosyltransferase-isomerase; OS = Mesorhizobium amorphae OX=71433 GN=queA PE=3 SV=1
MRVDAFDFELPESLIALRPAEPRATARLLTVGADGALGDRRVGDLPDLLRAGDLLVFNDTKVIPAQLEGLRQRGENAAKVSATLHRRVADDAWEAFLRPGKRVAEGDLLRFGMLEARVEEKSEGGIASLRFDRAGPALDSAIAEVGHVPLPPYIASRRGDDAQDRADYQTVYAREEGAVAAPTAGLHFTEAMFERLAERGIGRAFVTLHVGAGTFLPVKVEDTADHRMHFETGSVSQDAAEAIAKTKRAGGRVLSVGTTSLRILESAVDAEGVVRPWAGSTDIFITPGYRFRTADMLFTNFHLPRSTLMMLVSAFSGLDAMRAAYAHAIARGYRFYSYGDASLLERSDP

SEQ ID NO: 68786 - protein, 359 aa, Mesorhizobium australicum
  REGION 1..359: note = tr|A0A1X7PBN2|A0A1X7PBN2_9RHIZ S-adenosylmethionine:tRNA ribosyltransferase-isomerase; OS = Mesorhizobium australicum OX=536018 GN=queA PE=3 SV=1
MKVDLFDFDLPEDRIALRPAVPRDSAKLLVVRPGEALADRVVRDLPGLLRPGDALVFNDTKVIPAQLSGLRRRGEASARVDATLHMRVGPDAWRAFLRPAKRVTVGDRIAFGHTENICLMGALDATVEEKGEGGEVLLRFDFSGAALDEALHTVGHIPLPPYIASKRPEDERDRADYQTIYADEEGAVAAPTAGLHFTPDLFAALDAAGIERHFVTLHVGAGTFLPVKADDTADHKMHAEVGRVSTATASALNAVKARGGRIVCVGTTSLRLLESAAGEDGRLSAWTGPTDIFITPGYHFRFVDVLMTNFHLPRSTLFMLVSAFSGLETMRAAYAHAIAGGYRFYSYGDAGLLFRAGLR

SEQ ID NO: 68787 - protein, 361 aa, Mesorhizobium australicum
  REGION 1..361: note = tr|L0KQQ1|L0KQQ1_MESAW S-adenosylmethionine:tRNA ribosyltransferase-isomerase OS=Mesorhizobium australicum (strain HAMBI 3006 / LMG 24608 / WSM2073) OX=754035 GN=que A PE=3 SV=1
MRVDLFDFDLPEERIALRPAEPRDSAKMLVVKPGKGLEDRTVGDLPSLLRAGDVLVFNDTKVIPAQLKGIRRRGEAQSQVEATLHMRMAPDRWLAFMRPGKRIAAGDRIHFGHDGNSCFLGQLDATVIEKGEGGEALLGFDLSGPFLDEALHAVGHIPLPPYIASKRDDDERDRADYQTIYAREEGAVAAPTAGLHFTPALFAALDAKGVERRFVTLHVGAGTFLPVKADDTADHKMHAEIGSVSQATADALNAAKARGGRVIAVGTTSLRLLESAAREDGTLAPWSGPTDIFITPGYRFRTADMLMTNFHLPRSTLFMLVSAFSGLDTMRAAYAHAIESGYRFYSYGDASLLFREENDGR

SEQ ID NO: 68788 - protein, 362 aa, Mesorhizobium ciceri
  REGION 1..362: note = tr|A0A143N9H6|A0A143N9H6_9RHIZ S-adenosylmethionine:tRNA ribosyltransferase-isomerase; OS = Mesorhizobium ciceri OX=39645 GN=queA PE=3 SV=1
MRVDVFDFDLPEERIALRPAQPRDSAKMLLVKPGEGLEDRTVGDLPSLLRAGDVLVFNDTKVIPAQLKGIRRRGEATAQVEATLHMRMAPDRWLAFMRPGKRIAAGDRIHFGHDGNSCFLGQLDATVIEKGEGGEALLGFDLSGPFLDEALHAVGHIPLPPYIASKRDDDERDRADYQTIYASEEGAVAAPTAGLHFTPELFAALDAKGVERRFVTLHVGAGTFLPVKADDTADHKMHAETGSVSEATADALNAARARGGRIVAVGTTSLRLLESAAREDGTLAAWSGPTDIFITPGYCFRTADMLMTNFHLPRSTLFMLVSAFSGLDTMRAAYAHAIENRYRFYSYGDASLLFRAETSDGR

SEQ ID NO: 68789 - protein, 362 aa, Mesorhizobium ciceri
  REGION 1..362: note = tr|E8TB05|E8TB05_MESCW S-adenosylmethionine:tRNA ribosyltransferase-isomerase OS=Mesorhizobium ciceri biovar biserrulae (strain HAMBI 2942 / LMG 23838 / WSM1271) OX= 765698 GN=queA PE=3 SV=1
MRVDLFDFELPEERIALRPAQPRDSAKMLLVKPGEELEDRTVGDLPSLLSAGDVLVFNDTKVIPAQLKGIRRRGEATAQVEATLHMRMAPDRWLAFMRPGKRIAAGDRIHFGHDGNSCFLGQLDATVIEKGEGGEALLGFDLSGPFLDEALHAVGHIPLPPYIASKRDDDERDRADYQTIYASEEGAVAAPTAGLHFTPELFAALDAKGVERRFVTLHVGAGTFLPVKADDTADHKMHAETGSVSEATADALNAARARGGRIVAVGTTSLRLLESAAREDGTLAAWSGPTDIFITPGYRFRTADMLMTNFHLPRSTLFMLVSAFSGLDTMRAAYAHAIANRYRFYSYGDASLLFRAETSDGR

SEQ ID NO: 68790 - protein, 370 aa, unidentified
  source 1..370: note = Mesorhizobium delmotii
  REGION 1..370: note = tr|A0A2P9A9U8|A0A2P9A9U8_9RHIZ S-adenosylmethionine:tRNA ribosyltransferase-isomerase; OS = Mesorhizobium delmotii OX=1631247 GN=queA PE=3 SV=1
MRVDLFDFDLPEERIALRPAEPRDSAKMLVVRPGEGLEDRTVHELPSLLESGDVLVFNDTKVIPAQLKGIRRRGEAAAQVEATLHMRVAPDRWLAFMRPGKRIAVGDRIHFGHDANSCFLGQLDATVIAKGEAGEALLGFDLSGPFLDEALHAVGHIPLPPYIASKRDDDERDRKDYQTIYAREEGAVAAPTAGLHFTPELFAALDAKGVERRFVTLHVGAGTFLPVKVDDTADHKMHAEIGSVSPETAEALNAAKARDGRIIAVGTTSLRLLESATREDGTLAGWSGPTDIFITPGYRFKAADMLMTNFHLPRSTLFMLVSAFCGLETMRAAYAHAIETRYRFYSYGDASLLFKEDNDGRAPGIEQGIQ

SEQ ID NO: 68791 - protein, 380 aa, unidentified
  source 1..380: note = Mesorhizobium delmotii
  REGION 1..380: note = tr|A0A2P9AIJ5|A0A2P9AIJ5_9RHIZ S-adenosylmethionine:tRNA ribosyltransferase-isomerase; OS = Mesorhizobium delmotii OX=1631247 GN=BQ8482_180188 PE=3; SV = 1
MIAADRPDRRSAKLFVVEAGGTMSDLPRAVLATLFDPGDLVVANDAATLPASLHGTHVPSDEAIEIRLAGWLSLPDPTRFVAIAFGAGDHRTRTEDRLPPPPLSPGDRLRLGPLEAVVERLLDHPRLLELRFPGNRAAVLAGLAQHGRPIQYAHVAEPLALWDVWTKIAAGPVAFEAPSAGFALDWRTLQAWRRRGVGFATVTHAAGVSSTGDPALDLRLPFDEPYRIPERTAAQVARAKLRGGRIIAIGTSVVRALEAAANPAGNVRAGNAIATGRIARDTRLHVVDAILTGIHQPGESHFELLRAFADDALLAKASAAFTAYRYRAHEFGDSMLLNRQPLLLSREQNRAGVLETKRRCAARWISGLSNCPDTEARAKV

SEQ ID NO: 68792 - protein, 358 aa, unidentified
  source 1..358: note = Mesorhizobium ephedrae
  REGION 1..358: note = tr|A0A2P7SPK8|A0A2P7SPK8_9RHIZ S-adenosylmethionine:tRNA ribosyltransferase-isomerase; OS = Mesorhizobium ephedrae OX=2116701 GN=queA PE=3 SV=1
MKVDLFDFELPEDRIALRPAVPRDSAKLLVVRPDSGLEDRTVRDLPDLLKAGDALVFNDTKVIPAQLRGIRRRGDNQAHVEATLHMRVAPDRWLAFLRPAKRVAQGDRISFGHDGNTCFLGALDATVVEKRGAGEALLAFDLSGPVLDEALHQVGHIPLPPYIASKRDDDARDLVDYQTVYAREEGAVAAPTAGLHFTPKLFAALDAAGIERHFVTLHVGAGTFLPVKAEDTADHRMHAERGEVSADTAAALNAARARGGRVVAVGTTSLRLLESAADEAGIVQPWSGETSIFITPGYRFRAVEVLMTNFHLPRSTLFMLVSAFSGLDTMRAAYRHAIENGYRFYSYGDAGLLFRREP

SEQ ID NO: 68793 - protein, 361 aa, unidentified
  source 1..361: note = Mesorhizobium erdmanii
  REGION 1..361: note = tr|A0A4Q1V233|A0A4Q1V233_9RHIZ S-adenosylmethionine:tRNA ribosyltransferase-isomerase; OS = Mesorhizobium erdmanii OX=1777866 GN=queA PE=3 SV=1
MRVDLFDFELPEERIALRPAEPRDSAKMLVVKSGEALDDRKVGDLPSLLRAGDVLVFNDTKVIPAQLKGIRRRGEAQAQVEATLHMRVAPDRWLAFMRPGKRIAAGDRIHFGHDGNSCFLGQLDATVIEKGEGGEALLGFDLSGPFLDEALHAVGHIPLPPYIASKRDDDERDRADYQTIYAREEGAVAAPTAGLHFTPELFAALDAKGVERHFVTLHVGAGTFLPVKADDTADHKMHAEIGSVSRETADALNAAKARGGRIIAVGTTSLRLLESAAREDGRVPAWSGPTDIFITPGYRFRTADMLMTNFHLPRSTLFMLVSAFCGLDTMRAAYAHAIANRYRFYSYGDASLLYRAEMSDG

SEQ ID NO: 68794 - protein, 362 aa, unidentified
  source 1..362: note = Mesorhizobium hawassense
  REGION 1..362: note = tr|A0A330HNL2|A0A330HNL2_9RHIZ S-adenosylmethionine:tRNA ribosyltransferase-isomerase; OS = Mesorhizobium hawassense OX=1209954 GN=queA PE=3 SV=1
MRVDLFDFDLPEERIALRPAEPRDSARLLVVKPGETLEDRIVGDLPSLLREGDVLVFNDTKVIPAQLKGFRKRGEAVAQVEATLHMRVAPDRWQAFMRPGKRIAAGDRIHFGHDGNSCFLGQLDATVLEKGEAGEALLGFDLSGPFLDEALHAVGHIPLPPYIASKRDDDERDRADYQTIYAREEGAVAAPTAGLHFTPELFAALDAKGVERRFVTLHVGAGTFLPVKVDDTADHKMHAETGSVSAETAAALNAAKARGGRIICVGTTSLRLLESAARETGAVEAWSGPTDIFITPGYRFRTADMLMTNFHLPRSTLFMLVSAFSGLETMRLAYAHAIDNRYRFYSYGDASLLYRAETSDGR

SEQ ID NO: 68795 - protein, 361 aa, unidentified
  source 1..361: note = Mesorhizobium helmanticense
  REGION 1..361: note = tr|A0A2T4J217|A0A2T4J217_9RHIZ S-adenosylmethionine:tRNA ribosyltransferase-isomerase; OS = Mesorhizobium helmanticense OX=1776423 GN=queA PE=3 SV=1
MRVDLFDFELPEERIALRPAEPRDSARMLVVRPDEGLEDRTVRDLPSLLKRGDVLVFNDTKVIPAQLKGIRRRGEAVAQVEATLHMRTAPDRWLAFMRPGKRVAAGDRIHFGHDGNSCFLGQLDATVIEKGDGGEVLLGFDLSGPFLDEALHAVGHIPLPPYIASKRDDDERDRGDYQTIYAREEGAVAAPTAGLHFTPELFVALDAKGIERRFVTLHVGAGTFLPVKADDTADHKMHAETGSVSPETAEALNAAKARGGRIIAVGTTSLRLLESAASPDGRLAAWSGPTDIFITPGYRFKTADMLMTNFHLPRSTLFMLVSAFSGLETMRAAYAHAIETGYRFYSYGDASLLFREENDGR

SEQ ID NO: 68796 - protein, 361 aa, Mesorhizobium huakuii
  REGION 1..361: note = tr|A0A068D5J3|A0A068D5J3_9RHIZ S-adenosylmethionine:tRNA ribosyltransferase-isomerase; OS = Mesorhizobium huakuii 7653R OX=763057 GN=queA PE=3 SV=1
MRVDLFDFDLPEERIALRPTEPRDSAKMLVVRPGEALDDRTVGHLPSLLRAGDVLVFNDTKVIPAQLKGIRRRGDAQAQVEATLHMRVAPDRWLAFMRPGKRIAAGDRIHFGHDGNSCFLGQLDATVIEKGEGGEALLGFDLSGPFLDEALHTVGHIPLPPYIASKRDDDERDRADYQTIYAREEGAVAAPTAGLHFTPELFAALDAKGVERHFVTLHVGAGTFLPVKADDTADHKMHAEIGSVSRETANALNAAKARGGRIIAVGTTSLRLLESAAREDDTVPAWSGPTDIFITPGYRFRTADMLMTNFHLPRSTLFMLVSAFSGLDTMRAAYAHAIANRYRFYSYGDASLLYRAEMSDG

SEQ ID NO: 68797 - protein, 361 aa, unidentified
  source 1..361: note = Mesorhizobium japonicum
  REGION 1..361: note = sp|Q98M55|QUEA_RHILO S-adenosylmethionine:tRNA ribosyltransferase-isomerase OS=Mesorhizobium japonicum (strain LMG 29417 / CECT 9101 / MAFF 303099) OX=266835; GN = queAPE=3 SV=1
MRVDLFDFELPEERIALRPAEPRDSAKMLVVKSGEALDDRKVGDLPSLLRAGDVLVFNDTKVIPAQLKGIRRRGEAQAQVEATLHMRVAPDRWLAFMRPGKRIAAGDRIHFGHDGNSCFLGQLDATVIEKGEGGEALLGFDLSGPFLDEALHAVGHIPLPPYIASKRDDDERDRADYQTIYAREEGAVAAPTAGLHFTPELFAALDAKGVERHFVTLHVGAGTFLPVKADDTADHKMHAEIGSVSRETADALNAAKARGGRIIAVGTTSLRLLESAAREDGTVPAWSGPTDIFITPGYRFRTADMLMTNFHLPRSTLFMLVSAFSGLDTMGAAYAHAIANRYRFYSYGDASLLYRAEMSDG

SEQ ID NO: 68798 - protein, 361 aa, unidentified; identical to SEQ ID NO: 68793
  source 1..361: note = Mesorhizobium japonicum
  REGION 1..361: note = tr|A0A3M9X4L4|A0A3M9X4L4_9RHIZ S-adenosylmethionine:tRNA ribosyltransferase-isomerase; OS = Mesorhizobium japonicum OX=2066070 GN=queA PE=3 SV=1

SEQ ID NO: 68799 - protein, 361 aa, unidentified
  source 1..361: note = Mesorhizobium jarvisii
  REGION 1..361: note = tr|A0A3A5K5R9|A0A3A5K5R9_9RHIZ S-adenosylmethionine:tRNA ribosyltransferase-isomerase; OS = Mesorhizobium jarvisii OX=1777867 GN=queA PE=3 SV=1
MRVDLFDFDLPEERIALRPTEPRDSAKMLVVRQGEALDDRTVGDLPSLLRAGDVLVFNDTKVIPAQLKGIRRRGDAQAQVEATLHMRVAPDRWLAFMRPGKRIAAGDRIHFGHDGNSCFLGQLDATVIEKGEGGEALLGFDLSGPFLDEALHTVGHIPLPPYIASKRDDDERDRADYQTIYAREEGAVAAPTAGLHFTPELFAALDAKGVERHFVTLHVGAGTFLPVKADDTADHKMHAEIGSVSRETANALNAAKARGGRIIAVGTTSLRLLESAAREDDTVPAWSGPTDIFITPGYRFRTADMLMTNFHLPRSTLFMLVSAFSGLDTMRAAYAHAIANRYRFYSYGDASLLYRPEMSDG

SEQ ID NO: 68800 - protein, 362 aa, unidentified
  source 1..362: note = Mesorhizobium kowhaii
  REGION 1..362: note = tr|A0A2W7C1F8|A0A2W7C1F8_9RHIZ S-adenosylmethionine:tRNA ribosyltransferase-isomerase; OS = Mesorhizobium kowhaii OX=1300272 GN=queA PE=3 SV=1
MRVDLFDFDLPEERIALRPAESRDSARMLVVKPGEGLDDRTVGDLPSLLRAGDVLVFNDTKVIPAQLKGIRRRGEAQAQVEATLHMRMAPDRWLAFMRPGKRIAAGDRIHFGHDGNSCFLGQLDATVIEKGEGGEALLGFDLSGPFLDEALHAVGHIPLPPYIASKRDDDERDRADYQTIYAREEGAVAAPTAGLHFTPELFAAIDAKGVERHFVTLHVGAGTFLPVKADDTADHKMHAETGSVSKATADALNAVRARGGRIIAVGTTSLRLLESAARADGTLAAWSGPTDIFITPGYRFRTADMLMTNFHLPRSTLFMLVSAFSGLDTMRAAYAHAIETRYRFYSYGDASLLYRAEMSDGR

SEQ ID NO: 68801 - protein, 371 aa, Mesorhizobium mediterraneum
  REGION 1..371: note = tr|A0A271KZR6|A0A271KZR6_9RHIZ S-adenosylmethionine:tRNA ribosyltransferase-isomerase; OS = Mesorhizobium mediterraneum OX=43617 GN=queA PE=3 SV=1
MRVDLFDFELPEKRIALRPAEPRDSAKMLVVRPGEGLENRTVRELPTLLEAGDVLVFNDTKVIPAQLKGIRRRGEAAAQVEATLHMRVAPDRWLAFMRPGKRIAVGDRIHFGHDTNSCFLGQLDATVIEKGEAGEALLGFDLSGPFLDEALHAVGHIPLPPYIASKRDDDERDRSDYQTIYAREEGAVAAPTAGLHFTPELFAALDAKGVERRFVTLHVGAGTFLPVKVDDTADHKMHAEIGSVSPETAEALNAAKARGGRIIAVGTTSLRLLESAAREDGRLAAWSGPTDIFITPGYRFKAADMLMTNFHLPRSTLFMLVSAFCGLETMRAAYAHAIENRYRFYSYGDASLLFKEENDGRASGIHKEFND

SEQ ID NO: 68802 - protein, 361 aa, Mesorhizobium metallidurans
  REGION 1..361: note = tr|M5F5A9|M5F5A9_9RHIZ S-adenosylmethionine:tRNA ribosyltransferase-isomerase OS=Mesorhizobium metallidurans STM 2683 OX=1297569 GN=queA PE=3 SV=1
MKVELFDFELPEERIALRPAEPRDSAGMLVVRPGKGLEDRTVRDLPSLLKRGDVLVFNDTKVIPAQLKGIRRRGEAAAQVEATLHMRTAPDRWLAFMRPGKRVAAGDRIHFGLDGNSCFLGQFDATVIEKGEGGEVLLGFDLSGPFLDEALHAVGHIPLPPYIASKRDDDERDRSDYQTIYAREEGAVAAPTAGLHFTPELFAALDAKGIERRFVTLHVGAGTFLPVKVDDTADHKMHAEIGSVAQETAEALNAAKARGGRLVAVGTTSLRLLESAAGPDGRLAAWSGPTDIFITPGYLFKTADMLMTNFHLPRSTLFMLVSAFCGLQTMRAAYAHAIENRYRFYSYGDASLLFKEENDGR

SEQ ID NO: 68803 - protein, 370 aa, unidentified
  source 1..370: note = Mesorhizobium muleiense
  REGION 1..370: note = tr|A0A1G8TKJ8|A0A1G8TKJ8_9RHIZ S-adenosylmethionine:tRNA ribosyltransferase-isomerase; OS = Mesorhizobium muleiense OX=1004279 GN=queA PE=3 SV=1
MRVDLFDFDLPEERIALRPAEPRDSAKMLVVRPGEGLEDRTVRELPSLLETGDVLVFNDTKVIPAQLKGIRRRGEAAAQIEATLHMRVAPDRWLAFMRPGKRIAAGDRIHFGHDANSCFLGQLDATVIEKGEAGEALLGFDLSGAFLDEALHAVGHIPLPPYIASKRDDDERDRSDYQTIYAREEGAVAAPTAGLHFTPELFAALDAKGVERRFVTLHVGAGTFLPVKVDDTADHKMHAEIGSVSPETARALNAAKARGGRIIAVGTTSLRLLESAARKDGMLAGWSGPTDIFITPGYRFKAADMLMTNFHLPRSTLFMLVSAFCGLETMRAAYAHAIENRYRFYSYGDASLLLKQENDGRAPGIEQGIQ

SEQ ID NO: 68804 - protein, 358 aa, unidentified
  source 1..358: note = Mesorhizobium muleiense
  REGION 1..358: note = tr|A0A1G9AML3|A0A1G9AML3_9RHIZ S-adenosylmethionine:tRNA ribosyltransferase-isomerase; OS = Mesorhizobium muleiense OX=1004279; GN = SAMN05428953_113144 PE=3 SV=1
MIAADHPDRRSARLLVVMADGAMTDLPRADLAKLFEPDDLVVANDAATLPASLRGTHVPSSEAIEIRLAGWLSLADPTRFVAIAFGAGDHRTRTEDRLPPRPLSPGNRLRLGPLEAVVERLLDHPRLLELRFLGNRAAVLAGLAQHGRPIQYAHVPEPLALWDVWTKIAARPVAFEAPSAGFALDWRTLQSWRRHDVGFATLTHATGVSSTGDRALDSRLPFDEPYRIPEHTAVKVARAKLRGSRIIAVGTSVVRALEAAANPDGSVRAKNGIATGRVARETPLRVVDAILTGVHQPGESHFELLRAFADDALLAKASAAFAAHRYRTHEFGDSMLLNRQLLDRSHEPNRARDAASTL

SEQ ID NO: 68805 - protein, 363 aa, unidentified
  source 1..363: note = Mesorhizobium oceanicum
  REGION 1..363: note = tr|A0A1L3SRY3|A0A1L3SRY3_9RHIZ S-adenosylmethionine:tRNA ribosyltransferase-isomerase; OS = Mesorhizobium oceanicum OX=1670800 GN=queA PE=3 SV=1
MKVNLFDFELPDERIALRPAEPRDAARLLLVRPGEGLSDGVVRDLPALLRPEDALVFNDTKVIPAQLRGLRRRGQAVAQVDATLHMRVAPDRWKAFLRPGKRVAAGDRISFGHGGNACLAGSLDATVIEKGEAGEALLAFDITGPVLDEALHTVGHIPLPPYIASKRPDDERDRTDYQTIYAREEGAVAAPTAGLHFTPALFGELDARGVERHFVTLHVGAGTFLPVKAEDTADHRMHAEIGHVSAETADALNAVRARGGRVVCVGTTSLRLLESAAGEDGRLSAWSGATDIFITPGYRFRAVDGLMTNFHLPRSTLFMLVSALSGLETMREAYRHAINTGYRFYSYGDASLLWRAEGGLQDQ

SEQ ID NO: 68806 - protein, 362 aa, Mesorhizobium opportunistum
  REGION 1..362: note = tr|F7Y775|F7Y775_MESOW S-adenosylmethionine:tRNA ribosyltransferase-isomerase OS=Mesorhizobium opportunistum (strain LMG 24607 / HAMBI 3007 / WSM2075); OX = 536019 GN=q ueA PE=3 SV=1
MRVDLFDFDLPEERIALRPAEPRDSAGMLVVRPGETLDDRRVGDLPSLLRAGDVLVFNDTKVIPAQLKGIRRRGEAQAQVEATLHMRMAPDRWLAFMRPGKRVAAGDRIHFGHDGNSCFLGQLDATVIEKGEGGEALLGFDLSGPFLDEALHAVGHIPLPPYIASKRDDDERDRADYQTIYAREEGAVAAPTAGLHFTPELFAALDAKGVERRFVTLHVGAGTFLPVKADDTADHKMHAEIGSVSAATAEALNAAKARGGRIIAVGTTSLRLLESAARDDGTLAAWSGPTDIFITPGYRFRTADMLMTNFHLPRSTLFMLVSAFSGLETMRAAYAHAIAERYRFYSYGDASLLYRTETSDGR

SEQ ID NO: 68807 - protein, 360 aa, Mesorhizobium plurifarium
  REGION 1..360: note = tr|A0A2T3EM46|A0A2T3EM46_MESPL S-adenosylmethionine:tRNA ribosyltransferase-isomerase; OS = Mesorhizobium plurifarium OX=69974 GN=queA PE=3 SV=1
MRVDLFDFDLPEDSIALRPASPRDSARMLVVRPGGEPVLEDRGVLDLPSFLRPGDALVFNDTKVIPAQLEGVRYRGEDISTPVSLTLHMRVAPDRWKAFARPARRLKPGDRISFGHGGNACLLGSLEAVVEEKGDAGEVTLRFDLSGPSLDEAIMAVGHIPLPPYIASKRADDARDRTDYQTVYAREEGAVAAPTAGLHFTDRLFAKLDENGIERHFVTLHVGAGTFLPVKADDTDDHVMHEEIGHVDATTAAKLNAVRERGGRVVCVGTTSLRLIESAAAEDGNIRPWSGPTGIFITPGYRFRAVDMLMTNFHLPKSTLFMLVSAFAGLETMRAAYAHAIATGYRFYSYGDSSLLFRKD

SEQ ID NO: 68808 - protein, 362 aa, Mesorhizobium plurifarium
  REGION 1..362: note = tr|A0A090F605|A0A090F605_MESPL S-adenosylmethionine:tRNA ribosyltransferase-isomerase; OS = Mesorhizobium plurifarium OX=69974 GN=queA PE=3 SV=1
MRVDLFDFDLPEERIALRPAEPRHSARLLIVKPGEPLQDRIVSDLPSLLRQGDVLVFNDTKVIPAQLKGMRKRGEAVAQVEATLHMRVAPDRWQAFMRPGKRIAAGDRIHFGHDQNSCFLGQLDATVLEKGEAGEALLGFDLSGPFLDEALHAVGHIPLPPYIASKRDDDERDRADYQTIYAREEGAVAAPTAGLHFTPELFAALDAKGIERRFVTLHVGAGTFLPVKADDTANHKMHAETGSVSPETAAALNAARARGGRIICVGTTSLRLLESAARDDGRIEPWSGPTDIFITPGYRFRTADMLMTNFHLPRSTLFMLVSAFSGLETMRSAYAHAIENRYRFYSYGDASLLYRAETSDGR

SEQ ID NO: 68809 - protein, 343 aa, unidentified
  source 1..343: note = Mesorhizobium prunaredense
  REGION 1..343: note = tr|A0A1R3V2J4|A0A1R3V2J4_9RHIZ S-adenosylmethionine:tRNA ribosyltransferase-isomerase; OS = Mesorhizobium prunaredense OX=1631249 GN=BQ8794_140246; PE = 3 SV=1
MIAADHPDRRSARLLVVMADGAMTDLPRAELAKLFEPGDLVVANDAATLPASLHGTHVPSSKAIEIRLAGWLSLADPTRFVGFAFGAGDHRTRTEDRLPPPPLSPGNRLRLGPLEAVVERLLDHPRLLELRFLGNRAAVLAGLAQHGRPIQYAHVPEPLALWDVWTKIAARPVAFEAPSAGFALDWRTLQSWRRHDLGFATLTHATGISSTGDRALDSRLPFDEPYRIPEHTAAKVARAKLRRSRIIAVGTSVVRALEAAANPDGSVRAGKGIATGRVARDTPLRVVDAILTGVHQPGESHFELLRAFADDALLAKASAAFAAHRYRTHEFGDSMLLNRQPLD

SEQ ID NO: 68810 - protein, 370 aa, unidentified
  source 1..370: note = Mesorhizobium prunaredense
  REGION 1..370: note = tr|A0A1R3VJB6|A0A1R3VJB6_9RHIZ S-adenosylmethionine:tRNA ribosyltransferase-isomerase; OS = Mesorhizobium prunaredense OX=1631249 GN=queA PE=3 SV=1
MRVDLFDFDLPEERIALRPAEPRDSAKMLVVRPGEGLEDRTVRELPSLLETGDVLVFNDTKVLPAQLKGIRRRGEAAAQIEATLHMRVAPDRWLAFMRPGKRIAAGDRIHFGHDANSCFLGQLDATVIEKGEAGEALLGFDLSGLFLDEALHAVGHIPLPPYIASKRDDDERDRSDYQTIYAREEGAVAAPTAGLHFTPELFAALDAKGVERRFVTLHVGAGTFLPVKVDDTADHKMHAEIGSVSPETAKALNAAKARGGRIIAVGTTSLRLLESAAREDGTLAGWSGPTDIFITPGYRFKAADMLMTNFHLPRSTLFMLVSAFCGLETMRAAYAHAIENRYRFYSYGDASLLFKQENDGRAPGIEQGIQ

SEQ ID NO: 68811 - protein, 362 aa, unidentified
  source 1..362: note = Mesorhizobium qingshengii
  REGION 1..362: note = tr|A0A1G5V5W3|A0A1G5V5W3_9RHIZ S-adenosylmethionine:tRNA ribosyltransferase-isomerase; OS = Mesorhizobium qingshengii OX=1165689 GN=queA PE=3 SV=1
MRVDLFDFDLPEERIALRPAEPRDCARMLVVKPGERLDDRTVGDLPSLLRTGDVLVFNDTKVIPAQLKGFRRRGEAVAQVEATLHMRMAPDRWLAFMRPGKRIAAGDRIHFGHDGNSCFLGQLDATVIEKGEGGEALLGFDLSGPFLDEALHTVGHIPLPPYIASKRDDDERDRADYQTIYAREEGAVAAPTAGLHFTPELFAALDAKGIERRFVTLHVGAGTFLPVKADDTADHKMHAETGSVSEATAVALNVAKARGGRIIAVGTTSLRLLESAAREDGTLAAWSGPTDIFITPGYRFRTADMLMTNFHLPRSTLFMLVSAFSGLDTMRAAYAHAIENRYRFYSYGDASLLYRAETSDGR

SEQ ID NO: 68812 - protein, 361 aa, unidentified
  source 1..361: note = Mesorhizobium sanjuanii
  REGION 1..361: note = tr|A0A2A6FGP4|A0A2A6FGP4_9RHIZ S-adenosylmethionine:tRNA ribosyltransferase-isomerase; OS = Mesorhizobium sanjuanii OX=2037900 GN=queA PE=3 SV=1
MRVDLFDFELPEERIALRPAEPRDSARMLVVRPGEGLENRTVRDLPSLLKRGDVLVFNDTKVIPAQLKGIRRRGEAVAQVEATLHMRTAPDRWLAFMRPGKRVAAGDRIHFGHDGNSCFLGQLDATVIEKGDGGEVLLGFDLSGPFLDDALHAVGHIPLPPYIASKREDDERDRSDYQTIYAREEGAVAAPTAGLHFTPELFAALDAKGIERRFVTLHVGAGTFLPVKADDTADHKMHAETGSVSPETAESLNAAKARGGRIIAVGTTSLRLLESAATPDGRLAAWAGPTDIFITPGYRFKTADMLMTNFHLPRSTLFMLVSAFSGLETMRAAYAHAIETRYRFYSYGDASLLFREENDGR

SEQ ID NO: 68813 - protein, 358 aa, unidentified
  source 1..358: note = Mesorhizobium soli
  REGION 1..358: note = tr|A0A2P7SBL9|A0A2P7SBL9_9RHIZ S-adenosylmethionine:tRNA ribosyltransferase-isomerase; OS = Mesorhizobium soli OX=1295366 GN=queA PE=3 SV=1
MRVDLFDFDLPEERIALRPAEPRDCAKLLLVHPGEPLEDKRVGDLPSLLEPGDVLVFNDTKVIPAQLKGIRQRGEAVAHVDATLHMRVGPDRWKAFVRPGKRVAEGDRIQFGHSAEACMLGGLDATVVEKGEAGEVLLAFDLSGPLLDEALHAVGHIPLPPYIASKRPDDERDRKDYQTVYAREEGAVAAPTAGLHFTPELFAALDARGIERRFVTLHVGAGTFLPVKADDTADHKMHAEIGYVSEETAAAINAARAEGRRVVAVGTTSLRLLESAAAPDGTMTAWSGATDIFITPGYKFRAVDMLMTNFHLPRSTLFMLVSAFSGLETMREAYRHAIETGYRFYSYGDASLLFRTDK

SEQ ID NO: 68814 - protein, 362 aa, Mesorhizobium sp.
  REGION 1..362: note = tr|A0A503Q7M1|A0A503Q7M1_9RHIZ S-adenosylmethionine:tRNA ribosyltransferase-isomerase; OS = Mesorhizobium sp. B2-4-6 OX=2589943 GN=queA PE=3 SV=1
MRVDLFDFDLPEERIALRPAEPRDSARLLVVKTGETPQDRLVGELPSLLREGDVLVFNDTKVIPAQLRGMRKRGEAVAQVEATLHMRVAPDRWQAFMRPGKRIAAGDRIHFGHDGNSCFLGQLDATVLEKGEAGEALLGFDLSGPFLDEALHAVGHIPLPPYIASKRDDDERDRADYQTIYAREEGAVAAPTAGLHFTPELFTALDAKGIERRFVTLHVGAGTFLPVKADDTADHKMHAETGSVSPETAAALNAAKARGGRIVCVGTTSLRLLESAARSDGRIEPWSGTTDIFITPGYRFRTVDMLMTNFHLPRSTLFMLVSAFSGLETMRSAYAHAIENRYRFYSYGDASLLFRAETSDGR

SEQ ID NO: 68815 - protein, 362 aa, Mesorhizobium sp.; identical to SEQ ID NO: 68788
  REGION 1..362: note = tr|A0A3S2F0K2|A0A3S2F0K2_9RHIZ S-adenosylmethionine:tRNA ribosyltransferase-isomerase; OS = Mesorhizobium sp. M7A.F.Ca.CA.002.03.2.1 OX=2496680; GN = queA PE=3 SV=1

SEQ ID NO: 68816 - protein, 345 aa, unidentified
  source 1..345: note = Mesorhizobium tamadayense
  REGION 1..345: note = tr|A0A3P3F6L8|A0A3P3F6L8_9RHIZ S-adenosylmethionine:tRNA ribosyltransferase-isomerase; OS = Mesorhizobium tamadayense OX=425306 GN=EH240_27760 PE=3; SV = 1
MAAADRRDRHVARLLVVEQDGTMRDLPRAELAGLLDPGDLVVANDAATLPASLDGVHIRSSEAVEIRLAAWLSFPDPRRFVGITFGAGDHRTRTEDRLPPPLLSSGDLLRLGPLEAIVERVLDHPRLLELRVFGSRGAVLAGLAQHGRPIQYAHVPEPLALWDVWTKIAIEPVAFEAPSAGFALDWSTLQTWHRRDVGFATLTHAAGISSTGDPVLDTRLPFDEPYCIPERTAALVAEAKRRGSRIIAIGTTVVRALESAANPDGSVCTGNGIATGRIERGTPLRLVDAILTGVHQPGESHFELLRAFADDALLTNASALLAAHRYRAHEFGDSILLNRQPLLLG

SEQ ID NO: 68817 - protein, 362 aa, unidentified
  source 1..362: note = Mesorhizobium tamadayense
  REGION 1..362: note = tr|A0A3P3FYB3|A0A3P3FYB3_9RHIZ S-adenosylmethionine:tRNA ribosyltransferase-isomerase; OS = Mesorhizobium tamadayense OX=425306 GN=queA PE=3 SV=1
MRVDLFDFDLPEERIALRPAEPRDSARLLVVRPGQGLKDRIVRDLPSLLRKGDVLVFNDTKVIPAQLKGIRRRGEAMAQVEATLHMRVAPDRWRAFMRPGKRIAAGDRIHFGHDQNSCFLGQLDATVIEKGEAGEVLLGFDLSGPFLDEAMHAVGHVPLPPYIASKRDDDERDRSDYQTIYAREEGAVAAPTAGLHFTPEMFAALDAKGIERRFVTLHVGAGTFLPVKADDTAEHKMHAETGSVSRETADALNAAKARGGRIISVGTTSLRLLESAAREDGSIEAWSGPTDIFITPGYRFRTADILMTNFHLPRSTLFMLVSAFSGLETMRSAYAHAIESRYRFYSYGDSSLLFRAETSDGR

SEQ ID NO: 68818 - protein, 344 aa, Mesorhizobium temperatum
  REGION 1..344: note = tr|A0A271LC91|A0A271LC91_9RHIZ S-adenosylmethionine:tRNA ribosyltransferase-isomerase; OS = Mesorhizobium temperatum OX=241416 GN=CIT26_31945 PE=3; SV = 1
MIAADRPDRPSARLFVVEADGAMHDLPRAVLATLFDPGDLVVGNDAATLPASLHGTHVPSDEAIEIRLAGWLSLLDPTRLVAIAFGAGDHRTRTEDRLPPPPLSPGDRLRLGPLEAVVERLLDHPRLLELHFPGNRTVVLAGLARHGRPIQYAHVPEPLALWDVWTKIAAGPVAFEAPSAGFALDWRTLQAWRRRGVGFATVTHAAGVSSTGDPALDLRLPFDEPYRIPERTAAQVARAKLRGGRIIAIGTSVVRALEAAANPDGSVRAENAIATGRIARDMRLHVVDAILTGVHQPGESHFELLRAFADDALLAKASAAFTAYRYRAHEFGDSMLLNRQPLHL

SEQ ID NO: 68819 - protein, 364 aa, Mesorhizobium temperatum
  REGION 1..364: note = tr|A0A271LPJ6|A0A271LPJ6_9RHIZ S-adenosylmethionine:tRNA ribosyltransferase-isomerase; OS = Mesorhizobium temperatum OX=241416 GN=queA PE=3 SV=1
MRVDLFDFDLPEERIALRPAEPRDSSKMLVVRPGEGLEDRTVRELPSLLETGDVLVFNDTKVIPAQLKGIRRRGEAAAQVEATLHMRVAPDRWLAFMRPGKRIAVGDRIHFGHDANSCFLGQLDATVIEKGEAGEALLGFDLSGPSLDEALHAVGHIPLPPYIASKRDDDERDRSDYQTIYAREEGAVAAPTAGLHFTPELFAALDAKGVERRFVTLHVGAGTFLPVKVDDTADHKMHAEIGSVSPETAEALNAAKARGGRIIAVGTTSLRLLESATREDGTLAGWSGPTDIFITPGYRFKAADMLMTNFHLPRSTLFMLVSAFCGLETMRAAYAHAIENRYRFYSYGDASLLFKEENDGRAPV

SEQ ID NO: 68820 - protein, 361 aa, Mesorhizobium tianshanense
  REGION 1..361: note = tr|A0A562PEC1|A0A562PEC1_9RHIZ S-adenosylmethionine:tRNA ribosyltransferase-isomerase; OS = Mesorhizobium tianshanense OX=39844 GN=queA PE=3 SV=1
MRVDLFDFELPEERIALRPAEPRDSAKMLVVRPGEGLEDRTVRELPSLLEAGDVLVFNDTKVIPAQLKGIRRRGEAAAQVEATLHMRVAPDRWLAFMRPGKRIAAGDRIHFGHDANSCFLGQLDATVIEKGDGGEALLGFDLSGPFLDEALHAVGHIPLPPYIASKRDDDERDRSDYQTIYAREEGAVAAPTAGLHYTPELFAALDAKGVERRFVTLHVGAGTFLPVKVDDTADHKMHAEIGSVSPETAAALNAAKARGGRIVAVGTTSLRLLENAAREDGILAGWSGPTDIFITPGYRFKAIDMLMTNFHLPRSTLFMLVSAFCGLETMRAAYAHAIENRYRFYSYGDATLLFKEENDGR

SEQ ID NO: 68821 - protein, 362 aa, unidentified
  source 1..362: note = Mesorhizobium waimense
  REGION 1..362: note = tr|A0A3A5KJQ2|A0A3A5KJQ2_9RHIZ S-adenosylmethionine:tRNA ribosyltransferase-isomerase; OS = Mesorhizobium waimense OX=1300307 GN=queA PE=3 SV=1
MRVDLFDFDLPEERIALRPAEPRDSARMLVVKPDQGLDDRTVRDLPSFLEAGDVLVFNDTKVIPAQLRGIRRRGEAQAQVEATLHMRVAPDRWQAFMRPGKRIAAGDRIHFGHDGNSCFLGQLDATVIEKGDAGEVLLGFDLSGAFLDEALHAVGHIPLPPYIASKRDDDERDRSDYQTIYAREEGAVAAPTAGLHFTPELFAALDAKGIERRFVTLHVGAGTFLPVKADDTADHKMHAETGSVSQDTAEALNAAKARGGRIIAVGTTSLRLLESAAREDGTLAAWSGPTDIFITPGYRFRTADMLMTNFHLPRSTLFMLVSAFCGLETMRAAYAHAIDNSYRFYSYGDASLLYRAETSDGR

SEQ ID NO: 68822 - protein, 370 aa, unidentified
  source 1..370: note = Mesorhizobium wenxiniae
  REGION 1..370: note = tr|A0A271KDI1|A0A271KDI1_9RHIZ S-adenosylmethionine:tRNA ribosyltransferase-isomerase; OS = Mesorhizobium wenxiniae OX=2014805 GN=queA PE=3 SV=1
MRVDLFDFDLPEERIALRPAEPRDSAKMLVVRPGEGREDRTVRELPSLLESGDVLVFNDTKVIPAQLKGIRRRGEAVAQVEATLHMRVAPDRWLAFMRPGKRIAAGDRVHFGHDANSCFLGQLDATVIEKGEAGEALLGFDLSGPFLDEALHAVGHIPLPPYIASKRDDDERDRNDYQTIYAREEGAVAAPTAGLHFTPELFAALDAKGVERRFVTLHVGAGTFLPVKVDDTADHKMHAEIGSVSPETAEALNAAKARGGHIIAVGTTSLRLLESAAREDGTLGGWSGPTDIFITPGYRFKAADMLMTNFHLPRSTLFMLVSALCGLKTMRAAYAHAIENSYRFYSYGDASLLFKEENDGRALGIEQGIQ

SEQ ID NO: 68823 - protein, 344 aa, unidentified
  source 1..344: note = Mesorhizobium wenxiniae
  REGION 1..344: note = tr|A0A271KGX5|A0A271KGX5_9RHIZ S-adenosylmethionine:tRNA ribosyltransferase-isomerase; OS = Mesorhizobium wenxiniae OX=2014805 GN=CIT31_13070 PE=3; SV = 1
MIAADRPDRRSARLFVIEADGTMRDLPRAGLAMLFDPGDLVVGNDAATLPASLHGTHVPSEKAIEIRLAGWLSLPDPTRFVAIAFGAGDHRTRTEDRLPPPPLSPGDRLRLGPLEAVVERLLDHPRLLELRFQGNRAAVLAGLAQHGRPIQYAHVPEPLALWDVWTKIAAGPVAFEAPSAGFALDWRTLQAWRRRGVGFATVTHAAGVSSTGDPALDLRLPFDEPYRIPERTAAQVARAKLRGGRIIAIGTSVVRALEAAANPDGNVRAENAIATGRIARDTRLHVVDAILTGVHQPGESHFELLRAFADDALLAKASAAFTAYRYRTHEFGDSMLLNRQPLHL

SEQ ID NO: 68824 - protein, 350 aa, unidentified
  source 1..350: note = Mesosutterella multiformis
  REGION 1..350: note = tr|A0A388S9S0|A0A388S9S0_9BURK S-adenosylmethionine:tRNA ribosyltransferase-isomerase; OS = Mesosutterella multiformis OX=2259133 GN=queA PE=3 SV=1
MTEQYLSDFDFDLPEELIAQFPLEQRDNCRLLHVVPEGGYEDLLFHDIKKLLRPGDLLVMNNTFVIKARLRGHKATGGAVEALIERVTGEKSAIAMMRASKSPKAGTEVIFENHEGEKLPVKVGEREGEFFELEFPDAVLPLLDKFGSTPLPPYIERDANAKDESTYQTVYAKIPGAVAAPTAGLHFTRELLDELKAEGIDEAYVTLHVGAGTFQPVREEKLSEHKMHSEWYSVSPEVAAKVNETKAKGGRIVAVGTTSLRTLEAAAVAPGRIQSGARDTTLFVTPGYKFNTIDALITNFHLPKSTLVMLVSAIAGRERILDAYRHAIENKYRFFSYGDAMFLENAPQAK

SEQ ID NO: 68825 - protein, 336 aa, unidentified
  source 1..336: note = Mesotoga infera
  REGION 1..336: note = tr|A0A101GYM9|A0A101GYM9_9BACT S-adenosylmethionine:tRNA ribosyltransferase-isomerase; OS = Mesotoga infera OX=1236046 GN=queA PE=3 SV=1
MKVSEFDYDLPEELIAQEPAVPRDSSRLLVVDRKSGVLEHRVFAEIVEFLRPGDVVVLNNSRVIPARLLGMKETGGKVEAVLIERVGRGLWKAIVRPGSKIKPGNELLFSGISCSVVEHCEDSGRILDFHGASDEEIKESGLLAIPPYIQTYPENPESYQTVYSRPEGSVAAPTAGLHFTESLLETLTGKGVAVEFITLHVGIGTFRPVKSELIEEHKMHGEYYTVSSEAAETINKAKADKRRIIAVGTTTVRTLESIAARHGSVVSDSGQTNIFIYPPYDFKIVDSLVTNFHLPKSTLLMLVSAFAGRELILSAYREAISRRYRFFSFGDACLLL

SEQ ID NO: 68826 - protein, 336 aa, unidentified
  source 1..336: note = Mesotoga prima
  REGION 1..336: note = tr|I2F3K0|I2F3K0_9BACT S-adenosylmethionine:tRNA ribosyltransferase-isomerase OS=Mesotoga prima MesG1.Ag.4.2 OX=660470 GN=queA PE=3 SV=1
MKVSDYDFELPEELIAQKPAIPRDSSRLLVIDRETYSFEHRVFAEIEDFLHPGDVLVLNNSRVIPARLLGKKETGAKVEAVLTEKLGGGLWKAIVRPGSKIKPGNVLLFNKISCKVIEHCDDSSRILDFGSVTDEDVKKAGLLAIPPYVKYYPDNPESYQTVYSRPEGSVAAPTAGLHFTDTLLERLRKKDVDVQFITLHVGIGTFRPVKSETVDGHKMHNEFFSVSSEVAERLERARTEKRRIVAVGTTTVRTLESIVARHGCIVGDSGHTDIFIYPPYTFKATDSLITNFHLPRSTLLMLVSAFAGRELILSAYREAILKRYRFFSFGDACLIL

SEQ ID NO: 68827 - protein, 336 aa, unidentified
  source 1..336: note = Mesotoga sp.
  REGION 1..336: note = tr|A0A421CKN0|A0A421CKN0_9BACT S-adenosylmethionine:tRNA ribosyltransferase-isomerase; OS = Mesotoga sp. H07pep.5.4 OX=1463664 GN=queA PE=3 SV=1
MKVSDYDFELPEELIAQKPAIPRDSSRLLVIDRETYSFEHRVFAEIEDFLHPGDVLVLNNSRVIPARLLGRKETGAKVEAVLTEKLGGGLWKAIVRPGSKIKLGNVLLFNKISCKVIEHCDDSSRILDFGSVTDEDVKKAGLLAIPPYVKYYPDDPESYQTVYSRLEGSVAAPTAGLHFTDTLLERLRKKDVDVQFITLHVGIGTFRPVKSETIDGHKMHNEFFSVSSEVAERLERARKEKRRIVAVGTTTVRTLESIIARHGSIVGDSGHTDIFIYPPYTFKAIDSLITNFHLPRSTLLMLVSAFAGRELILSAYREAIIKKYRFFSFGDACLIL

SEQ ID NO: 68828 - protein, 336 aa, unidentified
  source 1..336: note = Mesotoga sp.
  REGION 1..336: note = tr|A0A2W1B4D0|A0A2W1B4D0_9BACT S-adenosylmethionine:tRNA ribosyltransferase-isomerase; OS = Mesotoga sp. TolDC OX=1389250 GN=queA PE=3 SV=1
MKVSEFDYDLPEELIAQEPAVPRDSSRLLVVDRKSGALEHRVFAEIVEFLRPGDVVVLNNSRVIPARLLGMKETGAKVEAVLIERLDRGLWKAIVRPGSKIKPGNELLFSGISCRVVEHCEDSGRILDFHGASDEEIKESGLLAIPPYIQTYPENPESYQTVYSRPEGSVAAPTAGLHFTESLLETLAGKGVAVEFITLHVGIGTFRPVKSELIEEHKMHGEYFTVSSEAAETINKAKADNRRIIAVGTTTVRTLESIAARHGSVVSDSGQTDIFIYPPYDFKIVDSLVTNFHLPKSTLLMLVSAFAGRELILSAYREAISRRYRFFSFGDACLLL

SEQ ID NO: 68829 - protein, 356 aa, unidentified
  source 1..356: note = Metakosakonia sp.
  REGION 1..356: note = tr|A0A348DIR8|A0A348DIR8_9ENTR S-adenosylmethionine:tRNA ribosyltransferase-isomerase; OS = Metakosakonia sp. MRY16-398 OX=2487150 GN=queA PE=3 SV=1
MRVADFSFELPESLIAHYPQPERSSCRLLSLDGPTGALAHGTFTDLLDKLNPGDLLVFNNTRVIPARLFGRKASGGKIEVLVERMLDDKRILAHIRASKAPKPGAELLLGDDESIHATMVARHDALFEVEFNDERPVLDILNAIGHMPLPPYIDRPDEDADRELYQTVYSQKPGAVAAPTAGLHFDEPLLARLREKGIEMAFVTLHVGAGTFQPVRVDSIEDHIMHSEYAEVPQEVVDAVLAAKARGNRVIAVGTTSVRSLESAAQAAKNALIAPFFGDTQIFIFPGYQYQVIDALVTNFHLPESTLIMLVSAFAGYKHTMHAYQEAVAHKYRFFSYGDAMFITYNPQAINERPGE

SEQ ID NO: 68830 - protein, 344 aa, unidentified
  source 1..344: note = Metallibacterium scheffleri
  REGION 1..344: note = tr|A0A4S3KKK6|A0A4S3KKK6_9GAMM S-adenosylmethionine:tRNA ribosyltransferase-isomerase; OS = Metallibacterium scheffleri OX=993689 GN=queA PE=3 SV=1
MKKSDFHYELPAELIAQAPLPERSASRMLIVDAADAAWRDARICDLPEQLRAGDLLVFNDTRVLPARLHARKQTGGVAEILIERISGSHEVRAQLGVSKKPREGAVLTLADGSAVRVLGREGAFFHLRFEVDEPLENLLQRLGQMPLPPYITRAPDAADAERYQTVYARHAGAVAAPTAGLHFDAPLLQALRARGVQTGFVTLHVGAGTFQPLRSEQVEDHHMHSEWINVGAALVEQIRRTREAGGRVLAVGTTVVRALESAAPGGALAPYAGETSIFILPGYRFTQIDGLLTNFHLPESTLLMLVSALAGRELMLAAYRHAVDARYRFFSYGDAMLIWPRAAG

SEQ ID NO: 68831 - protein, 343 aa, unidentified
  source 1..343: note = Unknown
  REGION 1..343: note = tr|A0A1X7MKY7|A0A1X7MKY7_9GAMM S-adenosylmethionine:tRNA ribosyltransferase-isomerase; OS = methanotrophic bacterial endosymbiont of Bathymodiolus sp. OX=280772 GN=queAPE=3 SV=1
MKKSDFYYDLPDELIAQQPLPERSASRLLCLDKETDAIEDRHFNELLALLHKDDLLVLNNTKVIPARLFGHKQSGGKVEILIERVLNDREVLVHMRSSKSPKAGALIELDEGFQCLVLGRVDDLFHLQFLGDQNLEAILQRIGHMPLPPYIERADDKNDQTRYQSVFAKQSSAVAAPTASLHFDTAMMAKIQAKGIAITFVTLHVASGTFRPVKVENLQEHVMHKEYFEVPEQTVEAVAQAKKRGGRVIAIGTTAMRSLESASRNGRLESECGDTDLFITPGYQFKTVDAMLTNFHLPESTLLMLVSAFAGYERIKKVYQHAIAEKYRFFSYGDAMFIQRYPG

SEQ ID NO: 68832 - protein, 351 aa, unidentified
  source 1..351: note = Methylacidimicrobium cyclopophantes
  REGION 1..351: note = tr|A0A5E6ME59|A0A5E6ME59_9BACT S-adenosylmethionine:tRNA ribosyltransferase-isomerase; OS = Methylacidimicrobium cyclopophantes OX=1041766 GN=queA; PE = 3 SV=1
MLAEGPPSSSSFDRSLPELAPYSFVLPEERIALAPSPDRAEARLLLLDRRSRSIAHYRIRDLPALLDPGDLLVLNDSRVIPALFPCAEPRLSLLLLEEQEPLLWRALVEPARKAPLGRSLLFVADLGKAEEERLTAEVVGVRSRGERLLRFSRPFRLERFGLPPLPPYIRKRRGRASDSSFSDSERYQTVFARQPGSVAAPTAGLHLTPELLARLPHAFVTLHVGPGTFRPIGPAEWRSGRLHPERFSIPSGFAEAAAASRRLVAVGTTVARVLETAPDLCAQNGTTDLFLRPPCAFRRTGALLTNFHLPRSSLFLLVSAFAGLELIHEAYREAIASGYRFYSYGDAMLIL

SEQ ID NO: 68833 - protein, 357 aa, unidentified
  source 1..357: note = Methylacidimicrobium tartarophylax
  REGION 1..357: note = tr|A0A5E6MC33|A0A5E6MC33_9BACT S-adenosylmethionine:tRNA ribosyltransferase-isomerase; OS = Methylacidimicrobium tartarophylax OX=1041768 GN=queA; PE = 3 SV=1
MSHTVHAGGGAVGRGTLIDRSVPDLAPYSFVLPEERIALAPTSDRAEARLMLLDRRSRSISHHRIRDLPTLLDPDDLLILNDSRVIPAYLPCREPQVSFLLLEEPEPLLWKALAEPARKASLGRSLLFVSHPGTADEERLTAEVVEVGSRGERLLRFSHPFLLERFGSPPLPPYIRKRRKHASVTPSFDLERYQTVFARRPGSVAAPTAGLHFTPGLLARLPHAFVTLHVGPGTFRPIGPEEWRTGRLHPERLAVPPGLAEAAQAARRLVAVGTTVARVLESVPDLRERSGTTDLFLRPPYSFQRTGALLTNFHLPRSSLFLLVSAFAGLDLLHEAYREAVACGYRFYSYGDAMLIL

SEQ ID NO: 68834 - protein, 334 aa, unidentified
  source 1..334: note = Methylacidiphilum fumariolicum
  REGION 1..334: note = tr|A0A5F0I2G3|A0A5F0I2G3_9BACT S-adenosylmethionine:tRNA ribosyltransferase-isomerase; OS = Methylacidiphilum fumariolicum OX=591154 GN=A7K73_07020; PE = 3 SV=1
MEEYSFSLPKELIALDPTPQRDHCKLMVVDRKTGRFYHCQFADLPQFLSKEDLLVLNNSKVLPAFFKSMDEKTTFLFVEALTPYQWKVMASPSKHVKSDSIVWLKKSQKDGYCELEAKIVSKLSDGYYILEFDKEPNLESLGLPPLPPYIRKLRRKNNRPEIDQQDMEYYQTVFAQRPGSIAAPTAGLHFSKGLLSKFKTAFITLHIGPGTFRPLTPKQLKTAKLEPEYFIIDANLKKMYKEGQRIVAIGTTVVRVLETIKNLEPQEGWTDLFIFPPFQFQRTGALITNFHLPKSSLFLLTCAFAGTDLLKAAYEEAIKKGYRFYSYGDAMLIL

SEQ ID NO: 68835 - protein, 334 aa, unidentified; identical to SEQ ID NO: 68834
  source 1..334: note = Methylacidiphilum fumariolicum
  REGION 1..334: note = tr|I0JZH3|I0JZH3_METFB S-adenosylmethionine:tRNA ribosyltransferase-isomerase OS=Methylacidiphilum fumariolicum (strain SolV) OX=1156937 GN=queA PE=3 SV=1

SEQ ID NO: 68836 - protein, 337 aa, unidentified
  source 1..337: note = Methylacidiphilum infernorum
  REGION 1..337: note = tr|B3DWS3|B3DWS3_METI4 S-adenosylmethionine:tRNA ribosyltransferase-isomerase OS=Methylacidiphilum infernorum (isolate V4) OX=481448 GN=queA PE=3 SV=1
MNFIDHYSFDLPSELIALDPLPSRDGCKLMVVDRKTQRFYHHRFYELALFLSKEDLLVLNNSKVIPAFFQSADEKTTFLFVQSLDPLHWKVMASPGKHLKMGSIIPIKCPTQNPNSPITARLSSKLQSAYYVLEFDEEPKLEWLGLPPLPPYIRKLRKKKNRVEIEQKDREYYQTVFAQHPGSIAAPTAGLHFSKEMLEQFSTAFITLHVGPGTFRPLSTEQLATGRLEAEYYSIDSSLKEKYKPGRRIVAVGTTVVRVLETIKNLEPQQGWTDLFIFPPFTFKRTNALITNFHLPRSSLFLLTCAFAGTELLKKAYAEAIQKSYRFYSYGDAMLII

SEQ ID NO: 68837 - protein, 334 aa, unidentified
  source 1..334: note = Methylacidiphilum kamchatkense
  REGION 1..334: note = tr|A0A0C1USB3|A0A0C1USB3_9BACT S-adenosylmethionine:tRNA ribosyltransferase-isomerase; OS = Methylacidiphilum kamchatkense Kam1 OX=1202785; GN = kam1_682 PE=3 SV=1
MEEYSFSLPKELIALDPTPQRDHCKLMVVDRKTGCFYHCQFSDLPQFLSKEDLLVLNNSKVLPAFFKSMDEKTTFLFVEALAPYQWKVMASPSKHVKSGSIVWLKRSQKDGYCELQAKIVSKLSDGYYILEFDKAPNLESLGLPPLPPYIRKLRKKNNRPEIEQQDMEYYQTVFAQCPGSIAAPTAGLHFSKELLSKFKTAFITLHIGPGTFRPLTAEQLKRAKLEPEYFIIDANLKKMYKEGQRIVAIGTTVVRVLETIKNLEPQEGWTDLFIFPPFQFQRTGALITNFHLPKSSLFLLTCAFAGTNLLKAAYEEAIKKGYRFYSYGDAMLIL

SEQ ID NO: 68838 - protein, 334 aa, unidentified
  source 1..334: note = Methylacidiphilum sp.
  REGION 1..334: note = tr|A0A4Y8P683|A0A4Y8P683_9BACT S-adenosylmethionine:tRNA ribosyltransferase-isomerase; OS = Methylacidiphilum sp. Yel OX=1847730 GN=A7Q09_02695; PE = 3 SV=1
MEEYSFSLPKELIALDPTPQRDHCKLMVVDRKTGRFYHCQFSDLPQFLSKEDLLVLNNSKVLPAFFKSMDEKTTFLFVEALTPYQWKVMASPSKHLKNGLIVWLKKSQKDGYCELEAKIVSKLSGGYYILEFDKEPNLESLGLPPLPPYIRKLRRKNNRPEIEQQDMEYYQTVFAQCPGSIAAPTAGLHFSKGLLSKFKTAFITLHIGPGTFRPLTSEQLKTAKLEPEYFIINANLKKMYKEGQRIVAIGTTVVRVLETIKNLEPQEGWTDLFIFPPFQFQRTGALITNFHLPKSSLFLLTCAFAGTDLLKAAYEEAIKKGYRFYSYGDAMLIL

SEQ ID NO: 68839 - protein, 337 aa, unidentified
  source 1..337: note = Methylacidiphilum sp.
  REGION 1..337: note = tr|A0A4Y8PGD9|A0A4Y8PGD9_9BACT S-adenosylmethionine:tRNA ribosyltransferase-isomerase; OS = Methylacidiphilum sp. Phi OX=1847729 GN=A7Q10_04965; PE = 3 SV=1
MDWLDNYSFDLPPELIALDPLIQREACKLMVVDRKAKRFYHHSFSELSLFLSKEDLLVLNNSKVIPALFKSADEKVSFLFINALDPFRWKVMASPGKYLKKDSIINLKSAGQTNPCDVPVIIKDKLPGGYYILEFEKEINLESLGLPPLPPYIRKLRKKKKRAEIEQKDREYYQTVFAKQLGSIAAPTAGLHFSKEMLENFSTAFITLHVGPATFRPLSVEQLSSGRLEPEYYSIDGSLKEQFRPGRRVVAVGTTVVRVLETIKDFEPQSGWTDLFIFPPFSFKNTHAMITNFHLPKSSLFLLTCAFAGTDLLKEAYKEAIQKGYRFYSYGDAMLII

SEQ ID NO: 68840 - protein, 348 aa, Methylarcula marina
  REGION 1..348: note = tr|A0A422QSS0|A0A422QSS0_9RHOB S-adenosylmethionine:tRNA ribosyltransferase-isomerase; OS = Methylarcula marina OX=72022 GN=queA PE=3 SV=1
MKLSDFDFDLPEHLIATRPARPRSSARLLLAEGQGIVDRHVYDLPQILRPGDLLVLNDTKVIPARLTGTRTRQTGQGEAVAKIEVTLLEPAADGWQALAKPLRKLREGEVIRFGEALSAEVAAITDGGLRLRFDAEGDAFDAALAQVGAMPLPPYIASLRAPDEQDRKDYQTVWAARQGAVAAPTASLHFDTPLLEALEARGVEFVHVTLHVGAGTFLPVKVENVATHRMHAEWGEVSEEAATRINAAKEQGRRVIPVGTTALRLIESAATEEARIQPFAGTTEIFIYPGYHFRVSDGLMTNFHLPKSTLLMLVSALMGMDKIQRIYAHAVAEEYRFFSYGDASLLLP

SEQ ID NO: 68841 - protein, 355 aa, Methylibium petroleiphilum
  REGION 1..355: note = tr|A2SMA0|A2SMA0_METPP S-adenosylmethionine:tRNA ribosyltransferase-isomerase OS=Methylibium petroleiphilum (strain ATCC BAA-1232 / LMG 22953 / PM1) OX=420662 GN=que A PE=3 SV=1
MSDAPAHPLTVADFDFALPPELIAQHPAPERSGSRLLDGRGDAPLDRRFRELPSLLSPGDLLVFNDTRVIKARLYGRKASGGGVEALVERVLPGTHEVWAHLRASKSPRPGSRVHFAGRDGGSTAFDAEVLGRCGPDGSLFHLRLPGDPFALLERHGHVPLPPYIEHGDDADDERRYQTVFARAPGAVAAPTAALHFDAEVLAALEAQGVARASVTLHVGAGTFQPVRVEQLAEHRMHSEWFELPGATVDAIARTRAAGGRVVAVGTTTLRALESAALGGELQAGARETDIFITPGFTFRVVDRLLTNFHLPRSTLMMLVSAFAGHERIRTLYTHAIRERYRFFSYGDAMLLQRR

SEQ ID NO: 68842 - protein, 356 aa, Methylibium sp.
  REGION 1..356: note = tr|A0A0Q7DE98|A0A0Q7DE98_9BURK S-adenosylmethionine:tRNA ribosyltransferase-isomerase; OS = Methylibium sp. Root1272 OX=1736441 GN=queA PE=3 SV=1
MSAAPAHPFTVADFDFALPPELIAQHPAAERSGSRLLDGRGDVPLDRRFRELPSLLAPGDLLVFNDTRVIKARLYGRKASGGGVEALVERVLPGTHEVWAHLRASKSPRPGSRVHFAGRDGDTIAFEAEVLGRCGPDGSLFHLLLPGEPFALLERHGHVPLPPYIEHGDDADDERRYQTVFARSPGAVAAPTAALHFDADVLAALEAQGVARASVTLHVGAGTFQPVRVEHLTEHRMHSEWFELPQATVDAIARTRAAGGRVVAVGTTTLRALESAARGDRGLQAGARDTDIFITPGFAFRVVDRLLTNFHLPRSTLMMLVSAFAGHAHIRALYAHAIRERYRFFSYGDAMLLDRR

SEQ ID NO: 68843 - protein, 355 aa, Methylibium sp.
  REGION 1..355: note = tr|A0A4P6HAX0|A0A4P6HAX0_9BURK S-adenosylmethionine:tRNA ribosyltransferase-isomerase; OS = Methylibium sp. Pch-M OX=2082386 GN=queA PE=3 SV=1
MSDAPAHPFTVADFDFALPPELIAQHPAPERSGSRLLDGRGAAPLDRRFRELPSLLSPGDLLVFNDTRVIKARLFGRKASGGGVEALVERVLPGTHEVWAHLRASKSPRPGSRVHFAGRDGGSTAFDAEVLGRCGPDGSLFHLHLPGDPFALLERHGHVPLPPYIEHGDDADDERRYQTVFARAPGAVAAPTAALHFDAEVLAALEAQGVARASVTLHVGAGTFQPVRVEQLSEHRMHSEWFELPEATVDAIARTRAAGGRVVAVGTTTLRALESAALGGELQAGARETDIFITPGFTFRVVDRLLTNFHLPRSTLMMLVSAFAGHERIRALYTHAIRERYRFFSYGDAMLLQRR

SEQ ID NO: 68844 - protein, 344 aa, Methylobacillus flagellatus
  REGION 1..344: note = tr|Q1H494|Q1H494_METFK S-adenosylmethionine:tRNA ribosyltransferase-isomerase OS=Methylobacillus flagellatus (strain KT / ATCC 51484 / DSM 6875) OX=265072; GN = queA PE =3 SV=1
MTMRTNDFDFFLPDELIAQFPAKERRGSRLLHLDGNTGQVNDRLFLDLPDLVEPGDLFIFNDTRVIKARLHGEKLSGGKIEVLVERVLGPFEALAHIRASRAPKPGSILRIADAFEAEMLGRQDDLFHLRILGDLPLLDLLEQHGSLPLPPYITHDAESTDEERYQTVYAREPGAVAAPTAGLHFDNAMLDGLKRLGVNIAYVTLHVGAGTFQPVRVDNISEHKMHSELYSVPQHTVDMIHQTRATGGKVTAVGTTALRALESAAQPGTLQAGQGETDIFITPGYRFQVVERLLTNFHLPKSTLLMLVSAFAGVEHIRNAYAHAVTARYRFFSYGDAMLIERQD

SEQ ID NO: 68845 - protein, 342 aa, unidentified
  source 1..342: note = Methylobacillus rhizosphaerae
  REGION 1..342: note = tr|A0A239A164|A0A239A164_9PROT S-adenosylmethionine:tRNA ribosyltransferase-isomerase; OS = Methylobacillus rhizosphaerae OX=551994 GN=queA PE=3; SV = 1
MRTTDFDFFLPDDLIAQFPARERRGSRLLHLDGKTGTTKDHLFLDLPSLVRPGDLFIFNDTRVIKARLHGEKSSGGKVELLVERILGPFEALAHIRSSRSPKPGSLLRIAGAIEAEVTGRQDDLFQIRFLGTTPLLDLLEQYGALPLPPYITHAAEETDEERYQTVYAREPGAIAAPTAGLHFDADMLESLRTLGVNIAYVTLHVGAGTFQPVRVDDIHDHKMHSELYSVPQATVDLIQQTRTNGGTVTAVGTTALRALESAARNGTLAAGSGDTDIFITPGYRFQVVERLLTNFHLPKSTLMMLVSAFAGVEHIRHAYAHAVAERYRFFSYGDAMLLERCD

SEQ ID NO: 68846 - protein, 349 aa, Methylobacillus sp.
  REGION 1..349: note = tr|A0A1A9NJR8|A0A1A9NJR8_9PROT S-adenosylmethionine:tRNA ribosyltransferase-isomerase; OS = Methylobacillus sp. MM3 OX=1848039 GN=queA PE=3 SV=1
MRTSDFDFELPSELIAQFPAAKRSGSRLLCLDGNSGALHDRMFGELPSLLAAGDLLVFNDTRVIKARLNGRKESGGKVEVLVERMLDAHRALAHVRASHAPKPGGRLILAEAIEVEVLSRQDDLYELKFPGETPLAELLERYGKLPLPPYITHAADSDDDERYQTVYARNPGAVAAPTAGLHFDEDVMQTLAECGIEKAFVTLHVGAGTFQPIRVEDVAEHKMHSEWYEIPQATVDSIARTRQRGGKVIAVGTTAMRALESAARQGEMAVGGGDTDIFITPGYRFRVVDRLLTNFHLPRTTLLMLVSAFGGMAHIREAYRHAVQERYRFFSYGDAMLIDRQNLPEVAGE

SEQ ID NO: 68847 - protein, 340 aa, Methylobacter sp.
  REGION 1..340: note = tr|A0A522WZ75|A0A522WZ75_9GAMM S-adenosylmethionine:tRNA ribosyltransferase-isomerase; OS = Methylobacter sp. OX=2051955 GN=queA PE=3 SV=1
MKKSDFVYHLPEALIAQKPLTERDASRLLCMDRHGGRIVDRQFTDFIDLIDERDLLVFNNTKVIPARLFGKKQSGGKVEILIERIVNDHRAIAHVRSSKSAKAGALIELDQGYCCEVLGRAEDLFQLEFKGDSNIFSILEQIGHIPLPPYITREDDESDLARYQTVFAKEAGAVAAPTAGLHFDQIMMDKLKAKGVQTAFVTLHVGSGTFQPVRVEDLSEHLMHKEYFAVLPETVATVQLARARGGRVIAIGTTAVRALESASKSGRLEACFGDTDLFITPGYQFKSVDAMLTNFHLSESTLLMLVSAFAGYESIMNAYSHAIDQSYRFFSYGDAMFLSD

SEQ ID NO: 68848 - protein, 340 aa, Methylobacter sp.
  REGION 1..340: note = tr|A0A2S5QWJ1|A0A2S5QWJ1_9GAMM S-adenosylmethionine:tRNA ribosyltransferase-isomerase; OS = Methylobacter sp. OX=2051955 GN=queA PE=3 SV=1
MKKSDFYYDLPDALIAQHPLAERTASRLLCLNRDSGVLADKQFSDFIDLLKPDDLLVFNDTRVIPARLWGNKASGGKVEILIERIIDEHHALAHVRASKAPKAGAVIQLPEGLACTVEGRENDLFQLMFDGGQTVLEVLMQIGHIPLPPYITRDDDAADFSRYQTVFAKTAGAVAAPTAGLHFDQALLDSIQAKGVRSAFVTLHVGSGTFQPVRVENLAEHVMHKEHFSVPPETVAAIAQTRAKSGRVIAIGTTAVRALESAARTGPFAATLGDTRLFITPGYTFKVVDALLTNFHLPESTLLMLVSAFAGYRPVMDAYQHAINQGYRFFSYGDAMFLYR

SEQ ID NO: 68849 - protein, 339 aa, Methylobacter tundripaludum
  REGION 1..339: note = tr|A0A2S6HF22|A0A2S6HF22_9GAMM S-adenosylmethionine:tRNA ribosyltransferase-isomerase; OS = Methylobacter tundripaludum OX=173365 GN=queA PE=3 SV=1
MKKSDFNYQLPEALIAQKPLAERDASRLLCMDRNIGGIVDRQFTDFIDLINERDLLVFNDTKVIPARLFGTKQSGGKVEILIERILDEHHAIAHVRASKSSKAGTLIELEKGYCCEVLGRADDLFQLEFKGDNSLLSILEQIGHIPLPPYITREDDQSDLTRYQTVFAREAGAVAAPTAGLHFDQAMMEKLKAKGVQSVFVTLHVGSGTFQPVRVEDLSEHLMHKEYFVVLPETVAAVQQARARGGRVIAIGTTAVRALESASKSGLLEAGFGDTDLFITPGYQFRSVDAMLTNFHLPESTLLMLVSAFAGYEHIMNAYSHAIDQSYRFFSYGDAMFLG

SEQ ID NO: 68850 - protein, 339 aa, Methylobacter tundripaludum
  REGION 1..339: note = tr|A0A2S6GW35|A0A2S6GW35_9GAMM S-adenosylmethionine:tRNA ribosyltransferase-isomerase; OS = Methylobacter tundripaludum OX=173365 GN=queA PE=3 SV=1
MKKSDFNYQLPEALIAQKPLAERDASRLLCMDRHTGRITDRQFTDLIDLIDERDLLVFNDTKVIPARLFGKKQSGGKVEILIERILDDHCAIAHVRASKAAKASTLIELDGGYCCEVLGRSDDLFQLEFKGEHSLLYILEQIGHIPLPPYITRADDESDLTRYQTVFAREAGAVAAPTAGLHFDQAMMGKLKAKGVLSAFVTLHVGSGTFQPVRVEDLSEHLMHKEYFAVLPETVAAVQQARARGGRVIAIGTTAVRALESASQSGRLEAGFGDTDLFITPGYQFKSVDAMLTNFHLPESTLLMLVSAFAGYASIMSAYSHAIDQSYRFFSYGDAMFLA

SEQ ID NO: 68851 - protein, 391 aa, Methylobacterium aquaticum
  REGION 1..391: note = tr|A0A0C6EW66|A0A0C6EW66_9RHIZ S-adenosylmethionine:tRNA ribosyltransferase-isomerase; OS = Methylobacterium aquaticum OX=270351 GN=queA PE=3 SV=1
MGRRRPARHPPARERPCPIDPAAESWLKGAMRVDLFDFDLPEDSIALRPAVPRDGARLMLLHPGSPPEDRIVRDLPGLLRPGDVLVFNDTRVIPARLRGLRHRDGGTVRLEAMLHLREAPDRWRAFARPAKRLKVGDRVSFGAAGEGEACGLTRLDATIVERGEGGETTFAFDLAGPALDEAVAALGELPLPPYIAAKRPTDAQDAADYQTVYAREPGAVAAPTAGLHFTPELLAACDAAGLAQVRVTLHVGAGTFLPVKADDTDAHRMHAEIGEITPDAAEALNRARATGGRIVAVGTTALRLLESAAGPDGTIRPWTGATDIFITPGYRFRAVDGLMTNFHLPRSTLFMLVSAFAGLEPMRAAYAAAIERGYRFYSYGDSSLLFRAETR

SEQ ID NO: 68852 - protein, 362 aa, Methylobacterium aquaticum
  REGION 1..362: note = tr|A0A0J6T5J1|A0A0J6T5J1_9RHIZ S-adenosylmethionine:tRNA ribosyltransferase-isomerase; OS = Methylobacterium aquaticum OX=270351 GN=queA PE=3 SV=1
MRVDLFDFDLPEDRIALRPAVPRDGARLMLLHPGAPPEDRVVRDLPGLLRPGDVLVFNDTRVIPARLRGLRHRPDGQPVRLEAMLHLRESPDRWRAFARPAKRLRVGDRVSFGAAGEGETCALTRLDATIVTRGEGGETTFAFDLAGPALDEAVAALGELPLPPYIAAKRPTDAQDAADYQTVYARAPGAVAAPTAGLHFTPELLAACTAAGLTQLRVTLHVGAGTFLPVKADDTDAHRMHAEIGEITPEAAEALNRARFSGGRIVAVGTTALRLLESAAEPDGTIRPWTGATDIFITPGYRFRAVDVLMTNFHLPRSTLFMLVSAFAGLEPMRAAYAAAIARGYRFYSYGDGSLLFRAETR

SEQ ID NO: 68853 - protein, 354 aa, Methylobacterium brachiatum
  REGION 1..354: note = tr|A0A1I3GZK9|A0A1I3GZK9_9RHIZ S-adenosylmethionine:tRNA ribosyltransferase-isomerase; OS = Methylobacterium brachiatum OX=269660 GN=queA PE=3 SV=1
MRVDLFDFDLPESCIALRPAEPRDAGRLLVVRPGDALADCSVRDLPGALRAGDALVFNDTRVIPARLIGVRTRPGAPGQRTEVMLHLREAPARWRAFARPAKRLTAGDALQFGDLRATVFEKGEAGEIVLDFDRAGAALDAQIALEGALPLPPYIAGKRPTDARDTTDYQTVYARHPGAVAAPTAGLHFSDDLLAAIDAAGLQRHHVTLHVGAGTFLPVKADDTEGHRMHAEIGILDAETAAALNAVRAAGGRIVAVGTTALRLLESAASPAGTLSAFSGPTDIFITPGYRFRAVDALVTNFHLPRSTLFMLVSAFSGLDTMRAAYAHAIRSGYRFYSYGDASLLFPGPRADMP

SEQ ID NO: 68854 - protein, 354 aa, Methylobacterium brachiatum
  REGION 1..354: note = tr|A0A3G2V8R4|A0A3G2V8R4_9RHIZ S-adenosylmethionine:tRNA ribosyltransferase-isomerase; OS = Methylobacterium brachiatum OX=269660 GN=queA PE=3 SV=1
MRVDLFDFDLPESCIALRPAEPRDAGRLLVVRPGETLADCSVRDLPGALRAGDALVFNDTRVIPARLIGVRTRPGAPGQRTEVMLHLREAPARWRAFARPAKRLTVGDALQFGDLRATVVEKGEAGEIVLDFDRAGPDLDAQIAREGALPLPPYIAGKRPTDARDTTDYQTVYARHPGAVAAPTAGLHFSDDLLAAIDAAGLQRHHVTLHVGAGTFLPVKADDTEGHRMHAEIGILDAETAAALNAVRAARGRIVAVGTTALRLLESAASPAGTLSAFSGPTDIFITPGYRFRAVDALVTNFHLPRSTLFMLVSAFSGLDTMRAAYAHAIRSGYRFYSYGDASLLFPGPRADMP

SEQ ID NO: 68855 - protein, 362 aa, unidentified
  source 1..362: note = Methylobacterium currus
  REGION 1..362: note = tr|A0A2R4WTD2|A0A2R4WTD2_9RHIZ S-adenosylmethionine:tRNA ribosyltransferase-isomerase; OS = Methylobacterium currus OX=2051553 GN=queA PE=3 SV=1
MRVDLFDFDLPEDRIALRPAVPRDGARLMLLHPGAPPEDRVVRDLPGLLRPGDVLVFNDTRVIPARLRGLRHRPDGPTVRLEAMLHLRESADRWRAFARPAKRLRVGDRVSFGEAGEGETCALTRLDATIVERGEGGETTFAFDLAGPALDEAVAALGELPLPPYIAAKRPTDAQDAADYQTVYAREPGAVAAPTAGLHFTPALLDACAAAGLAQVRVTLHVGAGTFLPVKADDTDAHRMHAEIGEITPQAAEALNRARAAGGRLVAVGTTALRLLESAAAPDGTIRPWTGATDIFITPGYRFRAVDVLMTNFHLPRSTLFMLVSAFAGLEPMRAAYAAAIARGYRFYSYGDSSLLFRAETR

SEQ ID NO: 68856 - protein, 367 aa, unidentified
  source 1..367: note = Methylobacterium dankookense
  REGION 1..367: note = tr|A0A564G2H4|A0A564G2H4_9RHIZ S-adenosylmethionine:tRNA ribosyltransferase-isomerase; OS = Methylobacterium dankookense OX=560405 GN=queA PE=3 SV=1
MRVDLFDFDLPEASIALRPAEPRGSARLLVVEPGGTLADRHVADLPGLLRPGDALVFNDTRVIPARLNGVRTRPGAPGQRCEAMLHLREAADSWRAFARPAKRLAPGDRIRFGAEGEGTACELARLDATVAEKGEGGEILLRFDLSGPVLDEAIAALGTLPLPPYIAGKRAVDARDAADYQTVYAREPGAVAAPTAGLHVTDDLLAALDAAGTTRHHVTLHVGAGTFLPVKADDTADHRMHAEVGHLDAATAEALNAARARGGRIVAVGTTALRLLESAADEAGRLHPFAGPTRIFITPGHRFRAVDALMTNFHLPRSTLFMLVAAFSGLETMRTAYAHAIATGYRFYSYGDSSLLFPAEPGPTGPR

SEQ ID NO: 68857 - protein, 362 aa, unidentified
  source 1..362: note = Methylobacterium gnaphalii
  REGION 1..362: note = tr|A0A512JIZ0|A0A512JIZ0_9RHIZ S-adenosylmethionine:tRNA ribosyltransferase-isomerase; OS = Methylobacterium gnaphalii OX=1010610 GN=queA PE=3 SV=1
MRVDLFDFDLPETSIALRPASPRDAGRLLVVRPGEPFVDRAVRDLAGQLRPGDALVFNDTRVIPARLTGVRRRPGAPGQRVEAMLHMREAPDCWRAFARPAKRIAPGDRLSFGSDEGASSTCELGRLDATLESKGEGGEVTLRFDLSGPALDDAIAAQGALPLPPYIAGKRPTDARDATDYQTIYAREPGAVAAPTAGLHFSEAILAKLDAAGIARHTVTLHVGAGTFLPVKADDTADHRMHAEIGTLSANTAEALNRTRAASGRVVAVGTTALRLLESAADENGRLHAFAGATDIFITPGYRFRAVDALMTNFHLPRSTLFMLVSAFSGLDTMRAAYAHAIASGYRFYSYGDSSLLFPEAR

SEQ ID NO: 68858 - protein, 361 aa, Methylobacterium gossipiicola
  REGION 1..361: note = tr|A0A1I2TDI0|A0A1I2TDI0_9RHIZ S-adenosylmethionine:tRNA ribosyltransferase-isomerase; OS = Methylobacterium gossipiicola OX=582675 GN=queA PE=3; SV = 1
MRVDLFDFELPEASIALRPPTPRDAGRLLVVRPGEALDDRAVRDLPGLLRPGDALVFNDTRVIPARLKGVRHRPGAPGLRMEAMLHLREAPDTWRAFARPAKRLAPGDRIVFGRQGAGEPCDLGGLDATLVEKGEAGEITLAFDLSGPDLDAAIAATGDLPLPPYIAGKRPTDARDTTDYQTVYADAPGAVAAPTAGLHFSEALLADLDAAGIQRHRVTLHVGAGTFLPVKADDTDDHRMHAEIGHLSGETADALNRVRAAGGRVVAVGTTALRLLESAADAEGRLHPFSGPTEIFITPGTPIRAVDALMTNFHLPRSTLFMLVSAFSGLETMRAAYAHAIEHGYRFYSYGDSSLLFPAGR

SEQ ID NO: 68859 - protein, 362 aa, unidentified
  source 1..362: note = Methylobacterium haplocladii
  REGION 1..362: note = tr|A0A512IR97|A0A512IR97_9RHIZ S-adenosylmethionine:tRNA ribosyltransferase-isomerase; OS = Methylobacterium haplocladii OX=1176176 GN=queA PE=3; SV = 1
MRVDLFDFDLPEALIALRPASPRDAGRLLVVQPGEPFADRGVRDLAGLLRAGDALVFNDTRVIPARLNGVRHRPGAPGQRVEAMLHLREAPDRWRAFARPGKRLAPGDLLRFGSDGGASETCELGRLDATVASKGEGGEITLRFDLSGPALDEAIAAQGALPLPPYIAGKRPADARDATDYQTIYAREPGAVAAPTAGLHFSEAMLADLDAAGIRRHAVTLHVGAGTFLPVKAEDTDAHRMHAEIGVLSGETAHALNRIRAEGGRIVAVGTTALRLLESAADADGTIRPFAGPTEIFITPGYRFRAVDALMTNFHLPRSTLFMLVSAFSGLETMRAAYAHAIGEGYRFYSYGDSSLLFPATV

SEQ ID NO: 68860 - protein, 361 aa, unidentified
  source 1..361: note = Methylobacterium indicum
  REGION 1..361: note = tr|A0A0J6TG64|A0A0J6TG64_9RHIZ S-adenosylmethionine:tRNA ribosyltransferase-isomerase; OS = Methylobacterium indicum OX=1775910 GN=queA PE=3 SV=1
MRVDLFDFDLPEDSIALRPAVPRDGARLMLLHPGSLPEDRIVRDLPGLLRPGDVLVFNDTRVIPARLRGLRHRDGTTVRLEAMLHLREAPNRWRAFARPAKRLKVGDRVSFGAAGEGEACALTRLDATIVERGEGGETTFAFDLSGPALDEAVAALGELPLPPYIAAKRPTDAQDTADYQTVYAREPGAVAAPTAGLHFTPDLLAACNAAGLGQVRVTLHVGAGTFLPVKADDTDAHRMHAEIGEITPDAAEALNRARATGGRIVAVGTTALRLLESAAESDGTIRPWTGATDIFITPGYRFRAVDVLMTNFHLPRSTLFMLVSAFAGLEPMRAAYAAAIERGYRFYSYGDSSLLFRAETR

SEQ ID NO: 68861 - protein, 361 aa, unidentified
  source 1..361: note = Methylobacterium indicum
  REGION 1..361: note = tr|A0A147FQU3|A0A147FQU3_9RHIZ S-adenosylmethionine:tRNA ribosyltransferase-isomerase; OS = Methylobacterium indicum OX=1775910 GN=queA PE=3 SV=1
MRVDLFDFDLPEDSIALRPAVPRDGARLMLLHPGSLPEDRIVRDLPGLLRPGDVLVFNDTRVIPARLRGLRHRDGTTVRLEAMLHLREAPDRWRAFARPAKRLKVGDRVSFGAAGEGEACALTRLDATIVERGEGGETTFAFDLSGPALDEAVAALGELPLPPYIAAKRPTDAQDAADYQTVYAREPGAVAAPTAGLHFTPDLLAACKAAGLQQVRVTLHVGAGTFLPVKADDTDAHRMHAEIGEITPDAAEALNRARATGGRIVAVGTTALRLLESAAESDGTIRPWTGATDIFITPGYRFRAVDVLMTNFHLPRSTLFMLVSAFAGLEPMRAAYAAAIERGYRFYSYGDSSLLFRAETR

SEQ ID NO: 68862 - protein, 354 aa, Methylobacterium mesophilicum
  REGION 1..354: note = tr|M7Z9X0|M7Z9X0_9RHIZ S-adenosylmethionine:tRNA ribosyltransferase-isomerase OS=Methylobacterium mesophilicum SR1.6/6 OX=908290 GN=queA PE=3 SV=1
MRVDLFDFDLPETSIALRPAEPRDAGRLLVVRPGSPPTDRNVRDLPGALRAGDVLVFNDTRVIPARLNGVRTRPGAPGQRTEVMLHLREAPARWRAFARPAKRLSVADVLRFGGLTAVVVEKAEAGEVVLDFDRAGAALDAAIAAEGALPLPPYIAGKRPTDARDATDYQTVYARRPGAVAAPTAGLHFSEALLAAIDAAGLRRHHVTLHVGAGTFLPVKADDTDGHRMHAEVGILDAETAEALNAARASGGRIVAVGTTALRLLESAASPDGRLSAFSGATDIFITPGYRFRAVDALVTNFHLPRSTLFMLVSAFSGLETMRDAYEHAIRSGYRFYSYGDASLLFPGPGADAP

SEQ ID NO: 68863 - protein, 364 aa, Methylobacterium nodulans
  REGION 1..364: note = tr|B8IE73|B8IE73_METNO S-adenosylmethionine:tRNA ribosyltransferase-isomerase OS=Methylobacterium nodulans (strain LMG 21967 / CNCM I-2342 / ORS 2060) OX=460265 GN=q ueA PE=3 SV=1
MARMRVDLFDFDLPEALIALRPAVPRDSARLMRVRPGEPPADAQVRDLPDLLRPGDCLVFNDTKVIPARLRGLRARPDGTVVRVEAMLHHREAADCWRAFARPAKRLREGDRIRFGAGQEGAACDLGHLDATVVARGEGGEITLAFDLAGAVLDEAVVRLGELPLPPYIAGRRPADARDAADYQTVYARAPGAVAAPTAGLHFTPDLLARLDAAGIGQARVTLHVGAGTFLPVKAEDTADHRMHAETGEITPETAAALNRVRAAGGRIVAVGTTALRLVESAAAPDGTLRPFAGETDIFITPGYRFRAVDVLMTNFHLPRSTLFMLVSAFAGLDTMREAYAAAIARGYRFYSYGDSSLLFRAGT

SEQ ID NO: 68864 - protein, 354 aa, Methylobacterium organophilum
  REGION 1..354: note = tr|A0A2U1F5Y6|A0A2U1F5Y6_METOR S-adenosylmethionine:tRNA ribosyltransferase-isomerase; OS = Methylobacterium organophilum OX=410 GN=queA PE=3 SV=1
MRVDLFDFELPETSIALRPAEPRDAGRMLVVRPGAPLVDRTVRDLPDALRAGDALVFNDTRVIPARLNGVRTRPGAPGQRTEVMLHLREAPDRWRAFARPAKRLTVGDALRFGDLTATVLEKAEAGEIVLAFDRAGPELDAAIAAEGALPLPPYIAGKRATDARDATDYQTVYARNPGAVAAPTAGLHFSDALLADLDAAGLQRHHVTLHVGAGTFLPVKAEDTDGHRMHAEIGILDAATADALNAARAAGGRIVAVGTTALRLLESAARPDGTLAPFSGPTEIFITPGYRFRAVDALVTNFHLPRSTLFMLVSAFSGLETMRAAYAHAIGAGYRFYSYGDASLLFPGPRADTP

SEQ ID NO: 68865 - protein, 354 aa, Methylobacterium oryzae
  REGION 1..354: note = tr|A0A089PZH1|A0A089PZH1_9RHIZ S-adenosylmethionine:tRNA ribosyltransferase-isomerase; OS = Methylobacterium oryzae CBMB20 OX=693986 GN=queA PE=3; SV = 1
MRVDLFDFDLPETSIALRPAEPRDAGRLLVVHPGLPPADRTVRDLPGALRAGDALVFNDTKVIPARLNGVRTRPGAPGQRTEVLLHLREAPDRWRAFARPAKRLAPGDALRFGALGANVIEKAEAGEIVLAFDRSGPELDAAIAAEGALPLPPYIAGKRATDTRDTTDYQTVYARHPGAVAAPTAGLHFSEALLSDLDAAGLRRHHVTLHVGAGTFLPVKAEDTDAHRMHAEIGILDAATADALNAARAAGGRIVAVGTTALRLLESAAGPDGTLAPFSGPTEIFITPGYRFRAVDALVTNFHLPRSTLFMLVSAFSGLETMRAAYAHAIEAGYRFYSYGDASLLFPGPRADIP

SEQ ID NO: 68866 - protein, 364 aa, unidentified
  source 1..364: note = Methylobacterium oxalidis
  REGION 1..364: note = tr|A0A512JA81|A0A512JA81_9RHIZ S-adenosylmethionine:tRNA ribosyltransferase-isomerase; OS = Methylobacterium oxalidis OX=944322 GN=queA PE=3 SV=1
MRVDLFDFELPEERIALRPAEPRDAGRLLVVRPGGVPPLEDRRVRDLPGLLRPGDALVFNDTRVIPARLAALRTRPGAAGLRAEVMLHLREAPDRWRAFARPGKRLAVGDVLRFGDHREGAPCELGGLAAQLVAKGEGGEIVLRFDLSGPVLDERIAALGTLPLPPYIAGKRPADARDATDYQTVYAREPGAVAAPTAGLHFSEDLLAVLDAAGLSRHTVTLHVGAGTFLPVKADDTADHRMHAEIGHLDADTAEALNAVRARGGRIVAVGTTALRLLESAADAEGRLRPFSGPTEIFITPGVPVRAVDALMTNFHLPRSTLFMLVSAFSGLETMRTAYAHAIRTGYRFYSYGDSSLLFPADPR

SEQ ID NO: 68867 - protein, 354 aa, unidentified
  source 1..354: note = Methylobacterium phyllostachyos
  REGION 1..354: note = tr|A0A1G9VCQ0|A0A1G9VCQ0_9RHIZ S-adenosylmethionine:tRNA ribosyltransferase-isomerase; OS = Methylobacterium phyllostachyos OX=582672 GN=queA PE=3; SV = 1
MRVDLFDFDLPETSIALRPAEPRDAGRLLVVRPGAALADRTVRDLPAALREGDALVFNDTRVIPARLHGIRMRPGAPGQRAEAMLHLREGPARWRAFARPAKRLAVGDTLRFGELTAIVAGKGEAGEIVLDFDRAGPELDAAIAAEGALPLPPYIAGKRATDARDVTDYQTIYARHPGAVAAPTAGLHFSEALLADLDAAGLQRHHVTLHVGAGTFLPVKAEDTDGHRMHAEIGILDATTADALNAARAAGGRIVAVGTTALRLLESAASADGTLSAFSGPTDIFITPGYRFRAVDALVTNFHLPRSTLFMLVSAFSGLETMRAAYAHAIRTGYRFYSYGDASLIFPGPRADLP

SEQ ID NO: 68868 - protein, 362 aa, Methylobacterium platani
  REGION 1..362: note = tr|A0A179S140|A0A179S140_9RHIZ S-adenosylmethionine:tRNA ribosyltransferase-isomerase; OS = Methylobacterium platani OX=427683 GN=queA PE=3 SV=1
MRVDLFDFDLPEESIALRPAVPRDGARLMLLYPDRPPEDRVVRDLPGLLRPGDVLVFNDTRVIPARLRGLRHRSDGQPVRLEAMLHLRESPDRWRAFARPAKRLRVGDRVSFGEAGEGEACALTRLDATIVERGEGGETTFAFDLAGPALDEAVAALGELPLPPYIAAKRPTDARDAADYQTVYAREPGAVAAPTAGLHFTPELLDACNAAGLPQVRVTLHVGAGTFLPVKADDTDAHRMHAEIGEITPQAAEALNRARAAGGRIVAVGTTALRLLESAATPDGTIAPWTGATDIFITPGYRFRAVDVLMTNFHLPRSTLFMLVSAFAGLEPMRAAYAAAIARGYRFYSYGDSSLLFRAETR

SEQ ID NO: 68869 - protein, 354 aa, unidentified
  source 1..354: note = Methylobacterium pseudosasicola
  REGION 1..354: note = tr|A0A1I4JQ76|A0A1I4JQ76_9RHIZ S-adenosylmethionine:tRNA ribosyltransferase-isomerase; OS = Methylobacterium pseudosasicola OX=582667 GN=queA PE=3; SV = 1
MRVDLFDFELPESCIALRPAEPRDGGRLLVVRPGEALADRTVRDLPGALRAGDALVFNDTKVIPARLNGVRTRPGAPGQRTEVLLHLREAPARWRAFARPAKRLSVGDALQFGELRATVFAKGEAGEITLDFDRASPELDAQIALEGALPLPPYIAGKRATDARDATDYQTIYARHPGAVAAPTAGLHFSDDLLTALDAAGLQRHHVTLHVGAGTFLPVKADDTEGHRMHAEIGILDAETAAALNAVRASGGRIVAVGTTALRLLESAARPDGTLSAFSGPTDIFITPGYRFRAIDALVTNFHLPRSTLFMLVSAFSGLDTMRAAYAHAIRSGYRFYSYGDASLLFPGPRADIS

SEQ ID NO: 68870 - protein, 354 aa, Methylobacterium radiotolerans
  REGION 1..354: note = sp|B1M584|QUEA_METRJ S-adenosylmethionine:tRNA ribosyltransferase-isomerase OS=Methylobacterium radiotolerans (strain ATCC 27329 / DSM 1819 / JCM 2831 / NBRC 15690 /NCIMB 10815 / 0-1) OX=426355 GN=queA PE=3 SV=1
MRVDLFDFELPETSIALRPAEPRDAGRMLVVRPGAPLVDRTVRDLPDALRAGDALVFNDTRVIPARLNGVRTRPGAPGQRTEVMLHLREAPDRWRAFARPAKRLTAGDALRFGDLTATVLEKAEAGEIVLAFDRAGPELDAAIAAEGALPLPPYIAGKRATDARDATDYQTVYARNPGAVAAPTAGLHFSDALLADLDAAGLQRHHVTLHVGAGTFLPVKAEDTDGHRMHAEIGILDAATADALNAARAAGGRIVAVGTTALRLLESAARPDGTLAPFSGPTEIFITPGYRFRAVDALVTNFHLPRSTLFMLVSAFSGLETMRAAYAHAIGAGYRFYSYGDASLLFPGPRADTP

SEQ ID NO: 68871 - protein, 354 aa, Methylobacterium radiotolerans; identical to SEQ ID NO: 68870
  REGION 1..354: note = tr|A0A3S3CCS7|A0A3S3CCS7_9RHIZ S-adenosylmethionine:tRNA ribosyltransferase-isomerase; OS = Methylobacterium radiotolerans OX=31998 GN=queA PE=3; SV = 1

SEQ ID NO: 68872 - protein, 356 aa, Methylobacterium sp.
  REGION 1..356: note = tr|A0A0Q5YQA8|A0A0Q5YQA8_9RHIZ S-adenosylmethionine:tRNA ribosyltransferase-isomerase; OS = Methylobacterium sp. Leaf399 OX=1736364 GN=queA PE=3; SV = 1
MRVDLFDFDLPEASIALRPPEPRDAGRLLVVRPGAPPEDRVVRDLASLLSPRDALVFNDTRVIPARLHGIRHRENAAGLRMEAMLHLREAPDRWRAFARPGKRLAVGDRLVLGADASEPLTARIVEKGEGGEVVLRFEASGPDLDAAIALAGTLPLPPYIAGKRPADARDAVDYQTVYAREPGAVAAPTAGLHFSQSLLAAIDAAGIARHSVTLHVGAGTFLPVKAEDTADHRMHAEIGVLDAATAEALNAVRAGGGRVVAVGTTALRLLESAADAEGVLHAFSGPTDIFITPGTPIRAVDALMTNFHLPRSTLFMLVSAFSGLETMRAAYAHAIAGGYRFYSYGDSSLLFPAAPR

SEQ ID NO: 68873 - protein, 362 aa, Methylobacterium sp.
  REGION 1..362: note = tr|A0A4Z0NFC9|A0A4Z0NFC9_9RHIZ S-adenosylmethionine:tRNA ribosyltransferase-isomerase; OS = Methylobacterium sp. 6HR-1 OX=1141884 GN=queA PE=3 SV=1
MRVDLFDFDLPEDRIALRPAVPRDASRLMLLHPGSPPEDRIVRELPGLLRPGDVLVFNDTRVIPARLHGLRHRPEGGAVRIESMLHLRESPDRWRAFARPAKRLRVGDRVSFGQAGEGGTCALTRLDATVVARGEGGETTFAFDLAGPALDEAVAALGELPLPPYIAAKRPTDAQDAADYQTVYAREPGAVAAPTAGLHFTPELLRACAAAGLAQVRVTLHVGAGTFLPVKADDTDGHRMHAEVGEIAPEAAEALNRARANGGRIVAVGTTALRLLESAADPDGTIRPWTGATDIFITPGYRFRTVDVLMTNFHLPRSTLFMLVSAFAGLEPMRAAYAAAIARGYRFYSYGDASLLFRAETR

SEQ ID NO: 68874 - protein, 148 aa, unidentified
  source 1..148: note = Methylobacterium tarhaniae
  REGION 1..148: note = tr|A0A0J6UN76|A0A0J6UN76_9RHIZ S-adenosylmethionine:tRNA ribosyltransferase-isomerase (Fragment) OS=Methylobacterium tarhaniae OX=1187852; GN = VQ03_30485 PE=3 SV=1
MRVDLFDFDLPEDRIALRPAVPRDGARLLLLHAGSPPEDRIVRDLPGLLRPGDVLVFNDTRVIPARLRGLRHRDGGTVRLEAMLHLREAPDRWRAFARPAKRLKVGDRVTFGQAGEGETCALTRLDDRGVEAGGRGGGGGTRLLYTSP

SEQ ID NO: 68875 - protein, 362 aa, Methylobacterium variabile
  REGION 1..362: note = tr|A0A0J6SU10|A0A0J6SU10_9RHIZ S-adenosylmethionine:tRNA ribosyltransferase-isomerase; OS = Methylobacterium variabile OX=298794 GN=queA PE=3 SV=1
MRVDLFDFDLPEDRIALRPAVPRDAGRLMLLRPGEPPEDRVVRDLPGLLLPGDVLVFNDTRVIPARLHGLRHRPEGGAVRIEAMLHLRESADRWRAFARPAKRLRVGDRVSFGQAGEGGTCALTRLDATVAERGEGGETTFAFDLSGPALDEAVAALGELPLPPYIAAKRPTDAQDAADYQTVFAREPGAVAAPTAGLHFTPDLLAACAAAGLSEVRVTLHVGAGTFLPVKADDTDEHRMHAEVGEITRAAADALNRARAAGGRIVAVGTTALRLLESAAAPDGTIQPWTGATDIFITPGYRFRAVDALMTNFHLPRSTLFMLVSAFAGLEPMRAAYAAAIERGYRFYSYGDASLLFRAETR

SEQ ID NO: 68876 - protein, 238 aa, unidentified
  source 1..238: note = Methylobrevis pamukkalensis
  REGION 1..238: note = tr|A0A1E3H547|A0A1E3H547_9RHIZ S-adenosylmethionine:tRNA ribosyltransferase-isomerase; OS = Methylobrevis pamukkalensis OX=1439726 GN=queA PE=3 SV=1
MTARGEAGEVEFRFDRSGPDLDLGLVEVGHIPLPPYIAARRPEDDDDRRDYQTVYAREEGAVAAPTAGLHFTPELLDALAAKGVGSAFVTLHVGAGTFLPVKVDDTAAHKMHAEIGVVAPEVADRLNAVRAAGGRVVSVGTTSLRLLESAAGADGVIRPFAGPTDIFITPGYRFRAVDLLMTNFHLPRSTLFMLVSAFCGLDTMRAAYAHAIASGYRFYSYGDASLLHPAPDARLKTR

SEQ ID NO: 68877 - protein, 344 aa, unidentified
  source 1..344: note = Methylocaldum marinum
  REGION 1..344: note = tr|A0A250L3A9|A0A250L3A9_9GAMM S-adenosylmethionine:tRNA ribosyltransferase-isomerase; OS = Methylocaldum marinum OX=1432792 GN=queA PE=3 SV=1
MRKSDFFFELPEHLIAQYPLPERSASRMLCLDGTTGRIDDRMFIELPELVRPGDILVFNDTKVMPARLFGRKASGGRVEILIERVLDSNSCLAHVRASKAPKTGTELLLDGGFRCVVMGRKDDLFLLMVLDGRTVDEVLNAVGHIPLPPYIDRPDSVSDWERYQTVFAKASGAVAAPTAGLHFDEAMLERLAEKGVEQAFVTLHVGSGTFQPLRVDELAQHRMHSELCEVSPAVVAKINEIRQRGGRVIAVGTTVVRALEAASLEGTLMPNKAETNLFIRPGFQFRCVDAMVTNFHLPESTLLVLVCAFAGYSEVLTAYRHAVERSYRFFSYGDAMFVTRKPYS

SEQ ID NO: 68878 - protein, 344 aa, Methylocaldum sp.
  REGION 1..344: note = tr|A0A4R7AB62|A0A4R7AB62_9GAMM S-adenosylmethionine:tRNA ribosyltransferase-isomerase; OS = Methylocaldum sp. 0917 OX=2485163 GN=queA PE=3 SV=1
MRKSDFFFELPEDLIAQYPLPERSASRLLCLDGTTGEIDDRMFIELPELLRAGDLLVFNDTKVMPARLFGRKASGGRVEVLIERVLGPSMGLAHVRASKAPKAGTEILLEGGFRCSVQGRQDDLFLLMLLDGRTVDEVLSAVGHIPLPPYIDRPDSVSDWERYQTVFAKASGAVAAPTAGLHFDEAMLERLAAKGIERAFVTLHVGSGTFQPLRVDELDQHKMHSELCEVGSDVVEKVNEVRQRGGRVIAVGTTVVRTLESASLKGSLTSYKGETNLFIRPGFHFRCVDAMVTNFHLPESTLLTLVCAFAGCSEVLAAYRHAVERKYRFFSYGDAMFVTHKPHA

SEQ ID NO: 68879 - protein, 355 aa, unidentified
  source 1..355: note = Methylocapsa palsarum
  REGION 1..355: note = tr|A0A1I4C4U8|A0A1I4C4U8_9RHIZ S-adenosylmethionine:tRNA ribosyltransferase-isomerase; OS = Methylocapsa palsarum OX=1612308 GN=queA PE=3 SV=1
MRVDLFDFDLPADRIAVRPAEPRDHARLLVVRPGESDPFDDGAILDLPGLLRPGDVLVVNDTRVIPARLQGVRTRGADRARIEATLHKREGEARWRAFVRPAKKLKQGEIVRFSDAPGLAAAVAEKGEAGEVLLAFDLSGAALDAAIERIGQMPLPPYIAARRPADGRDALDYQTLFAQRAGAVAAPTAGLHFTPGLVAALKARGLLIQTVTLHVGAGTFLPVKADETGDHKMHAEWGEVSAATADALNRARASGGRIVAVGTTSLRILESAAGDDGVIAPFADDTSIFITPGYVFKAVGALLTNFHLPRSTLFMLVSAFCGLETMQAAYSHAIASDYRFYSYGDACLLFPAQSA

SEQ ID NO: 68880 - protein, 361 aa, unidentified
  source 1..361: note = Methyloceanibacter caenitepidi
  REGION 1..361: note = tr|A0A0A8K343|A0A0A8K343_9RHIZ S-adenosylmethionine:tRNA ribosyltransferase-isomerase; OS = Methyloceanibacter caenitepidi OX=1384459 GN=queA PE=3; SV = 1
MRTDLFDFELPDGLIALRPVHPRDAARLLVVHPGDPDVLADKVMAELPLLLEPGDALVFNDTRVIPAALQGVRTRGYATAQISANLIEKLDDHRWNALAKPGKRLEPGDRIQFGKDNDACALGSLTATVEAKGEDGLVTLAFDLSGPALHDAIEAEGAMPLPPYIAARRAPDDQDRTDYQTTFAREEGAVAAPTAGLHFTPKLLQTLEELGVVIYFVTLHVGAGTFLPVRAEDTDDHHMHAEYGEVSTETAFALNAVKSRGNRIVAVGTTSLRLLEAASDEFGTLKPFHGETDIFIVPGYRLRFVDRLLTNFHLPKSTLFMLVSAFSGLETMKRAYEHAIAEGYRFYSYGDACLLTPKDQA

SEQ ID NO: 68881 - protein, 361 aa, unidentified
  source 1..361: note = Methyloceanibacter methanicus
  REGION 1..361: note = tr|A0A1E3VZN0|A0A1E3VZN0_9RHIZ S-adenosylmethionine:tRNA ribosyltransferase-isomerase; OS = Methyloceanibacter methanicus OX=1774968 GN=queA PE=3; SV = 1
MRTDLFDFELPDGLIALRPVHPRDAARLLVVCPDEPERLADKVMADLPLLLDPGDALVFNDTRVIPAALRGVRARGYATAQVSATLIEKLDDHRWRALAKPGKRLEQGDRIRFGEHGGACASGSLDATVVAKGEEGVVTLAFDLSGPALHDAIETQGAMPLPPYIAARRAPDKQDRTDYQTAFAREEGAVAAPTAGLHFTPKLIQTLDELGITAHFVTLHVGPGTFLPVRVEDTADHRMHSEYGEISTETAFALNAVKSRGNKVVAVGTTSLRLLESASDEFGTLKPFRGKTDIFITPGYRFRYVDRLLTNFHLPRSTLFMLVAAFSGLETMQQAYAHAIDQAYRFYSYGDACLLSPKDSA

SEQ ID NO: 68882 - protein, 361 aa, unidentified
  source 1..361: note = Methyloceanibacter stevinii
  REGION 1..361: note = tr|A0A1E3VKL4|A0A1E3VKL4_9RHIZ S-adenosylmethionine:tRNA ribosyltransferase-isomerase; OS = Methyloceanibacter stevinii OX=1774970 GN=queA PE=3 SV=1
MRTDLFDFELPDGLIALRPVHPRDAARLLVVHPGDPDILADKVMADLPLLLEPGDALVFNDTRVIPAALQGVRTRGYATAQISANLIEKLDDHRWNALAKPGKRLEPGDRIQFGKDSNACADGSLIATVEAKGQEGMVTLAFDLSGPALHDAIEAQGAMPLPPYIAARRAPDDQDRTDYQTTFAREEGAVAAPTAGLHFTRKLLQTLDELGIVIYFVTLHVGPGTFLPVRAEDTDDHRMHAEYGEVSTETAFALNAVKSRGNKVVAVGTTSLRLLESASDEFATLKPFHGETDIFITPGYRLRFVDRLLTNFHLPKSTLFMLVSAFSGLETMKLAYGHAISEGYRFYSYGDACLLTPKDPV

SEQ ID NO: 68883 - protein, 363 aa, unidentified
  source 1..363: note = Methyloceanibacter superfactus
  REGION 1..363: note = tr|A0A1E3VIW1|A0A1E3VIW1_9RHIZ S-adenosylmethionine:tRNA ribosyltransferase-isomerase; OS = Methyloceanibacter superfactus OX=1774969 GN=queA PE=3; SV = 1
MRTELFDFDLPESLIALRPASPRDAARLLVVDPHGTEQLADRMMTDLPGLIAPGDALVFNDTRVIPAALKGTRTRGDAMAQVSVNLTERLDDSRWLALARPAKRLEPGDRIQFGDSHNVCALGSLDATVAARGPDGEVTLAFDLSGAALHDAIETMGAMPLPPYIAARRAADDRDRSDYQTTSRARRAPWPRPPRGCHFTASLMQALEGRGVTCHFVTLHVGPGTFLPVRAEDTEAHKMHAEHGVVSTQVALALNAIKARGNRIVAVGTTSLRLLESAADEFGTLKPFSGETDIFITPGYRFRFVDRLLTNFHLPRSTLFMLVAAFSGLDTMKRAYAHAVAERYRFYSYGDACLLDRARHADD

SEQ ID NO: 68884 - protein, 361 aa, Methylocella silvestris
  REGION 1..361: note = tr|A0A2J7TLI0|A0A2J7TLI0_METSI S-adenosylmethionine:tRNA ribosyltransferase-isomerase; OS = Methylocella silvestris OX=199596 GN=queA PE=3 SV=1
MRVDQFDFDLPDASIALRPALPRDSARLLVVRPGGSSPATPDDRLIRDLPELLARGDVLVVNDTRVIPARLDGFRARGEALARIEATLHKRESGDLWRAFLRPAKKLRAGETIVFALGDEKLAARVIEKGEGGEVLLGFEVAGAELDRALDRVGHMPLPPYISSKRVTDESDAADYQTLFADRPGAVAAPTASLHFTPALLAALVAKGVQIARVTLHVGAGTFLPVKAEDTDDHRMHAEWGEVSAETAGVLNAARRAGRRIVAAGTTSLRILESAASPDGALMAFSGDTSIFITPGYSFRAVDLLLTNFHLPRSTLFMLVCAFSGLQTMRDAYQHAIEAGYRFYSYGDACLLHPAAPRGAA

SEQ ID NO: 68885 - protein, 361 aa, Methylocella silvestris
  REGION 1..361: note = sp|B8EIV1|QUEA_METSB S-adenosylmethionine:tRNA ribosyltransferase-isomerase OS=Methylocella silvestris (strain DSM 15510 / CIP 108128 / LMG 27833 / NCIMB 13906 / BL2 ) OX=395965 GN=queA PE=3 SV=1
MRVDQFDFDLPDASIALRPAHPRDAARLLVVRPGRLSPAALDDRFIRDLPELLAAGDVLVVNDTRVIPARLDGFRARGEALARIEATLHKREGGDLWRAFLRPAKKLRAGETILFSSGDAKLAARVVEKGEDGEVLLGFELSGAELDLALERVGRMPLPPYISSKRGADESDAADYQTLFADRPGAVAAPTASLHFTPALLAALVAKGVQIERVTLHVGAGTFLPVKAEDTDDHRMHAEWGEVSAETAGALNAARRAGRRVVAAGTTSLRILESAAGPDGAVAAFSGDTSIFITPGYSFKAVDLLLTNFHLPRSTLFMLVCAFSGLQTMRDAYNHAIAAGYRFYSYGDACLLYPAAPRGAA

SEQ ID NO: 68886 - protein, 364 aa, Methylocella tundrae
  REGION 1..364: note = tr|A0A4V6IMI6|A0A4V6IMI6_METTU S-adenosylmethionine:tRNA ribosyltransferase-isomerase; OS = Methylocella tundrae OX=227605 GN=queA PE=3 SV=1
MRVDLFDFELPDSSIALRPAHPRDAARMLVVRSEAPSAPALEDRIIRDLPDLLSPGDILVVNDTRVIPARLQGRRVRGEAEARIEATLHKREGASLWRAFVRPAKKLKAGEMITFEAAGAGSLEAEVVEKGEEGEVLLGFAASGSDLDAALDRIGQMPLPPYISGKRPADESDADDYQTLFARRSGAVAAPTASLHFTPALIAALSARDIMIEKVTLHVGAGTFLPVKAADTEDHRMHAEWGEVSAQTAKTLNDARRGGRRIVAAGTTSLRILESAAKDNGAVAAFSGDTSIFITPGYRFRAVDVLLTNFHLPRSTLFMLVCAFCGLETMQRAYAHAIAHGYRFYSYGDACLLFPAAANKAGDL

SEQ ID NO: 68887 - protein, 354 aa, unidentified
  source 1..354: note = Methylococcaceae bacterium
  REGION 1..354: note = tr|A0A1Z9UEE9|A0A1Z9UEE9_9GAMM S-adenosylmethionine:tRNA ribosyltransferase-isomerase; OS = Methylococcaceae bacterium TMED282 OX=1986758 GN=queA; PE = 3 SV=1
  VARIANT 77: note = Xaa can be any naturally occurring amino acid
  VARIANT 88: note = Xaa can be any naturally occurring amino acid
  VARIANT 220..221: note = Xaa can be any naturally occurring amino acid
MGFLLDLADFDYSLPKHLIAQEPLIIRRDAKLLALSEKKDTPSHFKVADLFSFFKPDDLLVLNDTRVINARLKTNKXTGGRIEILIEXVLSEKVALVHMRSSRAPKIGSCITLFGNVNISVITRFEELFQIEIITSHTFEELLNTHGKLPLPPYIEREPNDNDVSRYQTIYSRVPGAIAAPTAGLHIDQLLIDQLTASGIQIAYVTLHVGAGTFRPVKSXXIKEHKMHSERVVVSAATVAAVNKTREKGGRVIGVGTTVMRALETAARASGSIEVYDGETDLFITPGFEFQVIDALMTNFHLPRSTLLMLVCAFSGFERVMNAYRIAVENNYRFFSYGDAMWLERKVPKRSGGI

SEQ ID NO: 68888 - protein, 344 aa, unidentified
  source 1..344: note = Methylococcaceae bacterium
  REGION 1..344: note = tr|A0A4Q5L5Y2|A0A4Q5L5Y2_9GAMM S-adenosylmethionine:tRNA ribosyltransferase-isomerase; OS = Methylococcaceae bacterium FWC3 OX=2516328 GN=queA PE=3; SV = 1
MRRSDLLYELPKHLIAQEPLPERSASRLLVLDGATGNVQDRMFRGVPGLLRPEDLLVFNDTRVIRARLFGRKPTGGQVEVLVERILSDQRALAMIRASKIPRSEFTILLDGGHSAKVVAREDQRFILEFAAGRTVSEVLDAIGHIPLPPYIERADQPADATRYQTVYGCRPGAIAAPTAGLHFDQDVLRTLTEAGVQQGFVTLHVGSGTFQPLRVDDLNDHPMHSEECEVDEHLVGQVRATRERGGRVVAVGTTVVRSLETAARDGDLRAFRGATDLLIQPGFPFRCVDALITNFHLPESTLLALVCALAGYHETMSAYRHAVDARYRFFSYGDAMFVTPKIRR

SEQ ID NO: 68889 - protein, 338 aa, unidentified
  source 1..338: note = Methylococcales bacterium
  REGION 1..338: note = tr|A0A418RSG7|A0A418RSG7_9GAMM S-adenosylmethionine:tRNA ribosyltransferase-isomerase; OS = Methylococcales bacterium OX=2304002 GN=queA PE=3 SV=1
MKKSDFNYLLPDALIAQKPLAERDSSRLLCMDRDTGVITDRCFTDFISLLNERDLLVFNDTKVIPARLYGKKQSGGRIEILIERILDDQHATAHIKASKAPKPGTIIELDEGYQCEVLGREDDLFRLVFIDIKILDLLDKIGHIPLPPYITRADDESDLTRYQTVFAKQLGAVAAPTAGLHFDLALMDKIKALKVSTAFVTLHVGSGTFQPVRVENLAEHVMHKEYYAVTQATVDAVNAAKARGGRVIAIGTTAVRALESASKTGQLVAGFGDTNLFITPGYTFKSVDALLTNFHLPESTLLMLVSAFAGYQPIMAAYRHAIEQSYRFFSYGDAMFLS

SEQ ID NO: 68890 - protein, 339 aa, unidentified
  source 1..339: note = Methylococcales bacterium
  REGION 1..339: note = tr|A0A418RJU5|A0A418RJU5_9GAMM S-adenosylmethionine:tRNA ribosyltransferase-isomerase; OS = Methylococcales bacterium OX=2304002 GN=queA PE=3 SV=1
MKKSDFNYLLPDNLIAQKPLAERDASRLLCMNKNSGQITDRQFTNFIDLINDRDLLVFNDTKVIPARLYGRKQSGGKIEILIERLLDDHRALAHVKASKSPKAGALIELDQDYHCTVQGRADDLFILEFTDISLMKLLDLIGHIPLPPYITRADDVSDLTRYQTVFAKEAGAVAAPTAGLHFNDALMTKIKALNIQTAFVTLHVGSGTFQPVRAENLADHVMHKEYFAVPQATVDAVEQTRERGGRVIAIGTTAVRALESASTSGQLISGFGDTDLFITPGYTFKSVDALLTNFHLPESTLLMLISAFAGYDEIRNAYQHAIKESYRFFSYGDAMFLSN

SEQ ID NO: 68891 - protein, 347 aa, Methylococcus capsulatus
  REGION 1..347: note = sp|Q60AZ8|QUEA_METCA S-adenosylmethionine:tRNA ribosyltransferase-isomerase OS=Methylococcus capsulatus (strain ATCC 33009 / NCIMB 11132 / Bath) OX=243233 GN=queA; PE = 3 SV=1
MLKSEFHYDLPQNLIAQSPLPERSASRLLCLDGATGALEDKSFRDIEKLLRPGDLLVFNDTRVLPARLFGRKETGGAVEILLERLLGERLMLAHVRASKAPRPGTWLALEAEHRVRVVERDGDLFLLELAGEEPLQTVLEQIGHMPLPPYITRPDTSADLERYQTVYATRPGAVAAPTAGLHFDTELLGRLRGAGIDMARVTLHVGAGTFQPVRTENLEDHRMHAEYCEVGPEVVKAVERARGRGGRVVAVGTTSMRSLETAASGGSLRTFSGETRLFIKPGFRFNCVDALVTNFHLPESTLLVLVCAFAGHRETLAAYRHAIAQAYRFFSYGDAMFVTPNEPAANR

SEQ ID NO: 68892 - protein, 346 aa, Methylococcus sp.
  REGION 1..346: note = tr|A0A3N9UUH1|A0A3N9UUH1_9GAMM S-adenosylmethionine:tRNA ribosyltransferase-isomerase; OS = Methylococcus sp. OX=39769 GN=queA PE=3 SV=1
MLKSDFFYELPEDLIAQAPLGERGASRLLCLDQDSQLADRGFADLPDLLRPGDLLVLNDTRVMPARLYGRKSSGGRIEILIERAISPSLALAHVRASKSPKPGTMLLLDGGHACQVEERRDDLFLLQFPEGQTVEEVLSAVGHIPLPPYIDRPDEAGDRERYQTVYARTAGAVAAPTAGLHFDEDMLKTLADQGVGHAFVTLHVGSGTFLPVRVENLDEHRMHAEICDVPESTVARIRETRERGGRVVAVGTTVVRSLESAALAGELLPFQGETRLFIQPGFQYRCVDAMITNFHLPESTLLALVCAFAGYQPVMAAYRHAVEQRYRFFSYGDAMFLLRNTTGGRS

SEQ ID NO: 68893 - protein, 343 aa, Methylococcus sp.
  REGION 1..343: note = tr|A0A432RL06|A0A432RL06_9GAMM S-adenosylmethionine:tRNA ribosyltransferase-isomerase; OS = Methylococcus sp. OX=39769 GN=queA PE=3 SV=1
MLYKSDYHYKLPEHLIAQVPLGSRTASRMLTLDGCTGELRDCYFVDLLDLLRSGDLLVLNNTRVISARLYGQKPTGGRVELLVERLLDERRILAHTRSSKAVKPGTVIEVAGGGTFECIERQAALAVFEFLGTEPLSDLLERVGHIPLPPYIQRPDGGEDRLRYQTVYAARPGAVAAPTAGLHFDEKMISQLGSRGISTAHVTLHVGSGTFQPVRVEKLSDHRMHSEFCEIDQSVVEMVNQTRSEGGRVIAVGTTTTRVLEAASLEGRLKPFRGETNLFITPGFRFSCVDGLLTNFHLPESTLLTLVCAFAGYESVMSAYRHAVKEEYRFFSYGDAMFVKPPD

SEQ ID NO: 68894 - protein, 339 aa, unidentified
  source 1..339: note = Methylocucumis oryzae
  REGION 1..339: note = tr|A0A0F3IIB3|A0A0F3IIB3_9GAMM S-adenosylmethionine:tRNA ribosyltransferase-isomerase; OS = Methylocucumis oryzae OX=1632867 GN=queA PE=3 SV=1
MKTNDFNYFLPPELIAQQPLPERAQSRLLCMGRQSGCLTDTLFREFIDLVNERDLLVFNDTKVIPARLYGRKASGGKVEMLIERVIDDQHALTHIKASKAPKSGSFIELEQNLSCEVLARQDDLFYVHFHTQQSVYELLNTIGHIPLPPYIQREDTDFDSQRYQTVFAKNLGAVAAPTAGLHFDDKLLNQLEAKGVSKAFVTLHVGSGTFQPVRVTQIAEHRMHKEYYVVSDDTVALVNQTRANGGRVIAIGTTSVRALESASVSGTLQAGMGDTELFITPGYQFKVVDGLLTNFHLPESTLLMLVSAFASFETVKAAYQHAITERYRFFSYGDAMFIS

SEQ ID NO: 68895 - protein, 353 aa, unidentified
  source 1..353: note = Methylocystaceae bacterium
  REGION 1..353: note = tr|A0A5C9DEB9|A0A5C9DEB9_9RHIZ S-adenosylmethionine:tRNA ribosyltransferase-isomerase; OS = Methylocystaceae bacterium OX=2052174 GN=queA PE=3 SV=1
MRVDLFDFNLPQDSIALRPADPRDSARMLVALCGGSFEDRIVRDLPNFLRPGDALVVNDSRVIHARLSGRRSRGALSANVEATLIERLDASRWRALMRPAKKLAIGDRICFMGHGRAIDAHVEAKGEDGEITLVFELQGPALDIAIEQAGVMPLPPYIAGKRSADARDESDYQTIFAREAGAVAAPTAGLHFTPQLLAAIEARGVRLYRVTLHVGAGTFLPVKAEDTDLHRMHEEFARLDAETAQALNDVRAGGGRIVAVGTTALRVLESAADDAGRFAPYAARTRIFITPGYRFRAVDMLLTNFHLPRSTLFMLVAAFAGLERMKAAYAHAIKSGYRFYSYGDACVLQRSET

SEQ ID NO: 68896 - protein, 353 aa, unidentified
  source 1..353: note = Methylocystaceae bacterium
  REGION 1..353: note = tr|A0A4P5SNF9|A0A4P5SNF9_9RHIZ S-adenosylmethionine:tRNA ribosyltransferase-isomerase; OS = Methylocystaceae bacterium OX=2052174 GN=queA PE=3 SV=1
MLVDQFNFDLPEDRIALRPMRPRDAARMLIVSPNNQFLDKQVSDLPFMLRPGDALVINNTKVIHARLKGERFRNGVKAAIEATLIEKLNEQSWIALIKPAKKLQVGDIVKFYSDRISIEAKVENKEDGGQVTLIFDHTSNDLDKIIELIGAPPLPPYIAGKRPADKQDELDYQTYFASKPGAIAAPTAGLHFTKELINKLLQSDIKIFSITLHVGAGTFVPVKVEDTKDHIMQREFAYIDKETANQLNRVKNDGGRIVAVGTTALRVLESASNENGYISSYSDFTDIFITPGYKFKFTDLLLTNFHLPKSTLFMLVSAFSGLSTMHLAYSYAIKNKYRFYSYGDACLLTREQI

SEQ ID NO: 68897 - protein, 359 aa, unidentified
  source 1..359: note = Methylocystis bryophila
  REGION 1..359: note = tr|A0A1W6MSP8|A0A1W6MSP8_9RHIZ S-adenosylmethionine:tRNA ribosyltransferase-isomerase; OS = Methylocystis bryophila OX=655015 GN=queA PE=3 SV=1
MRVDLFDFDLPAESIALRPADPRDSARMLVLPAGEDRLEDRHVRDLPHLLRPGDALVVNDARVIRARLHGYRHREGTKAQIEATLIEQRSPSSWQAMARPAKKLAVGDRLSFGWTPTECPSANPSLEAEVEARGEAGEVTLAFDRSGSALEEAIQACGSIPLPPYIATRRAPDLRDESDYQTLFAAQPGAVAAPTAGLHFTPELLRSVEAAKISLHRLTLQVGAGTFLPVRAQDTRDHVMHAEYCSLSKETAEALNEIKGRGGRIVAVGTTALRCLESAACASGRLEPFQAKTDIFITPGYRFRVVDALMTNFHLPRSTLFMLVCAFGGLDRLKAAYAHAVRQGYRFYSYGDATLLFRT

SEQ ID NO: 68898 - protein, 345 aa, Methylocystis heyeri
  REGION 1..345: note = tr|A0A4S4MEP8|A0A4S4MEP8_9RHIZ S-adenosylmethionine:tRNA ribosyltransferase-isomerase; OS = Methylocystis heyeri OX=391905 GN=queA PE=3 SV=1
MLVVPPGAAPFEDRIVRDLPSFLRPGDALVINDTRVVRARLSGFRLRGENKARVEVTLIERLGGNCWRAMAKPAKKLGLGEQVCFVKDQAKGVNPPLEGEGRREAAGWAGALKAIVEERGDNGEVTLRFDLSGELLDQAIEDLGAMPLPPYIAGKRAVDASDDSDYQTLFAREAGAVAAPTAGLHFTPELLSAIEAAGARIHNVTLHVGAGTFLPVKAEDTADHQMHYEHAVLSAETAAALNEIRTRGGRIFAVGTTALRCLESAADENGELKAYSARTNIFITPGYKFRAVDVLLTNFHLPRSTLFMLVCAFCGVDRMKAAYAHAIAQGYRFYSYGDASLLYRA

SEQ ID NO: 68899 - protein, 353 aa, Methylocystis hirsuta
  REGION 1..353: note = tr|A0A3M9XUC4|A0A3M9XUC4_9RHIZ S-adenosylmethionine:tRNA ribosyltransferase-isomerase; OS = Methylocystis hirsuta OX=369798 GN=queA PE=3 SV=1
MRVDLFDFELPAERIALRPANPRDRARMLVVPAKEGFEDRRVLDLPNYLRDGDALVVNDSRVIHARLSGRRFRGALSANVEATLIERLDASRWRALMRPAKKLAIGDRISFMGHGGAIDARVEAKGDEGEITLAFELHGPALDIAIEQAGVMPLPPYIAGKRSADARDESDYQTIFAREAGAVAAPTAGLHFTPQLLAAIEARGVRLYSVTLHVGAGTFLPVKAEDTDLHRMHEEFARLDAETAQALNDARAGGGRIVAVGTTALRVLESAADETGRLAPYAARTRIFITPGYRFRAVDMLLTNFHLPRSTLFMLVAAFAGLERMKAAYAHAIESGYRFYSYGDACLLQRCEK

SEQ ID NO: 68900 - protein, 353 aa, Methylocystis rosea
  REGION 1..353: note = tr|A0A3G8M6A9|A0A3G8M6A9_9RHIZ S-adenosylmethionine:tRNA ribosyltransferase-isomerase; OS = Methylocystis rosea OX=173366 GN=queA PE=3 SV=1
MRVDLFDFNLPQDRIALRPADPRDGARLLVVPANGSFHDRIVRDLPDYLRPGDALVVNDSRVIHARLSGRRCRGALSANVEATLIERLDASRWRALMRPAKKLAIGDRICFMGHGGAIDARVEAKGDEGEITLAFELNGPVLDMAIEQAGVMPLPPYIAGKRSADARDESDYQTIFAREAGAVAAPTAGLHFTPQLLAAIEARGVRLHRVTLHVGAGTFLPVKAEDTDLHRMHEEFARLDAETAQALNNVRAGGGRIVAVGTTALRVLESAADDAGRLAPYAARTRIFITPGYRFRAVDMLLTNFHLPRSTLFMLVAAFAGLERMKAAYAHAIESGYRFYSYGDACLLQRSET

SEQ ID NO: 68901 - protein, 378 aa, Methylocystis sp.
  REGION 1..378: note = tr|A0A2P5NIN5|A0A2P5NIN5_9RHIZ S-adenosylmethionine:tRNA ribosyltransferase-isomerase; OS = Methylocystis sp. OX=1911079 GN=queA PE=3 SV=1
MRVDLFDFELPQDRIALRPVEPRDSARMLVVPPAGAFEDRIVRELTDFLRPGDALVVNDTRVIHARLSGKRMRGELSAGVEATLIERLDASRWRALMRPAKKLAIGDEVRFTRHCERSEAIESQGDEAGLLRRSAPRNDGDNLLAHVDAKGEDGEITLRFDLAGPALDEAIEAAGDMPLPPYIAGKRAADAKDEADYQTVYAREAGAVAAPTAGLHFTPQLLSAIEAKGVALHRVTLHVGAGTFLPMKAEDTKDHKMHEEFARIDPATAQALNEARAKGGRIVAVGTTALRTLESAAQPDGVILPYAARTGIFITPGYKFRATDMLITNFHLPKSTLFMLVSAFCGLERMKSAYAHAVANSYRFYSYGDASLLYRSEP

SEQ ID NO: 68902 - protein, 353 aa, Methylocystis sp.
  REGION 1..353: note = tr|J7Q5G2|J7Q5G2_METSZ S-adenosylmethionine:tRNA ribosyltransferase-isomerase OS=Methylocystis sp. (strain SC2) OX=187303 GN=queA PE=3 SV=1
MRVDLFDFNLPQDRIALRPADPRDSARMLVVPSGGPFEDRIIRDLPDCLRAGDALVVNDSRVIHARLSGRRLRGALSANVEATLIERLDASRWRALMRPAKKLAIGDRISFTGHGGEIDARVEAKGDDGEIALAFELHGPALDEAIEQSGAMPLPPYIAGKRSADARDESDYQTIFAREAGAVAAPTAGLHFTPQLLAAIEARGVRLYRVTLHVGAGTFLPVKAEDTDLHRMHEEYARLDAETAQALNVARAGGGRIVAVGTTALRVLESAADDAGRLAPYAARTRIFITPGYRFRAVDMLLTNFHLPRSTLFMLVAAFAGLERMKSAYVHAIESGYRFYSYGDACLLQRRDA

SEQ ID NO: 68903 - protein, 340 aa, unidentified
  source 1..340: note = Methyloglobulus morosus
  REGION 1..340: note = tr|V5DVW7|V5DVW7_9GAMM S-adenosylmethionine:tRNA ribosyltransferase-isomerase OS=Methyloglobulus morosus KoM1 OX=1116472 GN=queA PE=3 SV=1
MKKSDFAYELPEELVAQNPLTERHASRLLCLNKQTGQLADKQFTDFVDLIDERDLLVFNDTKVIPARLFGTKVTGGKVEILIERLCDDNHAIAHVRASKSSKEGAIIKLDGGFSCKVQGRAGDLFRVEFTGDTPLLEILGQIGHIPLPPYITRADDESDVSRYQSVFAKHLGAVAAPTASLHFDLEMMEKIKAKSVATAFVTLHVGSGTFQPVRVEDLSQHLMHKEYFRVPQETVQAVKEAKVRGGRVVAIGTTAVRALESASQNGRLESGFGDTDLFITPGYRFKSVDAMLTNFHLPESTLLMLVAAFAGYQPVMNAYQHAIGQSYRFFSYGDAMYLSD

SEQ ID NO: 68904 - protein, 361 aa, unidentified
  source 1..361: note = Methyloligella halotolerans
  REGION 1..361: note = tr|A0A1E2S2Z2|A0A1E2S2Z2_9RHIZ S-adenosylmethionine:tRNA ribosyltransferase-isomerase; OS = Methyloligella halotolerans OX=1177755 GN=queA PE=3 SV=1
MRTDLFHFELPEELIALRPVSPRDSARLLAVDGATGSLRDCSVRNLPYLLEPGDALVFNDTRVIPAELRGIRRRDDAVASVTVNLTERAGDSRWHGFARPAKRLREGDRIGFGGEGDVCLAGRLDATVEARGEGGAVTLAFDLTGPALDEAIARHGAMPLPPYIASKRPAEESDRQDYQTIYAAKEGAVAAPTAGLHFTDALMDALDARRIARHWLTLHVGPGTFLPVKAEDTDDHVMHSETGMIDRATADALNGVKARGGKIVAVGTTAMRLLESAADEEGVLHPFNGATDIFITPGYRFRYVDRMMTNFHLPRSTLFMLVSAFSGLEVMRRAYAHAIAQGYRFYSYGDACLLSPGDERS

SEQ ID NO: 68905 - protein, 351 aa, unidentified
  source 1..351: note = Methylomagnum ishizawai
  REGION 1..351: note = tr|A0A1Y6D593|A0A1Y6D593_9GAMM S-adenosylmethionine:tRNA ribosyltransferase-isomerase; OS = Methylomagnum ishizawai OX=1760988 GN=queA PE=3 SV=1
MPITPKLCPMLKSDFHYDLPERLIAQTPLPERAASRLLCLDGPSGRLEDRHFAALPDLLAAGDLLVLNDTRVIPARLFGHKASGGRVEVLIERVLDVRLALAHVRASKAPKPGGAIHLEGGYACRVRGRREDLFELEFPEGPGIEAVLAAVGHMPLPPYIARADRDEDRERYQTVFSRTPGAVAAPTAGLHFDAGTLERLAARGVESAFVTLHVGSGTFQPLRVDDLDRHRMHFEFCEVSPATVDKIRAARAGGGRVVAVGTTVVRTLETAALGGELAPYRGETDLFIRPGFHFRCVDALVTNFHLPESTLLTLVCAFAGRAEVLAAYRHAVAEEYRFFSYGDAMFVTRRP

SEQ ID NO: 68906 - protein, 341 aa, Methylomicrobium album
  REGION 1..341: note = tr|H8GM12|H8GM12_METAL S-adenosylmethionine:tRNA ribosyltransferase-isomerase OS=Methylomicrobium album BG8; OX = 686340 GN=queA PE=3 SV=1
MKKSDFFYHLPENLIAQHPLPERQASRLLCMRTPDWRIEDRKFTDFIDLVDVKDLLVFNDTRVIPARLFGRKSTGGQIEILIERIRDAHRAVAHVRASKAPKPGAAIVLDRGHQCRVVGRAGDLFELEFDSAAPLPEILEQIGHVPLPPYIDRADEREDLSRYQTVFAKRPGAVAAPTAGLHFDREMMERIAAKGVSTAFVTLHVGSGTFQPVRVENLADHVMHQEFFSVPAETVEAVRQARERGGRVVAIGTTSVRALESASRSGRLEAGWGDTDLFIMPGYRFHVVDALLTNFHLPESTLLMLVSAFAGYETTMKAYRHAIDHSYRFFSYGDAMFLASG

SEQ ID NO: 68907 - protein, 364 aa, Methylomicrobium alcaliphilum
  REGION 1..364: note = tr|G4SXC1|G4SXC1_META2 S-adenosylmethionine:tRNA ribosyltransferase-isomerase OS=Methylomicrobium alcaliphilum (strain DSM 19304 / NCIMB 14124 / VKM B-2133 / 20Z) OX =1091494 GN=queA PE=3 SV=1
MNFFQLSNVFLSVIIRNNLVLSRAMKKSDFNYHLPEHLIAQYPLADRVSSRLLCLDGANGNLRDRQFSDFIDLVEPDDLLVFNDTKVIPARLFGQKQTGGKVEILIERIVDRYEAIAHVRASKSPKAGTIIELDRDYRCEVWGREDDLFRLRFDGDAGVLDILESIGHIPLPPYIDRADDAVDLERYQTVFAKEAGAVAAPTAGLHFSQAILDRLEAKGVHKTFVTLHVGSGTFQPVRVEDLSQHLMHKEYYAVSPETVQAVEQVKARGGRVIAIGTTAVRALESASKTGRLEPGLGDTDLFITPGYRFVSVDVLLTNFHLPESTLLMLVSAFAGYDNIMKAYRHAIEQEYRFFSYGDAMLLMR

SEQ ID NO: 68908 - protein, 340 aa, Methylomicrobium buryatense
  REGION 1..340: note = tr|A0A4P9UNK2|A0A4P9UNK2_9GAMM S-adenosylmethionine:tRNA ribosyltransferase-isomerase; OS = Methylomicrobium buryatense OX=95641 GN=queA PE=3 SV=1
MKKSDFNYHLPEHLIAQYPLPDRVSSRLLCLDGANGNLRDKRFSDFIDLVEADDLLVFNDTKVIPARLFGQKQTGGKVEILIERIVDRHEAIAHVRASKSPKAGTIIDLDRDYRCVVQGREDDLFRLRFDGDAGVLDILESIGHIPLPPYIDRADDAVDLERYQTVFAKEAGAVAAPTAGLHFSQAILDQLDAKGVPKTFVTLHVGSGTFQPVRAEDLSQHLMHKEYYAVSPETVQAVEQAKSRGGRVIAIGTTAVRALESASRSGRLEPGFGDTDLFITPGYRFVSVDVLLTNFHLPESTLLMLVSAFAGYDNIMKAYRHAIEQEYRFFSYGDAMFLTR

SEQ ID NO: 68909 - protein, 340 aa, Methylomicrobium kenyense
  REGION 1..340: note = tr|A0A543VFC1|A0A543VFC1_9GAMM S-adenosylmethionine:tRNA ribosyltransferase-isomerase; OS = Methylomicrobium kenyense OX=269709 GN=queA PE=3 SV=1
MKKSDFNYQLPEHLIAQRPLPDRISSRLLCLDGANGNLLDRQFSDFIELVEPDDLLVFNDTKVIPARLFGRKQTGGKVEVLIERIVDRHEAIAHVRASKSPKAGTIIELDRSYRCEVRGREDDLFRLRFDGDADVFDILEDIGHIPLPPYIDRADDAIDLERYQTVFAKQAGAVAAPTAGLHFSQAILDRLEAKGVQKTFVTLHVGSGTFQPVRVEDLSQHLMHKEYYAVSPETVQAAEQAKARGGRVIAIGTTAVRALESASRSGRLEPGFGDTDLFITPGYRFMSVDVLLTNFHLPESTLLMLVSAFAGYDNIMKAYRHAVEQEYRFFSYGDAMFLTR

SEQ ID NO: 68910 - protein, 339 aa, unidentified
  source 1..339: note = Methylomonas denitrificans
  REGION 1..339: note = tr|A0A126T8A9|A0A126T8A9_9GAMM S-adenosylmethionine:tRNA ribosyltransferase-isomerase; OS = Methylomonas denitrificans OX=1538553 GN=queA PE=3 SV=1
MKKSDFNYQLPEQLIAQYPLPERSASRLLRLNRQSAAIADCQFADFVDMISSNDLLVFNNTKVMPARLFAQKSSGGKVEILIERIEDAHTALAHVKASKSPKTDALLTLENGAVCRVIGRHNDLFRLGFETEAGLMGLLDEVGHIPLPPYISRTDEASDLDRYQTVFAEQLGAVAAPTAGLHFDQAMLDRLDQKGVARSFVTLHVGSGTFRPVRVEDLSEHVMHKESYSVSQACVDAVNQARARGGRVVAIGTTAVRALESASRSGVLQAGFGDTDLFITPGYSFKSVDALLTNFHLPESTLLMLVSAFAGYDAVMKAYRHAIEQRYRFFSYGDAMLVI

SEQ ID NO: 68911 - protein, 339 aa, unidentified
  source 1..339: note = Methylomonas koyamae
  REGION 1..339: note = tr|A0A177NJ08|A0A177NJ08_9GAMM S-adenosylmethionine:tRNA ribosyltransferase-isomerase; OS = Methylomonas koyamae OX=702114 GN=queA PE=3 SV=1
MKKSDFNYRLPEELIAQYPLPERSASRMLHLDKLSGAVSDRQFTDLLELLSADDVLVFNDTKVIPARLFGRKSSGGKVEILIERIENPQQALAHIRASKSPKPGSLIELENGCCLEVLGREADLFRLSLPGANGLLELLAEVGHIPLPPYIDRNDEHSDLERYQTVFADRAGAVAAPTAGLHFDQAILENLDRKGVKRTFVTLHVGSGTFRPVRVDDLSQHTMHKEFYSVGQNAVDAVEAARARGGRVVAIGTTAVRALESASAGGHLAAGIGDTDLFITPGYKFKSVDALFTNFHLPESTLLMLVSAFAGYDAVMAAYRHAIEQRYRFFSYGDAMLIS

SEQ ID NO: 68912 - protein, 339 aa, unidentified
  source 1..339: note = Methylomonas koyamae
  REGION 1..339: note = tr|A0A291IJ53|A0A291IJ53_9GAMM S-adenosylmethionine:tRNA ribosyltransferase-isomerase; OS = Methylomonas koyamae OX=702114 GN=queA PE=3 SV=1
MKKSDFNYRLPDKLIAQYPLPERSASRMLHLDKLSGAVIDRQFIDLLELLSADDLLVFNDTKVIPARLFGHKSSGGRVEILIERIENPQQALAHIRASKSPKPGSLIELENGCCLEVLGREADLFRLSLPGANGLLELLAEVGHIPLPPYINRNDEHSDLERYQTVFADRAGAVAAPTAGLHFDQAILENLDRKGVKRTFVTLHVGSGTFRPVRVDDLSQHTMHKEFYSVGLNAVDAVEAARARGGRVVAIGTTAVRALESASAGGHLAAGIGDTDLFITPGYKFKSVDALFTNFHLPESTLLMLVSAFAGYDAVMAAYRHAIEQRYRFFSYGDAMLIT

SEQ ID NO: 68913 - protein, 339 aa, unidentified
  source 1..339: note = Methylomonas lenta
  REGION 1..339: note = tr|A0A177NIK4|A0A177NIK4_9GAMM S-adenosylmethionine:tRNA ribosyltransferase-isomerase; OS = Methylomonas lenta OX=980561 GN=queA PE=3 SV=1
MKKSDFNYHLPPELIAQKPLAQRSASRLLQLNKQTGELSDGQFSQFIDLLQPDDLLVFNDTKVIPARLFASKTSGGKVEILIERIEDPHQALAHVRASKTPKTDALLQLENGVFCRVLGREEDLFRLRFETELTLLEVLASIGHMPLPPYIDRADDISDLDRYQTVFAKQAGAVAAPTAGLHFDEYTLKLLEQKGIQSSFVTLHVGSGTFQPVRVEELTQHVMHKEYFDVSAACVEAVRQTKARGGRVVAIGTTAVRALESASANGELQAGCGDTQLFITPGYTFKTVDAMLTNFHLPESTLLMLISAFAGYDSVMKAYQHAIEQRYRFFSYGDAMAII

SEQ ID NO: 68914 - protein, 339 aa, Methylomonas methanica
  REGION 1..339: note = tr|A0A177MNA7|A0A177MNA7_METMH S-adenosylmethionine:tRNA ribosyltransferase-isomerase; OS = Methylomonas methanica OX=421 GN=queA PE=3 SV=1
MKKSDFNYQLPEQLIAQYPLPERSASRLLRLDRQSAAIADCQFADFVDMIGSNDLLVFNNTKVMPARLFAHKSSGGKVEMLIERIEDTHTALAHVKASKSPKTDALLTLENGAICRVIGRYNDLFRLRFETEAGLLKLLDEVGHIPLPPYISRTDEASDLDRYQTVFAEQIGAVAAPTAGLHFDHAILDRLDQKGVARSFVTLHVGSGTFRPVRVEDLSEHVMHKESYSVSQTCVDAVVQARARGGRVVAIGTTAVRALESASRSGLLQAGFGDTDLFITPGYSFKTVDALLTNFHLPESTLLMLVSAFAGYDSVMNAYRHAIDQRYRFFSYGDAMLVI

SEQ ID NO: 68915 - protein, 339 aa, Methylomonas methanica
  REGION 1..339: note = tr|G0A492|G0A492_METMM S-adenosylmethionine:tRNA ribosyltransferase-isomerase OS=Methylomonas methanica (strain MC09) OX=857087 GN=queA PE=3 SV=1
MKKSDFYYQLPPDLIAQKPLAQRNASRLLQLNRQTGALRDSRFTDFIGMLNQDDLLVFNDTKVIPARLYAHKDTGGKVEILIERIEDQSRVLAHIKASKSPKADSRLHLQNGTVCNVLGREDDLFRLQFDADIDVLALLAEIGHMPLPPYIDRPDDIEDLDRYQTVFAKQAGAVAAPTAGLHFDAETLRMLDSKGIQRCFVTLHVGSGTFQPVRVDDLSQHVMHKEFFQVSESCVDAVRQAKARGGRVVAIGTTAVRALESASATGGLLAGCGDTRLFITPGYAFKTVDALLTNFHLPESTLLMLISAFAGYDAVMQAYLHAIEQRYRFFSYGDAMAIF

SEQ ID NO: 68916 - protein, 339 aa, Methylomonas sp.
  REGION 1..339: note = tr|A0A2P5NDN0|A0A2P5NDN0_METSP S-adenosylmethionine:tRNA ribosyltransferase-isomerase; OS = Methylomonas sp. OX=418 GN=queA PE=3 SV=1
MKKTDFYYDLPPELIAQKPLPERSASRMLRLNRATGQVVDDVFESLADALQPSDLLVFNDTKVMPARLFARKHTGGHVEILIERIEPNGRALAHLKASKSTRPGTELVLENGETCRVVEREGDLFRLQFDPSKPLLALLEAVGHIPLPPYIERADDEDDAERYQTVFASQVGAVAAPTASLHFDDAMLQRIADRGIASVFVTLHVGSGTFQPVRVDDLSQHVMHQEFYDVPQTCVDAVERTRKAGGRVIAIGTTAVRALESASIHGGLQTCSGDTRLFITPGYTFNTVDGLLTNFHLPESTLLMLISAFAGYDPVMAAYRHAIERRYRFFSYGDAMLIL

SEQ ID NO: 68917 - protein, 339 aa, Methylomonas sp.
  REGION 1..339: note = tr|A0A172U7S2|A0A172U7S2_9GAMM S-adenosylmethionine:tRNA ribosyltransferase-isomerase; OS = Methylomonas sp. DH-1 OX=1727196 GN=queA PE=3 SV=1
MKKSDFNYRLPNELIAQYPLPERSASRMLHLDKLSGAVSDRQFTDLLELLSADDLLVFNDTKVIPARLFGRKSSGGKVEILIERIENPQQALAHIRASKSPKSGSLIELENGRCLEVLGREADLFRLSLPGANGLLELLAEVGHIPLPPYIDRNDEHSDLERYQTVFADRAGAVAAPTAGLHFDQAILENLDRKGVKRTFVTLHVGSGTFRPVRVDDLSQHTMHKEFYSVGQNAVDAVEAARTRGGRVVAIGTTAVRALESATAGGQLTAGIGDTDLFITPGYKFKSVDALFTNFHLPESTLLMLVSAFAGYDAVMAAYRHAIEQRYRFFSYGDAMLIT

SEQ ID NO: 68918 - protein, 339 aa, unidentified
  source 1..339: note = Methylomusa anaerophila
  REGION 1..339: note = tr|A0A348AP66|A0A348AP66_9FIRM S-adenosylmethionine:tRNA ribosyltransferase-isomerase; OS = Methylomusa anaerophila OX=1930071 GN=queA PE=3 SV=1
MLLSDFDYYLPEELIAQYPIEPRNHSRLLVVHRQSGLMEHQHFYNLQQYLQPGDTLVFNDTRVIPARLIGEKADTGSKVEVFLLNRNSGDQWECLVKPGKRARPGAIIEFGNLLRCEVIAGTDFGGRIVRFSYDGIFEEILDFLGETPLPPYIKETLHDKERYQTVYAKEKGSAAAPTAGLHFTSDMMTKLKEAGINLAFVTLHVGLGTFRPVSVADISQHSMHREYYSVSEETARIVNKTKAAGNRVIAVGTTAVRTLETAGKDGVLAAQSGWTNIFIYPGYRFRIIDALVTNFHLPKSTLLMLVSAFANRELILSAYAEAVAERYRFFSFGDAMLII

SEQ ID NO: 68919 - protein, 347 aa, Methylophaga aminisulfidivorans
  REGION 1..347: note = tr|F5SVT7|F5SVT7_9GAMM S-adenosylmethionine:tRNA ribosyltransferase-isomerase OS=Methylophaga aminisulfidivorans MP OX=1026882 GN=queA PE=3 SV=1
MKTSDFQFDLPEELIAQYPSENRTSSRLLFLDGNNGQRQDLQFTDLLSLLNPTDLLVFNNTKVIPARLFGVKDSGGKVEVLIERVLDESRVLAHIRSSKSPTAGRHLQLEGALDVEVLVRHDALFELKFHGIESVIDALEAYGRLPLPPYIEREVDKEDLDRYQTVYARNVGAVAAPTAGLHFDEALLNRIREAGIETAELTLHVGAGTFQPVRVDDVRSHQMHKEVIDVSEQVAEQVKATRARGGRVIAVGTTSVRALESASANGEISAYQGETDIFIYPGYQFKSVDAMVTNFHLSESTLLMLVSAFAGKQHIMDAYQHAIQQRYRFFSYGDAMFITRNNNEVVG

SEQ ID NO: 68920 - protein, 343 aa, unidentified
  source 1..343: note = Methylophaga frappieri
  REGION 1..343: note = tr|I1YF01|I1YF01_METFJ S-adenosylmethionine:tRNA ribosyltransferase-isomerase OS=Methylophaga frappieri (strain ATCC BAA-2434 / DSM 25690 / JAM7) OX=754477; GN = queA P E=3 SV=1
MQRNDFQFDLPEELIAQYPSEDRTASRLLELDGNTGAFRDHVFSDLTSLLTADDLLVFNNTKVIPARLLGEKETGGKVEVLVERLMDDQRVLAHVRSSKSPGVGRRLRLEGAVEAEVIGRRENLFELRFLSETSLIGLLESYGRLPLPPYIEREVDKADLARYQTVYAKHAGAVAAPTAGLHFDDALLQAVKAFGVQTAEVTLHVGAGTFQPVRADDIRDHQMHSEYIEVEQPVCEAVNAARKRGGRVIAVGTTSVRALESASKQGQIEPFRGDTDIFIYPGYRFRSVDAMITNFHLSESTLLMLVSAFAGRDNIMAAYQHAIAQRYRFFSYGDAMFIRRKDT

SEQ ID NO: 68921 - protein, 345 aa, unidentified
  source 1..345: note = Methylophaga lonarensis
  REGION 1..345: note = tr|M7PQ32|M7PQ32_9GAMM S-adenosylmethionine:tRNA ribosyltransferase-isomerase OS=Methylophaga lonarensis MPL OX=1286106 GN=queA PE=3 SV=1
MKTSDFKFDLPDELIAQYPCSERGASRLLCLDGDSGSLSDRMFADLPSLLTKDDLLVFNNTRVIPARLLGHKDSGGKVEVLIERIIDDQRALAHVRSSKSPAPGRRLKLEQALDVEVLGRQDALFELQFLNVSSVLAALEQHGRMPLPPYIEREVDAADLHRYQTVYAREAGAVAAPTAGLHFDEKLLAQIDAMGIERAEVTLHVGAGTFQPVRVENITEHQMHSEWLEVTETVCQQVRAARASGGRVIAVGTTSVRALESASLSGQIEPYQGETDIFIYPGYRFRSVDAMVTNFHLSESTLLMLVSAFAGRDHILGAYQHAVAERYRFFSYGDAMFITRNSSAC

SEQ ID NO: 68922 - protein, 343 aa, Methylophaga muralis
  REGION 1..343: note = tr|A0A1E3GQY6|A0A1E3GQY6_9GAMM S-adenosylmethionine:tRNA ribosyltransferase-isomerase; OS = Methylophaga muralis OX=291169 GN=queA PE=3 SV=1
MQRTDFQFELPPELIAQYPSKHRTASRLLTLDGNSGELADRQFSDFLDLLKPNDLLVFNNTKVIPARLLGEKETGGKIEVLVERVLDDKRVLAHIRSSKSPGAGRILILENELRAEVLGRQDALFELKFDIAGDVIEALEQYGRLPLPPYIEREVDKSDLDRYQTVYAKQIGAVAAPTAGLHFDNELMQRIRDSDIDMTEVTLHVGAGTFQPVRVEDIRTHQMHSERIEVSETVCEKVRQTREKGGRVIAVGTTSVRALESASRSGEIAAYSGETDIFIYPGYQFRSVDAMVTNFHLSESTLLMLVSAFAGRDHIMSAYHHAIEQRYRFFSYGDAMFITRKTA

SEQ ID NO: 68923 - protein, 343 aa, unidentified
  source 1..343: note = Methylophaga nitratireducenticrescens
  REGION 1..343: note = tr|I1XIV3|I1XIV3_METNJ S-adenosylmethionine:tRNA ribosyltransferase-isomerase OS=Methylophaga nitratireducenticrescens OX=754476 GN=queA PE=3 SV=1
MQRTDFQFELPPELIAQYPSKHRTASRLLNLDGNSGALMDRQFSDFLDLLKPNDLLVFNNTKVIPARLLGEKETGGKIEVLVERVLDDKRVLAHIRSSKSPGTGRILLLESELRVEVLGRHNALFELRFDIESDVIEALEQYGRLPLPPYIEREVDKRDLERYQTVYAKQVGAVAAPTAGLHFDNELMQRIRDSGVDMTEVTLHVGAGTFQPVRVEDIRTHQMHSERIEVSETVCEKVRQTREKGGRVIAIGTTSVRALESASRSGEIEAYSGETDIFIYPGYQFRSVDAMVTNFHLSESTLLMLVSAFAGRDHIMSAYQHAIKQRYRFFSYGDAMFITRKTA

SEQ ID NO: 68924 - protein, 343 aa, Methylophaga sp.
  REGION 1..343: note = tr|A0A2D9KYT9|A0A2D9KYT9_9GAMM S-adenosylmethionine:tRNA ribosyltransferase-isomerase; OS = Methylophaga sp. OX=2024840 GN=queA PE=3 SV=1
MQRTDFQFELPPELIAQYPSKHRTASRLLTLDGNSGELADRLFSDFLDLLKPNDLLVFNNTKVIPARLLGEKETGGKIEVLVERVLDDKRVLAHIRSSKSPGEGRILILETELRVEVLGRQDALFELKFDIAGDVIEALEQYGRLPLPPYIEREVDKNDLDRYQTVYAKQIGAVAAPTAGLHFDNELMQRIRDSGIDMTEVTLHVGAGTFQPVRVEDIRTHQMHSERIEVSETVCEKVRQTRKKGGRVIAIGTTSVRALESASRSGEIESYSGETDIFIYPGYQFRSVDAMVTNFHLSESTLLMLVSAFAGRDHIMTAYHHAIEQRYRFFSYGDAMFITRKTA

SEQ ID NO: 68925 - protein, 346 aa, Methylophaga sp.
  REGION 1..346: note = tr|A0A1Y5DMY7|A0A1Y5DMY7_9GAMM S-adenosylmethionine:tRNA ribosyltransferase-isomerase; OS = Methylophaga sp. 41_12_T18 OX=1856284 GN=queA PE=3 SV=1
MQRTDFQFEIPPELIAQFPSKHRTESRLLSLEGATGNLSDQQFVDLPTFLQKDDLLVFNNTKVIPARLKGKKESGGKVEVLVERVLDQHRVLAHVRSSKSPGAGVHLLLEDKLDAEVLGRHDALFEIYFHVDDVVAALEEHGRLPLPPYIERDVAKDDLDRYQTVYAQHIGAVAAPTAGLHFDQAMLDTIAEMGIDSAQVTLHVGAGTFQPVRVDDIKTHHMHSERIEVTAEVCEKIKATRARGGRVIAVGTTSVRALESASRNGCIIPYSGETDIFIYPGYQFKSVDAMITNFHLSESTLLMLVSAFAGRDNVMNAYQHAITNKYRFFSYGDAMFITRKLNDNVG

SEQ ID NO: 68926 - protein, 347 aa, Methylophaga sulfidovorans
  REGION 1..347: note = tr|A0A1I3VLJ0|A0A1I3VLJ0_9GAMM S-adenosylmethionine:tRNA ribosyltransferase-isomerase; OS = Methylophaga sulfidovorans OX=45496 GN=queA PE=3 SV=1
MKTSDFQFDLPEELIAQYPSENRTSSRLLFLDGNSGQRQDLQFTDLLSLLNPKDLLVFNNTKVIPARLFGVKDSGGKVEVLIERVLDETRVLAHIRSSKSPAAGRHLQLEGVLDAEVLGRHDALFELKFHGIDSIIDALDEYGRLPLPPYIEREVDKEDLDRYQTVYARNVGAVAAPTAGLHFDEALLNRIREAGIETAELTLHVGAGTFQPVRVDDVRSHQMHKEVIDVSEQVAKQVKATRARGGRVIAVGTTSVRALESASANGEIAAYQGETDIFIYPGYQFKSVDAMVTNFHLSESTLLMLVSAFAGKQHIMDAYQYAIQQRYRFFSYGDAMFITRNNNEVVG

SEQ ID NO: 68927 - protein, 347 aa, Methylophaga thiooxydans
  REGION 1..347: note = tr|C0N7P6|C0N7P6_9GAMM S-adenosylmethionine:tRNA ribosyltransferase-isomerase OS=Methylophaga thiooxydans DMS010 OX=637616 GN=queA PE=3 SV=1
MKTSDFRFDLPEELIAQYPSTDRTASRLLALDGNTGQVQDLNFTDLLNQLDSKDLLVFNNTKVIPARLLGHKETGGKVEVLVERVLDHERVLAHVRSSKSPSQGRRLQLEGSLEVEVLARHDALFELRFLNTDSVVDALESYGRMPLPPYIERDVDKADLERYQTVYAQHVGAVAAPTAGLHFDQALLAQIKEMGIETAELTLHVGAGTFQPVRVDDIRSHQMHSEVIEVSEQVCQQVKAARARGGRVIAVGTTSVRALESASQSGEISPFEGETDIFIYPGYQFKSVDAMVTNFHLSESTLLMLVSAFASRSHILNAYQHAVEQRYRFFSYGDAMFITRNTDDING

SEQ ID NO: 68928 - protein, 347 aa, Methylophaga thiooxydans
  REGION 1..347: note = tr|A0A0A0BH89|A0A0A0BH89_9GAMM S-adenosylmethionine:tRNA ribosyltransferase-isomerase; OS = Methylophaga thiooxydans OX=392484 GN=queA PE=3 SV=1
MKTSDFRFDLPEELIAQYPSTDRTASRLLALDGNTGQVQDLKFTDLLHQLDSKDLLVFNNTKVIPARLLGHKETGGKVEVLVERVLDHERVLAHVRSSKSPSQGRRLQLEGSLEVEVLARHDALFELRFLNTDSVVDALESYGRMPLPPYIERDVDKADLERYQTVYAQHVGAVAAPTAGLHFDQALLAQIKEMGIETAELTLHVGAGTFQPVRVDDIRSHQMHSEVIEVSEQVCQQVKAARARGGRVIAIGTTSVRALESASQSGEISPFEGETNIFIYPGYQFKSVDAMVTNFHLSESTLLMLVSAFASRSHILNAYQHAVEQRYRFFSYGDAMFITRNTDDING

SEQ ID NO: 68929 - protein, 343 aa, unidentified
  source 1..343: note = Methylophilaceae bacterium
  REGION 1..343: note = tr|Y0KF22|Y0KF22_9PROT S-adenosylmethionine:tRNA ribosyltransferase-isomerase OS=Methylophilaceae bacterium 11 OX=1101195 GN=queA PE=3 SV=1
MRTQEFDFYLPSELIAQFPAEKRNGSRLLHVDGNSGQLVDGTFAHLTDWLSPHDLVIFNDTRVIKARLFGQKSTGGAVEIMIERVLNDHEALAHVRASRAPKPGARLLLENAIEVEVTARQDDLFLLKFHHASSIFNLLDQYGHLPLPPYITHAAESEDETRYQTVYAKHAGAVAAPTAGLHFDETMLSNIQAMGVRIAYVTLHVGAGTFQPVKVDEISAHKMHSEHYHIPEETVALIQSTRQNGGRILAVGTTALRALESAAQHGPLTAGSGETNIFITPGYSFNVVDRLLTNFHLPKSTLMMLVSAFAGYTHIMSAYEHAIRQQYRFFSYGDAMLIERATL

SEQ ID NO: 68930 - protein, 341 aa, unidentified
  source 1..341: note = Methylophilaceae bacterium
  REGION 1..341: note = tr|A0A3D0W6B8|A0A3D0W6B8_9PROT S-adenosylmethionine:tRNA ribosyltransferase-isomerase; OS = Methylophilaceae bacterium OX=2030816 GN=queA PE=3 SV=1
MRIEEFDFELPEKLIAQTPLDKRDASRLLVLDKNTKSFADKKFTDFVDLLHPNDLLIFNDTRVIKARLFGTKITGGKAEIMIERIVNNNHALAHLKTSKKILNDTIFEINKDVLVQVIKKEGDLFYIRFHSNLPAYDILEKYGHIPLPPYIERSANLSDEKRYQTIYAKELGAVAAPTAGLHFTDEIFKALDNKKIKYTFLTLHVGAGTFKPVRDQDLDHHQMHSESYNVPEKTIQMILDAKSNNGRIIAIGTTVLRALESKFSDENIQTGFKETSIFIKPGYAFKIVDALLTNFHLPKSTLFILVSAFSGSDTMRKLYQHAIKHEYRFFSYGDATFIERS

SEQ ID NO: 68931 - protein, 344 aa, unidentified
  source 1..344: note = Methylophilales bacterium
  REGION 1..344: note = tr|A0A0H4JAM6|A0A0H4JAM6_9PROT S-adenosylmethionine:tRNA ribosyltransferase-isomerase; OS = Methylophilales bacterium MBRS-H7 OX=1623450 GN=queA; PE = 3 SV=1
MNIEEFNYTLPEELIAQHPTDKRSDSRLLQLNPNTEEIIDNNFTNFLSLINHNDLLVFNDTKVIKARIHGHKKSGGKVEVLIEKIINQNSFVGHIGTSKKINAGLEIMVGNFKLTVKDRDENMFIIETNDDIFNIIDCHGKLPLPPYINRDNEDFDDDRYQTVFAKHDGAIAAPTAGLHFDDQFFLELSKQNLNFSFITLHVGSGTFQPVRNSNITDHKMHSEEFMISQDVYDRIEQTKKNGGRIIAIGTTVLRALESAYAQPKKDSNFQKTNIFIYPGYQFKIVDSLFTNFHLPKSTLIMLVSAFAGHSFTMTAYAHAVKEKYRFFSYGDAMFIEQKLTTEDK

SEQ ID NO: 68932 - protein, 348 aa, unidentified
  source 1..348: note = Methylophilales bacterium
  REGION 1..348: note = tr|A0P811|A0P811_9PROT S-adenosylmethionine:tRNA ribosyltransferase-isomerase OS=Methylophilales bacterium HTCC2181 OX=383631 GN=queA PE=3 SV=1
MRIEEFNYILPDELIAQSPLKNRGDSRLLVANPVGKKISDSYFKNFTVLLKKNDLVIFNDTRVIKARIFGTKTTGGKVELLIERILNNHTATALIRTSKRIDIGLTIAIDCINSIKVISRNNNLFEIQLLGGSFYDLLEKHGHVPLPPYIERNDEDEDEIRYQTVFAKEAGAVAAPTAGLHFSEQDLRGMDKKGIAMAFITLHVGSGTFQPIKTEDINQHTMHQEIYNIPKSIIKKIAETKAKNGRIVAIGTTVLRALESAYEEDIIKTGYNETDIFIKPGFNFKVVDALFTNFHLPKSTLLMLVSAFAGSKFIKAIYRHAVDNKYRFFSYGDAMFIEQKVKNQDEQV

SEQ ID NO: 68933 - protein, 346 aa, unidentified
  source 1..346: note = Methylophilus medardicus
  REGION 1..346: note = tr|A0A5B8CUL4|A0A5B8CUL4_9PROT S-adenosylmethionine:tRNA ribosyltransferase-isomerase; OS = Methylophilus medardicus OX=2588534 GN=queA PE=3 SV=1
MKTLDFDFYLPPHLIAQHPLPNRSESRLLEVNALTQSIRNHHFREIAAHFEAGDVLVLNDTKVIKARLFGQKATGGHIEVMIDRVLSPQEAYAQIKSSRSPKAGSLLHLSAGYQAEVLGRHADMFHIQLLGEASWYDFLEQYGQLPLPPYIEHTADAADDTRYQTVFAKHAGAVAAPTAGLHFDEALLQALIDKGVHVRYVTLHVGAGTFQPVKVDDIADHHMHSEVYHLPADTIQTILEARANGKRVTAVGTTSLRTLESAAHVGKLFAHHGDTNIFITPGFEFKLVDRLITNFHLPKSTLMMLVSAFGGYDLMREAYAHAIEEAYRFFSYGDAMLITRAPSPKG

SEQ ID NO: 68934 - protein, 346 aa, Methylophilus methylotrophus
  REGION 1..346: note = tr|A0A5C7WL48|A0A5C7WL48_METME S-adenosylmethionine:tRNA ribosyltransferase-isomerase; OS = Methylophilus methylotrophus OX=17 GN=queA PE=3 SV=1
MRTLDFDFYLPPHLIAQHPLPNRSESRLLEVNAANNTIQDNYFRQIADHFEAGDVLVLNDTKVIKARLFGQKATGGQIEVMIDRVLSSDEAYAQIKSSRSPKAGGLLHLAGDMQAEVLGRVADMFHIRLLGEQSWYDFLEQYGQLPLPPYIEHTADETDDSRYQTVFAKHAGAVAAPTAGLHFDEALLQSLVDKGVHVRYVTLHVGAGTFQPVKVDNIAEHHMHSEVYHLPEETISTILAAQAEGKRVTAVGTTSLRTLESAAHAGKLFAHHGDTDIFITPGFEFKLVDRLITNFHLPKSTLMMLVSAFGGYDLMREAYAHAIAQSYRFFSYGDAMLITRNQSAKR

SEQ ID NO: 68935 - protein, 345 aa, Methylophilus rhizosphaerae
  REGION 1..345: note = tr|A0A1G9D5P3|A0A1G9D5P3_9PROT S-adenosylmethionine:tRNA ribosyltransferase-isomerase; OS = Methylophilus rhizosphaerae OX=492660 GN=queA PE=3 SV=1
MRTLDFDFYLPPDLIAQHPLPHRSESRLLEVNATNHSIQDSFFRQIGDHFEAGDVLVLNDTKVIKARLFGQKATGGQIEVMIDRVLNAQEAYAQIKSSRSPKAGGLLHLPGDYQAEVLGRHMDMFHIRLLGNESWYDFLERYGQLPLPPYIEHTADTTDSTRYQTVFARHEGAVAAPTAGLHFDEALLQSLIAKGVQVHYVTLHVGAGTFQPVKVDNIAEHHMHSEVYHLPEQTIDAILEARANGKRVTAVGTTSLRTLESAAHAGKLFAHHGETDIFITPGFEFKLVDRLITNFHLPKSTLMMLVSAFGGYDLMRQAYAHAIKQSYRFFSYGDAMLITRAVSKK

SEQ ID NO: 68936 - protein, 346 aa, Methylophilus sp.
  REGION 1..346: note = tr|A0A3D5D151|A0A3D5D151_9PROT S-adenosylmethionine:tRNA ribosyltransferase-isomerase; OS = Methylophilus sp. OX=29541 GN=queA PE=3 SV=1
MKTLDFDFYLPAHLIAQHPLPNRSESRLLEVNAIQQTIQDSYFRQIADHFEAGDVLVLNDTKVIKARLFGQKATGGQIEVMIDRVLSEQEAYAQIKSSRSPKAGSLLHLSGDYQAEVLGRHADMFHIRLLGNESWYDFLEQYGQLPLPPYIEHKADAADDTRYQTVFAKHAGAVAAPTAGLHFDEALLQALINKGVHVRYVTLHVGAGTFQPVKVDNIAEHHMHSEVYHLPEETISTILNARASGKRVTAVGTTSLRTLESAAHVGKLFAHHGDTNIFITPGFEFKLVDRLITNFHLPKSTLMMLVSAFGGYDLMRKAYAHAIDQSYRFFSYGDAMLITRVQSAKS

SEQ ID NO: 68937 - protein, 348 aa, Methylophilus sp.
  REGION 1..348: note = tr|A0A0Q6B9I7|A0A0Q6B9I7_9PROT S-adenosylmethionine:tRNA ribosyltransferase-isomerase; OS = Methylophilus sp. Leaf416 OX=1736373 GN=queA PE=3 SV=1
MRTLDFDFHLPQHLIAQHPLPNRTQSRLLEVDAIANTIRDNFFRQISDYFEAGDVLVLNDTKVIKARLFGQKATGGNIEVMIDRVLNTQEAYAQIKASRSPKAGSLLHLANGYQAEVLGRHADMFHIRLLGNESWYDFLEQHGQLPLPPYIEHAADTADDTRYQTVFAKHEGAVAAPTAGLHFDDEMLSALSNKGVHVCYVTLHVGAGTFQPVKVENIAEHHMHSEIYHLPEETIAAILQAREAGKRVTAVGTTSLRTLESAARADKLFAHHGETDIFITPGFEFQLVDRLITNFHLPKSTLMMLVSAFGGYDLLRRAYTHAIQESYRFFSYGDAMLITRAPHNKKKR

SEQ ID NO: 68938 - protein, 369 aa, Methylopila sp.
  REGION 1..369: note = tr|A0A2H6BFI6|A0A2H6BFI6_9RHIZ S-adenosylmethionine:tRNA ribosyltransferase-isomerase; OS = Methylopila sp. Yamaguchi OX=1437817 GN=queA PE=3 SV=1
MDVSLFDFDLPEELIALRPASPRDSARLLVVRPGGTPELEDRLISDLPDLLAPGDALVVNATRVIPARLRAVRLRGESAARVELLLHQRVDGARWKAFARPAKKLLPGERVVVGSEGGACLLRELAATVEARGEGGEVTLAFDLSGPDLDLAIARAGEMPLPPYIEGKRATDARDGEDYQTLFAREPGAVAAPTAGLHFTPRLVEALDRRGVSRHETVLHVGAGTFLPVKVEDTDDHRMHFENGVLEAETAAALNAARAAGGRLVAVGTTSTRLLESAVGLDGRLSAFDGATDIFITPGVPFRAVDALLTNFHLPRSTLMMLIAAFAGLDVVKRAYAHAIAERYRFYSYGDACLFFNSSPAAINSGGEL

SEQ ID NO: 68939 - protein, 343 aa, unidentified
  source 1..343: note = Methyloprofundus sedimenti
  REGION 1..343: note = tr|A0A1V8M670|A0A1V8M670_9GAMM S-adenosylmethionine:tRNA ribosyltransferase-isomerase; OS = Methyloprofundus sedimenti OX=1420851 GN=queA PE=3 SV=1
MKKSDFYYELPDELIAQQPLPERSASRLLYLHKDSDAIEDKQFIDLLALLNKDDLLVLNNTKVIPARLFGHKQSGGKVEILLERVLNEREVLAHMRSSKSPKAGALIELDAGFQCQVLGRVDDLFHLQFKGEQLLADILDRIGHMPLPPYIERADNISDQTRYQTVFAQQSGAVAAPTAGLHFDAAMMAKIQAKGIAIAFVTLHVASGTFRPVKVENLADHVMHKEYFEVPEQTVVAVEKAKKRGGRVIAIGTTAMRSLESASRSGQLASACGDTDLFITPGYQFKTVDAMLTNFHLPESTLLMLVSAFAGYERIKKVYQHAIAAKYRFFSYGDAMFIQRASL

SEQ ID NO: 68940 - protein, 368 aa, unidentified
  source 1..368: note = Methylorubrum extorquens
  REGION 1..368: note = tr|H1KMJ4|H1KMJ4_METEX S-adenosylmethionine:tRNA ribosyltransferase-isomerase OS=Methylorubrum extorquens DSM 13060 OX=882800 GN=queA PE=3 SV=1
MRVDLFDFELPEAAIALRPASPRDASRLLVVRPGDPLADRGVRDLPALLSPGDALVFNDTRVIPARLSGIRHRAGGSGQRCEAMLHLREAPDRWRAFARPAKRLAPGDRIRFGSEGASEVCALSGLDATVEERGEGGEILLRFDLSGPALDEAIAGLGALPLPPYIAGKRATDAQDTTDYQTVYAREPGAVAAPTAGLHFSDALLAGIDAAGIERVHVTLHVGAGTFLPVKADDTDAHRMHAEIGILDAATAARLNAVRARGNRVVAVGTTALRLLESAADPDGTIRPFSGATDIFITPGYRFRAVDALVTNFHLPRSTLFMLVSAFAGLDTMRAAYAHAIQSGYRFYSYGDASLLFPEGAPVSESIT

SEQ ID NO: 68941 - protein, 368 aa, unidentified
  source 1..368: note = Methylorubrum extorquens
  REGION 1..368: note = sp|A9VX03|QUEA_METEP S-adenosylmethionine:tRNA ribosyltransferase-isomerase OS=Methylorubrum extorquens (strain PA1) OX=419610 GN=queA PE=3 SV=1
MRVDLFDFELPEAAIALRPASPRDASRLLVVRPGDPLADRGVRDLPALLSPGDALVFNDTRVIPARLSGIRHRAGGSGQRCEAMLHLREAPDRWRAFARPAKRLAPGDRIRFGSEGASEVCALSGLDATVEERGEGGEILLRFDLSGPALDEAIAGLGALPLPPYIAGKRPTDAQDTTDYQTVYAREPGAVAAPTAGLHFSDALLAGIDAAGIERVHVTLHVGAGTFLPVKADDTEAHRMHAEIGILDAATAARLNAVRARGNRVVAVGTTALRLLESAADPDGTIRPFSGATDIFITPGYRFRAVDALVTNFHLPRSTLFMLVSAFAGLDTMRAAYAHAIQSGYRFYSYGDASLLFPEGAPVSESIT

SEQ ID NO: 68942 - protein, 366 aa, unidentified
  source 1..366: note = Methylorubrum populi
  REGION 1..366: note = tr|A0A177J0M7|A0A177J0M7_9RHIZ S-adenosylmethionine:tRNA ribosyltransferase-isomerase; OS = Methylorubrum populi OX=223967 GN=queA PE=3 SV=1
MRVDLFDFELPEAAIALRPASPRDASRLLVVRPGETLADRGVRDLPALLNPGDALVFNDTRVIPARLSGIRHRAGGTGQRCEAMLHLREAPDRWRAFARPAKRLAPGDRIRFGGEGANQGASEVCVLSGLDATVEERGEGGEILLRFDLAGPALDEAIAGLGALPLPPYIAGKRATDARDTTDYQTVYAREPGAVAAPTAGLHFSDALLDGIDAAGIERIHVTLHVGAGTFLPVKADDTEAHRMHAEIGILDTATAERLNAVRARGNRIVAVGTTALRLLESATDPDGTVRPFSGATDIFITPGYRFRAVDALVTNFHLPRSTLFMLVSAFSGLDTMRAAYAHAIASGYRFYSYGDASLLFPERAP

SEQ ID NO: 68943 - protein, 366 aa, unidentified; identical to SEQ ID NO: 68942
  source 1..366: note = Methylorubrum populi
  REGION 1..366: note = sp|B1ZIL2|QUEA_METPB S-adenosylmethionine:tRNA ribosyltransferase-isomerase OS=Methylorubrum populi (strain ATCC BAA-705 / NCIMB 13946 / BJ001) OX=441620; GN = queA PE= 3 SV=1

SEQ ID NO: 68944 - protein, 388 aa, unidentified
  source 1..388: note = Methylorubrum salsuginis
  REGION 1..388: note = tr|A0A1I4D1P3|A0A1I4D1P3_9RHIZ S-adenosylmethionine:tRNA ribosyltransferase-isomerase; OS = Methylorubrum salsuginis OX=414703 GN=queA PE=3 SV=1
MRLAPDRGNPHLPPGPIRGKARFMRVDLFDFDLPEALIALRPASPRDASRLLVVRPGETPLDRGVRDLPGLLSPGDVLVFNDTRVIPARLAGIRHRPGGTGQRCEAMLHLREAPDCWRAFARPAKRLTVGDRIRFGPEGEGAGEVCVMTGLEATVEAKGEGGEVSLRFDLAGPALDEAIMTQGALPLPPYIAGKRATDAQDATDYQTVYAREPGAVAAPTAGLHFSDSLLDAIDLAGIGRAHVTLHVGAGTFLPVKADDTADHRMHAEIGTLDAATAERLNATRSNGGRVVAVGTTALRLLESAADPDGTIRPFAGATDIFITPGYRFRAVDALVTNFHLPRSTLFMLVSAFSGLDTMRAAYAHAIAQGYRFYSYGDASLLFPAPPAP

SEQ ID NO: 68945 - protein, 373 aa, unidentified
  source 1..373: note = Methylorubrum sp.
  REGION 1..373: note = tr|A0A4Z0E4L5|A0A4Z0E4L5_9RHIZ S-adenosylmethionine:tRNA ribosyltransferase-isomerase; OS = Methylorubrum sp. Q1 OX=2562453 GN=queA PE=3 SV=1
MRVDLFDFELPEAAIALRPASPRDASRLLVVRPGDPLADRGMRDLPALLSPGDALVFNDTRVIPARLSGIRHRAGGSGQRCEAMLHLREAPDRWRAFARPAKRLAPGDRIRFGSEGASPSASEVCALSGLDATVEERGEGGEILLRFDLSGPALDAAIAGLGALPLPPYIAGKRATDAQDTTDYQTVYAREPGAVAAPTAGLHFSDALLAGIDAAGIERVHVTLHVGAGTFLPVKADDTDAHRMHAEIGILDAAAAARLNAVRARGNRVVAVGTTALRLLESAADPDGTIRPFSGATDIFITPGYRFRAVDALVTNFHLPRSTLFMLVSAFAGLDTMRAAYAHAIQSGYRFYSYGDASLLFPEGARFRSPSHE

SEQ ID NO: 68946 - protein, 368 aa, unidentified
  source 1..368: note = Methylorubrum zatmanii
  REGION 1..368: note = tr|A0A1W6RPD8|A0A1W6RPD8_9RHIZ S-adenosylmethionine:tRNA ribosyltransferase-isomerase; OS = Methylorubrum zatmanii OX=29429 GN=queA PE=3 SV=1
MRVDLFDFELPEAAIALRPASPRDASRLLVVRPGDPLADRGVRDLPALLSPGDALVFNDTRVIPARLSGIRHRAGGSGQRCEAMLHLREAPDRWRAFARPAKRLAPGDRIRFGSEGASEVCALSGLDATVEERGEGGEILLRFDLSGPALDEAIAGLGALPLPPYIAGKRPTDAQDTTDYQTVYAREPGAVAAPTAGLHFSDALLAGIDAAGIERVHVTLHVGAGTFLPVKADDTDAHRMHAEIGILDAATAARLNAVRARGNRVVAVGTTALRLLESAADTDGTIRPFSGATDIFITPGYRFRAVDALVTNFHLPRSTLFMLVSAFAGLDTMRAAYAHAIQSGYRFYSYGDASLLFPEGAPVSESIT

SEQ ID NO: 68947 - protein, 350 aa, Methylosinus sp.
  REGION 1..350: note = tr|A0A177PNV8|A0A177PNV8_9RHIZ S-adenosylmethionine:tRNA ribosyltransferase-isomerase; OS = Methylosinus sp. R-45379 OX=980563 GN=queA PE=3 SV=1
MRVDLFDFELPRDRIALRPAEPRDSARLLVVPPDGAFLERSIRDLTDFLAPGDALVVNDTRVIHARLSGFRARGETRAHIEATLIERVAADRWRALVKPAKKLAIGETVCFGADGALAATALEKGENGEILLGFSLAGAALDEAVEAAGVMPLPPYIAGQRAADARDETDYQTLFAANAGAVAAPTAGLHFTPRLVEELQAKGVSLHRVTLHVGAGTFLPVKVEDTAEHKMHSEWGALDAATAQALNETRARGGRIIAVGTTALRVLESAAREDGTLAEFASDTAIFITPGYRFRAVDALLTNFHLPRSTLFMLVCAFAGLERMRAAYAHAIASGYRFYSYGDACLLLRK

SEQ ID NO: 68948 - protein, 348 aa, Methylosinus sp.
  REGION 1..348: note = tr|A0A1A6FQ68|A0A1A6FQ68_9RHIZ S-adenosylmethionine:tRNA ribosyltransferase-isomerase; OS = Methylosinus sp. 3S-1 OX=1849840 GN=queA PE=3 SV=1
MRVELFDFELPQEAIALRPASPRDSARLLVVPPDGHFSDRSVSDLPQLLAPGDALVVNDTQVIHARLSGFRARGESRAHIDATLIERVGADRWRALVRPAKKLGVGESVRFAEGLEARVVEKGENGEILFAFSLAGSALDAAVEASGVMPLPPYIAGKRAADARDEADYQTLFAARAGAVAAPTAGLHFTPRLVDALTARGVSLHSVTLHVGAGTFLPVKAEDTAEHRMHAEWGAIDAATADALNETRARGGRIVAVGTTALRVLESAAGADGRISPFADRTAIFITPGYRFRAVDALLTNFHLPRSTLFMLVSAFSGLERMKAAYAHAIGSGYRFYSYGDACLLERS

SEQ ID NO: 68949 - protein, 350 aa, Methylosinus sporium
  REGION 1..350: note = tr|A0A549T1H7|A0A549T1H7_METSR S-adenosylmethionine:tRNA ribosyltransferase-isomerase; OS = Methylosinus sporium OX=428 GN=queA PE=3 SV=1
MRVDLFDFELPRERIALRPAEPRDSARLLVVPPDGAFLERSIRDLTDFLAPGDALVVNDTRVIHARLSGFRARGETRAHIEATLIERVAADRWRALVKPAKKLALGETVRFGADGALAATALEKGENGEILLGFSLAGAALDEAVEAAGVMPLPPYIAGQRAADARDETDYQTLFAANAGAVAAPTAGLHFTPRLVEMLQAKGVSLHRVTLHVGAGTFLPVKVEDTAEHKMHSEWGHIDAATAQALNETRARGGRIVAVGTTALRVLESAAHADGTLAEFASETAIFITPGYRFRAVDALLTNFHLPRSTLFMLVCAFAGLERMKAAYAHAIASGYRFYSYGDACLLLRK

SEQ ID NO: 68950 - protein, 350 aa, Methylosinus sporium
  REGION 1..350: note = tr|A0A2U1SNM6|A0A2U1SNM6_METSR S-adenosylmethionine:tRNA ribosyltransferase-isomerase; OS = Methylosinus sporium OX=428 GN=queA PE=3 SV=1
MRVDLFDFELPRDRIALRPAEPRDSARLLVSPPDGDFLDRSIRDLPDFLAPGDALVVNDTRVIHARLSGFRARGETRAHIEATLIERVAANRWRALVKPAKKLAIGETVRFGADGVLAATALEKGESGEILLGFSLAGAALDEAVEAAGVMPLPPYIAGQRAADARDETDYQTLFAANAGAVAAPTAGLHFTPRLVEELQAKGVSLHRVTLHVGAGTFLPVKVEDTAEHKMHSEWGALDAATAQALNETRARGGRVVAVGTTALRVLESAAREDGTLAEFASETAIFITPGYRFRAVDVLLTNFHLPRSTLFMLVCAFAGLERMKAAYAHAIAFGYRFYSYGDACLLLRK

SEQ ID NO: 68951 - protein, 371 aa, Methylosinus trichosporium
  REGION 1..371: note = tr|A0A2D2CVI9|A0A2D2CVI9_METTR S-adenosylmethionine:tRNA ribosyltransferase-isomerase; OS = Methylosinus trichosporium OB3b OX=595536 GN=queA PE=3; SV = 1
MRSRSLLPLAGEGVALNDSSQSVMRVELFDFELPQEAIALRPASPRDSARLLVVPPDGHFSDRSVSDLPQLLAPGDALVVNDTQVIHARLSGFRARGESRAHIDATLIERVGADRWRALVRPAKKLGVGESVRFAEGLEARVVEKGENGEILFAFSLAGSALDAAVEASGVMPLPPYIAGKRAADARDEADYQTLFAARAGAVAAPTAGLHFTPRLVDALTARGVSLHSVTLHVGAGTFLPVKAEDTAEHRMHAEWGAIDAATADALNETRARGGRIVAVGTTALRVLESAAGADGRISPFADRTAIFITPGYRFRAVDALLTNFHLPRSTLFMLVSAFSGLERMKAAYAHAIGSGYRFYSYGDACLLERS

SEQ ID NO: 68952 - protein, 347 aa, Methylotenera mobilis
  REGION 1..347: note = tr|C6WTW9|C6WTW9_METML S-adenosylmethionine:tRNA ribosyltransferase-isomerase OS=Methylotenera mobilis (strain JLW8 / ATCC BAA-1282 / DSM 17540) OX=583345; GN = queA PE =3 SV=1
MSHMKTQDFDFYLPSSLIAQHPSSERTASRMLYLNSTASKLTDKQFLDFPDFFKAGDLLIFNDTRVIKARLFGNKHSGGNVEVLIERVINQNTAYAHVRASRSPKVGSRITLSDAFDVEVTARHDDLFELRFLSEDSVFELLEQHGALPLPPYITHGATDHDEERYQTVYAKHLGAVAAPTAGLHFNTEILEQLKAKGVNIAYVTLHVGAGTFQPVRVDSVADHKMHSELFHVPTETVALIEATKANGGIVTAIGTTAMRALESAARNGTLAAGEGDTDIFITPGYRFNVVDRLLTNFHLPKSTLLMLVSAFAGTDNIRKAYAHAVAGEYRFFSYGDAMLIEKLPLA

SEQ ID NO: 68953 - protein, 345 aa, Methylotenera mobilis
  REGION 1..345: note = tr|A0A351RAF2|A0A351RAF2_9PROT S-adenosylmethionine:tRNA ribosyltransferase-isomerase; OS = Methylotenera mobilis OX=359408 GN=queA PE=3 SV=1
MKTQDFDFYLPSSLIAQHPSTERTASRMLYLNSATSELTDKQFLDFPDFFNAGDLLIFNDTRVIKARLFGHKHSGGNVEVLIERVINQNTAYAHVRASRAPKIGSRITLSEAFDVEVTARHDDLFELHFLSDVSVFDLLEQHGALPLPPYITHSATNHDEERYQTVYAKHLGAVAAPTAGLHFSTEILEQLKAKGVNIAYVTLHVGAGTFQPVRVDDVADHKMHSELFHVPQETVALIEATKANGGIVTAIGTTAMRALESAARSGTLAAGEGDTDIFITPGYRFNVVDRLLTNFHLPKSTLLMLVSAFAGTDNIKKAYAHAVDNQYRFFSYGDAMLIEKLDPKL

SEQ ID NO: 68954 - protein, 343 aa, Methylotenera sp.
  REGION 1..343: note = tr|A0A1G1B333|A0A1G1B333_9PROT S-adenosylmethionine:tRNA ribosyltransferase-isomerase; OS = Methylotenera sp. RIFCSPLOWO2_02_FULL_45_14 OX=1801615; GN = queA PE=3 SV=1
MRTLDFDFYLPEHLIAQHPTSERTASRMLHVNGTNGNLTDEAFSDFTNFLNAGDLLVFNDTRVIKARLFGHKETGGNVEVLIERIINQHVVYAHVRASRSPKVGSRINLANAFDVEVTARHDDLFELHFLSNSTVLELLEAHGALPLPPYITHDATTQDEERYQTVYSKHLGAIAAPTAGLHFDDTMLDKIRQMGVGIAYVTLHVGAGTFQPVRVDNIHDHQMHSELYNIPQATVDIITKTKNQGRKVMAIGTTAMRALESAAANGPLQAGDGETRIFITPGYTFKVVDRLFTNFHLPKSTLLMLVSAFGGVENIKQAYAHAIKRQYRFFSYGDAMLIEKQPD

SEQ ID NO: 68955 - protein, 354 aa, Methylotenera sp.
  REGION 1..354: note = tr|A0A2S5R565|A0A2S5R565_9PROT S-adenosylmethionine:tRNA ribosyltransferase-isomerase; OS = Methylotenera sp. OX=2051956 GN=queA PE=3 SV=1
MRTQDFDFYLPEALIAQHPTSSRNASKLLYVDGQSGILSDKLFIDFASLLRAGDLLIFNDTRVIKARLFGTKATGGQVEVLVERVLDSHHVLAHIRASRAPKAGSTLRLADAFDAQIVGRDDDLFHVHFLGDITVLDLLERYGALPLPAYITHDAGVQDDERYQTVYAKHAGAVAAPTAGLHFDETVLRALTAKGVKIAYITLHVGAGTFQPVRVDNIKDHKMHSEIYHISAETVTAINNAKQAGRNIIAVGTTSLRALESAAQKALSESKADALIAAGSGETSIFITPGFDFKIVDKLLTNFHLPKSTLLMLVSAFAGFDAIKQAYAHAIQKEYRFFSYGDAMFLEKSSHIKK

SEQ ID NO: 68956 - protein, 350 aa, Methylotenera versatilis
  REGION 1..350: note = tr|D7DLW2|D7DLW2_METV0 S-adenosylmethionine:tRNA ribosyltransferase-isomerase OS=Methylotenera versatilis (strain 301) OX=666681 GN=queA PE=3 SV=1
MRTEDFNFYLPDALIAQHPTAERTASRMLHLNSSKGELADNMFINLPEHLQAGDLLVFNDTRVIKARLFGVKHTGGSVEVMIERVINQHTAYAQIRASRAPKVGTRLTLSNAFDVEVTARHDDLFELLFLSETSVLDLLEQHGALPLPPYITHSATSDDEERYQTVFSKHLGAVAAPTAGLHFNDAMLDTLKQKGINIAYVTLHVGAGTFQPVRVDNINEHKMHSELYSISQATIDMINATKTNGAKVTAIGTTALRALESAARVTEFNTNGNLQAGNGDTDIFITPGYQFKVVDRLFTNFHLPKSTLLMLVSAFAGMDNIKKAYEHAINEHYRFFSYGDAMLIEKHPAA

SEQ ID NO: 68957 - protein, 343 aa, unidentified
  source 1..343: note = Methylothermaceae bacteria
  REGION 1..343: note = tr|A0A148N6M8|A0A148N6M8_9GAMM S-adenosylmethionine:tRNA ribosyltransferase-isomerase; OS = Methylothermaceae bacteria B42 OX=1798802 GN=queA PE=3; SV = 1
MRKSDFNYPLPSRLIAQVPLAERSASRLLVLNGGSGLIEDKKFTDIVDLIDPRDLLVFNDTKVIPARLYGRKQTGGKVEILLERVLANGRAWAQIRASKSPRPGSGIELDKGYRCSVVERNKDLFLLQFEAINDLYCVLQEIGHIPLPPYIDRPDSAQDHQRYQTVFARQPGAVAAPTAGLHFDFHLMARLKKKGVAMTYVTLHVGAGTFQPLRVENLEEHEMHQEWFEIGEGAAAEISQARSRGGRIIAVGTTVVRTLESACQQGELKPGRGATRLFIRPGYPFRCVDAMITNFHLPESTLLMLVCAFAGYEQVMSAYYHAVDKEYRFFSYGDAMYVTRRVV

SEQ ID NO: 68958 - protein, 112 aa, Methyloversatilis sp.
  REGION 1..112: note = tr|A0A257X4C0|A0A257X4C0_9PROT S-adenosylmethionine:tRNA ribosyltransferase-isomerase (Fragment) OS=Methyloversatilis sp. 12-65-5 OX=1970398; GN = B7Z51_07445 PE=3 SV=1
MLTLSDFDYDLPDDLIAQAPLPERSASRLLVVGPTTLTDSRIRELSRWLAAGDLLVFNDTRVMHARLFGMKDSGGRIEVLIERLTGQHEALAQVRASKTPRAGSRLRMEDAF

SEQ ID NO: 68959 - protein, 354 aa, Methyloversatilis sp.
  REGION 1..354: note = tr|A0A1B3LJN8|A0A1B3LJN8_9PROT S-adenosylmethionine:tRNA ribosyltransferase-isomerase; OS = Methyloversatilis sp. RAC08 OX=1842540 GN=queA PE=3 SV=1
MPHSVLTLSDFDYDLPDDLIAQAPLPERSASRLLVVGTTSLTDSSIRALPQWLEPDDLLVFNDTRVMHARLYGTKSSGGRIEVLIERLTGEHEALAQVRASKTPRAGSRLRMEDAFDFEVLGRDGEFFRLRSTDAAPLAALLERHGRLPLPPYIERAAADADEQRYQTVYARQTGSVAAPTAGLHFDDALLEAVAARGVRQAHVTLHVGAGTFQPVRTDNLAEHRMHSEQFQLPVDTAQAIADTKASGGRVIAVGTTSLRCLESAAATCAPDPLAACQGDTRLFITPGYDFRVIDGLLTNFHLPKSTLLMLVSALAGQQRVRAAYAHAVAQRYRFFSYGDAMFIPARMKDHDEV

SEQ ID NO: 68960 - protein, 350 aa, Methyloversatilis universalis
  REGION 1..350: note = tr|F5R7G0|F5R7G0_METUF S-adenosylmethionine:tRNA ribosyltransferase-isomerase OS=Methyloversatilis universalis (strain ATCC BAA-1314 / JCM 13912 / FAM5); OX = 1000565 G N=queA PE=3 SV=1
MLTLSDFDYTLPDELIAQAPLPERSASRLLVLGERAPTDAHIRDLPQWLNPGDLLVFNDTRVMHARLYGRKDSGGQVEVLVERLTGEREALAQVRASKTPRPGSRLTLEDAFEVEVLGREGEFFMLRSLSDAPLLDLLERHGRLPLPPYIDRAAVEADENRYQTVFARETGSVAAPTAGLHFDEALLAAVEARGVRTARVTLHVGAGTFQPVRVENLAEHHMHSERFQLSADTAQAIADTRAAGGRVIAIGTTSLRCLESAAAACGDGPLTACSGDTRLFITPGYAFRVIDGLLTNFHLPKSTLLMLVSALAGRRRMFDAYAHAIAQRYRFFSYGDAMFIPARMKDDDEV

SEQ ID NO: 68961 - protein, 354 aa, Methylovirgula ligni
  REGION 1..354: note = tr|A0A3D9YZL0|A0A3D9YZL0_9RHIZ S-adenosylmethionine:tRNA ribosyltransferase-isomerase; OS = Methylovirgula ligni OX=569860 GN=queA PE=3 SV=1
MRVDLFDFDLPPERIALRPIIPRDAARMLVVAPASPEPLQDRTIRDLPDFLRPGDILVVNNTRVIPARLEGVRTRGVNKAKIEVLLHRRVSDDTWRAFAKGAKKLQRGDTIAFQRGDTIVATEVLENFGEGEVMLAFPLGGADLDRAIEALGAMPLPLYIAGKRPADAQDSDDYQSLFAVHRGAVAAPTASLHFTPALKTAIAARGVEIAQITLHVGAGTFLPVKADDTQAHRMHAEWGEIDAETAARLNAARAAGGRIVAVGTTSLRLLESAATAAGKIAPFSDETAIFITPGYRFKAVDLLLTNFHLPRSTLFMLVAAFSGLETMQAAYKHAIASDYRFYSYGDACLLHPAP

SEQ ID NO: 68962 - protein, 343 aa, Methylovirgula sp.
  REGION 1..343: note = tr|A0A371WQJ1|A0A371WQJ1_9RHIZ S-adenosylmethionine:tRNA ribosyltransferase-isomerase; OS = Methylovirgula sp. 4M-Z18 OX=2293567 GN=DYH55_11325; PE = 3 SV=1
MIAADQLERQTAKLLAISADGTTRHLQRTDLAALFRPGDLVVANDAATLPASLHGRHCATNEPIEIRLAGWICAGDPTRFIALAFGAGDCRMRTEDRAPPPPLSAGDRLALGPFIAIVEHLLDHPRLFELRFLGDRRTILAGLAHHGRPIQYAHVAERLVLWDVWTRIATEPFAFEPPSAGFSLNWHTLAAWQRRGVKFATLTHAAGISSTGDPVLDLRLPFDEPYRIPLRTAKAIARAKAAGGRIIAIGTTVVRALESAVETDGSICPGDGIAHGRIGRKTPLRVVDAILTGVHMPGESHFELLRAFADDKVLDRMSAELAKNGYQPHEFGDSVILERHLSA

SEQ ID NO: 68963 - protein, 356 aa, Methylovirgula sp.
  REGION 1..356: note = tr|A0A371WUS0|A0A371WUS0_9RHIZ S-adenosylmethionine:tRNA ribosyltransferase-isomerase; OS = Methylovirgula sp. 4M-Z18 OX=2293567 GN=queA PE=3 SV=1
MRVDLFDFELPEDRIALRPMVPREAAKLLVVAPDGALSDHHVGDLPDFLRPGDALVVNDTRVLPARLYGIRRRGDAVARIEALLHKREGAHLWRAFVRPAKKLKVGERVQFGEDSNACFLGRLDAQVVEKTEGGEVLFAFDLSGGALDDAIVQAGHMPLPPYIASKRPDDAGDLADYQTMFARETGAVAAPTAGLHFTPELLARVEAKGVAVHRVTLHVGAGTFLPVKVDDTDAHQMHAEFGVVTPEVATALNAARANGARIVTIGTTSLRILESAASAAGEIRPFAGDTSIFITPGYRFRAVDILMTNFHLPRSTLFMLVSAFSGLETMKVAYAHAVANDYRFYSYGDACLLMRA

SEQ ID NO: 68964 - protein, 351 aa, unidentified
  source 1..351: note = Methylovorus glucosetrophus
  REGION 1..351: note = tr|C6X9X7|C6X9X7_METGS S-adenosylmethionine:tRNA ribosyltransferase-isomerase OS=Methylovorus glucosetrophus (strain SIP3-4) OX=582744 GN=queA PE=3 SV=1
MRTEDFDFFLPEELIAQFPAAERDGSRLLRLDGNSGAIADHQFRELPQFLNAGDVLIFNDTRVIKARLQGHKESGGSIELLIERPLDTHRALAHIRASRSPKPGSRIFIGDGIPARVIERQDDLFLIEVEHVTPLLDLLDQYGALPLPPYITHAADAEDDERYQTIYARTPGAVAAPTAGLHFNQVMLDRLQAAGIQIAYVTLHVGAGTFQPVRVDDISEHRMHSEIYTVPPATVDLINTARAAGHKITAVGTTALRALESAARSGALVAGSGETDIFITPGYRFQVVERLLTNFHLPKSTLMMLVSAFAGVEHIRAAYAHAIASRYRFFSYGDAMLLERRESINQAPTPG

SEQ ID NO: 68965 - protein, 342 aa, Methylovorus sp.
  REGION 1..342: note = tr|A0A1A9T0Q0|A0A1A9T0Q0_9PROT S-adenosylmethionine:tRNA ribosyltransferase-isomerase; OS = Methylovorus sp. MM2 OX=1848038 GN=queA PE=3 SV=1
MRTSDFDFVLPEALIAQFPTNERSGSRLLKLDSKTGELSDHMFRELPAFLQAGDLLIFNDTRVIKARLTGQKSTGGAIEVLIERVIDDHRALAHIRASRSPKPGSKVLLAGDIEAEVTERQDDLFMLRFPDNTKILDFLEQYGALPLPPYITHTADNADEERYQTVYAKSLGAVAAPTAGLHFDTAMLEQLKNNGIRIAFVTLHVGAGTFQPVRVDEISEHKMHSELYSIPEETVALIKATQANGGKVTAIGTTALRALESAARTGELIAGVGETDIFITPGYQFQVVERLLTNFHLPKSTLMMLVSAFAGIENIRHAYAHAIAQQYRFFSYGDAMLLDRLD

SEQ ID NO: 68966 - protein, 338 aa, unidentified
  source 1..338: note = Methylovulum psychrotolerans
  REGION 1..338: note = tr|A0A1Z4BVP0|A0A1Z4BVP0_9GAMM S-adenosylmethionine:tRNA ribosyltransferase-isomerase; OS = Methylovulum psychrotolerans OX=1704499 GN=queA PE=3; SV = 1
MKKSDFYYDLPDALIAQHPLAERTASRLLCMGRGTGELCDRQFNDFIDLIHADDLLVFNDTRVIPARLWGHKASGGKVEILIERLLDEHHAIAHVRASKAPKPGTLVELPEGLACTVTGRDNDLFHLAFPQPILAVLAQIGHIPLPPYITRADDSGDYSRYQTVFAKTAGAVAAPTAGLHFDEALLDKLKAKGVRSAFVTLHVGSGTFQPVRVEDLAAHIMHKEYFSVTEETVTAVAQTRARGGRVVAVGTTAVRALESAARSGSLTASFGDTQLFITPGYTFKVVDALLTNFHLPESTLLMLVSAFAGYQPIMAAYRHAVAEGYRFFSYGDAMFLSR

SEQ ID NO: 68967 - protein, 338 aa, unidentified
  source 1..338: note = Methylovulum psychrotolerans
  REGION 1..338: note = tr|A0A2S5CN02|A0A2S5CN02_9GAMM S-adenosylmethionine:tRNA ribosyltransferase-isomerase; OS = Methylovulum psychrotolerans OX=1704499 GN=queA PE=3; SV = 1
MKKSDFYYDLPDALIAQHPLAERTASRLLCMGRDTGELCDRQFNDFIDLIHADDLLVFNDTRVIPARLWGHKASGGKVEILIERLLDEHHAIAHVRASKAPKPGTLVELPEGLACTVTGRDNDLFHLAFPQPILAVLAQIGHIPLPPYITRADDSGDYSRYQTVFAKTAGAVAAPTAGLHFDEALLDKLKAKGVRSAFVTLHVGSGTFQPVRVEDLAAHIMHKEYFSVTEETVTAVAQTHARGGRVVAVGTTAVRALESAARSGSLTASFGDTQLFITPGYTFKVVDALLTNFHLPESTLLMLVSAFAGYQPIMAAYRHAVAEGYRFFSYGDAMFLSR

SEQ ID NO: 68968 - protein, 340 aa, Methylovulum sp.
  REGION 1..340: note = tr|A0A522DSA3|A0A522DSA3_9GAMM S-adenosylmethionine:tRNA ribosyltransferase-isomerase; OS = Methylovulum sp. OX=1916980 GN=queA PE=3 SV=1
MKKSDFNYLLPDILIAQKPLPERDASRLLHMNRDTGELSDKQFINFINLIDKRDVLVFNDTKVIPARLYGKKQSGGKIEILIERIQDDHHALAHVRASKAPKAGALIELDGGFCCEILGRAGDLFELEFKNVCSLWQLLQQVGHIPLPPYITRADDESDLTRYQTVFARASGAVAAPTAGLHFDLAMLEKIKAKGVETAFVTLHVGSGTFQPVRVENLAEHLMHKEYFAVPPATVAAAHRARARGGRVIAIGTTAVRALESASKSGVLEAGFGDTDLFITPGYQFKSVDAMLTNFHLPESTLLMLVSAFAGYEPVMNAYRYAIAESYRFFSYGDAMFLSD

SEQ ID NO: 68969 - protein, 356 aa, Micavibrio sp.
  REGION 1..356: note = tr|A0A1Z8KRB9|A0A1Z8KRB9_9PROT S-adenosylmethionine:tRNA ribosyltransferase-isomerase; OS = Micavibrio sp. TMED2 OX=1986633 GN=queA PE=3 SV=1
MDISLFDYPLPARLIADRPAEPRESAKLLDLTSGEPVDRTINDLPDILTPGTILVVNNTRVLPARLTGRRIAADGDGTPGGVIEVTLHQLVSNGDDTIWHVFAKPGKRIRPGDRIRFANDFEALVDAKHENGQVTLRFQMPFDMLRDQLDIHGVMPLPPYIKRDKGGDDQDKQDYQTVFAKREGAVAAPTASLHFTDDLLTRLAARGITTVQVTLHVGAGTFLPVKTEDVTEHQMHEEWGEVTPETADLLNQAKADGRPVIAVGTTALRILETAAAATGSIQPFAGATDLYILPGYRFNFVDRLLTNFHLPRSTLLMLVSALAGRERMLHAYHHAIAHDYRFFSYGDACLLAAMPD

SEQ ID NO: 68970 - protein, 142 aa, Microbacterium sp.
  REGION 1..142: note = tr|A0A074TWJ6|A0A074TWJ6_9MICO S-adenosylmethionine:tRNA ribosyltransferase-isomerase (Fragment) OS=Microbacterium sp. SUBG005 OX=1504156; GN = HR12_18170 PE=3 SV=1
MRVADFSFELPESLIAHYPMPERSSCRLLSLDGPTGALTHGTFTDLLDKLNPGDLLVFNNTRVIPARLFGRKASGGKIEVLVERMLDDKRILAHIRASKAPKPGAELLLGDDESIKATMTARHDALFEVEFNDERTVLDILN

SEQ ID NO: 68971 - protein, 341 aa, Microbacterium sp.
  REGION 1..341: note = tr|A0A542GXH2|A0A542GXH2_9BACI S-adenosylmethionine:tRNA ribosyltransferase-isomerase; OS = Microbacterium sp. SLBN-1 OX=1489561 GN=queA PE=3 SV=1
MKVEDFDFHLPEELIAQTPLENRSESRLMVLDKEDGSIDHLRFKNIVDLLDEGDCLVLNDTRVLPARLFGQKEETGANIEVLLLKQEEGDQWETLVKPAKRVKVGTEVVFGDGKLKATCVGTKDHGGRIMEFAYEGIFYEVLEELGEMPLPPYIRERLEEQDRYQTVYAKERGSAAAPTAGLHFTEELLEELKQKGVHIAFITLHVGLGTFRPVSVDSIEDHDMHSEFYQISEGTARLLNDVRDKGGRIITVGTTSTRTLETIASKHDRFVEENGWTNIFIYPGYEFKGIDGLITNFHLPKSTLIMLVSAFAGQEHVLEAYETAVQEKYRFFSFGDAMFLK

SEQ ID NO: 68972 - protein, 381 aa, unidentified
  source 1..381: note = Microbispora bryophytorum
  REGION 1..381: note = tr|A0A544XZ81|A0A544XZ81_9ACTN S-adenosylmethionine:tRNA ribosyltransferase-isomerase; OS = Microbispora bryophytorum OX=1460882 GN=FLX07_01720; PE = 3 SV=1
MTARNPHTAVPPRTEPPAKTAPGRADGVDATPAGVRPYGAGESFEFALAAPLEAHEPPEARGLRRDEVRLLVSRRDTGEVTGEVTHHVFADLPSLLSPGDLLVVNNSATLPAAVRLDRLAVHFSGRLASGEWLVELRRRTATATEPYSGVAPGEWLPLPGGATLRLPAQETPRLWRAHLDRDVLSYLAVHGVPIRYGHVRRDWPLADYQTVFGVEPGSAEMPSAGRPFTPELVTDLVRRGIGVAPITLHTGVASPEKDEPPYPEWFSVSPWTARLVNITREHGGRVIAVGTTVVRALETAALDAPAPGTVRATSGWTSHVVTPAEGVRAVDGLVTGLHEPRSSHLMMLSSITGTGVLARAYEAALEEGYLWHEFGDSHLIL

SEQ ID NO: 68973 - protein, 350 aa, unidentified
  source 1..350: note = Microbispora hainanensis
  REGION 1..350: note = tr|A0A544Z5H2|A0A544Z5H2_9ACTN S-adenosylmethionine:tRNA ribosyltransferase-isomerase; OS = Microbispora hainanensis OX=568844 GN=FLX08_01015 PE=3; SV = 1
MTAPDPAIRPYGAGGSFEFALAAPLEAHEPPEARGLRRDEVRLLVSRRDTGEITHHVFADLPSLLSPGDLLVVNDSATLPAAVRLDRLAVHFSGRLASGEWLVELRRRTGRATEPYSGAAPGEWLPLPGGATLRLLAPETPRLWRARLDRDVLSYLAAHGVPIRYGYVGRDWPLADYQTVFGVEPGSAEMPSAGRPFTPELVTALVSRGIGVAPITLHTGVASPEKDEPPYPEWFSVSERTARLVNITREHGGRVIAVGTTVVRALETAARDASAPDTVRAASGWTSHVVTPEGGVRAVDGLVTGLHEPRSTHLMMLSAITGTRVLTRAYEAALEEGYLWHEFGDSHLIL

SEQ ID NO: 68974 - protein, 350 aa, Microbispora rosea
  REGION 1..350: note = tr|A0A1N7G6Y7|A0A1N7G6Y7_9ACTN S-adenosylmethionine:tRNA ribosyltransferase-isomerase; OS = Microbispora rosea OX=58117 GN=SAMN05421833_12696 PE=3; SV = 1
MTAPDSAIRPHGAKGSFEFALTAPLEAHEPPEARGLRRDEVRLLASRRDTGEITHHVFADLPSLLSPGDLLVVNNSATLPAAVRLDRLAVHFSGRLASGEWLVELRRRTAKATEPYSGAAPGEWLPLPGGATLRLLAQETPRLWRAHLDRDVLSYLAAHGVPIRYGYVGRDWPLAHYQTVFGVEPGSAEMPSAGRPFTPELVTALVSRGIGVAPITLHTGVASPEKDEPPYPEWFSVSPWTARLVNITREHGGRVIAVGTTVVRALETAALDASAPDTVRATSGWTSHVVTPAGGVRAVDGLVTGLHEPRSSHLMMLSAITGTGVLTSSYEAALEEGYLWHEFGDSHLIL

SEQ ID NO: 68975 - protein, 346 aa, Microbispora sp.
  REGION 1..346: note = tr|A0A544Y9K0|A0A544Y9K0_9ACTN S-adenosylmethionine:tRNA ribosyltransferase-isomerase; OS = Microbispora sp. SCL1-1 OX=2592812 GN=FLW53_14735 PE=3; SV = 1
MTTPDPEIRPYGESFEFALGAALEAHEPPEARGLRRDEVRLLVSRRDTGEITHHVFADLPSLLSPGDLLVVNDSATLPAAVRLDRLAVHFSGRLASGEWLVELRRRTGTATEPYSGAAPGEWLPLPGGATLRLLAPETPRLWRARLDRDVLSYLARHGVPIRYGYVRRDWPLADYQTVFGVEPGSAEMPSAGRPFTPELVTALVSRGIGVAPITLHTGVASPEKDEPPYPEWFAVSERTARLVNITHEHGGRVIAVGTTVVRALETAARDAPDTVRAASGWTSRVVTPEGGVRAVDGMVTGLHEPRSTHLMMLSAITGTGVLARSYEAALEEGYLWHEFGDSHLIL

SEQ ID NO: 68976 - protein, 369 aa, Microbispora sp.
  REGION 1..369: note = tr|A0A544Z9I1|A0A544Z9I1_9ACTN S-adenosylmethionine:tRNA ribosyltransferase-isomerase; OS = Microbispora sp. KK1-11 OX=2053005 GN=FLW16_29435 PE=3; SV = 1
MTARDPHTAVQARTEPPATTTAPGPAIRPYGAAGSFEFALAAPLEAHEPPEARGLRRDEVRLLVSRRDTGEVSHHVFADLPTLLSPGDLLVVNNSATLPAAVRLDRLAVHFSGRLASGEWLVELRRRTATATEPYSGAAPGEWLPLPGGATLRLLAQETPRLWRAHLDRDVLSYLAAHGVPIRYGYVRRDWPLADYQTVFGVEPGSAEMPSAGRPFTPELVTELVSRGIGVAPITLHTGVASPEKDEPPYPEWFSVSPWTARLVNITREHGGRVIAVGTTVVRALETAALDAPAPGTVRAASGWTSHVVTPAGGVRAVDGLVTGLHEPRSSHLMMLSAITGTGVLARAYEAALEEGYLWHEFGDSHLIL

SEQ ID NO: 68977 - protein, 396 aa, unidentified
  source 1..396: note = Microbispora tritici
  REGION 1..396: note = tr|A0A5D0QIT2|A0A5D0QIT2_9ACTN S-adenosylmethionine:tRNA ribosyltransferase-isomerase; OS = Microbispora tritici OX=2604471 GN=FXF59_00480 PE=3 SV=1
MTGAGGRTAAETEGRPDTPLGGGGLADAAPSSDGPADAIGEPARPHASGDSLTFALAAPLEAREPPEARGLRRDEVRLLVSRRDTGEVTHHVFADLPSLLAPGDLLVVNDSATLPAAVRLDRLAVHFSGRLASGDWLVELRRRTATATEPYLGGAPGEWLPLPGGATLRLVERETARLWRARLDRDVLSYLAAHGAPIRYGYVRRDWPLADYQTVFGVEPGSAEMPSAGRPFTPELVTALVSRGIGIAPITLHTGVASPEKDEPPYPEWFSVSARTARLANLTRAHGGRVIAVGTTVVRALETAAVRPPVAEPHRGEAGPDGGGVRALSGWTSHVVTPAGGVRAVDGLITGLHEPRSSHLMMLSAITGTGVLADAYDEALREGYLWHEFGDSHLIL

SEQ ID NO: 68978 - protein, 407 aa, unidentified
  source 1..407: note = Microbispora triticiradicis
  REGION 1..407: note = tr|A0A372P515|A0A372P515_9ACTN S-adenosylmethionine:tRNA ribosyltransferase-isomerase; OS = Microbispora triticiradicis OX=2200763 GN=DI270_027665; PE = 3 SV=1
MTGAGGRTAAETEGRPDTPLGGGGPADAAPSSDGPADAIGEPARPQAAGDSLTFALAAPLEAREPPEARGLRRDEVRLLVSRRDTGEVTHHVFADLPSLLAPGDLLVVNDSATLPAAVRLDRLAVHFSGRLASGDWLVELRRRTATATEPYLGGAPGEWLPLPGGATLRLVERETARLWRARLDRDVLSYLAAHGAPIRYGYVRRDWPLADYQTVFGVEPGSAEMPSAGRPFTPELVTALVSRGIGIAPITLHTGVASPEKDEPPYPEWFSVSARTARLANLTRAHGGRVIAVGTTVVRALETAAAVRPPVAEPHCAAPHCAAPHWGEAGPDGGGVRALSGWTSHVVTPAGGVRAVDGLITGLHEPRSSHLMMLSAITGAGVLADAYDEALREGYLWHEFGDSHLIL

SEQ ID NO: 68979 - protein, 355 aa, Microbulbifer agarilyticus
  REGION 1..355: note = tr|A0A1Q2M6D3|A0A1Q2M6D3_9GAMM S-adenosylmethionine:tRNA ribosyltransferase-isomerase; OS = Microbulbifer agarilyticus OX=260552 GN=queA PE=3 SV=1
MQRQDFYFDLPESLIAKAPTAERRGSRLLCLDGTTGALGHRQFAELPDLIAPGDLLVFNDTRVIPARLFGQKASGGKLEILIERVLDEHRALAHIRSSKSPKPGSEIFLEDGSRLSMVARHDALFELEFPAEGVLPVLERQGHMPLPPYIDREDTETDKDRYQTVYSRNAGAVAAPTAGLHFDDEMIQSLRDKGVDTAFVTLHVGAGTFQPVRVDDINTHKMHSEILDVSAEVCDAVKACRARGGKVIAVGTTSVRALESAAVSGQLKPTQGETEIFIYPGYDFRVVDRLITNFHLPESTLLMLVSAFAGYNNAMNAYRQAVAEEYRFFSYGDAMLIERNPAVDPAEVGAGQADD

SEQ ID NO: 68980 - protein, 346 aa, unidentified
  source 1..346: note = Microbulbifer aggregans
  REGION 1..346: note = tr|A0A1C9W848|A0A1C9W848_9GAMM S-adenosylmethionine:tRNA ribosyltransferase-isomerase; OS = Microbulbifer aggregans OX=1769779 GN=queA PE=3 SV=1
MRRQDFHFDLPDELIARAPASERRGSRLLCLDGPTGAVDHRKFAELPELVQSGDLLVFNDTRVIPARLFGRKESGGKLEILVERVLDEGRVLAHIRSSKSPKPGTRILLEDDSELEMVARHDALFELAFPSEGVLPVLERLGHMPLPPYIDRPDDEADRERYQTVYSREAGAVAAPTAGLHFDDEMLDTLRNMGVETAFVTLHVGAGTFQPVRVDDIHEHQMHSEVLNVPESVCKAVADCRARGGKVIAVGTTSVRALESAAASGELKPTVGETDIFIYPGYQFRVVDRLITNFHLPESTLMMLVSAFAGYEQTMNAYREAVRERYRFFSYGDAMLISRNPNVSAW

SEQ ID NO: 68981 - protein, 346 aa, Microbulbifer donghaiensis
  REGION 1..346: note = tr|A0A1M5I2G5|A0A1M5I2G5_9GAMM S-adenosylmethionine:tRNA ribosyltransferase-isomerase; OS = Microbulbifer donghaiensis OX=494016 GN=queA PE=3 SV=1
MRRQDFRFDLPDELIARTPAKERRGSRLLCLDGPSGRLEHRQFAELADLVEAGDLLVFNDTRVIPARLFGRKASGGKLEILIERVLDERRALAHIRSSKSPKPGSEVVLEDDTPLQMVARHEALFELEFPQEGVLPVLERLGHMPLPPYIDRPDEDADRERYQTVYSRHAGAVAAPTAGLHFDDAMLAALRDKGVETAFVTLHVGAGTFQPVRVDDIFEHQMHSEVLHVPESVCRAVADCRARGGRVIAVGTTSVRALESAAAGGELVPTVGETDIFIYPGYRFRVVDRLITNFHLPESTLMMLVSAFAGYEQTMNAYREAVREKYRFFSYGDAMLINRNPHVSGW

SEQ ID NO: 68982 - protein, 346 aa, Microbulbifer marinus
  REGION 1..346: note = tr|A0A1H4A6Z4|A0A1H4A6Z4_9GAMM S-adenosylmethionine:tRNA ribosyltransferase-isomerase; OS = Microbulbifer marinus OX=658218 GN=queA PE=3 SV=1
MRRQDFRFDLPDELIARTPAKERRGSRLLCLDGPSGRLEHRQFAELADLVEPGDLLVFNDTRVIPARLFGRKASGGKLEILIERVLDEHRALAHIRSSKSPKPGTEILLEDDTPLQMMARHEALFELEFPQEGVLPVLERLGHMPLPPYIDRPDEDTDRERYQTVYSRHAGAVAAPTAGLHFDDAMLAALRDKGVETAFVTLHVGAGTFQPVRVDDIFEHKMHSEVLHVPESVCRAVADCRARGGRVIAVGTTSVRALESAAANGELVPTVGETDIFIYPGYQFRVVDRLITNFHLPESTLMMLVSAFAGYEQTMNAYREAVQQKYRFFSYGDAMLITRNPEVSGW

SEQ ID NO: 68983 - protein, 346 aa, Microbulbifer sp.
  REGION 1..346: note = tr|A0A0X3U0G1|A0A0X3U0G1_9GAMM S-adenosylmethionine:tRNA ribosyltransferase-isomerase; OS = Microbulbifer sp. ZGT114 OX=1685377 GN=queA PE=3 SV=1
MRRQDFHFDLPDELIARAPARERRGSRLLCLDGPTGAVDHRKFLELPQLVQSGDLLVFNDTRVIPARLFGRKESGGKLEILIERVLDEGRALAHIRSSKSPKPGTRILLEDDTALEMVARHDALFELAFPSEGALPVLERLGHMPLPPYIDRPDDEADRERYQTVYNREAGAVAAPTAGLHFDEEMLDTLRDMGVETAFVTLHVGAGTFQPVRVDDIHEHQMHSEVLNVPESVCRAVADCRARGGKVIAVGTTSVRALESAAASGELKPTVGETDIFIYPGYQFQVVDRLITNFHLPESTLMMLVSAFAGYEQTMNAYREAVRERYRFFSYGDAMLISRNPNVSPW

SEQ ID NO: 68984 - protein, 357 aa, Microbulbifer sp.
  REGION 1..357: note = tr|A0A510IN21|A0A510IN21_9GAMM S-adenosylmethionine:tRNA ribosyltransferase-isomerase; OS = Microbulbifer sp. GL-2 OX=2591606 GN=queA PE=3 SV=1
MQRQDFDFHLPDELIARAPTEERRGSRLLCLDGPSGAITHRQFPDILDQVQAGDLIVFNDTRVIPARLFAQKETGGKLEILVERVLNETDIWAHVRSSKSPKPGSSIVLEDGTRIEVTGRKDALFELSFPKEEGVLAILDRLGHMPLPPYIDREDDASDRERYQTVYGRNAGAVAAPTAGLHFDDEMIGALRDKGVEVVFVTLHVGAGTFQPVRVDNIYEHQMHSEVLDVSQEVVDAVAACRARNGSVIAVGTTSVRALESAARGGELQTTVGETDIFIYPGYEFQVVDKLVTNFHLPESTLLMLVSAFAGYQHTMAAYKAAVEERYRFFSYGDAMFITRDPNAKKEEVAPTKGDTQ

SEQ ID NO: 68985 - protein, 346 aa, Microbulbifer thermotolerans
  REGION 1..346: note = tr|A0A1I1LDK0|A0A1I1LDK0_9GAMM S-adenosylmethionine:tRNA ribosyltransferase-isomerase; OS = Microbulbifer thermotolerans OX=252514 GN=queA PE=3 SV=1
MRRQDFHFELPDELIARAPAAERRGSRLLCLDGPSGAVQHRHFADLADLVDTGDLLVFNDTRVIPARLFGRKATGGRLEILIERVQGERDALAHIRSSKSPKPGSEILLQDGTELRMVSRRGALFELEFPAEGVLPVLERLGHMPLPPYIDRPDEDADRERYQTVYSREAGAVAAPTAGLHFDEAMLETLRHKGVETAFVTLHVGAGTFQPVRVDNIFEHEMHSEVMNVPESVCRAVADCRARGGRVIAVGTTSVRALESAAAGGELKPVVGETDIFIYPGYQFRVVDRLITNFHLPESTLLMLVSAFAGYDQTMNAYREAVQKRYRFFSYGDAMLIDRNPHVSGW

SEQ ID NO: 68986 - protein, 346 aa, Microbulbifer thermotolerans
  REGION 1..346: note = tr|A0A143HNI1|A0A143HNI1_9GAMM S-adenosylmethionine:tRNA ribosyltransferase-isomerase; OS = Microbulbifer thermotolerans OX=252514 GN=queA PE=3 SV=1
MRRQDFHFELPDELIARAPAAERRGSRLLCLDGPSGAVQHRHFADLADLVDTGDLLVFNDTRVIPARLFGRKATGGRLEILIERVQGERDALAHIRFSKSPKPGSEILLQDGTELRMVSRRGALFELEFPAEGVLPVLERLGHMPLPPYIDRPDEDADRERYQTVYSREAGAVAAPTAGLHFDEAMLETLRHKGVETAFVTLHVGAGTFQPVRVDNIFEHEMHSEVMNVPESVCRAVADCRARGGRVIAVGTTSVRALESAAAGGELKPVVGETDIFIYPGYQFRVVDRLITNFHLPESTLLMLVSAFAGYDQTMNAYREAVQKRYRFFSYGDAMLIDRNPHVSGW

SEQ ID NO: 68987 - protein, 346 aa, Microbulbifer yueqingensis
  REGION 1..346: note = tr|A0A1G8WVH6|A0A1G8WVH6_9GAMM S-adenosylmethionine:tRNA ribosyltransferase-isomerase; OS = Microbulbifer yueqingensis OX=658219 GN=queA PE=3 SV=1
MRRQDFHFDLPDELIARTPAKERRGSRLLCLDGPSGRVGHRLFAELPDLVKPGDLLVFNDTRVIPARLYARKETGGRLEILVERVLDERRVLAHVRSSKSPKPGSRLLLEDDTPVEMVARHDALFELEFPAEGVLPLLERLGHMPLPPYIDRPDEASDRERYQTVYSREPGAVAAPTAGLHFDDEMLDTLRDMGVETAFVTLHVGAGTFQPVRVDDIHEHQMHSEVLNVPESVCRAVADCQARGGRVIAVGTTSVRALESAAASGELRPTVGETDIFIFPGYRFRVVDRLITNFHLPESTLMMLVSAFAGYEQTMNAYREAVKERYRFFSYGDAMLIERNPDVQGW

SEQ ID NO: 68988 - protein, 340 aa, Micrococcus lylae; identical to SEQ ID NO: 68458
  REGION 1..340: note = tr|A0A378P4J2|A0A378P4J2_9MICC S-adenosylmethionine:tRNA ribosyltransferase-isomerase; OS = Micrococcus lylae OX=1273 GN=queA PE=3 SV=1

SEQ ID NO: 68989 - protein, 386 aa, unidentified
  source 1..386: note = Microcoleaceae bacterium
  REGION 1..386: note = tr|A0A355CMG6|A0A355CMG6_9CYAN S-adenosylmethionine:tRNA ribosyltransferase-isomerase; OS = Microcoleaceae bacterium UBA10368 OX=2055793 GN=queA; PE = 3 SV=1
MTEIDWSLDGYDYELPPDRIAQNPVVPRDSSRLLAVDSPSSQQHRIFRDLPDLLEPGDLLVLNNTRVLPARLYGHKPNGPAVEILLMEERDRNCWLALVKPGKRLKLGAKIEFDPICHEEAAGPCCCIPQGAVATLTDRLTATVIERDDATGGRLLEFNLPTEMSLIPFLDEYGHVPLPPYIDNSQAAPEQYQTVYADRPGAIAAPTAGLHFTEEVFSRLQQRGIETTFVTLHVGVGTFRPVEVADVTTHRMHGEWVEVSPATVEKIRETQARGGRIIAVGTTAVRALEGAAAATATPIADFPLQPFSGQTNLFIYPGYKWRVVDGMITNFHLPRSTLLMMISAMIGRSRVLDLYREAIAQQYRFYSFGDAMLILPEAYAIEEGID

SEQ ID NO: 68990 - protein, 386 aa, unidentified; identical to SEQ ID NO: 68989
  source 1..386: note = Microcoleaceae bacterium
  REGION 1..386: note = tr|A0A349JEK6|A0A349JEK6_9CYAN S-adenosylmethionine:tRNA ribosyltransferase-isomerase; OS = Microcoleaceae bacterium UBA11344 OX=2055792 GN=queA; PE = 3 SV=1

SEQ ID NO: 68991 - protein, 443 aa, Microcoleus sp.
  REGION 1..443: note = tr|K9WKU9|K9WKU9_9CYAN S-adenosylmethionine:tRNA ribosyltransferase-isomerase OS=Microcoleus sp. PCC 7113; OX = 1173027 GN=queA PE=3 SV=1
MPPIWDRGLYPILCLVKESPLSKITVDRFVQNTKPMDDAQSQPSDVSNKMAAFLQRDTVTNTRLSQSHPIDGLLSSYDYMLPQERIAQTPLPERDGSRLLVVDSPTHHTHGIFRDLPKLLRPGDLLVLNNTRVIPARLYGYKSTGAPVEVLLLEERSDNCWLALVKPGRRLKPGAKIFFEPQPPGTPSPTTPPLGNGGTPPLPLLSATVLARDEATSGRLLQFDLPPEDSLAALLVQYGQVPLPPYITDTQALPEQYQTVYAQVPGAIAAPTAGLHFTPELLAQCRQQGIQQASVTLHVGIGTFRPVEVEDITHHAMHGEWLEVPQSTVEMIRETKASGGRVIAVGTTVVRALEGAAASGELQPFAGKTELFIYPGYQWRVVDGLITNFHLPRSSLLMLVSALIGRQRLLALYQEAIAQNYRFYSFGDAMLILPDAREPKMIC

SEQ ID NO: 68992 - protein, 379 aa, Microcoleus vaginatus
  REGION 1..379: note = tr|F5UEU8|F5UEU8_9CYAN S-adenosylmethionine:tRNA ribosyltransferase-isomerase OS=Microcoleus vaginatus FGP-2 OX=756067 GN=queA PE=3 SV=1
MTEMDWSLDGYDYELPPSRIAQNPVVPRDSSRLLAVDSPSSHQHRIFRDLPDLLQPGDLLVLNNTRVLPARLYGHKPNGPAVEILLMEERQHNCWLALVKPGKRLKLGAKIEFDPIAPPCEDSTTAPCCCLPDATMPDRRRLTATVIERDDATGGRLLEFDIPTDENLAKFLDEYGHIPLPPYIENSQASAEQYQTVYADRLGAVAAPTAGLHFTEELFSRLEQRGIEKTFVTLHVGVGTFRPVEVADVTAHKMHGEWVEVPAVTVEKIRETQARGGRIIAVGTTAVRALEGAAAARDDFSLQPFCGPTNLFIYPGYKWRVVEGMITNFHLPRSTLMMMISAMIGRPRLLDLYREAIEQQYRFYSFGDAMLILPTAKKD

SEQ ID NO: 68993 - protein, 365 aa, Microcystis aeruginosa; identical to SEQ ID NO: 65234
  REGION 1..365: note = tr|A0A552E637|A0A552E637_MICAE S-adenosylmethionine:tRNA ribosyltransferase-isomerase; OS = Microcystis aeruginosa Ma_SC_T_19800800_S464 OX=2486257; GN = queA PE=3 SV=1

SEQ ID NO: 68994 - protein, 365 aa, Microcystis aeruginosa
  REGION 1..365: note = tr|A0A0F6RJ96|A0A0F6RJ96_MICAE S-adenosylmethionine:tRNA ribosyltransferase-isomerase; OS = Microcystis aeruginosa NIES-2549 OX=1641812 GN=queA; PE = 3 SV=1
MIPDQLLSSYDYHLPPELIAQNPAEPRDSSRLLVVDSPNSHNLAIFRDLPTWLESGDLLVFNDTRVIPARLFGRKTTGAPVEILLLEEQDDHRWLSLVKPGKRFKVGSEVLFYPKTGRTEDEAKLWLAKIIDRDMNTGGRLLEFQRHPGRSFWDMLEEYGHIPFPPYVTESEAEEDRYQTVYADKQGSVAAPTAGLHFTPELFHKLAQKAIDTAYITLHVGVGTFRPVEVENIAEHIMHQEFLEISAETAEKIAQTKARGGRVIAVGTTVARALEGAIKESKSEKLTAFQGKTNLFVYPGYQWRIIDGMITNFHLPKSSLMMLVSALVGRERLLALYQAAIQERFRFYSFGDAMLILPSACSSNR

SEQ ID NO: 68995 - protein, 365 aa, Microcystis flosaquae
  REGION 1..365: note = tr|A0A3E0KZJ2|A0A3E0KZJ2_9CHRO S-adenosylmethionine:tRNA ribosyltransferase-isomerase; OS = Microcystis flos-aquae DF17 OX=2060470 GN=queA PE=3 SV=1
MIPDQLLSSYDYHLPPELIAQNPAETRDSSRLLVVDSPNSHNLAIFRDLPTWLESGDLLVFNDTRVIPARLFGRKTTGAPVEILLLEEQDDHRWLSLVKPGKRFKVGSEVLFYPKTGPTEDQEKLWLAKVIDRDLNTGGRLLQFQRHPRRSFWDMLEEYGHIPFPPYVTESEAEEDRYQTVYADKQGSVAAPTAGLHFTPELFHKLAQKGIDTAYITLHVGVGTFRPVEVENITEHLMHQEFLQISAETAEKIAQTKARGGRVIAVGTTVARALEGAIKESKSEKLTAFQGKTNLFVYPGYQWRVIDGMITNFHLPKSSLMMLVSALIGRERLLALYQEAIQEHFRFYSFGDAMLILPSARSSNR

SEQ ID NO: 68996 - protein, 365 aa, Microcystis flosaquae
  REGION 1..365: note = tr|A0A552L7T0|A0A552L7T0_9CHRO S-adenosylmethionine:tRNA ribosyltransferase-isomerase; OS = Microcystis flos-aquae Mf_WU_F_19750830_S460 OX=2486237; GN = queA PE=3 SV=1
MIPDQLLSSYDYHLPPELISQNPAEPRDSSRLLVVDSPNSHNLAIFRDLPTWLESGDLLVFNDTRVIPARLFGRKTTGAPVEILLLEEQDDHRWLSLVKPGKRFKVGSEVLFYPKTGRTEDKEKLWLAKIIDRDMNTGGRLLEFQRHPGRSFWDMLEEYGHIPFPPYVTESEAEEDRYQTVYADKQGSVAAPTAGLHFTPELFHKLAQKGIDTAYITLHVGVGTFRPVEVENIAEHIMHQEFLEISAETAEKIAQTKARGGRVIAVGTTVARALEGAIKETKSQKLTAFQGKTNLFVYPGYQWRVIDGMITNFHLPKSSLMMLVSALVGRERLLALYQAAIQERFRFYSFGDAMLILPSACSGNR

SEQ ID NO: 68997 - protein, 365 aa, unidentified
  source 1..365: note = Microcystis novacekii
  REGION 1..365: note = tr|A0A552J3Y2|A0A552J3Y2_9CHRO S-adenosylmethionine:tRNA ribosyltransferase-isomerase; OS = Microcystis novacekii Mn_MB_F_20050700_S1D OX=2486266; GN = queA PE=3 SV=1
MIPDQSLSSYDYHLPPELIAQNPAEPRDSSRLLVVDSPNSHHLAIFRDLPAWLEPGDLLVLNDTRVIPARLFGRKTTGAPIEILLLEEQDNYRWLSLVKPGKRFKVGSEVLFYPKTGRTENKEKLWLAKVIDRDLNTSGRLLEFQRHPGRSFWDMLEEYGHIPFPPYVTESEAEEDRYQTVYGNKQGSVAAPTAGLHFTPELFHKLAQKGIDTAYITLHVGVGTFRPVEVENITEHLMHQEFLQISAETAEKIAQTKARGGRIIAVGTTVARALEGAIKETKSEKLTAFQGKTNLFVYPGYQWRVIDGMITNFHLPKSSLMMLVSALIGRERLLALYQEAIQERFRFYSFGDAMLILPSARSINQ

SEQ ID NO: 68998 - protein, 365 aa, unidentified
  source 1..365: note = Microcystis panniformis
  REGION 1..365: note = tr|A0A0K1RVD7|A0A0K1RVD7_9CHRO S-adenosylmethionine:tRNA ribosyltransferase-isomerase; OS = Microcystis panniformis FACHB-1757 OX=1638788 GN=queA; PE = 3 SV=1
MIPDQSLSSYDYHLPPELIAQNPAEPRDSSRLLVVDSPNSYNLAIFRDLPTWLEPGDLLVLNDTRVIPARLFGRKTTGAPIEILLLEEQDDHRWLSLVKPGKRFKVGSEVLFYPKTGRTEDQAKLWLAKVIDRDLNTSGRLLEFQRHPGRSFWDMLEEYGHIPFPPYVTESEAEEDRYQTVYADKQGSVAAPTAGLHFTPELFHKLAQKGIDTAYITLHVGVGTFRPVEVENITEHLMHREFLEISAETAEKIAQTKARGGRVIAVGTTVARALEGAIKETKSDKLTAFQGKTNLFVYPGYQWRVIDGMITNFHLPKSSLMMLVSALVGRERLLALYQAAIQERFRFYSFGDAMLILPSACSSNQ

SEQ ID NO: 68999 - protein, 364 aa, unidentified
  source 1..364: note = Microcystis panniformis
  REGION 1..364: note = tr|A0A552PRN2|A0A552PRN2_9CHRO S-adenosylmethionine:tRNA ribosyltransferase-isomerase; OS = Microcystis panniformis Mp_MB_F_20051200_S9 OX=2486223; GN = queA PE=3 SV=1
MIPDQSLSSYDYHLPPELIAQNPAEPRDSSRLLVVDSPNSHNLAIFRDLPAWLEPGDLLVLNDTRVIPARLFGRKTTGAPIEILLLEEQDNYRWLSLVKPGKRFKVGSEVLFYPKTGRTEDKEKLWLAKVIDRDLNTSGRLLEFQRHPGRSFWDMLEEYGHIPFPPYVTESEAEEDRYQTVYADKQGSVAAPTAGLHFTPELFHKLAQKGIDTTYITLHVGVGTFRPVEVENITEHLMHQEFLEISAETAEKIAQTKARGGRVIAVGTTVARALEGAIKETKSDKLTAFQGKTNLFVYPGYQWRVIDGMITNFHLPKSSLMMLVSALVGRERLLALYQAAIQERFRFYSFGDAMLILPSARSSK

SEQ ID NO: 69000 - protein, 365 aa, Microcystis sp.
  REGION 1..365: note = tr|A0A2L2XQT1|A0A2L2XQT1_9CHRO S-adenosylmethionine:tRNA ribosyltransferase-isomerase; OS = Microcystis sp. 0824 OX=1502726 GN=queA PE=3 SV=1
MIPDQLLSSYDYHLPPELIAQNPAEPRDSSRLLVVDSPNSHNLAIFRDLPTWLESGDLLVFNDTRVIPARLFGRKTTGAPVEILLLEEQDDHRWLSLVKPGKRFKVGSEVLFYPKTGRTEDEAKLWLAKIIDRDMNTGGRLLEFQRHPGRSFWDMLEEYGHIPFPPYVTESEAEEDRYQTVYADKQGSVAAPTAGLHFTPELFHKLAQKGIDTAYITLHVGVGTFRPVEVENIAEHIMHQEFLEISAETAEKIAQTKARGGRVIAVGTTVARALEGAIKESKSEKLTAFQGKTNLFVYPGYQWRVIDGMITNFHLPKSSLMMLVSALIGRERLLALYQAAIQERFRFYSFGDAMLILPSARSSNR

SEQ ID NO: 69001 - protein, 365 aa, Microcystis sp.
  REGION 1..365: note = tr|A0A552CAN9|A0A552CAN9_9CHRO S-adenosylmethionine:tRNA ribosyltransferase-isomerase; OS = Microcystis sp. Msp_OC_L_20101000_S702 OX=2486218; GN = queA PE=3 SV=1
MIPDQSLSSYDYHLPPELIAQNPAEPRDSSRLLVVDSPNSHNLAIFRDLPTWLEPGDLLVLNDTRVIPARLFGRKTTGAPIEILLLEEQDNYRWLSLVKPGKRFKVGSEVLFYPKTGRTENKEKLWLAKVIDRDMNTSGRLLEFQRHPGRSFWDMLEEYGHIPFPPYVTESEAEEDRYQTVYADKQGSVAAPTAGLHFTPELFHKLAQKGIDTTYITLHVGVGTFRPVEVENITEHLMHREFLEISAETAEKIAQTKARGGRVIAVGTTVARALEGAIKETKSDKVTAFQGKTNLFVYPGYQWRVIDGMITNFHLPKSSLMMLVSALVGRERLLALYQAAIQERFRFYSFGDAMLILPSACSSNR

SEQ ID NO: 69002 - protein, 370 aa, unidentified
  source 1..370: note = Microcystis viridis
  REGION 1..370: note = tr|A0A3G9JKM9|A0A3G9JKM9_MICVR S-adenosylmethionine:tRNA ribosyltransferase-isomerase; OS = Microcystis viridis NIES-102 OX=213615 GN=queA PE=3 SV=1
MMTMTMTPDQLLSSYDYHLPPELIAQNPAETRDSSRLLVVDSPNSHNLAIFRDLPTWLESGDLLVFNDTRVIPARLFGRKTTGAPVEILLLEEQDDHRWLSLVKPGKRFKVGSEVLFYPKTGPTEDQEKLWLAKVIDRDLNTGGRLLQFQRHPRRSFWDMLEEYGHIPFPPYVTESEAEEDRYQTVYADKQGSVAAPTAGLHFTPELFHKLAQKGIDTAYITLHVGVGTFRPVEVENITEHLMHQEFLQISAETAEKIAQTKARGGRVIAVGTTVARALEGAIKESKSEKLTAFQGKTNLFVYPGYQWRVIDGMITNFHLPKSSLMMLVSALIGRERLLALYQEAIQEHFRFYSFGDAMLILPSARSSNR

SEQ ID NO: 69003 - protein, 365 aa, unidentified
  source 1..365: note = Microcystis viridis
  REGION 1..365: note = tr|A0A552I958|A0A552I958_MICVR S-adenosylmethionine:tRNA ribosyltransferase-isomerase; OS = Microcystis viridis Mv_BB_P_19951000_S68D OX=2486270; GN = queA PE=3 SV=1
MIPDQLLSSYDYHLPPELIAQNPAEPRDSSRLLVVDSPNSHNLAIFRDLPTWLESGDLLVFNDTRVIPARLFGRKITGAPVEILLLEEQDDHRWLSLVKPGKRFKVGSEVLFYPKTGPTEDKEKLWLAKVIARDLNTGGRLLEFQPHPGRSFWDILEEYGHIPFPPYVTESEAEEDRYQTVYGNKQGSVAAPTAGLHFTPELFHKLAQKGIDTAYITLHVGVGTFRPVEVENITEHLMHQEFLQISAATAEKIAQTKARGGRIIAVGTTVARALEGAIKESKSDKLTAFQGKTNLFVYPGYQWRVIDGMITNFHLPKSSLMMLVSALIGRERLLALYQEAIQERFRFYSFGDAMLILPSARSINQ

SEQ ID NO: 69004 - protein, 365 aa, unidentified
  source 1..365: note = Microcystis wesenbergii
  REGION 1..365: note = tr|A0A552JYK9|A0A552JYK9_9CHRO S-adenosylmethionine:tRNA ribosyltransferase-isomerase; OS = Microcystis wesenbergii Mw_QC_S_20081001_S30D; OX = 2486245 GN=queA PE=3 SV=1
MIPDQSLSSYDYHLPPELIAQNPAEPRDSSRLLVVDSPNSHNLAIFRDLPTWLEPGDLLVFNDTRVIPARLFGRKITGAPVEILLLEEQDDHRWLSLVKPGKRFKVGSEVLFYPKTGPTEDEEKFWLAKIIDRDLNTGGRLLEFQRHPGRSFWDMLEEYGHIPFPPYVTESEAEEDRYQTVYGDKQGSVAAPTAGLHFTPELFHKLAQKGIDTAYVTLHVGVGTFRPVEVENITEHIMHQEFLQISAETAEKIAQTKARGGRVIAVGTTVARALEGAIKETKSDKLTAFQGKTNLFVYPGYQWRVIDGMITNFHLPKSSLMMLVSALVGRERLLALYQAAIQERFRFYSFGDAMLILPSARSSNQ

SEQ ID NO: 69005 - protein, 365 aa, unidentified
  source 1..365: note = Microcystis wesenbergii
  REGION 1..365: note = tr|A0A552M9I3|A0A552M9I3_9CHRO S-adenosylmethionine:tRNA ribosyltransferase-isomerase; OS = Microcystis wesenbergii Mw_MB_S_20031200_S109D; OX = 2486241 GN=queA PE=3 SV=1
MIPDQLLSSYDYHLPPELIAQNPAEPRDSSRLLVVDSPNSHNLAIFRDLPTWLEPGDLLVFNDTRVIPARLFGRKITGAPVEILLLEEQDDHRWLSLVKPGKRFKVGSEVLFYPKTGRTEDKEKLWLAKVIDRDLNTGGRLLEFQPHPGRSFWDILEEYGHIPFPPYVTESGAEEDRYQTVYGNKQGSVAAPTAGLHFTPELFHKLAQKGIDTAYITLHVGVGTFRPVEVENITEHLMHQEFLQISAATAEKIAQTKARGGRIIAVGTTVARALEGAIKESKSDKLTAFQGKTNLFVYPGYQWRVIDGMITNFHLPKSSLMMLVSALIGRERLLALYQEAIQERFRFYSFGDAMLILPSARSINQ

SEQ ID NO: 69006 - protein, 347 aa, unidentified
  source 1..347: note = Microgenomates group
  REGION 1..347: note = tr|A0A0G1L2N0|A0A0G1L2N0_9BACT S-adenosylmethionine:tRNA ribosyltransferase-isomerase; OS = Microgenomates group bacterium GW2011_GWC1_44_23; OX = 1618523 GN=queA PE=3 SV= 1
MTLTNFNFDLPGDLIGQKAIEPRDSCRLLVVNRQNQSLTHNIFRDLPDILDEKCVLVLNDTKVFPARLYGTKVTGGKIEVLLLKQLSLNSFTCILRGKTKDSQKLIFSDNLSATVLGGEIKFSLSGTELLSALDALGKTPLPPYIHSTESEEKLREQYQTVYAREKGSAAAPTAGLHFTESLLSKLAEKGVQVEKITLHVGLGTFKPVTEEQIASKTLHSESFWLSAETAQRLNQAKKADKKIIAVGTTTCRVLESQARETGKLTAGEGETNLFIQSGFHFNFVDGLITNFHLPGTSLLMLVSAFVSAPNSPITFKIFKDSLVGRAYAEAIKNKYKFFSFGDAMMII

SEQ ID NO: 69007 - protein, 350 aa, unidentified; identical to SEQ ID NO: 64750
  source 1..350: note = Microgenomates group
  REGION 1..350: note = tr|A0A0G1QG49|A0A0G1QG49_9BACT S-adenosylmethionine:tRNA ribosyltransferase-isomerase; OS = Microgenomates group bacterium GW2011_GWA1_46_7; OX = 1618495 GN=queA PE=3 SV=1

SEQ ID NO: 69008 - protein, 351 aa, Microlunatus phosphovorus
  REGION 1..351: note = tr|F5XL99|F5XL99_MICPN S-adenosylmethionine:tRNA ribosyltransferase-isomerase OS=Microlunatus phosphovorus (strain ATCC 700054 / DSM 10555 / JCM 9379 / NBRC 101784 /NCIMB 13414 / VKM Ac-1990 / NM-1) OX=1032480 GN
MPTTLTETPSTIFTPPADAFAPAPPEARGGRRDTIRMLVAGPTSIEHARFAELPHYLRPGDVVVINNSATIAGEIDAVGIGGPVVLHLATVLDDGSWVLEVRTAPDARLSVLDAVAGQRFVSGGIALRLIEPYPHPGSSPTGIGNRLWRAASSGDVRAHLAATGRPIAYGYLDQRYPLADYQSVFATVPGSAEMPSAGRPFTTGLVTDLVSRGITVAPITLHTGLSSQEAGEAPQPERFEVPSATARLVNAARAGGGRVVAVGTTVTRALESAVDEGRLVPRRGWTERVVTPSDPPQIVTGLVTGWHDPQASHLLLVEAVAGAELTQRAYDAAVSLGYRWHEFGDSALLLP

SEQ ID NO: 69009 - protein, 363 aa, Microlunatus soli
  REGION 1..363: note = tr|A0A1H1M5Z1|A0A1H1M5Z1_9ACTN S-adenosylmethionine:tRNA ribosyltransferase-isomerase; OS = Microlunatus soli OX=630515 GN=SAMN04489812_0016 PE=3; SV = 1
MSLLTLTPTTVFPAPAAATAPRPAEERGLRRDEVRMLIARDSSITHARFHDLPAQLDPGDLLVVNDSATIAAECDARIGEDPVVLHVASRLGDHDWAVELRTAPDAARAILDAAVGTEVVLDGDDGVLELVAPYPAPGSSPTGRGTRLWRAAYEGHAPLLDLLDRVGRPIAYGYLDRRYPLSAYQTVFGLRPGSAEMPSASRPFTPELVTRLVAGGVGITPITLHTAVSSQEAGEAPLPEQFTVPSVTARAINTARDAGHRVVAVGTTAARAVESAVEETGAGSVAVPRSGWTDRVITVAEPPRLIDGLISGWHDPQASHLLLVEAVAGAELTQRAYDAAAATGYLWHEFGDSALLLPDRRTG

SEQ ID NO: 69010 - protein, 358 aa, Microlunatus sp.
  REGION 1..358: note = tr|A0A516Q058|A0A516Q058_9ACTN S-adenosylmethionine:tRNA ribosyltransferase-isomerase; OS = Microlunatus sp. KUDC0627 OX=2596828 GN=FOE78_13710; PE = 3 SV=1
MRALTSVPRTVFPAPSASTAPAPAEARGLARDEVRLLVARPGNIEHTQFRQLPDQLTAGDLLVINTSATVPGEIDAYAADGRPIVLHLATRLDDGSLVVELRTAPDAARAVLDAAPGQELTIGGVRLRLIEPYPRAGSTPTGEGNRLWRARADGDLAGELDRRGRPIAYGYLDRRYPLSAYQSVFASVPGSAEMPSAGRPFSESLITRLVAAGIRFAPITLHTGVSSQEAGEAPQPEWYDVPATTSDQINHTRETGGRVIAVGTTATRAVESAVGPDGTVRSFRGWTDRVISPDAPARVVTGLITGWHDPHASHLLLVESIAGPELTQAAYDAAVEQHYLWHEFGDSALLLPEMASTS

SEQ ID NO: 69011 - protein, 106 aa, unidentified
  source 1..106: note = Micromonospora ureilytica
  REGION 1..106: note = tr|A0A3N9Y7X1|A0A3N9Y7X1_9ACTN S-adenosylmethionine:tRNA ribosyltransferase-isomerase (Fragment) OS=Micromonospora ureilytica OX=709868; GN = DDE19_00130 PE=3 SV=1
MKLTDLDFSYPEELIATSPVRPSRVMWVEGELEPQEISLQDLLSRIPAGDVLVVNNTRVLKRLVFSGDVEILFLKQINATDWEVLFPSKKFKIGSVLELPLGVQMT

SEQ ID NO: 69012 - protein, 330 aa, unidentified
  source 1..330: note = Micromonosporaceae bacterium
  REGION 1..330: note = tr|A0A3D4WX13|A0A3D4WX13_9ACTN S-adenosylmethionine:tRNA ribosyltransferase-isomerase; OS = Micromonosporaceae bacterium OX=1873464 GN=DGG94_09975; PE = 3 SV=1
MTATTFDFTLSPDLEAHEPPEARGLARDQVRMLVGGPDGVAHHHFPELPHLLEPGDVLVVNNSATMPAAVSTVDGQLAVHFSTQLPDGSWVIEPRHYQGTPGERLRLPGGVSAVLKEVYSERLWIADIDVASIPGYLMKYGRPIRYPYVARDWPLSTYHSVFATELGSAEMPSASRPFTEHMVTRLASRGIVIAPITLHTGVASPEAHEKPYPERYSVPANTARLANEAKAAGQRIIAVGTTAVRALETAARPDGMVQASHGWTDLLVTPESGVLVTDGLLTGFHEPRASHLLMLEAIAGSELLSRCYSAAIAEGYLWHEFGDLNLLLAR

SEQ ID NO: 69013 - protein, 415 aa, Microscilla marina
  REGION 1..415: note = tr|A1ZDV0|A1ZDV0_9BACT S-adenosylmethionine:tRNA ribosyltransferase-isomerase OS=Microscilla marina ATCC 23134 OX=313606 GN=queA PE=3 SV=1
MSNQSIDNLPPVYLTDYNYTLPEERIAKSPLMQRDQSKLLVYQSGNIQHQHFYDLPQHLPADTMLVFNNTKVIPARLYFQKPTGALIEVFLLKPEAPHEIAAAMHTGNGCIWHCMIGNKRKWNKGLILEQVLPNGLVLKAELTDSEKQWVRFEWNNSHVSFAEVLAMTGELPLPPYLKRKATQKDADQYQTVYSKFEGAVAAPTAGLHFTPEVISQLQDKGIQTEFLTLHVSAGTFQPVKVENVIEHDMHSEQLVIHKQNIEHLLHHSGNIVAVGTTSMRVLESVYWLGVRLLKENYELLPGTPFQIDKLLPYQWENNDLPTRQEALQAILNYMNRQELGKLWGATEIFIFPRYEFKMCKGLITNYHLPKTTLILLVAAFVGNDWEKIYNEALAKDYRFLSYGDSSLLWCNEASK

SEQ ID NO: 69014 - protein, 350 aa, Microscilla marina
  REGION 1..350: note = tr|A1ZRB5|A1ZRB5_9BACT S-adenosylmethionine:tRNA ribosyltransferase-isomerase OS=Microscilla marina ATCC 23134 OX=313606 GN=queA PE=3 SV=1
MKLSEFKFDFPTDLLALHPTDNRDESRLMVIHRDSGKIEHKVFKDIVDYFDEGDVFVVNDTKVFPARLFGSKEKTGAQIEVFLLRELNQEAHLWDVLVDPARKIRVGNKLFFGNGELVAEVIDNTTSRGRTIRFLTDRSDEEFYQLIDELGETPLPKHIYQQRKTDAHDRERFQTIFAEHVGAVAAPTAGLHFTKQLIKRLELKGIDMTPVTLHIGLGTFRDVDVEDLTKHKADSENFSVPANTTDKVNDALANKKRVCAIGTTVVKALESSVSANSLLKENAGWSDKFIFPPYEFKIPNALVTNFHLPESTLLMTACAFGGYELIMDAYQVAVKEKYRFFSYGDAMLIL

SEQ ID NO: 69015 - protein, 351 aa, unidentified
  source 1..351: note = Microscillaceae bacterium
  REGION 1..351: note = tr|A0A349DW04|A0A349DW04_9BACT S-adenosylmethionine:tRNA ribosyltransferase-isomerase; OS = Microscillaceae bacterium OX=2053581 GN=DCS93_28575; PE = 3 SV=1
MQITNNSLIQFELPQHLACPLPTELRNMPRDAVRLLVTTGAGEASHDVFSNFDQYLQAGDVLVVNTSATVASAFAITLPNGKPGRLHLSTQLSDKEWLIEIRAIEGNTTTRWKAGQEGMKFKLPENVTVKLKERFYKNDQLLDLWVAEFDIRQEEEGYRHRYGQPIKYTQLENPFPLSYYQTFFSFHLGSAEMPSAGRGFTESLLRKLVRKGVVLAPITLHTGVSSLEEDEKPYPEYMEINPVTALLINTAKEEGRRVVAVGTTAIRAIESVANAQGQVKAFRGHTDLYIEDTHQMRVADGLLTGFHEPKASHLHMLQSLAGFEHIERAYQQAIEADYYWHQFGDLHLILA

SEQ ID NO: 69016 - protein, 411 aa, unidentified
  source 1..411: note = Microscillaceae bacterium
  REGION 1..411: note = tr|A0A349DVW9|A0A349DVW9_9BACT S-adenosylmethionine:tRNA ribosyltransferase-isomerase; OS = Microscillaceae bacterium OX=2053581 GN=queA PE=3 SV=1
MNPQNTHHLSPVYLRDYDYTLPEERIAKRPLEQRDHSKLLVYKSGNINHQHFYDLPQYLPADTLLAFNDTKVIPARLYFQKPTGAVIEVFLLKPTNPPEIAAAMHKSQECTWQCMIGNKRKWSQDLVLEQTLPGGLILKANLVNRDNNEVAFSWNDAQMSFAEILAIIGELPLPPYLKRKATKKDEDQYQTVYSKFEGAVAAPTAGLHFTEEVIQALEQNGVQTEYLTLHVSAGTFQPVKVDNVLEHEMHSEQIIVRRKNIEQLAQHAHPVVAVGTTSMRVLESIYWLGVRIIKEKYEPQLDRPFQIEKLYPYQWENEALPTRQESMQAILQFMEAQQLEKLWGATEIFIFPGYDFKMCNGLITNYHLPKTTLILLIAAFVGEDWRKIYNEALENDYRFLSYGDSSLLWRS

SEQ ID NO: 69017 - protein, 367 aa, Microvirga aerophila
  REGION 1..367: note = tr|A0A512BZC8|A0A512BZC8_9RHIZ S-adenosylmethionine:tRNA ribosyltransferase-isomerase; OS = Microvirga aerophila OX=670291 GN=queA PE=3 SV=1
MSQGFMRVDLFDFDLPESSISLRPTEPRDAARMLVVKPDEVPFEDRTVRDLPDLLQPGDVLVLNDTKVIPSRLYGLRVREETAARVEIMLHKREGMDRWRAFARPAKKLNIGDRIRFGEASESTACELVRVDAEVEEKGDGGEVTLRFSFAGPFLDEAIARLGELPLPPYIAGKRATDEKDRADYQTVYARDEGAVAAPTAGLHFTDDLFRRLEERGIGRQFVTLHVGAGTFLPVKADDTAEHRMHAEWGTVTEETARALNEARARGGRVVAVGTTSLRLLESAAEEDGTIAPFSGDTAIFITPGYRFKAVDVLMTNFHLPRSTLFMLVSAFAGLQRMRAAYSHAIEAGYRFYSYGDASLLFRAKPS

SEQ ID NO: 69018 - protein, 358 aa, Microvirga guangxiensis
  REGION 1..358: note = tr|A0A1G5AZ46|A0A1G5AZ46_9RHIZ S-adenosylmethionine:tRNA ribosyltransferase-isomerase; OS = Microvirga guangxiensis OX=549386 GN=queA PE=3 SV=1
MRVDLFDFELPEQNIALRPAEPRDAARMLVVRPESRLEDRVVRDLPDLLQPGDVLVLNDTKVIPSRLYGLRVREETAARVEIMLHKREGADRWRAFARPAKKLNVGDRIRFGEQADSTACELVRLDAEVIEKGEGGDVALRFSFSGPFLDEAIARLGELPLPPYIAGKRATDEKDRTDYQTVYAKDEGAVAAPTAGLHFTDELFRRLDERGIARHFVTLHVGAGTFLPVKADDTDEHRMHAEWGTITEATAQALNQARARGGRIVAVGTTSLRLLESAAREDGTIAPFSSDTAIFITPGYRFKAVDVLMTNFHLPRSTLFMLVSAFAGLDCMHAAYAHAIETGYRFYSYGDASLLFRR

SEQ ID NO: 69019 - protein, 358 aa, unidentified
  source 1..358: note = Microvirga lotononidis
  REGION 1..358: note = tr|I4YMX7|I4YMX7_9RHIZ S-adenosylmethionine:tRNA ribosyltransferase-isomerase OS=Microvirga lotononidis; OX = 864069 GN=queA PE=3 SV=1
MRVDLFDFDLPETNIALRPVEPRDAARMLVVRPETGLEDRIVRDLPDLLQPGDVLVLNNTKVIPSRLYGLRVREENAARVEIMLHKREGADHWRAFARPAKKLHVGDRIRFGDPSESTACELVRLDAEVVEKGEGGDVALRFSFAGAFLDEAIARLGELPLPPYIAGKRPTDDKDLSDYQTVYAKDEGAVAAPTAGLHFTDGLFRRLDERGVARHFVTLHVGAGTFLPVKADDTDEHRMHAEWGSVSEETARALNEARARGGRIVAVGTTSLRLLESAAREDGSIAPFSGDTAIFITPGYRFKAVDVLMTNFHLPRSTLFMLVSAFAGLDCMRGAYAHAIETGYRFYSYGDASLLFRR

SEQ ID NO: 69020 - protein, 358 aa, unidentified
  source 1..358: note = Microvirga ossetica
  REGION 1..358: note = tr|A0A1B2EKQ3|A0A1B2EKQ3_9RHIZ S-adenosylmethionine:tRNA ribosyltransferase-isomerase; OS = Microvirga ossetica OX=1882682 GN=queA PE=3 SV=1
MRVDLFDFELPETSIALRPVEPRDRARMLVVRPGSGLEDRSVHDLPDLLQPGDVLVLNDTKVIPSRLYGLRMREDTAARVEIMLHKRESADRWRAFARPAKKLHVGDRIRFGESSESTACELVRLDAEVEEKGEGGDVALRFSFSGAFLDEAIARLGELPLPPYIAGKRPTDDKDRADYQTVYAKDEGAVAAPTAGLHFTDDLFRRLDERGVSRHFVTLHVGAGTFLPVKADDTAEHRMHAEWGSVSEETARALNAARARGGRIVAVGTTSLRLLESAAREDGTIAPFSGDTAIFITPGYRFKAVDVLMTNFHLPRSTLFMLVSAFAGLERMKAAYAHAVETGYRFYSYGDASLLFRR

SEQ ID NO: 69021 - protein, 358 aa, Microvirga sp.
  REGION 1..358: note = tr|A0A2T7U4P1|A0A2T7U4P1_9RHIZ S-adenosylmethionine:tRNA ribosyltransferase-isomerase; OS = Microvirga sp. KLBC 81 OX=1862707 GN=queA PE=3 SV=1
MRVDLFDFELPEQNIALRPVEPRDSARILVVRPDSGFEDRIVRDLPDLLQPGDVLVLNNTKVIPSRLYGLRVREETAARVEIMLHKREGADRWRAFARPAKKLNVGDRIRFGEESESTACELVRLDAEVLEKAEGGDVALRFSFSGPFLDEAIARLGELPLPPYIAGKRATDEKDRTDYQTVYAKDEGAVAAPTAGLHFTDELFRRLDERGIAHHFVTLHVGAGTFLPVKAEDTTEHRMHAEWGTVTEETARALNEARARGGRIVAVGTTSLRLLESAACEDGTIAPFSGDTAIFITPGYRFKAVDVLMTNFHLPRSTLFMLVSAFAGLERMRTAYQHAIETGYRFYSYGDASLLFRR

SEQ ID NO: 69022 - protein, 358 aa, Microvirga sp.
  REGION 1..358: note = tr|A0A086MIW2|A0A086MIW2_9RHIZ S-adenosylmethionine:tRNA ribosyltransferase-isomerase; OS = Microvirga sp. BSC39 OX=1549810 GN=queA PE=3 SV=1
MRVDLFDFDLPETSIALRPVEPRDAARMLVVSPEQGLDDRIVRDLPDLLQPGDVLVLNDTKVIPSRLYGLRMREETAARVEIMLHKREGADRWRAFARPAKKLNVGDRIRFGEATESTACELVRLDAEVEEKGEGGDVALRFSFAGAFLDEAIARLGELPLPPYIAGKRPTDDKDRADYQTVYAKDEGAVAAPTAGLHFTEDLFRRLDERGVTRHFVTLHVGAGTFLPVKAEDTAEHRMHAEWGSVSEETARALNEARARGGRIVSVGTTSLRLLESAAREDGTIAPFSGDTAIFITPGYRLKAVDVLMTNFHLPRSTLFMLVSAFAGLDCMRAAYAHAIETGYRFYSYGDASLLFRR

SEQ ID NO: 69023 - protein, 359 aa, Microvirga subterranea
  REGION 1..359: note = tr|A0A370HNY0|A0A370HNY0_9RHIZ S-adenosylmethionine:tRNA ribosyltransferase-isomerase; OS = Microvirga subterranea OX=186651 GN=queA PE=3 SV=1
MRVDLFDFDLPESSIALRPVEPRDAARMLVVRPDESPFEDRFVRDLPDLLQPGDVLVLNDTKVIPSRLYGLRVREETAARVEIMLHKRESADSWRAFARPAKKLNVGDRIRFGEAAESTACELVRLDAEVEEKGEGGDVRLRFSFSGPFLDEAIARLGELPLPPYIAGKRPTDDKDLRDYQTVYAKDEGAVAAPTAGLHFTESLFRRLEERGIARHFVTLHVGAGTFLPVKAEDTAEHRMHAEWGTVTEATARALNEARARGGRIVAVGTTSLRLLESAAREDGTIAPFSGDTAIFITPGYRFKAVDVLMTNFHLPRSTLFMLVSAFAGLERMRAAYAHAIETGYRFYSYGDSSLLFRR

SEQ ID NO: 69024 - protein, 358 aa, unidentified
  source 1..358: note = Microvirga vignae
  REGION 1..358: note = tr|A0A0H1RAY9|A0A0H1RAY9_9RHIZ S-adenosylmethionine:tRNA ribosyltransferase-isomerase; OS = Microvirga vignae OX=1225564 GN=queA PE=3 SV=1
MRVDLFDFELPEQNIALRPVEPRDSARMLVVRPGSDFEDGKVRDLPDLLLPGDVLVLNDTKVIPSRLYGLRVREETAARVEIMLHKREGADRWRAFARPAKKLNVGDRIRFGEETESTVCELVRLDAEVIEKGEGGDVALRFSFSGPFLDEAIARLGELPLPPYIAGKRATDEKDRTDYQTVYAKDEGAVAAPTAGLHFTDELFRRLGERGIERHFVTLHVGAGTFLPVKAEDTTEHRMHAEWGTVAEETARALNEARARGGRIVAVGTTSLRLLESAVCEDGTIAPFSGDTAIFITPGYRFKAVDVLMTNFHLPRSTLFMLVSAFAGLERMRAAYTHAIETGYRFYSYGDASLLFRR

SEQ ID NO: 69025 - protein, 342 aa, Microvirgula sp.
  REGION 1..342: note = tr|A0A329B960|A0A329B960_9NEIS S-adenosylmethionine:tRNA ribosyltransferase-isomerase; OS = Microvirgula sp. AG722 OX=2183901 GN=queA PE=3 SV=1
MLLSEFDYDLPERLIAQFPPEQRGNSRLLHVEGDRLSDLRFPDLIGLLAPGDLLVMNDTRVIKARLYGRKASGGAIEALVERVLDDHHALAHVRASKSPKPGTRLLFADRWEAEMVERQGELFLLRFLGDRDVYAILDDAGKLPLPPYIERAAGGDDESRYQTVYARERGAVAAPTAGLHFTDEILAAIRARGIGTATVTLHVGAGTFQPVRVDNIDEHKMHSERFEIPVGTVDAIAACHAAGGRVVAVGTTSMRALEAAAQDGALRAGRGETDIFITPGYRFRVVDRLLTNFHLPKSTLLMLVSAFAGIDTLRGAYRHAVEQEYRFFSYGDAMLLEKETRA

SEQ ID NO: 69026 - protein, 199 aa, unidentified
  source 1..199: note = Midichloria mitochondrii
  REGION 1..199: note = tr|F7XVY7|F7XVY7_MIDMI S-adenosylmethionine:tRNA ribosyltransferase-isomerase OS=Midichloria mitochondrii (strain IricVA) OX=696127 GN=midi_00531 PE=3 SV=1
MPLPPYIKRENAHSNDFDSYQTVYSKRYGTFAAPTAGLHFTQNLLEKIAQKGVNIQFLTLHVGLGTFAPIKTQNIEEHKMHTENFILNQSVCEAVNYAKQNGNKVICVGTTTMRVLESVAVNNMVTPQIGETDIFIKPGHKFQIADALITNFHLPKSTLLVLVSAFIGNTNVDKVYQYAIEQKYRFFSYGDACYFSKPT

SEQ ID NO: 69027 - protein, 102 aa, unidentified
  source 1..102: note = Midichloria mitochondrii
  REGION 1..102: note = tr|F7XVY9|F7XVY9_MIDMI S-adenosylmethionine:tRNA ribosyltransferase-isomerase OS=Midichloria mitochondrii (strain IricVA) OX=696127 GN=midi_00533 PE=3 SV=1
MNIDEFDFVLPKELIAQFPANPRGSSKLLYFDPHHKIHDQVFDYIVNILNPSDVLVFNDTKVIPSLLKIHSINAKKTNASLNIVHQINDSSWQVMAPSQQIN

SEQ ID NO: 69028 - protein, 348 aa, unidentified
  source 1..348: note = Minicystis rosea
  REGION 1..348: note = tr|A0A1L6LC21|A0A1L6LC21_9DELT S-adenosylmethionine:tRNA ribosyltransferase-isomerase; OS = Minicystis rosea OX=888845 GN=A7982_04610 PE=3 SV=1
MGGGVVSPATWPREDPLSERLLWIDPRAGTLRDGHVRDLPELLRAGDLLVVNDSATLPASLRGVTGNGAPVEARLAGAGEGDDVFRAVLFGAGDHRTRTEDRAPPPVLFAGDRIAFGPGLAATIARVSPISSRLVDLAFDTKGAALWTALYRQGRPVQYAYVAAPLELWHTQTRYGSRPWSAEMPSAGRPLGWSLILEAIRRGVTIARLTHAAGLSSTGDPLLDAALPLPERFDIPEETVRAIAETRARGGRVIAVGTTVARALEGSAALHDGTVMAGEGVTDLVLDHTSRPRVVDGLLTGMHEPTASHFHLLEAFASPALLRRAHAHAEEIGYLGHEFGDSTLVLPA

SEQ ID NO: 69029 - protein, 373 aa, unidentified
  source 1..373: note = Minicystis rosea
  REGION 1..373: note = tr|A0A1L6KZP0|A0A1L6KZP0_9DELT S-adenosylmethionine:tRNA ribosyltransferase-isomerase; OS = Minicystis rosea OX=888845 GN=queA PE=3 SV=1
MRRALFDYRLPPELIAAHPPAERDGARLLVLGGGAPEQTEVRAIERFIAPGTLLVVNDTRVIPARLLGHKVGTGGRVEIFLVRRLGEGEVADGDRTLRAERWSALGRSSKPLRRGSRIVVDAVSKQQYPRPPLCVEIISAGNAGMFEVDLFSPADLPIEQAIEACGHVPLPPYVHRKDDAADRERYQTVFARVPGAVAAPTAGLHLTTELLDRLRARGAEIASVTLHVGLGTFQPVTVDDLDDHPMHAEIFAVPAETVAAVARARDRGAPVLAIGTTAVRALESAADPDRPGLVRAMEGETRLLIQPGYRFRVVDQLLTNFHLPESTLLAMVSAFAGRERVLAAYQAAIDARYRFYSYGDAMLILSRADGGAV

SEQ ID NO: 69030 - protein, 345 aa, unidentified
  source 1..345: note = Minwuia thermotolerans
  REGION 1..345: note = tr|A0A2M9G148|A0A2M9G148_9PROT S-adenosylmethionine:tRNA ribosyltransferase-isomerase; OS = Minwuia thermotolerans OX=2056226 GN=queA PE=3 SV=1
MKVDLFDFDLPSDRIALRPAEPRESARLLEVRAAGLGHFRIADLPGLLRPGDMLVVNDTRVIPARLKGRRGEAKVEATLHMRIDGRTWAAFARPAKRLRPGDRIEFGGALSAEVVERRDGGEVVLRFDRADDALFQALHAAGEMPLPPYIASKRPVDVRDFSDYQTVMADRPGAVAAPTAGLHLTEALFTELAARDIAVHRLTLHVGAGTFLPVKADDTADHRMHAEVGEIAATTAEALNRGRAAGGRIVAVGTTSLRLLESAVDAAGDIRAFSGATDIFITPGHRFRTADMLLTNFHLPRSTLFMLVSAFSGLERMKAAYAEAIERDYRFYSYGDACLLHRVEP

SEQ ID NO: 69031 - protein, 351 aa, Mitsuaria sp.
  REGION 1..351: note = tr|A0A1A9HRZ6|A0A1A9HRZ6_9BURK S-adenosylmethionine:tRNA ribosyltransferase-isomerase; OS = Mitsuaria sp. 7 OX=1658665 GN=queA PE=3 SV=1
MSRTYSVSDFDFALPPDLIAQHPAAERSASRLLDGRSDPPVDRVFRELPELLNPGDLLVFNDTKVIKARLYGAKASGGAVEALVERVLPGTREVWAHMRASKSPKAGAVVRFADAFDAEVLGRCGPDDGLFHLRLSGDPFELLEQHGHVPLPPYIEHGDSADDVRRYQTVFAREPGAVAAPTAALHFDEALLARLAERGVGTAHVTLHVGAGTFQPVRVESLAEHKMHSEWFQVTPGTVDAIARCRAAGGKVTAVGTTTLRALESAALVGGLQAGARETDIFITPGFDFQVVDRLVTNFHLPKSTLMMLVSAFAGYEPIMALYRHAIEQRYRFFSYGDAMLLERAQERSGD

SEQ ID NO: 69032 - protein, 347 aa, Mitsuaria sp.
  REGION 1..347: note = tr|A0A1I6KRC5|A0A1I6KRC5_9BURK S-adenosylmethionine:tRNA ribosyltransferase-isomerase; OS = Mitsuaria sp. PDC51 OX=1881035 GN=queA PE=3 SV=1
MSRHFTVSDFDFALPPELIAQHPAAERSASRLLDGRADPPVDRVFRELPELLHPGDLLVFNDTKVIKARLYGAKASGGAVEALVERVLPGTREVWAHMRASKSPKPGAVVRFAEAFDAEVLGRCGPDDGLFHLRLSGDPFELLERHGHVPLPPYIAHDDSADDVRRYQTVFAREPGAVAAPTAALHFDEALLARLAERGIGTAHVTLHVGAGTFQPVRVESLAEHKMHSEWFQVTPETVDAIARCRAAGGKVTAVGTTTLRALESAALGGGLKAGARETDIFITPGFDFQVVDRLVTNFHLPKSTLMMLVSAFAGYEPIMALYRHAIAQRYRFFSYGDAMLLERARG

SEQ ID NO: 69033 - protein, 368 aa, Mitsuokella jalaludinii
  REGION 1..368: note = tr|A0A173XH19|A0A173XH19_9FIRM S-adenosylmethionine:tRNA ribosyltransferase-isomerase; OS = Mitsuokella jalaludinii OX=187979 GN=queA PE=3 SV=1
MLLSDFDYDLPEERIAQVPIEPRNASRLMVLDPVEKTIEHRHFYDLKEYLEPGDTLIFNDTRVMPARLIGHRDQTGGKVEVFLLRRLDANHWETLVKPGKKAKPGNVIRFGAELSCTVTEHTDFGGRIVEFHYDGIFEEILDRLGETPLPPYIHEKLEDKERYQTVYNREEGSAAAPTAGLHFTKEQMQELREMGVNLGFVTLHVGLGTFRPVSVDNIEEHEMHKEYYCIPDETAKLIMDTKKAGHRVIAVGTTSIRTLESAATAKNEIAGKSGWTGIFIYPGYDFKIVDAIITNFHLPKSTLIMLISAFAGRSFILSAYKTAVEQKYRFFSFGDAMFLQRPQPLAERAKELKELEELDRQREAEKKE

SEQ ID NO: 69034 - protein, 368 aa, Mitsuokella multacida
  REGION 1..368: note = tr|C9KK56|C9KK56_9FIRM S-adenosylmethionine:tRNA ribosyltransferase-isomerase OS=Mitsuokella multacida DSM 20544 OX=500635 GN=queA PE=3 SV=1
MLLSDFDYDLPEERIAQVPIEPRNASRLMVLDPVTKEIEHRHFYDLKEFLEPGDTLIFNDTRVMPARLIGHRDQTGGRVEVFLLRRLDANHWETLVKPGKKAKPGNVIRFGDELSCTVTEHTDFGGRIVEFHYDGIFEEILDRLGETPLPPYIHEKLEDKERYQTVYNREEGSAAAPTAGLHFTKEQMQELREMGVNLGFVTLHVGLGTFRPVNVENIEEHEMHKEYYCIPDETAKLIMDTKKAGHRVIAVGTTSIRTLESAATAKNEIAGKSGWTGIFIYPGYDFKIVDAIITNFHLPKSTLIMLISAFAGRNFVLNAYKTAVEMKYRFFSFGDAMFIRRKQPDAERAEELKELEELDRQREAEGKA

SEQ ID NO: 69035 - protein, 366 aa, Mitsuokella multacida
  REGION 1..366: note = tr|A0A356UKW3|A0A356UKW3_9FIRM S-adenosylmethionine:tRNA ribosyltransferase-isomerase; OS = Mitsuokella multacida OX=52226 GN=queA PE=3 SV=1
MLLSDFDYDLPEERIAQVPIEPRNASRLMVLDPVEKTIEHRHFYDLKEFLEPGDTLIFNDTRVMPARLIGHRDQTGGKVEVFLLRRLDANHWETLVKPGKKAKPGNVIRFGDELSCTVTEHTDFGGRIVEFHYDGIFEEILDRLGETPLPPYIHEKLEDKERYQTVYNREEGSAAAPTAGLHFTKEQMQELREMGVNLGFVTLHVGLGTFRPVNVENIEEHEMHKEYYCIPDETAKLIMDTKKAGHRVIAVGTTSIRTLESAATAKNEIAGKSGWTGIFIYPGYDFKIVDAIITNFHLPKSTLIMLISAFAGRNFVLNAYKTAVEMKYRFFSFGDAMFIRRKQPDAERAEELKELELDILTLSKAP

SEQ ID NO: 69036 - protein, 371 aa, Mitsuokella sp.
  REGION 1..371: note = tr|A0A415RA37|A0A415RA37_9FIRM S-adenosylmethionine:tRNA ribosyltransferase-isomerase; OS = Mitsuokella sp. AF33-22 OX=2292047 GN=queA PE=3 SV=1
MLLSDFDYDLPEERIAQVPIEPRNASRLMVLDPVEKTIEHRHFYDLKEFLVPGDTLIFNDTRVMPARLIGHRDQTGGKVEVFLLRRLDATHWETLVKPGKKAKPGNVIRFSDELSCTVTEHTDFGGRIVEFQFDGIFEEILDRLGETPLPPYIHEKLEDKERYQTVYNREEGSAAAPTAGLHFTKEQMQELRDMGVNLGFVTLHVGLGTFRPVNVDNIEDHEMHKEYYCIPDETAKLIMDTKKAGHRVIAVGTTSIRTLESAATAKNEIAGKSGWTGIFIYPGYGFKIVDALITNFHLPKSTLIMLISAFAGRKFVLQAYKTAVEMKYRFFSFGDAMLVTRKQPDAERNQEVAELEELDRQRQAEAGKDNE

SEQ ID NO: 69037 - protein, 347 aa, Mitsuokella sp.
  REGION 1..347: note = tr|U2TAU5|U2TAU5_9FIRM S-adenosylmethionine:tRNA ribosyltransferase-isomerase OS=Mitsuokella sp. oral taxon 131 str. W9106 OX=1321781 GN=queA PE=3 SV=1
MQLSEFDYDLPEERIAQTPIEPRNASRLMVLDPASWQIEHRHFYDLKEYLMPGDTLILNDTRVMPARLVGHRDQTGGKVEVFLLRRLDGNRWESLVKPGKKAKDGTRIRFGAELSCVVKAHTDFGGRIVEFEYEGIFEEILDRLGEMPLPPYIHEKLADKERYQTVYNREEGSAAAPTAGLHFTKEQLKEIRAMGVHIGFVTLHVGLGTFRPVHVDTIEEHEMHSEYYSISDETAQLIMNTKAAGHRVIAVGTTSIRTLESAADAKHGISGKTGWTNIFIYPGYDFKIVDAIITNFHLPKSTLIMLISAFAGRELVLHAYKMAVEMKYRFFSFGDAMLIRSKAANPQ

SEQ ID NO: 69038 - protein, 356 aa, unidentified
  source 1..356: note = Mixta gaviniae
  REGION 1..356: note = tr|A0A1X1DSM8|A0A1X1DSM8_9GAMM S-adenosylmethionine:tRNA ribosyltransferase-isomerase; OS = Mixta gaviniae OX=665914 GN=queA PE=3 SV=1
MRVADFSFELPESLIAHYPQPQRSGCRLLSLNGPDGALSHGVFTDVLDKLNPGDLLVFNNTRVIPARVYGRKASGGKIEMLVERMLDDKRVLAHVRASKAPKPGAALLFGDDESVRATMVARHDALFEIVFDDARGVLDILNAIGHMPLPPYIDRPDEEADRELYQTVYSQKPGAVAAPTAGLHFDEPLLAALREKGVEMAFVTLHVGAGTFQPVRVDSIEDHIMHSEYAEVPQEVVDAVLACKARGNRVVAVGTTSVRSLESAAQAAQDALIAPFFDDTQIFIYPGYHYQVIDALITNFHLPESTLIMLVSAFAGYRHTMNAYHAAVAEQYRFFSYGDAMFITRNPQAPDEKVGA

SEQ ID NO: 69039 - protein, 356 aa, unidentified
  source 1..356: note = Mixta sp.
  REGION 1..356: note = tr|A0A506V7I3|A0A506V7I3_9GAMM S-adenosylmethionine:tRNA ribosyltransferase-isomerase; OS = Mixta sp. BIT-26 OX=2562439 GN=queA PE=3 SV=1
MRVADFSFALPESLIAHYPQPQRSGCRLLSLNGPDGALSHGVFTDVLDKLNPGDLLVFNNTRVIPARVYGRKASGGKIEMLVERMLDDKRVLAHVRASKAPKPGAELLFGDDESVRATMVARHGALFEIEFADARSVLDILNAIGHMPLPPYIDRPDEEADRELYQTVYSAKPGAVAAPTAGLHFDEPLLAALREKGVEMAFVTLHVGAGTFQPVRVDSIEDHIMHSEYAEVPQEVVDAVLACKARGNRVVAVGTTSVRSLESAAQAAGDALIAPFFDDTQIFIYPGYRYQLIDALITNFHLPESTLIMLVSAFAGYRHTMNAYREAVAQQYRFFSYGDAMFITRNPQAPDEKVGA

SEQ ID NO: 69040 - protein, 356 aa, unidentified
  source 1..356: note = Mixta theicola
  REGION 1..356: note = tr|A0A2K1QC64|A0A2K1QC64_9GAMM S-adenosylmethionine:tRNA ribosyltransferase-isomerase; OS = Mixta theicola OX=1458355 GN=queA PE=3 SV=1
MRVADFSFELPESLIAHYPQPQRSGCRLLSLNGPDGALSHGVFTDVLDKLNPGDLLVFNNTRVIPARVYGRKASGGKIEMLVERMLDDKRVLAHVRASKAPKPGAELLFGDDESVRATMVARHDALFEIEFDDARSVLDILNAIGHMPLPPYIDRPDEEADRELYQTVYSQKPGAVAAPTAGLHFDEPLLAALREKGVEMAFVTLHVGAGTFQPVRVDSIEDHIMHSEYAEVPQEVVDAVLACKARGNRVVAVGTTSVRSLESAAQAAQNTLIAPFFDDTQIFIYPGYRYQVIDALITNFHLPESTLIMLVSAFAGYRHTMSAYHEAVAEQYRFFSYGDAMFITRNPQAPDEKVGV

SEQ ID NO: 69041 - protein, 355 aa, unidentified
  source 1..355: note = Mizugakiibacter sediminis
  REGION 1..355: note = tr|A0A0K8QRE9|A0A0K8QRE9_9GAMM S-adenosylmethionine:tRNA ribosyltransferase-isomerase; OS = Mizugakiibacter sediminis OX=1475481 GN=queA PE=3 SV=1
MKKSDFHYDLPAELIAQAPLPERSASRLLVLDAAARAWQDRTMRELPQLLRPGDLLVFNDTRVLPARLHGRKESGGAVEILIERVTGAREARAQLGVSKKPRPGGRILLGDGSVVTVLGRDGEFFLLRFEGEEPLERLLLRLGRMPLPPYIAREADAADAERYQTVFAREPGAVAAPTAGLHFDAPLLDALRARGIESGYVTLHVGAGTFQPVRVERIEDHVMHREWLNVGAELVEKVRRTRARGGRVVAVGTTVVRALESASRGGELRPFAGETAIFIFPGYRIRSIDGLITNFHLPESTLLMLVSALAGRELILDAYRHAVEQRYRFFSYGDAMLIWPGDGKGETGSGKGGGA

SEQ ID NO: 69042 - protein, 345 aa, unidentified
  source 1..345: note = Mobilisporobacter senegalensis
  REGION 1..345: note = tr|A0A3N1XQ04|A0A3N1XQ04_9FIRM S-adenosylmethionine:tRNA ribosyltransferase-isomerase; OS = Mobilisporobacter senegalensis OX=1329262 GN=queA PE=3; SV = 1
MKKKDFDFYLPEELIAQDPLLDRSSSRLLILDKETGRTEHKIFKDIIDYIRPGDCLVLNNTKVIPARLIGSKEDTGASVELLLLKRNEGDIWETLVKPGKKAKKGAKLVFGEGLLRAEVVDIVEEGNRLVKFHYEGIFEEILDKLGQMPLPPYITHTLKDKNRYQTVYAKYEGSAAAPTAGLHFTNELLDGIRAKGIAIANVTLHVGLGTFRPVKEEDILAHHMHSEFYQIDSEAADIINNTKKNGGRIICVGTTSCRTIESAGDENGMLKACSGNTEIFIYPGYKFKILDALITNFHLPESTLIMLVSALAGRENVLNAYKIAVEEKYRFFSFGDAMFITDLEK

SEQ ID NO: 69043 - protein, 345 aa, Modestobacter marinus
  REGION 1..345: note = tr|I4EXT6|I4EXT6_9ACTN S-adenosylmethionine:tRNA ribosyltransferase-isomerase OS=Modestobacter marinus; OX = 477641 GN=MODMU_2770 PE=3 SV=1
MTAPFTLPPGSEATAPPERRGLARDGVTLLAARPGAVTPHRFRDLPDLLAPGDVVVVNTSPTAPARLDAVRGDGTATPVHVATPLDDGGWVVEVRRPDNSGPDLGVEPGSVLLLPGGVELRLVAPFPVPGSRLWRAAADPAVTPAAHLARYGTPIRYGHLARAVPLAALQNVYATPVGPQEMGSAEMASAGRPFTDRLLVRLVARGITVLPLLLHTGVSSPELHEPPAPERFAVPAATARVVTGTRAAGGRVVAVGTTVTRALESATGEDGVTRPASGWTDLVLSADRPARVVGGLVTGLHAPEASHLQLLAAVAGVDLVDRAYRSAVAAHLLWHEFGDSMLFLP

SEQ ID NO: 69044 - protein, 361 aa, Moellerella wisconsensis
  REGION 1..361: note = tr|A0A0H2QC11|A0A0H2QC11_9GAMM S-adenosylmethionine:tRNA ribosyltransferase-isomerase; OS = Moellerella wisconsensis OX=158849 GN=queA PE=3 SV=1
MRVSDFTFELPEGLIAHYPQSQRSACRLLSLDGTTGQLTHGIFTDVLEKLEPGDLLVFNNTRVIPARLFGRKASGGKIEVLVERMLDDNRVLAHVRASKAPKEGAELLLGDDESVKATMLARHGALFELRFDDSRDILTILNQIGHMPLPPYIDRPDEEADKELYQTVYSQRPGAVAAPTAGLHFDEPLLAALREKGIEMAFVTLHVGAGTFQPVRVDTIEDHIMHSEYAEISQDVVDAVLACKARGNRVVAVGTTSVRSLESAAQASKEQLIAPFFDDTQIFIYPGYNYQVVDALITNFHLPESTLIMLVSAFAGYQNTMRAYREAVEQQYRFFSYGDAMFITRNLQAPAEQVGQLDVSE

SEQ ID NO: 69045 - protein, 361 aa, Moellerella wisconsensis; identical to SEQ ID NO: 69044
  REGION 1..361: note = tr|A0A0N0ZAK1|A0A0N0ZAK1_9GAMM S-adenosylmethionine:tRNA ribosyltransferase-isomerase; OS = Moellerella wisconsensis ATCC 35017 OX=1354267 GN=queA; PE = 3 SV=1

SEQ ID NO: 69046 - protein, 349 aa, Mogibacterium diversum
  REGION 1..349: note = tr|A0A2S0L346|A0A2S0L346_9FIRM S-adenosylmethionine:tRNA ribosyltransferase-isomerase; OS = Mogibacterium diversum OX=114527 GN=queA PE=3 SV=1
MRLEDFDYELPRELIAQTPSLKRDECRLMVLDRAKNTIEHRHFYDILEYLHEGDCLVVNDSRVIPARLYGIKEKTGAHIELLLIKRLEGDKWESLVKPGKRLKEGDTVVLDENKLFKANILGFKDKENGTRIIEFEYEGIFMERLEEIGSMPLPPYIERDAENDDKERYQTVYSKVDGSVAAPTAGLHFTDELLEKVREKGVEIAYVTLHVGIGTFRPVKVDNIEDHKMHFEEYTIAPETAETINRAIREGRRVISVGTTSTRTLESAAKQVDGVWQIESGHSSTGIFIYPGYKYKVVDGLITNFHLPKSTLIMLVSALYDREHIIAAYEEAVRERYKFFSYGDAMFIK

SEQ ID NO: 69047 - protein, 349 aa, Mogibacterium pumilum
  REGION 1..349: note = tr|A0A223ASJ2|A0A223ASJ2_9FIRM S-adenosylmethionine:tRNA ribosyltransferase-isomerase; OS = Mogibacterium pumilum OX=86332 GN=queA PE=3 SV=1
MRLEDFDYELPKELIAQTPSLKRDECRLMVLDRTENSIKHKHFYDILDYLHEGDCLVVNDSRVIPARLYGTKEKTGAHIELLLIKRLNGDKWESLAKPGKRLKEGDTVILDENRLFKAHILGFKDEENGTRIIEFEYKGIFMERLEEIGSMPLPPYIERDAGNDDKERYQTVYSKVDGSVAAPTAGLHFTDELLEQLRAKGVEIAYVTLHVGIGTFRPVKVDNIEDHKMHFEEYTIEPETADTVNRAIREGRRVISVGTTSTRTLESAAKQVDGVWQIESGHSNTGIFIYPGYKYKVVDALITNFHLPKSTLIMLVSALYDREHILEAYEEAVRERYKFFSYGDAMFIK

SEQ ID NO: 69048 - protein, 349 aa, Mogibacterium sp.
  REGION 1..349: note = tr|J5WAG8|J5WAG8_9FIRM S-adenosylmethionine:tRNA ribosyltransferase-isomerase OS=Mogibacterium sp. CM50; OX = 936375 GN=queA PE=3 SV=1
MKLEDFDYNLPKELIAQAPSLKRDECRLMVLNRAADTIEHKHFYDILDYLHEGDCLVVNDSRVIPARLYGTKEKTGAHIEFLLIKRLEGDKWESLVKPGKRLKEGDTVILDDNKLFKAHILGFKDEGNGTRIIEFEYEGIFMERLEEIGSMPLPPYIERRAVDDDKERYQTVYSKIDGSVAAPTAGLHFTDELLEKVKVKGIEVASVTLHVGIGTFRPVKVENVEDHKMHFEEYTINSETAETINRAIRDGRRIISVGTTSTRTLESAAKQVDGVWQIESGHRSTGIFIYPGYEYKVVDGLITNFHLPKSTLIMLVSALYDREHILKAYEEAVRENYKFFSYGDAMFIR

SEQ ID NO: 69049 - protein, 349 aa, Mogibacterium timidum
  REGION 1..349: note = tr|X8INV3|X8INV3_9FIRM S-adenosylmethionine:tRNA ribosyltransferase-isomerase OS=Mogibacterium timidum ATCC 33093 OX=1401079 GN=queA PE=3 SV=1
MKLEDFDYNLPKELIAQAPSLKRDECRLMVLNRAADTIEHKHFYDILDYLHEGDCLVVNDSRVIPARLYGTKEKTGAHIEFLLIKRLEGDKWESLVKPGKRLKEGDTVILDDNKLFKAHILGFKDEGNGTRIIEFEYEGIFMERLEEIGSMPLPPYIERRAVDDDKERYQTVYSKIDGSVAAPTAGLHFTDELLEKVKVKGIEVASVTLHVGIGTFRPVKVENVEDHKMHFEEYTINSETAETINRAIRDGRRIISVGTTSTRTLESAAKQVDGVWQIESGHRSTGIFIYPGYEYKVVDGLITNFHLPKSTLIMLVSALYDREHILKAYEEAVGENYKFFSYGDAMFIR

SEQ ID NO: 69050 - protein, 351 aa, unidentified
  source 1..351: note = Moheibacter sediminis
  REGION 1..351: note = tr|A0A1W1ZD44|A0A1W1ZD44_9FLAO S-adenosylmethionine:tRNA ribosyltransferase-isomerase; OS = Moheibacter sediminis OX=1434700 GN=queA PE=3 SV=1
MKMKTSDFNFKLPEELLAEHPSEQRDEARLMVLNRKNETIEHRLFKDIVDYFDEGDVMIMNNTKVFPARLMGNKEKTGAKIEVFLLRELDAETRLWDVLVDPARKIRIGNKLFFGDDDSLVAEVVDNTTSRGRTLRFLFDGSYEEFRQALEDLGETPLPKYIQREVVPEDAERYQTIYAKHEGAVAAPTAGLHFSKHLLKRLEIKGVDFAELTLHVGLGTFAPVEVEDLSKHKMESEQVIIPEETAIRVNEAIDAKKRVCAVGTTSMRAIESSVSANGHLNPFDSWTNKFIHPPYDFGVANCMITNFHTPKSTLIMMVSAFTGHDFLMKAYKEAVKEGYKFYSYGDAMLII

SEQ ID NO: 69051 - protein, 348 aa, unidentified
  source 1..348: note = Monaibacterium marinum
  REGION 1..348: note = tr|A0A2C9CT71|A0A2C9CT71_9RHOB S-adenosylmethionine:tRNA ribosyltransferase-isomerase; OS = Monaibacterium marinum OX=1690039 GN=queA PE=3 SV=1
MKLSDFDFDLPEHLIALRPVRPRPASRMLLAQGAQTQDRHVSDLPEILQPGDLMVFNDTKVIPARLFGTRSRVSAHGSGVAKVEATLLERTTPDTWSALARPGRKLAVGDVMQFENLSAEIVAKGQDGRVTLRFDQAGADLDAAIALAGQMPLPPYIAARRPADEADREDYQTVFADKLGAVAAPTASLHFDDDLLARLAARGVENTRVTLHVGAGTFLPVTVDDVSDHKMHSEWGEVSVEAAETIAKAKAEGRRVIPVGTTALRLIEAASASGTIAPWLGDTDIFITPGYQFRTASGLMTNFHLPRSTLMMLVSAMMGVDRIKEIYAHAIADEYRFYSYGDSSLLLP

SEQ ID NO: 69052 - protein, 409 aa, unidentified
  source 1..409: note = Mongoliibacter ruber
  REGION 1..409: note = tr|A0A2T0WVF8|A0A2T0WVF8_9BACT S-adenosylmethionine:tRNA ribosyltransferase-isomerase; OS = Mongoliibacter ruber OX=1750599 GN=queA PE=3 SV=1
MTLLKSIQNIRLTDYEYTLPDEKIAKFPLEKRDESKLLHYDGSKGISHHAFRELPQLIPEGSMMVFNNTKVIPARMIFQRETGARIEIFLLKPILPSTVINEVMINTQMVTWECMIGNLKKWKTGETLKGAIEIQGQLIELKATLTDRENRLVQFDWSGNLVPFVSLVEASGEVPLPPYLNRKATPEDKPRYQTVYSKKEGAVAAPTAGLHFTENVFDQLRDKGIKEEYLTLHVSAGTFQPIKSEVISEHNMHSEQVVVSFESITNIAAHDAKIVAVGTTSMRTLESLYWYGVKLLHNQKSEFLIEKLFPYGSFESLPNRTESFSAISEYMQKNDLREITGSTEIFIMPGYNFKVCDGLVTNFHQPSSTLVLLIAAFTNGKWRDIYDTALSQDYRFLSYGDSNLYWKEG

SEQ ID NO: 69053 - protein, 349 aa, unidentified
  source 1..349: note = Mongoliibacter ruber
  REGION 1..349: note = tr|A0A2T0WQU3|A0A2T0WQU3_9BACT S-adenosylmethionine:tRNA ribosyltransferase-isomerase; OS = Mongoliibacter ruber OX=1750599 GN=queA PE=3 SV=1
MKLSDFKFDVPKKLISLYPTENRDESRLMVLNRKTGEIEHKVFKDIIDYFGDGDVFVMNDTKVFPARLYGNKEKTGAKIEVFLLRELNQDLRLWDVLVDPARKIRVGNKLYFGDSDLVAEVIDNTTSRGRTIRFLFDGTDEEFYKTIDTLGETPILKEWIDRKVEAEDRERYQTIFARNVGAVAAPTAGLHFTPHLLKRLELKGVEVCPITLHVGLGTFRQVDVEDLTKHKMDSENYDIPEKTVEKVNQALDNKKRVVSVGTTSLKTVESSVTANNKLKASSGWTDKFIIPPYEFKIANTLITNFHLPESTLLMTASAFGGYDLVMRAYQEAIKEKYRFFSYGDAMLIL

SEQ ID NO: 69054 - protein, 341 aa, unidentified
  source 1..341: note = Monoglobus pectinilyticus
  REGION 1..341: note = tr|A0A2K9P110|A0A2K9P110_9FIRM S-adenosylmethionine:tRNA ribosyltransferase-isomerase; OS = Monoglobus pectinilyticus OX=1981510 GN=queA PE=3 SV=1
MTTKDFYYDLPPELIAQHPLKDRAGSRLLVLDKETGKIEHKNFRNIIEYLNPGDCLVMNNTRVIPARLYGVKEDTGGKIEFLLLKRIDLNTWNVILKPGKRARTGARFVFGDGLLKAEVIEVRPDGNRIVRFEYDGVWEELLDKLGEMPLPPYIKEKLEDKERYQTVYSKIEGSAAAPTAGLHFTNELLEDIKDKGVKTAYLTLHVGLGTFRPVSVENVEEHVMHTEHYEVSQEAADIINETRKSGGRIIAVGTTSVRTLETVAEDNGTMKAEIGDTSIFIYPGYKFKVTDSIITNFHLPESTLLMLVSAFAGKENIFEAYEQAVKEKYRFFSFGDAMLLK

SEQ ID NO: 69055 - protein, 393 aa, unidentified
  source 1..393: note = Moorea bouillonii
  REGION 1..393: note = tr|A0A1U7N0M1|A0A1U7N0M1_9CYAN S-adenosylmethionine:tRNA ribosyltransferase-isomerase; OS = Moorea bouillonii PNG OX=568701 GN=queA PE=3 SV=1
MTGIDKQTSKHQIDQLVSSYDYELPEEQIAQTPLSERDGSRLLVVDSPTHHSHHIFRELPELLQPGDLLILNNTRVIPARLYGRKSTGVPVEILLLEERQQQGQQQGQHQSWLALVKPGRRLKPGAEIWFTPSSDLGLKDSTLSKHLTTPLPPLKATVLATDEGTSGRILQFDFPEGVSWETLLEWYGQVPLPPYIQDSQATPDQYQTIYAQKNGAVAAPTAGLHFTNQLMENCRQRGIRLGYITLHVGVGTFRPVEVEDITEHDMHGEWLEVPQSTVEQIQETRATGGRVIAVGTTVVRALEGAVVDGELQPYCGKTNLFIYPGYQWQVVEGLITNFHLPRSSLLMLVSAMVGRERLLTLYQDAIALSYRFYSFGDAMLILPEAKATPLPDF

SEQ ID NO: 69056 - protein, 243 aa, unidentified
  source 1..243: note = Moorea producens
  REGION 1..243: note = tr|F4XV92|F4XV92_9CYAN S-adenosylmethionine:tRNA ribosyltransferase-isomerase OS=Moorea producens 3L; OX = 489825 GN=LYNGBM3L_38820 PE=3 SV=1
MEIFTYELPTEFIAQRPIQPPEAAKLLITSPDAEIEETTFASLPQHLGSRDLLVFNDTAPNIRQGSGDYQDKIDDQTIFANKAGSVAVPTASLHFTPELISQLRASGKQVEFVTLQVGSSSSLCIESRQKPSSEQFEVSQETLNRLHRWKEAGGRVIAVGTTVVRALESAVRGMSGQTNLFITPGFRFELVGGVITNFHEPQTTHLLLVEAFLGRKRLEEVYQYALQHRFRFLSYGDGMLITI

SEQ ID NO: 69057 - protein, 398 aa, unidentified
  source 1..398: note = Moorea producens
  REGION 1..398: note = tr|A0A1D8TR30|A0A1D8TR30_9CYAN S-adenosylmethionine:tRNA ribosyltransferase-isomerase; OS = Moorea producens PAL-8-15-08-1 OX=1458985 GN=queA PE=3; SV = 1
MTGIDKQTSKHQIDQLVSSYDYELPQEQIAQTPLSERDGSKLLVVDSPTHHSHHIFRELPELLQPGDLLILNNTRVIPARLYGRKSTGVPVEILLLEERPHQELQEGQHQSWLALVKPGRRLKPGAEIWFTPSSDLGLNDSTVSKHLTTPLPPLKATVLATDEATSGRILQFDFPEGVSWETLLELYGQVPLPPYIQDSQATPDQYQTIYAQKNGAVAAPTAGLHFTNQLMENCRQRGIRLGYITLHVGVGTFRPVEVEDITEHDMHGEWLEVPQSTVEQIQETRATGGRVIAVGTTVVRALEGAVVNGELQPYCGKTNLFIYPGYQWQVVEGLITNFHLPRSSLLMLVSAMVGRERLLTLYQDAIALSYRFYSFGDAMLILPEARDVPREQGIGNRE

SEQ ID NO: 69058 - protein, 342 aa, Moorella glycerini
  REGION 1..342: note = tr|A0A0C7NIN9|A0A0C7NIN9_9THEO S-adenosylmethionine:tRNA ribosyltransferase-isomerase; OS = Moorella glycerini OX=55779 GN=queA PE=3 SV=1
MRLEEFDYDLPPELIAQTPAEPRDASRLLVLHRDRDYLEHRHFYDLPAYLHPGDVLVLNETRVIPARLWGRRAGTGARIEVLLLTQRDRDTWEALVRPGRRVPVGTEIIFGQGELRARAMATTGTGGRVLQFSYREGPLEALLDRLGEMPLPPYIKEKPEDPGRYQTVYARVEGSAAAPTAGLHFTPRLLEQLREQGVKIVNLLLHVGLGTFRPVKVENIEEHQMHAEYYEVTPEAAAAINVARARGGRVVAVGTTVVRTLETVATDDGLIQPGSGWTDIFIYPGYRFKAIDCLITNFHLPKSTLIMLVSAFAGREKILAAYRTAVAEGYRFFSFGDAMLIL

SEQ ID NO: 69059 - protein, 342 aa, Moorella humiferrea
  REGION 1..342: note = tr|A0A2T0AY52|A0A2T0AY52_9THEO S-adenosylmethionine:tRNA ribosyltransferase-isomerase; OS = Moorella humiferrea OX=676965 GN=queA PE=3 SV=1
MRLEDFDYYLPAELIAQTPVEPRDASRLLVLHREKDMLEHRHFYDLPDYLCDGDVLVLNETRVLPARLWGRRAGTGARIEVLLLTRRTGDIWETLVRPARRVPVGTEIIFGRGELKGRVISVGKEGERLLEFAYEEGPFEALLERLGEMPLPPYIKEKPENPGRYQTVYARVDGSAAAPTAGLHFTPRLMERLQEKGIKLAYLLLHVGLGTFRPVKVENIEEHRMHAEYYEVTPETAAAINEARCRGGRVVAVGTTVVRTLETVATSEGVIRPGKGWTDIFIYPGYTFKAVDCLITNFHLPKSTLIMLVSAFAGREKILAAYKEAVAAGYRFFSFGDAMLIL

SEQ ID NO: 69060 - protein, 342 aa, Moorella mulderi
  REGION 1..342: note = tr|A0A151AXH8|A0A151AXH8_9THEO S-adenosylmethionine:tRNA ribosyltransferase-isomerase; OS = Moorella mulderi DSM 14980 OX=1122241 GN=queA PE=3 SV=1
MRLEEFDYDLPPELIAQTPAEPRDASRLLVLHRDRDYLEHRHFYDLPAYLRPGDVLVLNETRVIPARLWGRRAGTGARIEVLLLTRRDRDTWEALVRPGRRVPVGTEIIFGQGELRARAMATTGAGGRVLQFSYREGPFEALLDRLGEMPLPPYIKEKPEDPGRYQTVYARVEGSAAAPTAGLHFTPRLLEQLREQGVKIVYLLLHVGLGTFRPVKVENIEEHQMHAEYYEVTPEAAAAINAARARGGRIVGVGTTVVRTLETVATETGLIQPGSGWTDIFIYPGYRFKAIDCLITNFHLPKSTLIMLVSAFAGREKILAAYRTAVAEGYRFFSFGDAMLIL

SEQ ID NO: 69061 - protein, 341 aa, Moorella sp.
  REGION 1..341: note = tr|A0A124FDP3|A0A124FDP3_9THEO S-adenosylmethionine:tRNA ribosyltransferase-isomerase; OS = Moorella sp. 60_41 OX=1635264 GN=queA PE=3 SV=1
MRVEEFDYYLPPELIAQEPVEPRDSSRLLVLHRADGCLEHRRFYDLPQYLEKGDVLVLNDTRVIPARLFGRKAGTGGRVEVLLLKPLGGDRWETLVRPGRRVPPGTRLVFGTGELEARVLSVTEEGGRVLEFAYQESWEDLLATLGRVPLPPYIRRELADPERYQTVYARYPGSAASPTAGLHFTPRLLEEIKAKGVQVVSVLLHVGLGTFRPVKEETVEEHRMHAEYFVVSPKTAEVVNRAREGSGRVVAVGTTVVRTLETVATPEGRISPGEGYTDLFIYPGYSFKAVDCLITNFHLPRSTLLMLVSAFAGREKILQAYRVAVEEGYRFFSFGDAMLIL

SEQ ID NO: 69062 - protein, 346 aa, Moorella sp.
  REGION 1..346: note = tr|A0A4P6BMV5|A0A4P6BMV5_9THEO S-adenosylmethionine:tRNA ribosyltransferase-isomerase; OS = Moorella sp. E306M OX=2572683 GN=queA PE=3 SV=1
MKGVLRLEEFDYDLPPELIAQTPVEPRDASRLLVLNRERGYLEHRHFYDLPDYLKEGDVLVLNETRVIPARLWGRRAGTGARIEVLLLTRRDRDTWEALVRPGRRVPVGTEIIFGQGELKARATATTSAGGRLLQFFYQEGPFETLLDRLGAMPLPPYIKEKPEDPGRYQTVYARVEGSVAAPTAGLHFTPRLLEQLRGQGVQIVYLLLHVGLGTFRPVKVQNIEEHHMHAEYYEVTPEAAAAINAARARGGRIVAVGTTVVRTLETVATEEGLIQPGNGWTDIFIYPGYRFKAVDCLITNFHLPKSTLIMLVSAFAGREKILAAYRTAVAEGYRFFSFGDAMLIL

SEQ ID NO: 69063 - protein, 342 aa, Moorella thermoacetica
  REGION 1..342: note = sp|Q2RHU2|QUEA_MOOTA S-adenosylmethionine:tRNA ribosyltransferase-isomerase OS=Moorella thermoacetica (strain ATCC 39073 / JCM 9320) OX=264732 GN=queA PE=3 SV=1
MRIEEFDYELPPGQIAQQPVEPRDASRLLVLHREGGFLEHRHFYDLPRYLHPGDVLVVNETKVIPARLWGYRAGTGAKIEVLLLTRQEGDTWETLVRPGRRVPVGAELIFGRGELQARVKGVTPAGGRIMEFSYQEGPWEALLERLGEMPLPPYIKEKPADPGRYQTVYAREEGSAAAPTAGLHFTPRLLKELREQGIEIASILLHVGLGTFRPVKVENIQEHVMHAEYYAVTPAAAATINAARARGHRVVAVGTTVVRTLETVATADGVIHAGSGWTDIFIYPGYRFKAIDSLITNFHLPRSTLLMLVSAFAGREKILDAYRVAVREGYRFYSFGDAMLIL

SEQ ID NO: 69064 - protein, 342 aa, Moorella thermoacetica; identical to SEQ ID NO: 69063
  REGION 1..342: note = tr|A0A1J5NJ30|A0A1J5NJ30_MOOTH S-adenosylmethionine:tRNA ribosyltransferase-isomerase; OS = Moorella thermoacetica OX=1525 GN=queA PE=3 SV=1

SEQ ID NO: 69065 - protein, 356 aa, unidentified
  source 1..356: note = Moranella endobia
  REGION 1..356: note = tr|F7XY23|F7XY23_MOREP S-adenosylmethionine:tRNA ribosyltransferase-isomerase OS=Moranella endobia (strain PCIT) OX=903503 GN=queA PE=3 SV=1
MRLDDFLFELPAHLIARYPQRERSACRLLSLDGETGALVHQVFTDLINNLAPGDLLVFNNTRVIPARLFGRKISGGKIEIMVERIINDKQVLAHVRASKVLKVGTTLLLGDDNSIAATMVARHDSLYELRFNDQRDVLTLLDEKGHIPLPPYIDRPDNVADSTRYQTVYSERPGAVAAPTAGLHFDELILAKLRAKGIEMAFVTLHVGAGTFQPVRVNRIEQHRMHSEYVEVPQEVVNAVLACKARAKRVVAVGTTSVRSLESAAAAAGEQVLAPFYGDTSIFIYPGYHFRVIDALITNFHLPKSTLIMLVSAFAGYHHTVAAYREAVAQEYRFFSYGDAMFITRNPTAANIAHMN

SEQ ID NO: 69066 - protein, 375 aa, Moraxella atlantae
  REGION 1..375: note = tr|A0A378Q4B3|A0A378Q4B3_9GAMM S-adenosylmethionine:tRNA ribosyltransferase-isomerase; OS = Moraxella atlantae OX=34059 GN=queA PE=3 SV=1
MTLPTTSSAPSPTWTLDDFDYILPDALIARHPLAQRSASRLLHVAADGTLHDQHFTDLPALLSAGDLLVLNDTKVMNARLFGQKASGGAVEVLVERILSPDLSHNPPQYRALCHVRASRAPKAGQTLELAEGHIRVTVMGREANLFVLDFAQPIAPLLAAYGSLPIPPYFERMAEAEDDTRYQTVFHDPNKTASVAAPTASLHFDEALLQQLADQGVQRAFVTLHVGAGTFAPVKTNDISQHQMHSEYAELPADTAALINTTKAAGGRVIAVGTTVTRVLETAYRHTQPTQDQNAPLQLQAWAGDTDIFIYPPYRFGVIDRLITNFHLPKSTLLMLVSALAGRERMLAAYQHAIDAHYRFFSYGDAMLIDQADTQ

SEQ ID NO: 69067 - protein, 376 aa, Moraxella atlantae
  REGION 1..376: note = tr|A0A1B8QG01|A0A1B8QG01_9GAMM S-adenosylmethionine:tRNA ribosyltransferase-isomerase; OS = Moraxella atlantae OX=34059 GN=queA PE=3 SV=1
MTLPTTSSAPSPTWTLDDFDYILPDALIARHPLAQRSASRLLHVAADGTLHDQHFTDLPTLLSAGDLLILNDTKVMNARLFGQKASGGAVEVLVERILSPDLSHNPPQYRALCHVRASRAPKAGQTLELAEGHIRVTVMGREANLFVLDFAQPIAPLLTAYGSLPIPPYFERMAEAEDDTRYQTVFHDPNKTASVAAPTASLHFDEALLQQLADQGVQRAFVTLHVGAGTFAPVKTNDISQHQMHSEYAELPADTAALINTTKAAGGRVIAVGTTVTRVLETAYRHTQPTQDQNAPLQLQAWAGDTDIFIYPPYRFGVIDRLITNFHLPKSTLLMLVSALAGRERMLAAYQHAIDAHYRFFSYGDAMLIDKVTNQG

SEQ ID NO: 69068 - protein, 349 aa, Moraxella bovis
  REGION 1..349: note = tr|A0A378PYA9|A0A378PYA9_MORBO S-adenosylmethionine:tRNA ribosyltransferase-isomerase; OS = Moraxella bovis OX=476 GN=queA PE=3 SV=1
MNTPLLTADFDYHLPDELIARYPLAVRSGSRLLHVQGDTLADLNFSDLPDLLNKGDLLVLNDTKVMKARLFGVKDTGGAVEVLIERITDHDNHIAHCHVRSSRALKVGQAVSLADEGMTATMCGRAENLFVLQFDAPILADLERYGQMPIPPYFERTADDTDDTRYQTVFHDPAKQASVAAPTASLHFDDETLQKLADKGVEIAFVTLHVGAGTFAPVKADDLTDHIMHAEYAHLPQATADKINATKAQGGQVIAVGTTVTRTLETAHLHRVDGQLAEFSGDTQIFIYPPYEFGVVDRLITNFHLPKSTLLMLVSAFAGTDNIKNAYAHAIHKKYRFFSYGDAMILDRF

SEQ ID NO: 69069 - protein, 349 aa, Moraxella bovis
  REGION 1..349: note = tr|A0A2Z4R6N2|A0A2Z4R6N2_MORBO S-adenosylmethionine:tRNA ribosyltransferase-isomerase; OS = Moraxella bovis OX=476 GN=queA PE=3 SV=1
MNTPLLTADFDYHLPDELIARYPLAVRSGSRLLHVQGDTLADLNFSDLPDLLNKGDLLVLNDTKVMKARLFGVKDTGGAVEVLIERITDHDNHIAHCHVRSSRALKVGQTVSLADEGMTATMCGRAQNLFVLQFDAPILADLERYGQMPIPPYFERTADDTDDTRYQTVFHDPAKQASVAAPTASLHFDDETLQKLANKGVEIAFVTLHVGAGTFAPVKADDLTDHIMHAEYAHLPQATADKINATKAQGGQVIAVGTTVTRTLETAHLYRVGGQLAEFSGDTQIFIYPPYEFGVVDRLITNFHLPKSTLLMLVSAFAGTDNIKNAYAHAIDKKYRFFSYGDAMILDKG

SEQ ID NO: 69070 - protein, 347 aa, Moraxella bovoculi
  REGION 1..347: note = tr|A0A0U2B1I4|A0A0U2B1I4_9GAMM S-adenosylmethionine:tRNA ribosyltransferase-isomerase; OS = Moraxella bovoculi OX=386891 GN=queA PE=3 SV=1
MPLLTADFDYHLPDELIARYPLAVRSSSRLLHVQGDTLADLDFTDLPDLLNKGDLLVLNDTKVMKARLFGVKDTGGAVEVLIERITDHDNHIAHCHVRSSRALKVGQTVSLADGGMAATMCGRAENLFILQFDAPILADLERYGQIPIPPYFERTADDTDDTRYQTVFHDPAKQASVAAPTASLHFDDETLACLTDKGVEIAFVTLHVGAGTFAPVKADDLTDHIMHAEYAHLPQATADKINTTKAQGGQVIAVGTTVTRTLETAHLHRVDGQLTEFAGDTQIFIYPPYDFGVVDRLITNFHLPKSTLLMLVSAFAGTDNIKHAYAHAIDKKYRFFSYGDAMILDKS

SEQ ID NO: 69071 - protein, 347 aa, Moraxella bovoculi
  REGION 1..347: note = tr|A0A066UNF8|A0A066UNF8_9GAMM S-adenosylmethionine:tRNA ribosyltransferase-isomerase; OS = Moraxella bovoculi 237 OX=743974 GN=queA PE=3 SV=1
MPLLTTDFDYHLPDELIARYPLAVRSSSRLLHVQGDTLSDLNFTDLPDLLNKGDLLVLNDTKVMKARLFGVKDTGGAVEVLIERITDHDNHIAHCHVRSSRALKVGQMVSLADGGMTATMCGRAENLFILQFDAPILANLERYGQMPIPPYFERTADDTDDTRYQTVFHDPAKQASVAAPTASLHFDDETLACLSDKGVEIAFVTLHVGAGTFAPVKADDLTDHIMHAEYAHLPQVTADKINATKAQGGRVIAVGTTVTRTLETAHLYRVDGQLTEFAGDTQIFIYPPYDFGVVDRLITNFHLPKSTLLMLVSAFAGTDNIKHAYAHAIDRKYRFFSYGDAMILDKS

SEQ ID NO: 69072 - protein, 360 aa, Moraxella canis
  REGION 1..360: note = tr|A0A1S9ZM65|A0A1S9ZM65_9GAMM S-adenosylmethionine:tRNA ribosyltransferase-isomerase; OS = Moraxella canis OX=90239 GN=queA PE=3 SV=1
MTQQTKPLLLSDYDYHLPESLIARYPLENRTSSRLLHVSDRTCQDLHFGDLIKLLNPGDLLVLNDTKVIKARLHGQKQTGGAVEVLVERILPDEAGAPANQALCHVRSSRSPKAGQVLSLADDQMRATVMGRQDNLFILSFESPILADLDKYGQMPIPPYFERKADEKDDERYQTVFHDPDKSASVAAPTASLHFDEALLTQLRQKGVQIAFVTLHVGSGTFAPVKVDNLTDHIMHAEYAHLPTPTAALINATKVAGGRIVAVGTTVTRTLETAHLHRIDGELVEFSGDTQIFIYPPYEFGVVDCLITNFHLPKSTLLMLVSAFAGTQAIKDAYNHAIEHQYRFFSYGDAMFLERQTSSR

SEQ ID NO: 69073 - protein, 349 aa, Moraxella caprae
  REGION 1..349: note = tr|A0A378R2D3|A0A378R2D3_9GAMM S-adenosylmethionine:tRNA ribosyltransferase-isomerase; OS = Moraxella caprae OX=90240 GN=queA PE=3 SV=1
MNTPLLTADFDYHLPDELIARYPLAVRSSSRLLHVQGDTLADLNFSDLPDLLNKGDLLVLNDTKVMKARLFGVKDTGGAVEVLIERITDHDNHIAHCHVRSSRALKVGQTVSLADGGMTATMCGRAENLFILQFDAPILADLERYGQMPIPPYFERTADDTDDTRYQTVFHDPTKQASVAAPTASLHFDDETLQKLADKGVEIAFVTLHVGAGTFAPVKADDLTDHIMHAEYAHLPQATADKINTTKAQGGQVIAVGTTVTRTLETAHLHRVDGQLAEFAGDTQIFIYPPYDFGVVDRLITNFHLPKSTLLMLVSAFAGADNIKNAYAHAIDKKYRFFSYGDAMILDKG

SEQ ID NO: 69074 - protein, 363 aa, Moraxella catarrhalis
  REGION 1..363: note = tr|A0A198XC22|A0A198XC22_MORCA S-adenosylmethionine:tRNA ribosyltransferase-isomerase; OS = Moraxella catarrhalis OX=480 GN=queA PE=3 SV=1
MTILSAMTQQTQPVLLSDYDYHLPDDLIARYPLNERTSSRLLHVSKNSCQDLQFTDLPNLLKSGDLLVLNDTKVIKARLHGQKQTGGAVEVLIERILPDEINENLYKALCHVRSSRSPKVGQTLNLANNQMQATVIGRQDNLFILGFRSPILDDLDNYGQMPIPPYFERKADEQDDERYQTVFHNPTKSASVAAPTASLHFDEALLTQLREKGVQIAFVTLHVGSGTFAPVKVDNLADHVMHAEYAHLPASTATLINNTKSAGGRIIAVGTTVTRTLETAHRHRIHGELVEFLGDTQIFIYPPYEFGVVDCLITNFHLPKSTLLMLVSAFAGTQTIKDAYNHAIKNKYRFFSYGDAMFLEKAQ

SEQ ID NO: 69075 - protein, 357 aa, Moraxella catarrhalis
  REGION 1..357: note = tr|A0A3A9MJT2|A0A3A9MJT2_MORCA S-adenosylmethionine:tRNA ribosyltransferase-isomerase; OS = Moraxella catarrhalis OX=480 GN=queA PE=3 SV=1
MTQQTQPVLLSDYDYHLPDDLIARYPLNERTSSRLLHVSKNSCQDLRFTDLPNLLKSGDLLVLNDTKVIKARLHGQKQTGGAVEVLIERILPDEINNNLYKALCHVRSSRSPKVGQTLNLANNQMQATVIGRQDNLFILGFRSPILADLDNYGQMPIPPYFERKADETDDERYQTVFHNPTKSASVAAPTASLHFDDALLTQLRKKGVQIAFVTLHVGSGTFTPVKVDNLADHVMHAEYAHLPASTATLINNTKSAGGRIIAVGTTVTRTLETAHRHRIHGELVEFLGDTQIFIYPPYEFGVVDCLITNFHLPKSTLLMLVSAFAGTQTIQEAYNHAIKNKYRFFSYGDAMFLEKAQ

SEQ ID NO: 69076 - protein, 362 aa, Moraxella caviae
  REGION 1..362: note = tr|A0A1T0A2G5|A0A1T0A2G5_9GAMM S-adenosylmethionine:tRNA ribosyltransferase-isomerase; OS = Moraxella caviae OX=34060 GN=queA PE=3 SV=1
MNAQTQTPAHTPILLSDYDYELPENLIATHPLDTRSASRLLCVANGALTDCQFADLPKLLNAGDLLVMNDTKVMKARLFGKKETGGAVEVLIERIIDPQKHIAICHIKASRALKAGQSVSLADGNMRATMLERAQNLFVLQFDAPILADLERFGELPIPPYFDRAADTQDDERYQTIFHDPKKTASVAAPTASLHFDDATLNALKDKGVDTAFVTLHVGAGTFAPVKTDDVSQHVMHAEFAHLPQATADKINATKARGGKIIAVGTTVTRVLETAHLHRKDGKLAEFAGDTQIFIYPPYQFGVVDRLITNFHLPKSTLLMLVSAFAGTTTIRHAYQHAIAHQYRFFSYGDAMLLDKCGGEMA

SEQ ID NO: 69077 - protein, 357 aa, Moraxella cuniculi
  REGION 1..357: note = tr|A0A1N7FYY0|A0A1N7FYY0_9GAMM S-adenosylmethionine:tRNA ribosyltransferase-isomerase; OS = Moraxella cuniculi DSM 21768 OX=1122245 GN=queA PE=3; SV = 1
MTQSDQTPLVDDYDYHLPEQLIARTPLAKRSDSRLLHLTQHGYQDRQFTDLPSLLRAGDLLVLNDTKVMKARLHGQKATGGAVEVLVERLLFDVANAPYAALCHVRASRSPKIGQTLKLADNQLSATVIDRKENLFVLAFDVPILPALEQFGQMPIPPYFQRSATSLDDERYQSVFHNPNHTASVAAPTASLHFDDALLQQIKDKGVNIAFVTLNVGAGTFAPVKAAKLSEHIMHAEYAHLPAATAELINQTKAAGGRVIAVGTTVTRVLETAYLQRTCDTLHEFAGDTQIFIYPPYQFGVIDCLITNFHLPKSTLLMLVSAFMGTDTIKAAYAHAIKQEYRFFSYGDAMFLERATN

SEQ ID NO: 69078 - protein, 357 aa, Moraxella cuniculi
  REGION 1..357: note = tr|A0A3S4UVB8|A0A3S4UVB8_9GAMM S-adenosylmethionine:tRNA ribosyltransferase-isomerase; OS = Moraxella cuniculi OX=34061 GN=queA PE=3 SV=1
MTQSDQTPLVDDYDYHLPEQLIARTPLAKRSDSRLLHLTQHGYQDRQFTDLPSLLRAGDLLVLNDTKVMKARLYGQKATGGAVEVLVERLLFNVANAPYAALCHVRASRSPKIGQTLKLADNQLSATVIDRKENLFVLAFDVPILPALEQFGQMPIPPYFQRSATSLDDERYQSVFHNPNHTASVAAPTASLHFDDALLQQIKDKGVNIAFVTLNVGAGTFAPVKAAKLSEHIMHAEYAHLPAATAELINQTKAAGGRVIAVGTTVTRVLETAYLQRTCDTLHEFAGDTQIFIYPPYQFGVIDCLITNFHLPKSTLLMLVSAFMGTDTIKAAYAHAIKQEYRFFSYGDAMFLERATN

SEQ ID NO: 69079 - protein, 349 aa, Moraxella equi
  REGION 1..349: note = tr|A0A378QM96|A0A378QM96_9GAMM S-adenosylmethionine:tRNA ribosyltransferase-isomerase; OS = Moraxella equi OX=60442 GN=queA PE=3 SV=1
MNTPLLTADFDYHLPDELIARYPLAVRSSSRLLHVQGDTLADLNFSDLPDLLNKGDLLVLNDTKVMKARLFGVKDTGGAVEVLVERITDHGNHIAHCHVRSSRALKVGQAVSLADGGMRAVMCGRAQNLFVLQFDAPILADLERYGQMPIPPYFERMADDTDDTRYQTVFHDPTKQASVAAPTASLHFDDETLQKLANKGVEIAFVTLHVGAGTFAPVKADDLTDHIMHAEYAHLPQTTADKINAIKAQGGQIIAVGTTVTRTLETAHLHRVDGQLVEFAGDTQIFIYPPYDFGVVDRLITNFHLPKSTLLMLVSAFAGTDNIKNAYAHAIHKKYRFFSYGDAMILDKG

SEQ ID NO: 69080 - protein, 349 aa, Moraxella lacunata
  REGION 1..349: note = tr|A0A378TVT9|A0A378TVT9_MORLA S-adenosylmethionine:tRNA ribosyltransferase-isomerase; OS = Moraxella lacunata OX=477 GN=queA PE=3 SV=1
MKTPLLTADFDYHLPDELIARYPLAVRSSSRLLHVQGDTLADLNFTDLPDLLNKGDLLVLNDTKVMKARLFGVKDTGGAVEVLIERITDHDNHIAHCHVRSSRALKVGQAVSLADGSMRAVMCGRAENLFVLQFDAPILADLERYGQMPIPPYFERMADDTDDTRYQTVFHDPTKQASVAAPTASLHFDDETLQKLADKGVEIAFVTLHVGAGTFAPVKTDDLTDHIMHAEYAHLPQATADKINATKAQGGQVIAVGTTVTRTLETAHLHRVDGQLAEFAGDTQIFIYPPYEFGVMDRLITNFHLPKSTLLMLVSAFAGTDNIKNAYAHAIHKKYRFFSYGDAMILDKG

SEQ ID NO: 69081 - protein, 349 aa, Moraxella lacunata
  REGION 1..349: note = tr|A0A378QFB1|A0A378QFB1_MORLA S-adenosylmethionine:tRNA ribosyltransferase-isomerase; OS = Moraxella lacunata OX=477 GN=queA PE=3 SV=1
MNTPLLTADFDYHLPDELIARYPLAVRSSSRLLHVQGDTLTDLHFTDLPDLLNKGDLLVLNDTKVMKARLFGVKDTGGAVEVLIERITDHEQNIAHCHVRSSRALKVGQAVSLADGGIRAVMCGRAQNLFILQFDAPILADLENHGHMPIPPYFERTADDTDDARYQTVFYDPAKQASVAAPTASLHFDDDTLQRLTDKGVQMAFITLHVGAGTFAPVKADDLSDHVMHAEYAHLPQATADKINATKAQNGKIIAVGTTVARTLETAHLHRVDGQLTEFCGDTQIFIYPPYEFGVVDRLITNFHLPKSTLLMLVCAFAGTNNIKHAYAHAISEQYRFFSYGDAMILDGA

SEQ ID NO: 69082 - protein, 406 aa, Moraxella lincolnii
  REGION 1..406: note = tr|A0A1T0CKF2|A0A1T0CKF2_9GAMM S-adenosylmethionine:tRNA ribosyltransferase-isomerase; OS = Moraxella lincolnii OX=90241 GN=queA PE=3 SV=1
MHSPDRHPSVNQPSINNPSVNYLRVNDYDYELSDELIARHPLAQRSASRLLYLPANQQPQDKQFADLPSLLNQGDLVVFNDTKVMKARLFGQKDTGGKIEVLVERIDPILNPAFGNSAFGKNKNTVDATCLQTCLQNKEHHKTYPYLALCHIKASKAPKLEQHIILANGHMQGKVLARQNNLFVVGFTKPVLPDLEQHGELPIPPYFDRRADDGDDQRYQTVFFDPTKMASVAAPTASLHFDDNILNQLNIKGVNTAFVTLHVGAGTFAPVKTNHILSHKMHSEYAELPQMTADLINQVKSNGGQVVAVGTTVTRVLETAFQKTASFDKPTLSAWAGDTDIFIYPSFKFGVVDRLLTNFHLPKSTLLMLVSAFAGKTQIEHAYQHAIQQKYRFFSYGDAMLLDKLT

SEQ ID NO: 69083 - protein, 376 aa, unidentified
  source 1..376: note = Moraxella macacae
  REGION 1..376: note = tr|L2F6A7|L2F6A7_9GAMM S-adenosylmethionine:tRNA ribosyltransferase-isomerase OS=Moraxella macacae 0408225; OX = 1230338 GN=queA PE=3 SV=1
MQCFSTKQSTTVNHIMKLSDFDYDLPNALIARYPLAERCASKLLYVNSHGDLQDLAFIDLPNLLNPGDLIVFNDTKVMKARLFGQKDTGGAVEILVERILPNDKNHTNTALCHVRSSKSPKINQTLYFANQQVTATMQGRSDNLFVLVFNQPILPVLEQFGTLPIPPYFERPADDNDTDRYQTVFHDPNKLASVAAPTASLHFDAKILTKLTANGVNTAFVTLHVGAGTFAPVKTLDILQHKMHSEYAEISQTTADLINQTKRQGGKIIAVGTTVTRVLETAFQKTASFANPNLSAWTGDTDIFIYPSYKFGVIDRLITNFHLPKSTLLMLVSAFNGTKNIKNAYLHATKNNYRFFSYGDAMILDKQAIYDETLNT

SEQ ID NO: 69084 - protein, 349 aa, Moraxella nonliquefaciens
  REGION 1..349: note = tr|A0A1B8QJ48|A0A1B8QJ48_MORNO S-adenosylmethionine:tRNA ribosyltransferase-isomerase; OS = Moraxella nonliquefaciens OX=478 GN=queA PE=3 SV=1
MNTPLLTADFDYHLPDELIARYPLAVRSSSRLLHVKGNTLGDRHFSDLPELLNKGDLLVLNDTKVMRARLFGVKDTGGAVEVLIERIIDHEHNIAHCHVRSGRALKIGQTVSLADGNMSATMCGRVQNLFILQFNAPILADLENHGHMPIPPYFERTADDTDDARYQTVFYDPAKQASVAAPTASLHFDDDTLQRLTDKGVQMAFITLHVGAGTFAPVKADDLSDHVMHAEYAHLPQATADKINATKAQNGKIIAVGTTVARTLETAHLHRVDGQLTEFCGDTQIFIYPPYEFGVVDRLITNFHLPKSTLLMLVCAFAGTNNIKHAYAHAISEQYRFFSYGDAMILDGA

SEQ ID NO: 69085 - protein, 349 aa, Moraxella nonliquefaciens
  REGION 1..349: note = tr|A0A1B8PN20|A0A1B8PN20_MORNO S-adenosylmethionine:tRNA ribosyltransferase-isomerase; OS = Moraxella nonliquefaciens OX=478 GN=queA PE=3 SV=1
MNTPLLTADFDYHLPDELIARYPLAVRSSSRLLHVKGNTLGDRHFSDLPELLNKGDLLVLNDTKVMRARLFGVKDTGGAVEVLIERIIDHEHNIAHCHVRSGRALKIGQTVSLADGNMSATMCGRVQNLFILQFNAPILADLENHGHMPIPPYFERTADDTDDARYQTVFYDPAKQASVAAPTASLHFDDDTLQRLTDKGVQMAFITLHVGAGTFAPVKADDLSDHVMHAEYAHLPQTTADKINATKAQNGKIIAVGTTVARTLETAHLHRVDGQLTEFCGDTQIFIYPPYEFGVVDRLITNFHLPKSTLLMLVCAFAGTNNIKHAYAHAISEQYRFFSYGDAMILDGV

SEQ ID NO: 69086 - protein, 357 aa, Moraxella osloensis
  REGION 1..357: note = tr|A0A2K8K0S9|A0A2K8K0S9_9GAMM S-adenosylmethionine:tRNA ribosyltransferase-isomerase; OS = Moraxella osloensis OX=34062 GN=queA PE=3 SV=1
MPLTLDDFDYQLPDELIARYPLAVRSASRLLYLPAHGQPKDQQFVDLPELLNSGDLVVFNDTKVMKARLFGQKASGGAVEVLVERILPDDVTMSQKHTALCHVRASRSPKEGQTLSLADGNTHATVMGREDNLFLLEFDQPILPVLEHYGELPIPPYFERHADDNDETRYQTVFHDPAKLASVAAPTASLHFDDNVLAAFKSKGINTAFVTLHVGAGTFAPVKTEDILRHKMHSEYAELPQATADLINQTKARGGQVIAVGTTVTRVLETAFQKTASFENPMLSAWSGDTDIFIYPSFRFGVIDKLITNFHLPKSTLLMLVSAFAGSEPIKQAYQHAIEQRYRFFSYGDAMLLDKVV

SEQ ID NO: 69087 - protein, 357 aa, Moraxella osloensis
  REGION 1..357: note = tr|A0A173MVI2|A0A173MVI2_9GAMM S-adenosylmethionine:tRNA ribosyltransferase-isomerase; OS = Moraxella osloensis OX=34062 GN=queA PE=3 SV=1
MPLTLDDFDYQLPDELIARYPLAVRSASRLLYLPAHGQPKDQQFVDLPELLNSGDLVVFNDTKVMKARLFGQKASGGAVEVLVERILPDDDTGNQKHTALCHVRASRSPKEGQTLSLADGNIHATVMGREDNLFLLEFDQPILPVLEHYGELPIPPYFERHADDNDETRYQTVFHDPAKLASVAAPTASLHFDDNVLAALKSKGINTAFVTLHVGAGTFAPVKTEDILRHKMHSEYAELPQATADLINQTKARGGQVIAVGTTVTRVLETAFQKTANFENPMLSAWSGDTDIFIYPSFRFGVIDKLITNFHLPKSTLLMLVSAFAGSEPIKQAYQHAIEQRYRFFSYGDAMLLDKVV

SEQ ID NO: 69088 - protein, 347 aa, Moraxella ovis
  REGION 1..347: note = tr|A0A378PKC5|A0A378PKC5_9GAMM S-adenosylmethionine:tRNA ribosyltransferase-isomerase; OS = Moraxella ovis OX=29433 GN=queA PE=3 SV=1
MPLLTADFDYHLPDELIARYPLAVRSSSRLLHVQGDTLTDLNFTDLPDLLNKGDLLVLNDTKVMKARLFGVKDTGGSVEVLIERITDHGNHIAHCHVRSSRALKVGQTVSLADGGMTATMYGRAENLFILQFDAPILADLERYGQMPIPPYFERTADDTDDTRYQTVFHDPAKQASVAAPTASLHFDDETLACLTDKGVEIAFVTLHVGAGTFAPVKADDLTDHIMHAEYAHLPQVTADKINTTKAQGGQVIAVGTTVTRTLETAHLHRVDGQLTEFAGDTQIFIYPPYDFGVVDRLITNFHLPKSTLLMLVSAFAGTDNIKHAYAHAIDKKYRFFSYGDAMILDKS

SEQ ID NO: 69089 - protein, 356 aa, Moraxella pluranimalium
  REGION 1..356: note = tr|A0A1T0CVC2|A0A1T0CVC2_9GAMM S-adenosylmethionine:tRNA ribosyltransferase-isomerase; OS = Moraxella pluranimalium OX=470453 GN=queA PE=3 SV=1
MSHTDQPVLISDYDYDLPEALIARHPLDARSGSRLLHMADGVINDKQFTDLAELLSANDLLVLNDTKVMKARLHGQKATGGAVEVLVERLLPNEDGQAPHRALCHVRSSRSPKAGQMLSLADGKMGATVLGREENLFVLAFDAPILADLDCYGQMPIPPYFERDADEMDDERYQTVFHDPAKTGSVAAPTASLHFDDELLAKLKQKGVKTAFVTLNVGAGTFAPVKADDVRDHIMHSEYAHLPKETAELINQTKANGGRIIAVGTTVTRTLETAYLHRIDDRLVEYAGDTNIFIYPPYRFGVVDCLVTNFHLPKSTLLMLVSAFAGTDHIKQAYQHAIDHGYRFFSYGDAMFLEKV

SEQ ID NO: 69090 - protein, 357 aa, Moraxella porci
  REGION 1..357: note = tr|A0A1T0CSD5|A0A1T0CSD5_9GAMM S-adenosylmethionine:tRNA ribosyltransferase-isomerase; OS = Moraxella porci DSM 25326 OX=573983 GN=queA PE=3 SV=1
MSHTDQPVLISDYDYDLPEALIARHPLDQRSSSRLLYVADGVISDRQFTDLSELLKDGDLLVLNDTKVMKARLHGQKATGGVVEVLVERLLPDEDGHPPHRALCHVRSSRSPKTGQTLSLANNKMHATVLGREENLFILAFDAPILPDLDRYGQMPIPPYFERDADEMDDERYQTVFHDPAKTGSVAAPTASLHFDDDLLDKLKQKGVKTAFVTLNVGAGTFAPVKADDVRDHVMHSEYAHLPKETAELINQTKANGGRIIAVGTTVTRTLETAYLHHKDSKLVEYAGDTNIFIYPPYRFGVVDCLVTNFHLPKSTLLMLVSAFAGIDPIKQAYQHAIDHNYRFFSYGDAMFLEKSI

SEQ ID NO: 69091 - protein, 348 aa, Moraxella sp.
  REGION 1..348: note = tr|A0A229GNM1|A0A229GNM1_9GAMM S-adenosylmethionine:tRNA ribosyltransferase-isomerase; OS = Moraxella sp. VT-16-12 OX=2014877 GN=queA PE=3 SV=1
MPILTSDFDYDLPDELIARYPLATRSASRLLHVKGDKLSDLCFTDLPSLLHQGDLLVLNDTKVMKARLFGKKDTGGAVEVLVERITDHERYIAACHVRSSRALKMGQTVSLADGAMSATMCGRDENLFILQFVNPILADLDKYGQMPIPPYFERTATKTDDERYQTVFCDDAKQASVAAPTASLHFDDKTLQILKDKGVDIAFVTLHVGAGTFAPVKTDDLTDHVMHAEYAHLPQQTADKINAAKANGKKIIAVGTTVARTLETAHLHRVNGLLTEFRGDTQIFIYPPYEFGVVDRLITNFHLPKSTLLMLVSAFAGTDNIKHAYVHAIGQQYRFFSYGDAMLLDKCP

SEQ ID NO: 69092 - protein, 357 aa, Moraxella sp.
  REGION 1..357: note = tr|A0A2K0XUA9|A0A2K0XUA9_9GAMM S-adenosylmethionine:tRNA ribosyltransferase-isomerase; OS = Moraxella sp. RCAD0137 OX=1775913 GN=queA PE=3 SV=1
MSHTDQPVLISDYDYDLPEALIARHPLDQRSSSRLLYVADGVISDRQFTDLAELLKDGDLLVLNDTKVMKARLHGQKATGGVVEVLVERLLPDEVGHPPHRALCHVRSSRSPKAGQTLSLADHKMHATVLGREENLFILAFDAPILPDLDRYGQMPIPPYFERDADEMDDERYQTVFHDPAKTGSVAAPTASLHFDDDLLDKLKQKGVKTAFVTLNVGAGTFAPVKADDVRDHVMHSEYAHLPKETAELINQTKANGGRIIAVGTTVTRTLETAYLHHKDGKLIEYAGDTNIFIYPPYRFGVVDCLVTNFHLPKSTLLMLVSAFAGIDSIKKAYQHAIHHNYRFFSYGDAMFLEKSV

SEQ ID NO: 69093 - protein, 345 aa, unidentified
  source 1..345: note = Moraxellaceae bacterium
  REGION 1..345: note = tr|A0A345P7Q8|A0A345P7Q8_9GAMM S-adenosylmethionine:tRNA ribosyltransferase-isomerase; OS = Moraxellaceae bacterium HYN0046 OX=2283318 GN=queA PE=3; SV = 1
MQLADFHYFLPDELIARYPLAGRSDSRLLCLSHQGEISDRQIVDLPDLLNTGDLLVLNDTRVIKARLHGLRPSGGAVEVLVERITDTYHGLAHVRASNSPKSGAVLTLAEGQVKATVQGRKDNLYILEFDQPVLEALEQYGALPIPPYFNRPAEESDETRYQTVFHDPEKSASVAAPTAGLHIDEALLERLHVKGIKTAFVTLHVGAGTFQPVRTENIKDHVMHAEWGEVPQETVDAVRATQAQGGKVIAVGTTATRALESAARAHGGSLQAWSGETDIFIYPGYQFAVIDRLMTNFHLPESTLLMLVSALTGRDKIMSAYQHAIAQKYRFFSYGDAMLIDRANT

SEQ ID NO: 69094 - protein, 342 aa, unidentified
  source 1..342: note = Moraxellaceae bacterium
  REGION 1..342: note = tr|A0A2A4UZC8|A0A2A4UZC8_9GAMM S-adenosylmethionine:tRNA ribosyltransferase-isomerase; OS = Moraxellaceae bacterium OX=1889775 GN=queA PE=3 SV=1
MKVSDFHFDLPEELIAHYPAKDRSASRLLHLNSQSGQLDHGVFPDLLNYLRPGDLLIFNNTRVMAARLYGHKPSGGKVELLVERVIDGQLALAMLKSSKPARPGLQFELDTGILVEVVERREALYLIRLVDECDWNAVFERIGHMPLPPYIKRDDEKVDEDRYQTVYSEKLGAVAAPTAGLHFDQAMMSQLKERSIDIGFVTLHVGLGTFLPVRVDSLEEHIMHSEWMELTADLVEKINLTRRQGGRVIAVGTTSVRCLESAAKSGALQAYCGETDIFIYPGYQFQVVDALLTNFHLSQSTLIMLVAAFAGWDNIKHAYETAVEERYRFFSYGDAMFIDGKT

SEQ ID NO: 69095 - protein, 358 aa, Morganella morganii
  REGION 1..358: note = tr|M7CIW6|M7CIW6_MORMO S-adenosylmethionine:tRNA ribosyltransferase-isomerase OS=Morganella morganii SC01; OX = 1239989 GN=queA PE=3 SV=1
MRVADFTFELPDELIARYPQAERSKCRLLSLDGISGELNHGIFTEVLNKLNPGDLLVFNDTRVIPARMFGRKASGGKIEVLVERMLDEHRVLAHVRASKAPKEGAELLLGEDESVKATMVARHDALFEIRFDDERDVLTILNQIGHMPLPPYIDRPDEESDRELYQTVYNDRPGAVAAPTAGLHFDEPLLAALREKGVEMAFVTLHVGAGTFQPVRVDNIEDHIMHSEYAEVPQNVVDAVLACKARGNKVVAVGTTSVRSLESAAKAAQDALIAPFFDDTQIFIYPGYEYQVVDALITNFHLPESTLIMLVSAFAGYQHTMQAYEAAVREHYRFFSYGDAMFITRNPQAKFEKVGHDD

SEQ ID NO: 69096 - protein, 358 aa, Morganella morganii
  REGION 1..358: note = tr|A0A2C5T4M8|A0A2C5T4M8_MORMO S-adenosylmethionine:tRNA ribosyltransferase-isomerase; OS = Morganella morganii OX=582 GN=queA PE=3 SV=1
MRVADFTFELPDELIARYPQAERSKCRLLSLDGISGELNHGIFTEVLNKLNPGDLLVFNDTRVIPARMFGRKASGGKIEVLVERMLDEHRVLAHVRASKAPKEGAELLLGEDESVKATMVARHDALFEIRFDDERDVLTILNQIGHMPLPPYIDRPDEESDRELYQTVYNDRPGAVAAPTAGLHFDEPLLAALREKGVEMAFVTLHVGAGTFQPVRVDNIEDHIMHSEYAEVPQNVVDAVLACKARGNKVIAVGTTSVRSLESAAKAAQDALIAPFFDDTQIFIYPGYEYQVVDALITNFHLPESTLIMLVSAFAGYQHTMQAYEAAVRERYRFFSYGDAMFITRNPQAKFEKVGHDD

SEQ ID NO: 69097 - protein, 358 aa, Morganella psychrotolerans
  REGION 1..358: note = tr|A0A1B8H3U7|A0A1B8H3U7_9GAMM S-adenosylmethionine:tRNA ribosyltransferase-isomerase; OS = Morganella psychrotolerans OX=368603 GN=queA PE=3 SV=1
MRVADFTFELPDELIARYPQAERSKCRLLSLDGVSGELNHGIFTDVLNKLNPGDLLVFNDTRVIPARMFGRKASGGKIEVLVERVLDEHSVLAHVRASKAPKPGTELLLGDDESVQATMTARHDALFEIRFDDERDVLTILNQIGHIPLPPYIDRPDEASDRELYQTVYNDRPGAVAAPTAGLHFDEPLLAALREKGVEMAFVTLHVGAGTFQPVRVDKIEEHIMHSEYAEVPQNVVDAVLACKARGNKVVAVGTTSVRSLESAAKASPDALIAPFFDDTQIFIYPGYEYQVVDALITNFHLSESTLIMLVSAFAGYQHTMQAYKAAIQERYRFFSYGDAMFISRNPQAKFEKVGQDD

SEQ ID NO: 69098 - protein, 358 aa, Morganella psychrotolerans
  REGION 1..358: note = tr|A0A1B8H194|A0A1B8H194_9GAMM S-adenosylmethionine:tRNA ribosyltransferase-isomerase; OS = Morganella psychrotolerans OX=368603 GN=queA PE=3 SV=1
MRVADFTFELPDELIARYPQAERSKCRLLSLDGVSGELNHGIFTDVLDKLNPGDLLVFNDTRVIPARMFGRKASGGKIEVLVERMLDDHRVLAHVRASKAPKPGTELLLGDDESVKATMTVRHDALFEIRFDDERDVLTILNQIGHIPLPPYIDRPDEASDRELYQTVYNDRPGAVAAPTAGLHFDEPLLAALREKGVEMAFVTLHVGAGTFQPVRVDKIEEHIMHSEYAEVPQNVVDAVLACKARGNKVVAVGTTSVRSLESAAKASPDALIAPFFDDTQIFIYPGYEYQVVDALITNFHLPESTLIMLVSAFAGYQHTMQAYDAAIQERYRFFSYGDAMFISRDPQAKFEKVGHDD

SEQ ID NO: 69099 - protein, 358 aa, Morganella sp.
  REGION 1..358: note = tr|A0A3D3HWZ2|A0A3D3HWZ2_9GAMM S-adenosylmethionine:tRNA ribosyltransferase-isomerase; OS = Morganella sp. (in: Bacteria) OX=1912315 GN=queA PE=3; SV = 1
MRVADFTFELPDELIARYPQAERSKCRLLSLDGVSGELNHGIFTDVLNKLNPGDLLVFNDTRVIPARMFGRKASGGKIEVLVERMLDDHRVLAHVRASKAPKPGTELLLGDDESVKATMTVRHDALFEIRFDDERDVLTILNQIGHIPLPPYIDRPDEASDRELYQTVYNDRPGAVAAPTAGLHFDEPLLAALREKGVEMAFVTLHVGAGTFQPVRVDKIEEHIMHSEYAEVPQNVVDAVLACKARGNKVVAVGTTSVRSLESAAKASPDALIAPFFDDTQIFIYPGYEYQVVDALITNFHLPESTLIMLVSAFAGYQHTMQAYDAAIQERYRFFSYGDAMFISRDPQAKFEKVGHDD

SEQ ID NO: 69100 - protein, 349 aa, Moritella marina
  REGION 1..349: note = tr|A0A5J6WL27|A0A5J6WL27_MORMI tRNA preQ1(34) S-adenosylmethionine ribosyltransferase-isomerase QueA; OS = Moritella marina ATCC 15381 OX=1202962 GN=queA PE=4 SV=1
MQVSDFNFTLPDELIARYPKADRRSSRLLQLNGNSGELADKQFADILDLVEAGDLMVFNNTRVIPARMYGQKASGGKIEVLVERVISEHSVLAHVRSSKSPKVGARLILEGTVNAEMVARHDALFELKFLDERHVLEVLEDIGHMPLPPYIDRPDEDSDKERYQTVYNEKPGAVAAPTAGLHFDEALLAQLAEKGVNTAFVTLHVGAGTFQPVRVDNILDHHMHSEYAEVSEEVVAKIAETKANGGRVIAVGTTSVRSLESAAQVTMAKGLPLAPFFDDTEIFIYPGYEFQLVDAMVTNFHLPESTLIMLLSAFAGYDHVMPAYQHAIAEKYRFFSYGDAMFVTKQTAD

SEQ ID NO: 69101 - protein, 349 aa, Moritella sp.
  REGION 1..349: note = tr|A0A2G2IQV8|A0A2G2IQV8_9GAMM S-adenosylmethionine:tRNA ribosyltransferase-isomerase; OS = Moritella sp. OX=78556 GN=queA PE=3 SV=1
  VARIANT 87: note = Xaa can be any naturally occurring amino acid
  VARIANT 97: note = Xaa can be any naturally occurring amino acid
  VARIANT 127: note = Xaa can be any naturally occurring amino acid
  VARIANT 189: note = Xaa can be any naturally occurring amino acid
  VARIANT 192: note = Xaa can be any naturally occurring amino acid
  VARIANT 348..349: note = Xaa can be any naturally occurring amino acid
MQVSDFNFSLPDELIARYPKADRRSSRLLQLNGNSGELVDKQFADILDLVEAGDLMVFNNTRVIPARMYGQKASGGKIEVLVERVIXDHSVLAHVRXSKSPKVGAQLILEGTVKAEMIARHDALFEXKFLDERHVLEILEDIGHMPLPPYIDRPDEDSDKERYQTVYNEKPGAVAAPTAGLHFDEALLXELXEKGVNTAFVTLHVGAGTFQPVRVDNILDHHMHSEYAEVSEEVVAKIAETKANGGRVIAVGTTSVRSLESAAQATMAKGLPLAPFFEDTEIFIYPGYKFQLVDAMITNFHLPESTLIMLLSAFAGYDHVMPAYQHAIAEKYRFFSYGDAMFVTKQTXX

SEQ ID NO: 69102 - protein, 349 aa, Moritella sp.
  REGION 1..349: note = tr|A6F9N1|A6F9N1_9GAMM S-adenosylmethionine:tRNA ribosyltransferase-isomerase OS=Moritella sp. PE36; OX = 58051 GN=queA PE=3 SV=1
MQVSDFNFSLPDELIARYPKADRRSSRLLQLNGNSGELVDKQFADILDLVEAGDLMVFNNTRVIPARMYGQKASGGKIEVLVERVISDHSVLAHVRSSKSPKVGAQLILEGTVKAEMIARHDALFELKFLDERHVLEILEDIGHMPLPPYIDRPDEDSDKERYQTVYNEKPGAVAAPTAGLHFDEALLVELAEKDVNTAFVTLHVGAGTFQPVRVDNILDHHMHSEYAEVSEEVVAKIAETKANGGRVIAVGTTSVRSLESAAQATMAKGLPLAPFFEDTEIFIYPGYKFQLVDAMITNFHLPESTLIMLLSAFAGYDHVMPAYQHAIAEKYRFFSYGDAMFVTKQTEK

SEQ ID NO: 69103 - protein, 349 aa, Moritella viscosa
  REGION 1..349: note = tr|A0A090IA18|A0A090IA18_9GAMM S-adenosylmethionine:tRNA ribosyltransferase-isomerase; OS = Moritella viscosa OX=80854 GN=queA PE=3 SV=1
MQVSDFNFSLPDELIARYPKADRRSSRLLQLNGNSGELADKQFTDILDLVEAGDLMVFNNTRVIPARMYGQKASGGKIEVLVERVISEHSVLAHVRSSKSPKVGAQLILEGTVNAEMIARHDALFELKFLDERHVLEVLEDIGHMPLPPYIDRPDEDSDKERYQTVYNEKPGAVAAPTAGLHFDEALLAELAKKGVSTAFVTLHVGAGTFQPVRVDNILDHHMHSEYAEVSEEVVTKIAETKASGGRVIAVGTTSVRSLESAAQATMAKGLPLAPFFDDTEIFIYPGYEFQLVDAMVTNFHLPESTLIMLLSAFAGYDHVMSAYQHAIAEKYRFFSYGDAMFVTKQTAV

SEQ ID NO: 69104 - protein, 349 aa, Moritella yayanosii
  REGION 1..349: note = tr|A0A330LPK4|A0A330LPK4_9GAMM S-adenosylmethionine:tRNA ribosyltransferase-isomerase; OS = Moritella yayanosii OX=69539 GN=queA PE=3 SV=1
MQVSDFNFSLPDELIARYPKADRRSSRLLQLNGNSGELTDKQFVDVLDLVEAGDLMVFNNTRVIPARMYGKKASGGKIEVLVERVIGDHSVLAHVRSSKSPKVGAQLILEGTVKAEMIARHDALFELKFLDERHVLEILEDIGHMPLPPYIDRPDEDSDKERYQTVYNEKPGAVAAPTAGLHFDEALLVELADKGVNIAFVTLHVGAGTFQPVRVDNILDHHMHSEYAEVSADVVAKIAETKANGGRVIAVGTTSVRSLESAAQATMAKGLPLAPFFEDTDIFIYPGYKFQLVDAMITNFHLPESTLIMLLSAFAGYDHVMPAYQHAIAEKYRFFSYGDAMFVTKQTAT

SEQ ID NO: 69105 - protein, 347 aa, Morococcus cerebrosus
  REGION 1..347: note = tr|A0A0C1GYS9|A0A0C1GYS9_9NEIS S-adenosylmethionine:tRNA ribosyltransferase-isomerase; OS = Morococcus cerebrosus OX=1056807 GN=queA PE=3 SV=1
MDISDFDFTLPDRLIAQHPPEVRGSSRLLVALPDMPLQDRVFGDLPDYIEAGDVLVFNNTKVMKARLFGQKESGGKIEALIERVLDNHTALAHIRSSKSPKPGTKLIFEGDICAVMVERADELFCLRFEGEQTVYELLEQNGHLPLPPYIERAAGADDDTRYQTVYAKHQGAVAAPTAGLHFTDELLGRLKAKGVETAEVTLHVGAGTFQPVRVDKIEEHKMHSEWFDVPPETVAAIEAAHARGNKVWAVGTTSMRALESAARETGRLKAGQGDTDIFITPGYRFRVIDRLITNFHLPKSTLLMLVSAFSSMEHIRSVYRHAVEHEYRFFSYGDAMVLGRREMDIED

SEQ ID NO: 69106 - protein, 349 aa, Motilibacter peucedani
  REGION 1..349: note = tr|A0A420XUG1|A0A420XUG1_9ACTN S-adenosylmethionine:tRNA ribosyltransferase-isomerase; OS = Motilibacter peucedani OX=598650 GN=CLV35_0821 PE=3 SV=1
MTAAAPTRTRFVLPPGRLATEPPEWRGRGRDDVRLLVASRYAVVHEHFPSLREYLREGDVLVVNNSVTLPSAVAARDGSGRRFPLHVSTALDDGRWVVEARRPDQSGPDFSLSPGTRLALPGGVELVVDEPFPDAGARPSRLWSAVVSPTVDRARYLERFGSPIVYDYVTGHPPTSYYQNVWASEPGSAEMPSAGRPFTAELLVRLVSRGITVVPITLHCGVSSPELHEPPAPEPFRVSESAAAAVNSARARGGRVVAVGTTVVRALESVASPDGTVHEGAGWTDLVLSAERPARVVDGLVTGLHEPEASHLDLLDAVAGPELVDKAYEALVQGDYLWHEFGDSTLLLP

SEQ ID NO: 69107 - protein, 355 aa, unidentified
  source 1..355: note = Motilimonas sp.
  REGION 1..355: note = tr|A0A418YEM0|A0A418YEM0_9GAMM S-adenosylmethionine:tRNA ribosyltransferase-isomerase; OS = Motilimonas sp. PLHSC7-2 OX=2303987 GN=queA PE=3 SV=1
MKVTDFSFDLPNELIARYPQAERTASRLLSLDGNSGELAHLQFADIEAQLQAGDLLVFNDTRVIPARMFGQKETGGKLEVLVERMLDDKRFLAHVRCSKSPKPGNKLQLEGSVNATMIARHDSLFEIEIDDSRSLLEVLEAVGHMPLPPYIDRPDEDADKERYQTVYNKKPGAVAAPTAGLHFDQALLARLTEKGVEQAFVTLHVGAGTFQPVKVDKVTDHQMHSEYAEVPQDVVDKILATKANGGRVIAVGTTSVRSLESAAQASIRQGKPLAPFMDDTQIFIYPGYQFQLVDAMITNFHLPESTLIMLISAFAGYDNVMKAYQAAITEKYRFFSYGDAMFIRRNEHVTVPSFT

SEQ ID NO: 69108 - protein, 347 aa, unidentified
  source 1..347: note = Motiliproteus coralliicola
  REGION 1..347: note = tr|A0A369WCT9|A0A369WCT9_9GAMM S-adenosylmethionine:tRNA ribosyltransferase-isomerase; OS = Motiliproteus coralliicola OX=2283196 GN=queA PE=3 SV=1
MRVDDFHFELPDELIARHPAEQRTGSRLLCVDGDSGELIHRGFADILELVEPGDLLVFNDTRVIPARMFGNKSTGGKIEMLVERVVDAHNALVHIRSSKAPKPGAELLLEGQLEAEVTGRQGALFEVRFKGERSLLSWLDEIGHMPLPPYMDREDHESDRERYQTVYNRVPGAVAAPTAGLHFDEALLQTLRDKGVELGFVTLHVGAGTFQPVKVETVTEHQMHSEYIEVSEQVCEQVRACHARGGRVIGVGTTSVRSLESAAMKHGGELAAYSGETDIFIYPGYEFRVIDCLVTNFHLPQSTLLMLVSAFAGQQHILNAYQEAVAQKYRFYSYGDAMFLTRRRSAG

SEQ ID NO: 69109 - protein, 350 aa, unidentified
  source 1..350: note = Motiliproteus sp.
  REGION 1..350: note = tr|A0A1R1LLP3|A0A1R1LLP3_9GAMM S-adenosylmethionine:tRNA ribosyltransferase-isomerase; OS = Motiliproteus sp. MSK22-1 OX=1897630 GN=queA PE=3 SV=1
MRVKDFHFELPDELIARFPTEERTGSRLLCLEGNSGELQHRQFTDILDLLQPGDLAVFNNTRVIPARLYGCKESGGKVEMLVERVLDEHQVLAHVRASKAPKPGTRLTFEGKLKAEVIGRQDALFVLNFEGERSVLECLEEVGHMPLPPYMAREDQLEDRERYQTVYGCRQGAVAAPTAGLHFDEDLLQSLEAKGIEQAFVTLHVGAGTFQPVRVESIKDHHMHSEYIEVSQQVCDQIAATRARGGRVVAVGTTSVRCLESAARASDTANGCELASFTGDTDIFIYPGYQFQVVDALVTNFHLSESTLLMLVSAFAGSEHIRIAYEEAIKQRYRFFSYGDAMFLTRRDCL

SEQ ID NO: 69110 - protein, 349 aa, unidentified
  source 1..349: note = Mucilaginibacter auburnensis
  REGION 1..349: note = tr|A0A2H9VUN0|A0A2H9VUN0_9SPHI S-adenosylmethionine:tRNA ribosyltransferase-isomerase; OS = Mucilaginibacter auburnensis OX=1457233 GN=queA PE=3; SV = 1
MKLSQFKFNLPESLIAHTPSDQRDEARLMVLHRDSGKIEHKVFKDVLDYFDDQDVMILNNTKVFPARMYGNKEKTGATIEVFLLRELNKELRLWDVLVDPARKIRVGNKLYFGDDDLLIAEVVDNTTSRGRTIRFLFDGTDEEFRRNVEILGETPLPKYIKRKATSEDKERYQTIYAKHEGAVAAPTAGLHFSRELMKRLELKGVEFAEVTLHVGLGTFRPVEVEDLTKHKMDSEQIIIEEKQANIVNRAIERKKRVCAVGTTSMRAIESAVSASKSLKPINDWTSKFIFPPYDFSIANCMITNFHTPESTLLMMIAAFGGYENVMNAYEIAIKEKYRFYSYGDAMLII

SEQ ID NO: 69111 - protein, 349 aa, Mucilaginibacter frigoritolerans
  REGION 1..349: note = tr|A0A562UHW4|A0A562UHW4_9SPHI S-adenosylmethionine:tRNA ribosyltransferase-isomerase; OS = Mucilaginibacter frigoritolerans OX=652788 GN=queA PE=3; SV = 1
MKLSQFKFNLPDSLIAHTPANTRDESRLMVLHRDSGKIEHKIFKDVLDYFDDKDVMILNNTKVFPARMYGNKEKTGATIEVFLLRELNKELRLWDVLVDPARKIRVGNKLYFGDDDLLIAEVVDNTTSRGRTIRFLFDGTDEEFRRNVEILGETPLPKYIKRKATAEDKDRYQTIFAKHEGAVAAPTAGLHFSRELMKRLELKGVEFAEVTLHVGLGTFRPVEVEDLTKHKMDSEQFIIEEKQANIVNRAIERKKRICAVGTTSMRAVESAVSANKTLKAANDWTSKFIFPPYDFSIANSMITNFHTPESTLLMMICAFGGYEHVMNAYEVAVKEKYRFYSYGDAMLII

SEQ ID NO: 69112 - protein, 349 aa, unidentified
  source 1..349: note = Mucilaginibacter ginsenosidivorans
  REGION 1..349: note = tr|A0A5B8V0T6|A0A5B8V0T6_9SPHI S-adenosylmethionine:tRNA ribosyltransferase-isomerase; OS = Mucilaginibacter ginsenosidivorans OX=398053 GN=queA; PE = 3 SV=1
MKLSQFKFNLPDSLIAHTPAGTRDEARLMVLHKDSGKIEHKIFRDVLDYFDDKDVMILNNTKVFPARMYGNKEKTGATIEVFLLRELNKELRLWDVLVDPARKIRVGNKLYFGDDDLLIAEVVDNTTSRGRTIRFLFDGTDEEFRRNVEILGETPLPKYIKRKATPEDKERYQTIFAKHEGAVAAPTAGLHFSRELMKRLELKGVEFAEVTLHVGLGTFRPVEVEDLTKHKMDSEQFIIEQKQADIVNRGIEAKKRICAVGTTSMRAIESAVSASKTLKPANDWTSKFIFPPYDFSIANSMITNFHTPESTLLMMVCAFGGYENVMHAYEVAVKEKYRFYSYGDAMLMI

SEQ ID NO: 69113 - protein, 349 aa, unidentified
  source 1..349: note = Mucilaginibacter ginsenosidivorax
  REGION 1..349: note = tr|A0A5B8VU21|A0A5B8VU21_9SPHI S-adenosylmethionine:tRNA ribosyltransferase-isomerase; OS = Mucilaginibacter ginsenosidivorax OX=862126 GN=queA; PE = 3 SV=1
MKLSQFKFNLPESLIAHNPSATRDEARLMVLHKDSGKIEHKIFKDVLDYFDDKDVMILNNTKVFPARLYGNKEKTGATIEVFLLRELNKELRLWDVLVDPARKIRVGNKLYFGDDDLLIAEVVDNTTSRGRTIRFLFDGTDEEFRRNVEILGETPLPKYIKRKATAEDKERYQTIFAKHEGAVAAPTAGLHFSRELMKRLELKGVDFAEVTLHVGLGTFRPVEVEDLTKHKMDSEQFIIEQKQADIVNRGIERKARICAVGTTSMRAIESAVSAGKTLKAANDWTSKFIFPPYDFSIANSMITNFHTPESTLLMMVSAFGGYEHVMNAYEVAVKEKYRFYSYGDAMLII

SEQ ID NO: 69114 - protein, 349 aa, Mucilaginibacter gossypii
  REGION 1..349: note = tr|A0A1G8EDD6|A0A1G8EDD6_9SPHI S-adenosylmethionine:tRNA ribosyltransferase-isomerase; OS = Mucilaginibacter gossypii OX=551996 GN=queA PE=3 SV=1
MKLSQFKFNLPESLIAHTPSATRDESRLMVLHKDSGKIEHKIFKDVLDYFDDKDVMILNNTKVFPARLYGNKEKTGATIEVFLLRELNKELRLWDVLVDPARKIRVGNKLYFGDDDLLIAEVVDNTTSRGRTIRFLFDGTDEEFRRNVEILGETPLPKYIKRKATAEDKERYQTIFAKHEGAVAAPTAGLHFSRELMKRLELKGVDFAEVTLHVGLGTFRPVEVEDLTKHKMDSEQFIIEQKQADIVNRGIERKARICAVGTTSMRAIESAVSANKTLKAANDWTSKFIFPPYDFSIANSMITNFHTPESTLLMMISAFGGYEHVMNAYEIAVKEKYRFYSYGDAMLII

SEQ ID NO: 69115 - protein, 349 aa, Mucilaginibacter gossypii
  REGION 1..349: note = tr|A0A5C1IGX7|A0A5C1IGX7_9SPHI S-adenosylmethionine:tRNA ribosyltransferase-isomerase; OS = Mucilaginibacter gossypii OX=551996 GN=queA PE=3 SV=1
MKLSQFKFNLPESLIAHTPSATRDESRLMVLHKDSGKIEHKIFKDVLDYFHDKDVMILNNTKVFPARLYGNKEKTGATIEVFLLRELNKELRLWDVLVDPARKIRVGNKLYFGDDDLLIAEVVDNTTSRGRTIRFLFDGTDEEFRRNVEILGETPLPKYIKRKATAEDKERYQTIFAKHEGAVAAPTAGLHFSRELMKRLELKGVDFAEVTLHVGLGTFRPVEVEDLTKHKMDSEQFIIEQKQADIVNRGIERKARICAVGTTSMRTIESAVSANKTLKAANDWTSKFIFPPYDFSIANSMITNFHTPESTLLMMIAAFGGYENVMNAYEVAVKEKYRFYSYGDAMLII

SEQ ID NO: 69116 - protein, 349 aa, Mucilaginibacter gossypiicola
  REGION 1..349: note = tr|A0A1H8JTZ9|A0A1H8JTZ9_9SPHI S-adenosylmethionine:tRNA ribosyltransferase-isomerase; OS = Mucilaginibacter gossypiicola OX=551995 GN=queA PE=3; SV = 1
MKLSQFKFNLPESLIAHTPSATRDESRLMVLHKDSGKIEHKIFKDVLDYFHDKDVMILNNTKVFPARLYGNKEKTGATIEVFLLRELNKELRLWDVLVDPARKIRVGNKLYFGDDDLLIAEVVDNTTSRGRTIRFLFDGTDEEFRRNVEILGETPLPKYIKRKATAEDKERYQTIFAKHEGAVAAPTAGLHFSRELMKRLELKGVDFAEVTLHVGLGTFRPVEVEDLTKHKMDSEQFIIEQKQADIVNRGIERKARICAVGTTSMRTIESAVSANKTLKAANDWTSKFIFPPYDFSIANSMITNFHTPESTLLMMIAAFGGYENVMNAYEIAVKEKYRFYSYGDAMLII

SEQ ID NO: 69117 - protein, 349 aa, unidentified
  source 1..349: note = Mucilaginibacter gotjawali
  REGION 1..349: note = tr|A0A0X8X3V0|A0A0X8X3V0_9SPHI S-adenosylmethionine:tRNA ribosyltransferase-isomerase; OS = Mucilaginibacter gotjawali OX=1550579 GN=queA PE=3 SV=1
MKLSQFKFNLPDSLVAHTPANTRDEARLMVLHRETGQIEHKIFKDVLDYFDDKDVMILNNTKVFPARMYGNKEKTGATIEVFLLRELNKELRLWDVLVDPARKIRVGNKLYFGDDDLLIAEVVDNTTSRGRTIRFLFDGTDEEFRRNVEILGETPLPKYIKRKATAEDKERYQTIFAKHEGAVAAPTAGLHFSRELMKRLELKGVEFAEVTLHVGLGTFRPVEVEDLTKHKMDSEQFIIEEKQANIVNRGIELKKRICAVGTTSMRAIESAVSANKTLKPANDWTSKFIFPPYDFSIANSMITNFHTPESTLLMMVCAFGGYEHVMNAYEVAVKEKYRFYSYGDAMLII

SEQ ID NO: 69118 - protein, 349 aa, Mucilaginibacter gracilis
  REGION 1..349: note = tr|A0A495J364|A0A495J364_9SPHI S-adenosylmethionine:tRNA ribosyltransferase-isomerase; OS = Mucilaginibacter gracilis OX=423350 GN=queA PE=3 SV=1
MKLSQFKFNLPDSLVAHSPSENRDESRLLVLHRDSGKIEHKIFKDVLNYYDDKDVMIINNTKVFPARLYGNKEKTGATIEVFLLRELNKELRLWDVLVDPARKIRVGNKLYFGDDDLLIAEVVDNTTSRGRTIRFLFDGTDEEFRRNVEILGETPLPKYIKRKATEEDKERYQTIFAKNEGAVAAPTAGLHFSRELMKRLELKGVEFAEVTLHVGLGTFRPVEVEDLTKHKMDSEQFIIEQKQADIVNKAIEDKRRICAVGTTSMRAVESAVSANKTLKSANDWTSKFIFPPYDFSIANSMITNFHTPESTLLMMICAFGGYENVMNAYEIAVKEKYRFYSYGDAMMII

SEQ ID NO: 69119 - protein, 349 aa, Mucilaginibacter lappiensis
  REGION 1..349: note = tr|A0A1N7BI10|A0A1N7BI10_9SPHI S-adenosylmethionine:tRNA ribosyltransferase-isomerase; OS = Mucilaginibacter lappiensis OX=354630 GN=queA PE=3 SV=1
MKLSQFKFNLPESLVAHNPSATRDEARLMVLHKDSGKIEHKIFKDVLDYFDDQDVMILNNTKVFPARLYGNKEKTGATIEVFLLRELNKELRLWDVLVDPARKIRVGNKLYFGDDDLLIAEVVDNTTSRGRTIRFLFDGTDEEFRRNVEILGETPLPKYIKRKATAEDKERYQTIFAKHEGAVAAPTAGLHFSRELMKRLELKGVDFAEVTLHVGLGTFRPVEVEDLTKHKMDSEQFIIEQKQADIVNRGIERKKRICAVGTTSMRAIESAVSAGKTLKAANDWTSKFIFPPYDFSIANSMITNFHTPESTLLMMVSAFGGYEYVMNAYEVAVKEKYRFYSYGDAMLII

SEQ ID NO: 69120 - protein, 349 aa, Mucilaginibacter mallensis
  REGION 1..349: note = tr|A0A1H1Z587|A0A1H1Z587_9SPHI S-adenosylmethionine:tRNA ribosyltransferase-isomerase; OS = Mucilaginibacter mallensis OX=652787 GN=queA PE=3 SV=1
MKLSQFKFNLPDALIANTPSHARDEARLMVLHKDSGKIEHKIFKDILDYYDDQDVMILNNTKVFPARMYGNKEKTGATIEVFLLRELNKELRLWDVLVDPARKIRVGNKLYFGDDDLLIAEVVDNTTSRGRTIRFLFDGTDEEFRRNVEILGETPLPKYIKRKATAEDKERYQTIFAKHEGAVAAPTAGLHFSRELMKRLELKGIDFAEVTLHVGLGTFRPVEVEDLTKHKMDSEQFIIEQKQADIVNRGIERKKRICAVGTTSMRAIESAVSANKTLKAANDWTSKFIFPPYDFSIANSMVTNFHTPESTLLMMICAFGGYEHVMNAYEVAVKEKYRFYSYGDAMLII

SEQ ID NO: 69121 - protein, 349 aa, Mucilaginibacter oryzae
  REGION 1..349: note = tr|A0A316HSV6|A0A316HSV6_9SPHI S-adenosylmethionine:tRNA ribosyltransferase-isomerase; OS = Mucilaginibacter oryzae OX=468058 GN=queA PE=3 SV=1
MKLSQFKFNLPDSLIAHTPSATRDESRLMVLHKDSGKIEHKIFKDVLDYFHDKDVMILNNTKVFPARLYGNKEKTGATIEVFLLRELNKELRLWDVLVDPARKIRVGNKLYFGDDDLLIAEVVDNTTSRGRTIRFLFDGTDEEFRRNVEILGETPLPKYIKRKATAEDKERYQTIFAKHEGAVAAPTAGLHFSRELMKRLELKGVEFAEVTLHVGLGTFRPVEVEDLTKHKMDSEQFIIEQKQADIVNRGIERKARICAVGTTSMRTIESAVSANKTLKAANDWTSKFIFPPYDFSIANSMITNFHTPESTLLMMIAAFGGYENVMNAYEVAVKEKYRFYSYGDAMLII

SEQ ID NO: 69122 - protein, 349 aa, Mucilaginibacter paludis
  REGION 1..349: note = tr|H1Y0Z9|H1Y0Z9_9SPHI S-adenosylmethionine:tRNA ribosyltransferase-isomerase OS=Mucilaginibacter paludis DSM 18603 OX=714943 GN=queA PE=3 SV=1
MKLSQFKFNLPESLVAHSPSENRDESRLLVLHRDSGKIEHKIFKDVLNYFDDKDVMIINNTKVFPARLYGNKEKTGATIEVFLLRELNKELRLWDVLVDPARKIRVGNKLYFGDDDLLIAEVVDNTTSRGRTIRFLFDGTDEEFRRNVEILGETPLPKYIKRKATEEDKERYQTIFAKNEGAVAAPTAGLHFSRELMKRLELKGVEFAEVTLHVGLGTFRTVEVEDLTKHKMDSEQFIIEQKQADIVNRGIENKKRICAVGTTSMRTIESAVSANKTLKAANDWTSKFIFPPYDFSIANSMITNFHTPESTLLMMICAFGGYENVMNAYEVAVKEKYRFYSYGDAMMII

SEQ ID NO: 69123 - protein, 349 aa, unidentified
  source 1..349: note = Mucilaginibacter pedocola
  REGION 1..349: note = tr|A0A1S9P7D2|A0A1S9P7D2_9SPHI S-adenosylmethionine:tRNA ribosyltransferase-isomerase; OS = Mucilaginibacter pedocola OX=1792845 GN=queA PE=3 SV=1
MKLSQFKFNLPDSLIAHTPADKRDESRLMVLHRDSGKIEHKIFKDVLDYFDDKDVMILNNTKVFPARMYGNKEKTGATIEVFLLRELNKELRLWDVLVDPARKIRVGNKLYFGDDDLLIAEVVDNTTSRGRTIRFLFDGTDEEFRRNVEILGETPLPKYIKRKATAEDKERYQTIFAKNEGAVAAPTAGLHFSRELMKRLELKGVEFAEVTLHVGLGTFRPVEVEDLTKHKMDSEQFIIEQKQADIVNKGIERKSRICAVGTTSMRTIESAVSANKTLKAANDWTSKFIFPPYDFSIANSMITNFHTPESTLLMMISAFGGYEHVMNAYEVAVKEKYRFYSYGDAMLII

SEQ ID NO: 69124 - protein, 349 aa, unidentified
  source 1..349: note = Mucilaginibacter phyllosphaerae
  REGION 1..349: note = tr|A0A4Y8A875|A0A4Y8A875_9SPHI S-adenosylmethionine:tRNA ribosyltransferase-isomerase; OS = Mucilaginibacter phyllosphaerae OX=1812349 GN=queA PE=3; SV = 1
MKLSQFKFNLPESLVAHTPSDTRDESRLMVLHRDSGKIEHKIFKDVLDYFDDKDVMILNNTKVFPARMYGNKEKTGATIEVFLLRELNKELRLWDVLVDPARKIRVGNKLYFGDDDLLIAEVVDNTTSRGRTIRFLFDGTDEEFRRNVEILGETPLPKYIKRKATAEDKERYQTIFAKHEGAVAAPTAGLHFSRELMKRLELKGVEFAEVTLHVGLGTFRPVEVEDLTKHKMDSEQFIIEEKQANIVNRAIERKSRICAVGTTSMRTIESAVSAGKTLKAANDWTSKFIFPPYDFSIANSMITNFHTPESTLLMMVSAFGGYEHVMNAYEIAVKEKYRFYSYGDAMLII

SEQ ID NO: 69125 - protein, 349 aa, unidentified
  source 1..349: note = Mucilaginibacter pineti
  REGION 1..349: note = tr|A0A1G7I2I4|A0A1G7I2I4_9SPHI S-adenosylmethionine:tRNA ribosyltransferase-isomerase; OS = Mucilaginibacter pineti OX=1391627 GN=queA PE=3 SV=1
MKLSQFKFNLPESLIAHNPSATRDEARLMVLHKDSGKIEHKIFKDVLDYFDDQDVMILNNTKVFPARLYGNKEKTGATIEVFLLRELNKELRLWDVLVDPARKIRVGNKLYFGDDDLLIAEVVDNTTSRGRTIRFLFDGTEEEFRRNVEILGETPLPKYIKRKATAEDKERYQTIFAKHEGAVAAPTAGLHFSRELMKRLELKGVDFAEVTLHVGLGTFRPVEVEDLTKHKMDSEQFIIEQKQADIVNRGIERKSRICAVGTTSMRAIESAVSAGKTLKPANDWTSKFIFPPYDFSIANSMITNFHTPESTLLMMVSAFGGYEHVMNAYEVAVKEKYRFYSYGDAMLII

SEQ ID NO: 69126 - protein, 349 aa, unidentified
  source 1..349: note = Mucilaginibacter polytrichastri
  REGION 1..349: note = tr|A0A1Q5ZUQ7|A0A1Q5ZUQ7_9SPHI S-adenosylmethionine:tRNA ribosyltransferase-isomerase; OS = Mucilaginibacter polytrichastri OX=1302689 GN=queA PE=3; SV = 1
MKLSQFKFNLPESLIAHTPASTRDEARLMVLHRDSGKIEHKIFKDVLDYFDNKDVMILNNTKVFPARMYGNKEKTGATIEVFLLRELNKELRLWDVLVDPARKIRVGNKLYFGEDDLLVAEVVDNTTSRGRTIRFLFDGTDEEFRRNIEILGETPLPKYIKRKATAEDKERYQTIFAKNEGAVAAPTAGLHFSRELMKRLELKGIEFAEVTLHVGLGTFRPVEVEDLTKHKMDSEQFIIEEKQAAIVNRAIESKHRVCAVGTTSMRTIESAVSANKTLKSANDWTSKFIFPPYEFSIANSMITNFHTPESTLLMMVSAFGGYEHIMNAYEVAVKEKYRFYSYGDAMLII

SEQ ID NO: 69127 - protein, 349 aa, unidentified
  source 1..349: note = Mucilaginibacter psychrotolerans
  REGION 1..349: note = tr|A0A4Y8SAG3|A0A4Y8SAG3_9SPHI S-adenosylmethionine:tRNA ribosyltransferase-isomerase; OS = Mucilaginibacter psychrotolerans OX=1524096 GN=queA; PE = 3 SV=1
MKLSQFKFNLPESLIAHSPSDIRDQSRLMVLHRDSGKIEHKIFKDILDYFDDKDVMILNNTKVFPARMYGNKEKTGATIEVFLLRELNKELRLWDVLVDPARKIRVGNKLYFGDDDLLIAEVVDNTTSRGRTIRFLFDGTDEEFRRNVEILGETPLPKYIKRKATADDKERYQTIFAKHEGAVAAPTAGLHFSRELMKRLELKGVEFAEVTLHVGLGTFRPVEVEDLTKHKMDSEQFIIEQKQADIVNRGIERKSRICAVGTTSMRTIESAVSANKTLKAANDWTSKFIFPPYEFSIANSMITNFHTPESTLLMMISAFGGYEHVMNAYEVAVKEKYRFYSYGDAMLII

SEQ ID NO: 69128 - protein, 349 aa, unidentified
  source 1..349: note = Mucilaginibacter rubeus
  REGION 1..349: note = tr|A0A364WXI8|A0A364WXI8_9SPHI S-adenosylmethionine:tRNA ribosyltransferase-isomerase; OS = Mucilaginibacter rubeus OX=2027860 GN=queA PE=3 SV=1
MKLSQFKFNLPESLIAHSPSATRDESRLMVLHKDSGKIEHKIFKDVLDYFDDKDVMILNNTKVFPARLYGNKEKTGATIEVFLLRELNKELRLWDVLVDPARKIRVGNKLYFGDDDLLIAEVVDNTTSRGRTIRFLFDGTDEEFRRNVEILGETPLPKYIKRKATAEDKERYQTIFAKHEGAVAAPTAGLHFSRELMKRLELKGVDFAEVTLHVGLGTFRPVEVEDLTKHKMDSEQFIIEQKQADIVNRGIERKARICAVGTTSMRAIESAVSANKTLKAANDWTSKFIFPPYDFSIANSMITNFHTPESTLLMMISAFGGYEHVMNAYEIAVKEKYRFYSYGDAMLII

SEQ ID NO: 69129 - protein, 349 aa, unidentified
  source 1..349: note = Mucilaginibacter rubeus
  REGION 1..349: note = tr|A0A5C1HUC9|A0A5C1HUC9_9SPHI S-adenosylmethionine:tRNA ribosyltransferase-isomerase; OS = Mucilaginibacter rubeus OX=2027860 GN=queA PE=3 SV=1
MKLSQFKFNLPESLIAHTPSATRDESRLMVLHKDSGKIEHKIFKDVLDYFHDKDVMILNNTKVFPARLYGNKEKTGATIEVFLLRELNKELRLWDVLVDPARKIRVGNKLYFGDDDLLIAEVVDNTTSRGRTIRFLFDGTDEEFRRNVEILGETPLPKYIKRKATAEDKERYQTIFAKHEGAVAAPTAGLHFSRELMKRLELKGVDFAEVTLHVGLGTFRPVEVEDLTKHKMDSEQFIIEQRQADIVNRGIERKARICAVGTTSMRTIESAVSANKTLKAANDWTSKFIFPPYDFSIANSMITNFHTPESTLLMMIAAFGGYENVMNAYEIAVKEKYRFYSYGDAMLII

SEQ ID NO: 69130 - protein, 349 aa, Mucilaginibacter sp.
  REGION 1..349: note = tr|A0A556MLB5|A0A556MLB5_9SPHI S-adenosylmethionine:tRNA ribosyltransferase-isomerase; OS = Mucilaginibacter sp. MAH-19 OX=2597670 GN=queA PE=3 SV=1
MKLSQFKFNLPESLIAHSPAATRDESRLMVLHKDSGKIEHKVFKDVLDYFDDKDVMILNNTKVFPARMYGNKEKTGATIEVFLLRELNKELRLWDVLVDPARKIRVGNKLYFGDDDLLIAEVVDNTTSRGRTIRFLFDGTEEEFRRNVEILGETPLPKYIKRKATAEDKERYQTIFAKHEGAVAAPTAGLHFSRELMKRLELKGVEFAEVTLHVGLGTFRPVEVEDLTKHKMDSEQIIIEQKQADIVNRGIERKKRICAVGTTSMRAIESAVSASKTLKSVNDWTSKFIFPPYDFSIANSMITNFHTPESTLLMMVSAFGGYEHIMNAYEVAIKEKYRFYSYGDAMLII

SEQ ID NO: 69131 - protein, 349 aa, Mucilaginibacter sp.
  REGION 1..349: note = tr|A0A1C2GPY8|A0A1C2GPY8_9SPHI S-adenosylmethionine:tRNA ribosyltransferase-isomerase; OS = Mucilaginibacter sp. PPCGB 2223 OX=1886027 GN=queA PE=3; SV = 1
MKLSQFKFNLPDSLIAHSPSDQRDESRLLVLHRDSGKIEHKIFKDVLNYFDDKDVMIINNTKVFPARLYGNKEKTGATIEVFLLRELNKELRLWDVLVDPARKIRVGNKLYFGDDDLLIAEVVDNTTSRGRTIRFLFDGTDEEFRRNVEILGETPLPKYIKRKATEEDKERYQTIFAKNEGAVAAPTAGLHFSRELMKRLELKGVEFAEVTLHVGLGTFRPVEVEDLTKHKMDSEQFIIEQKQADIVNKGIEAKRRICAVGTTSMRAIESAVSANKTLKAANDWTSKFIFPPYDFSIANSMITNFHTPESTLLMMICAFGGYENVMNAYEVAVKEKYRFYSYGDAMLII

SEQ ID NO: 69132 - protein, 349 aa, unidentified
  source 1..349: note = Mucilaginibacter yixingensis
  REGION 1..349: note = tr|A0A2T5J7B0|A0A2T5J7B0_9SPHI S-adenosylmethionine:tRNA ribosyltransferase-isomerase; OS = Mucilaginibacter yixingensis OX=1295612 GN=queA PE=3; SV = 1
MKLSQFKFNLPESLIAHNPADQRDEARLMVLHRDTGKIEHKIFKDVLDYFDDKDVMILNNTKVFPARMYGNKEKTGATIEVFLLRELNKELRLWDVLVDPARKIRVGNKLYFGDDDLLIAEVVDNTTSRGRTIRFLFDGTDEEFRRNIEILGETPLPKYIKRKATAEDKERYQTIFAKHEGAVAAPTAGLHFSRELMKRLELKGVEFAEVTLHVGLGTFRPVEVEDLTKHKMDSEQIIIEQRQADIVNRGIERKKRICAVGTTSMRAIESAVSANKTLKAVNDWTSKFIFPPYDFSIANSMVTNFHTPESTLLMMICAFGGYDEVMNAYEIAVKEKYRFYSYGDAMLII

SEQ ID NO: 69133 - protein, 392 aa, unidentified
  source 1..392: note = Mucinivorans hirudinis
  REGION 1..392: note = tr|A0A060REP4|A0A060REP4_9BACT S-adenosylmethionine:tRNA ribosyltransferase-isomerase; OS = Mucinivorans hirudinis OX=1433126 GN=BN938_2793 PE=3; SV = 1
MDKVINISEFDYHLPVERIAKFPLDRREESKLLVYKHNIIADSQFLNIRGEIPSDYLLAFNNTKVVRARLIFRKDSGARIEIFCLEPVLDYERAFAAVGQCSWKCIVGNAKKWKEGDVKITHNEITLSAAKISDNQVKFSWNTTHTFGELLAILGKIPIPPYLERDSAEIDNSRYQTTYCKIEGSVAAPTAGLHFTKDILAQFPVQAEVTLHVGAGTFLPVKTENAVEHAMHTEHFSIEVAELEKLVRSAGRIIAVGTTTVRTLESLVVLGERVLTGGNPREQQTVGQWEAYGEEKQSAPAADALGALHQYMVKNQIPNLHCSTQIMITPGYRFRVVAGLITNFHQPKSTLLLLISAVVGDDWHRIYEHAMANGYRFLSYGDSSLLFVESVR

SEQ ID NO: 69134 - protein, 349 aa, unidentified
  source 1..349: note = Mucinivorans hirudinis
  REGION 1..349: note = tr|A0A060RES4|A0A060RES4_9BACT S-adenosylmethionine:tRNA ribosyltransferase-isomerase; OS = Mucinivorans hirudinis OX=1433126 GN=queA PE=3 SV=1
MKLSQYRYEFTPDMVAPYPMDNRDESRLMVIDRRTGKIDHKTFKDVLNYFKEGDVMILNNTRVFPARLYGNKEKTGAEIEVFLLRELNEELRLWDVLVDPARKIRIGNKLYFGDDDLVVAEVIDNTTSRGRTLRFLFDGTHEEFRKALYGLGETPLPRWVREKVEPLDEERYQTIFATEEGAVAAPTAGLHFSKHLLKRMEIKGINTAFITLHAGLGGFRTVDVEDLSKHKTDSEQVIITENAANVVNKARCAGRRVCAVGTTVQRAIESSVTTQGMLTPFDGWTNKFIFPPYEFNVANSMITNLHLPESIHLMLVSAFLGYDLTMRAYEIARQEKYRIGTYGDAMLIL

SEQ ID NO: 69135 - protein, 340 aa, Mucispirillum schaedleri
  REGION 1..340: note = tr|V2QH17|V2QH17_9BACT S-adenosylmethionine:tRNA ribosyltransferase-isomerase OS=Mucispirillum schaedleri ASF457 OX=1379858 GN=queA PE=3 SV=1
MATKVDKFDYNLPKELIALYPASKRDKCRLMMVDTVNKSITNHIFSDIVNILDDTSFLVVNNTKVRNARLYAKKVTGGLSEIFVTDVIDNTHFKGLVRGKFKTGDKVISEGMYFTLLEKLQDGLWIIQAESDIEKIMYEKGHVPLPPYINRQDTQQDKTDYQTVYAKYTGSSAAPTAGLHFTNELLSALKNKGVEVIEITLDVGLGTFRPVKTEYMEDHEMHYERYYISEDAAERINLLKSKGKKLTAVGSTSVRALETASDDKGIIKAGESSSNIFIMEPYNFKTVDNMITNFHLPKSTLLAMVSVLGGYDLIMQAYHRAVQENYRFFSYGDAMYIKRK

SEQ ID NO: 69136 - protein, 363 aa, unidentified
  source 1..363: note = Muribacter muris
  REGION 1..363: note = tr|A0A0J5P7B9|A0A0J5P7B9_9PAST S-adenosylmethionine:tRNA ribosyltransferase-isomerase; OS = Muribacter muris OX=67855 GN=queA PE=3 SV=1
MRVADFHFDLPDERIARYPTPERTASRLLYLNGETGEFHDQQFPDLLSHLNAGDLLIFNNTRVIPARLYGRKTSGGKLEVLVERILDDNRCLAHIRSSKSPKVDAEIILGEDKLGEGNGLKAVMLARHDALFELKFEGEMPLIDQLQQAGHMPLPPYIDRPDEEADQERYQTVYNQIPGAVAAPTAGLHFDTELLAQLNAKGIKTAFVTLHVGAGTFQPVRVETIEDHKMHAEYAEVSQAVVDQILTTKAAGKRVICVGTTSVRSIESAAQQAEKQGKLIAPFYSDTSIFLYPGKTFRVVDALITNFHLPESTLIMLVSAFAGYRHCMQAYRHAVDHHYRFFSYGDAMFITKNPHATDDMPSA

SEQ ID NO: 69137 - protein, 363 aa, unidentified
  source 1..363: note = Muribacter muris
  REGION 1..363: note = tr|A0A4Y9K4P1|A0A4Y9K4P1_9PAST S-adenosylmethionine:tRNA ribosyltransferase-isomerase; OS = Muribacter muris OX=67855 GN=queA PE=3 SV=1
MRVADFHFDLPDERIARYPTPERTNSRLLYLNGETGEFHDQQFPDLLSHLNAGDLLIFNNTRVIPARLYGRKTSGGKLEVLVERILDDNRCLAHIRSSKSPKVDAEIILGEDKLGEGNGLKAVMLARHDALFELKFEGEIPLLDQLQQAGHMPLPPYIDRPDEEADQERYQTVYNQIPGAVAAPTAGLHFDTTLLTQLNAKGIKTAFVTLHVGAGTFQPVRVETIEDHKMHAEYAEVSQAVVDQILATKAAGKRVICVGTTSVRSIESAAQQAEKQGKLIAPFYSDTSIFLYPGKTFRVIDALITNFHLPESTLIMLVSAFAGYRHCMQAYRHAVDHHYRFFSYGDAMFITKNPHATDDMPSA

SEQ ID NO: 69138 - protein, 350 aa, unidentified
  source 1..350: note = Muribaculaceae bacterium
  REGION 1..350: note = tr|A0A4Q0IMX1|A0A4Q0IMX1_9BACT S-adenosylmethionine:tRNA ribosyltransferase-isomerase; OS = Muribaculaceae bacterium Isolate-007 (NCI) OX=2489217; GN = queA PE=3 SV=1
MKLSQFKFKFPEELIATEPTPVRDEARMMVVHKSTGEIEHRIFKEIINYFDDGDVMVFNDTKVFPAKLIGNKEKTGAKIEVFLLRELNEEHKLWDVLVEPARKIRIGNKLYFGDDESMVAEVIDNTTSRGRTLRFLYDGPHEEFKEALYKLGMTPLPPYIKRESLPSDAEDYQCIFAAKEGAVVAPAAGLHFSRELLKRLEIKGVKDAYLTLHSGLGNYRDIDVEDLTKHRMDSEDMVVTQELVDIVNAAKDENRNVCAVGTSVLRGIESAVSMGGHMKTYAGWTNKFIFPPYDFTVANAMVSNFHLPYSTMLMMVCAFGGYDLVMYAYDEAIKEKYRFGAYGDAMLIVD

SEQ ID NO: 69139 - protein, 350 aa, unidentified
  source 1..350: note = Muribaculaceae bacterium
  REGION 1..350: note = tr|A0A3N2NM10|A0A3N2NM10_9BACT S-adenosylmethionine:tRNA ribosyltransferase-isomerase; OS = Muribaculaceae bacterium Isolate-114 (HZI) OX=2486475; GN = queA PE=3 SV=1
MKLSQFKFKLPEELIAQYPAENRDECRMMVVNSKTGEITHHIFKELINYFDEGDVMIFNDTKVFPARLYGNKEKTGACIEVFLLRELNAENKLWDVLVEPARKIRIGNKLYFGDDDSMVAEVIDNTTSRGRTLRFLYDGPHDEFKEALYALGETPLPEYIKRKAEPEDAERYQCIYAEKEGAVMAPAAGLHFSRELLKRLEIKGVERGFLTLHSGRGNFKEIDVEDLTKHRMDSEDTMVDEKLVDIVNVAKDNGHNVCAVGTSVLRALATAVCMNGRLMTYSGWTNKFIFPPYDFTVCNSLISNFHMPLSTMLMMVAAFGGYETVMKAYDVAVKEKYRFGAYGDAMLILR

SEQ ID NO: 69140 - protein, 350 aa, unidentified; identical to SEQ ID NO: 69138
  source 1..350: note = Muribaculum intestinale
  REGION 1..350: note = tr|A0A1B1SA94|A0A1B1SA94_9BACT S-adenosylmethionine:tRNA ribosyltransferase-isomerase; OS = Muribaculum intestinale OX=1796646 GN=queA PE=3 SV=1

SEQ ID NO: 69141 - protein, 408 aa, unidentified
  source 1..408: note = Muribaculum intestinale
  REGION 1..408: note = tr|A0A4S1ZT82|A0A4S1ZT82_9BACT S-adenosylmethionine:tRNA ribosyltransferase-isomerase; OS = Muribaculum intestinale OX=1796646 GN=E5360_00590 PE=3; SV = 1
MAIDPHSLHIADFNYTLPDEQIAKHPLAERDRCRLLVRRGDGEIEEHEFLELPGLLPSDAMLVYNNTRVINARLRFRKGDNGNGSLIEVFCLEPASPSDYAISFASTSGCSWICFVGNSKRWKDGAIRRRLNIGGQEVVLSATRVARDGNASEVRFDWDNPDVTFSQIIESAGEIPIPPYLNRGTEESDSTDYQTVYSRIEGSVAAPTAGLHFTPAVLDAVDRRGIPRRELTLHVGAGTFQPVKSDTVGEHGMHSEFISVPRELIAELVATERRVVAVGTTSVRTLESLYHAGCLVYEGKWQGEVPQWYPYESSHPRLGRREALKALLDYVDGTDASRFIASTRIIIAPGYTYRVVAGMVTNFHQPQSTLLLLVSAFVDGHWREMYDFALARGFRFLSYGDASLLLTE

SEQ ID NO: 69142 - protein, 350 aa, unidentified
  source 1..350: note = Muribaculum sp.
  REGION 1..350: note = tr|A0A4P7W5G4|A0A4P7W5G4_9BACT S-adenosylmethionine:tRNA ribosyltransferase-isomerase; OS = Muribaculum sp. H5 OX=2530393 GN=queA PE=3 SV=1
MKLSQFKFRLPDELIAQRPAPERDQSRMMVVNRRTGEIEHKIFKDIIDYFDDGDLFVYNDTMVFPARLYGNKEKTGARIEVFLLRELSAENKLWDVLVEPARKIRIGNKLYFGDDESMVAEVIDNTTSRGRTLRFLYDGPHEEFKKELYKLGTTPLPYYINREPDEEDAERFQTIFARKEGAVIVPGAGLHFSRELLKRLEIKGVNLGFITIHSGLGNYREIDVEDLTKHRMDSEEMEASEELVDLVNATKDGGHRVCAVGTSVLRAVASAVSMGDHMKTYSGWTNKFIFPPYDFSVTDALVSNFHLPYSTMLMMVAAFGGYDLVMDAYKKAVKEGYKFGVYGDAMLIVS

SEQ ID NO: 69143 - protein, 349 aa, unidentified
  source 1..349: note = Muribaculum sp.
  REGION 1..349: note = tr|A0A4S2AVB6|A0A4S2AVB6_9BACT S-adenosylmethionine:tRNA ribosyltransferase-isomerase; OS = Muribaculum sp. NM65_B17 OX=2516961 GN=queA PE=3 SV=1
MKLSQFKFKLPEELIATEPCAVRDESRLMVVNRKTGEIEHHTFKEIINYFGDGDVFILNDTMVFPARLYGNKEKTGAKIEVFLLRELNEENKLWDVLVEPARKIRIGNKLYFGDDESMVAEVIDNTTSRGRTLRFLYDGSHEEFKDALYKLGQTPLPPYIKREPVPTDAERYQCIFAAKEGAVVAPAAGLHFSRELMKRMEIKGIETGFLTVHSGLGNYREIDVEDLTKHRMDSEEMEVTPELVDMVNKAKDDNKQVCAVGTSVLRGIETAVSMGGHMKTFTGWTNKFIFPPYDFTVATSLVSNFHMPYSTMLMMVAAFGGYDLVMHAYEVAVKEKYRFGAYGDAMLIL

SEQ ID NO: 69144 - protein, 349 aa, unidentified
  source 1..349: note = Muricauda antarctica
  REGION 1..349: note = tr|A0A1M6TTW5|A0A1M6TTW5_9FLAO S-adenosylmethionine:tRNA ribosyltransferase-isomerase; OS = Muricauda antarctica OX=1055723 GN=queA PE=3 SV=1
MKLSNFNFELPKELLAEYPAENRDESKLMVIHRDSGKIEHRMFKDLIEYFDEGDVMVLNNTKVFPARLFGNKEKTGARIEVFLLRELNQEQRLWDVLVDPARKIRIGNKLYFGDDESLVAEVIDNTTSRGRTLRFLYDGSYTDFRRKLRELGETPLPKYIKRNVEPEDEERYQTIYAKHEGAVAAPTAGLHFSKHLLKRLEIKGIDFAEVTLHVGLGTFNPVEVEDLSKHKMDSEELVIDEKATEIVNRAKVKKKRVCAVGTTVMRGLESAVSSEHTLNTYEGWTNKFIFPPYDFSIANCMVTNFHLPKSTLLMMVSAFAGHDLIKKAYKQAILEGYRFYSYGDAMLIL

SEQ ID NO: 69145 - protein, 349 aa, Muricauda lutaonensis
  REGION 1..349: note = tr|A0A0D5YTM6|A0A0D5YTM6_9FLAO S-adenosylmethionine:tRNA ribosyltransferase-isomerase; OS = Muricauda lutaonensis OX=516051 GN=queA PE=3 SV=1
MKLSNFNFELPKELLAEYPAENRDESRLMVVHRDSGKIEHKMFKDLIDYFDEGDVMVLNNTKVFPARLYGNKEKTGARIEVFLLRELNEEQRLWDVLVDPARKIRIGNKLYFGEDESLVAEVIDNTTSRGRTLRFLYDGSYMDFRRKLKELGETPLPKYIKREVEPEDELRYQTIYAKHEGAVAAPTAGLHFSKHLLKRLEIKGIDFAEVTLHVGLGTFNPVEVEDLSKHKMDSEELVIDERATEVVNRAKRNKKKVCAVGTTVMRGLESAVSSEHTLNTFEGWTNKFIFPPYEFSIANCMITNFHLPKSTLLMMVSAFMGHDLMKKAYKQAILEQYRFYSYGDAMLIL

SEQ ID NO: 69146 - protein, 349 aa, Muricauda lutimaris
  REGION 1..349: note = tr|A0A3A1NCG0|A0A3A1NCG0_9FLAO S-adenosylmethionine:tRNA ribosyltransferase-isomerase; OS = Muricauda lutimaris OX=475082 GN=queA PE=3 SV=1
MKLSNFSFELPKELLAEYPAEHRDESKLMVVHRDTGKIEHKMFKDIVDYFDEDDVMVLNNTKVFPARLFGNKEKTGARIEVFLLRELNQEQRLWDVLVDPARKIRIGNKLYFGEDESLVAEVIDNTTSRGRTLRFLYDGSYTDFRRKLRELGETPLPKYIKREVTPEDEERYQTIYAKHEGAVAAPTAGLHFSKHLLKRLEIKGIEFAEVTLHVGLGTFNPVEVEDLSKHKMDSEELVIDEKATEIVNNAKANKRKVCAVGTTVMRGLESAVSSEHTLNTFEGWTNKFIFPPYEFSIANCMITNFHLPKSTLMMMVSAFAGHDLIKKAYKQAILEGYRFYSYGDAMLIL

SEQ ID NO: 69147 - protein, 349 aa, Muricauda olearia
  REGION 1..349: note = tr|A0A444VJZ0|A0A444VJZ0_9FLAO S-adenosylmethionine:tRNA ribosyltransferase-isomerase; OS = Muricauda olearia OX=552546 GN=queA PE=3 SV=1
MKLSNFNFELPKELLAEYPAENRDESKLMVVHRDTGKIEHKMFKDLIDYFDEGDVMVLNNTKVFPARLYGNKEKTGARIEVFLLRELNQEQRLWDVLVDPARKIRIGNKLYFGEDESLVAEVIDNTTSRGRTLRFLYDGSYTDFRRKLRELGETPLPKYIKRNVEPEDEERYQTIYAKYEGAVAAPTAGLHFSKHLLKRLEIKGIDFAEVTLHVGLGTFNPVEVEDLSKHKMDSEELVIDEKATEVVNSAKDDKKKVCAVGTTVMRALESAVSSEHTLNTFEGWTNKFIFPPYDFSIANCMITNFHLPKSTLLMMVSAFAGHDLIKKAYKQAILEGYRFYSYGDAMLIL

SEQ ID NO: 69148 - protein, 349 aa, unidentified
  source 1..349: note = Muricauda pacifica
  REGION 1..349: note = tr|A0A2T0MJY3|A0A2T0MJY3_9FLAO S-adenosylmethionine:tRNA ribosyltransferase-isomerase; OS = Muricauda pacifica OX=1080225 GN=queA PE=3 SV=1
MKLSNFNFELPKELLAEYPAENRDESKLMVIHRETGKIEHKMFKDLIDYFDEGDVMVLNNTKVFPARLYGNKEKTGARIEVFLLRELNQEQRLWDVLVDPARKIRIGNKLYFGDDESLVAEVIDNTTSRGRTLRFLYDGSYTDFRRKLRELGETPLPKYIKRDVEPEDEERYQTIYAKHEGAVAAPTAGLHFSKHLLKRLEIKGVDFAEVTLHVGLGTFNPVEVEDLSKHKMDSEELVIDEKATEIVNRAKSNKKKVCAVGTTVMRGLESAVSSEHTLNTFEGWTNKFIFPPYDFSIANCMVTNFHLPKSTLLMMISAFVGHDLMKKAYKQAILEQYRFYSYGDAMLII

SEQ ID NO: 69149 - protein, 349 aa, Muricauda ruestringensis
  REGION 1..349: note = tr|G2PKZ8|G2PKZ8_MURRD S-adenosylmethionine:tRNA ribosyltransferase-isomerase OS=Muricauda ruestringensis (strain DSM 13258 / CIP 107369 / LMG 19739 / B1); OX = 886377GN=queA PE=3 SV=1
MKLSNFNFELPKELLAEYPAEHRDESKLMVVHRDTGKIEHKMFKDLVNYFDEDDVMVLNNTKVFPARLFGNKEKTGARIEVFLLRELNQEQRLWDVLVDPARKIRIGNKLYFGEDESLVAEVIDNTTSRGRTLRFLYDGSYTDFRRKLRELGETPLPKYIKREVTAEDEERYQTIYAKHEGAVAAPTAGLHFSKHLLKRLEIKGIEFAEVTLHVGLGTFNPVEVEDLSKHKMDSEELVIDEKATEIVNNAKANKRKVCAVGTTVMRGLESAVSSEHTLNTHEGWTNKFIFPPYEFSIANCMITNFHLPKSTLLMMVSAFAGHDLIKKAYKQAILEGYRFYSYGDAMLIL

SEQ ID NO: 69150 - protein, 349 aa, Muricauda sp.
  REGION 1..349: note = tr|A0A2N0GI38|A0A2N0GI38_9FLAO S-adenosylmethionine:tRNA ribosyltransferase-isomerase; OS = Muricauda sp. ES.050 OX=1798204 GN=queA PE=3 SV=1
MKLSNFNFELPKELLAEYPAEHRDESKLMVVHRDTGKIEHKMFKDLVDYFEEDDVMVLNNTKVFPARLFGNKEKTGARIEVFLLRELNQEQRLWDVLVDPARKIRIGNKLYFGEDESLVAEVIDNTTSRGRTLRFLYDGSYTDFRRKLRELGETPLPKYIKREVTPDDEERYQTIYAKHEGAVAAPTAGLHFSKHLLKRLEIKGIEFAEVTLHVGLGTFNPVEVEDLSKHKMDSEELVIDEKATEIVNNAKTHKRKVCAVGTTVMRGLESAVSSEHTLNTHEGWTNKFIFPPYEFSIANCMITNFHLPKSTLLMMVSAFAGHDLIKKAYKQAILEGYRFYSYGDAMLIL

SEQ ID NO: 69151 - protein, 349 aa, Muricauda sp.
  REGION 1..349: note = tr|A0A2E3VL02|A0A2E3VL02_9FLAO S-adenosylmethionine:tRNA ribosyltransferase-isomerase; OS = Muricauda sp. OX=192149 GN=queA PE=3 SV=1
MKLSNFNFELPKELLAEYPAEHRDESKLMVIHRDSGKIEHKMFKDLVDYFDEDDVMVLNNTKVFPARLFGNKEKTGARIEVFLLRELNQEQRLWDVLVDPARKIRIGNKLYFGDDENLVAEVIDNTTSRGRTLRFLYDGSYTDFRRKLRELGETPLPKYIKREVTPDDEERYQTIYAKHEGAVAAPTAGLHFSKHLLKRLEIKGINFAEVTLHVGLGTFNPVEVEDLSKHKMDSEELVIDEKATEIVNTAKSNKRKVCAVGTTVMRGLESAVSSEHTLNTFEGWTNKFIFPPYDFSIANCMITNFHLPKSTLLMMVSAFAGHDLIKKAYKQAILEGYRFYSYGDAMLIL

SEQ ID NO: 69152 - protein, 349 aa, unidentified; identical to SEQ ID NO: 69144
  source 1..349: note = Muricauda taeanensis
  REGION 1..349: note = tr|A0A3A1NR69|A0A3A1NR69_9FLAO S-adenosylmethionine:tRNA ribosyltransferase-isomerase; OS = Muricauda taeanensis OX=1005926 GN=queA PE=3 SV=1

SEQ ID NO: 69153 - protein, 349 aa, unidentified
  source 1..349: note = Muricauda zhangzhouensis
  REGION 1..349: note = tr|A0A1H2X9W3|A0A1H2X9W3_9FLAO S-adenosylmethionine:tRNA ribosyltransferase-isomerase; OS = Muricauda zhangzhouensis OX=1073328 GN=queA PE=3 SV=1
MKLSNFNFELPKELLAEHPAEHRDESKLMVIHRDTGKIEHKMFKDLIDYFDEGDVMVLNNTKVFPARLFGNKEKTGARIEVFLLRELNQEQRLWDVLVDPARKIRIGNKLYFGDDESLVAEVIDNTTSRGRTLRFLYDGSYTDFRRKLRELGETPLPKYIKREVTPEDEERYQTIYAKHEGAVAAPTAGLHFSKHLLKRLEIKGIDFAEVTLHVGLGTFNPVEVEDLSKHKMDSEELVIDEKATEVVNNAKDQKRKICAVGTTVMRGLESAVSSEHTLNTFEGWTNKFIFPPYDFSIANCMITNFHLPKSTLLMMVSAFAGHDLIKKAYKQAILEGYRFYSYGDAMLIL

SEQ ID NO: 69154 - protein, 376 aa, unidentified
  source 1..376: note = Muricomes intestini
  REGION 1..376: note = tr|A0A4R3K641|A0A4R3K641_9FIRM S-adenosylmethionine:tRNA ribosyltransferase-isomerase (Fragment) OS=Muricomes intestini OX=1796634 GN=EDD59_1121; PE = 3 SV=1
PYAPGIGKIRNRKKSDFLKLTLDKRSLHNRKADFALKTSDFYYDLPQELIAQDPLEDRAGSRLLVLDKKTGKTEHHIFRDIAGYLEPGDCLVINDTKVIPARLIGVKEDTGAKIEVLLLKRKENNVWETLVKPGKKARPGTRISFGDGLLMGEVMDVVDEGNRLIHFKYEGIFEEILDQLGQMPLPPYITHQLKDKDRYNTVYATHEGSAAAPTAGLHFTPELLQKIQDKGVDIARVTLHVGLGTFRPVKVKEVKEHHMHSEFYIIDEEAAEKINRAKETGKRVICVGTTSCRTIEAAADENGYLKACSGWTEIFIYPGYRFKVLDGLITNFHLPESTLIMLVSALADREHVLAAYEEAVKEKYRFFSFGDAMLIV

SEQ ID NO: 69155 - protein, 349 aa, Muriicola sp.
  REGION 1..349: note = tr|A0A411E7E2|A0A411E7E2_9FLAO S-adenosylmethionine:tRNA ribosyltransferase-isomerase; OS = Muriicola sp. MMS17-SY002 OX=2507538 GN=queA PE=3 SV=1
MKLSHFNFELPKELLAEYPAEHRDESKLMVVHRETGKIEHKMFKDLIDYFKEDDVMVLNNTKVFPARLFGNKEKTGARIEVFLLRELNEEQRLWDVLVDPARKIRIGNKLYFGEDESLVAEVIDNTTSRGRTLRFLYDGAYIDFRRKLRELGETPLPKYIKRDVEPEDETRYQTIYAKHEGAVAAPTAGLHFSKHLLKRLEIKGIKYAELTLHVGLGTFNPVEVEDLSKHKMDSEELVIDERATEIVNTAKNNKRRICAVGTTAMRGLESAVSSDYMLNTFDGWTNKFIFPPYEFSIANAMVTNFHLPKSTLLMMVSAFMGHDLMKRAYKEAILEGYRFYSYGDAMLII

SEQ ID NO: 69156 - protein, 357 aa, unidentified
  source 1..357: note = Mycoavidus cysteinexigens
  REGION 1..357: note = tr|A0A2Z6EYG6|A0A2Z6EYG6_9BURK S-adenosylmethionine:tRNA ribosyltransferase-isomerase; OS = Mycoavidus cysteinexigens OX=1553431 GN=queA PE=3 SV=1
MYTLSDFDFKLPAELIAQTALANRSASRLLEVDNARAPAHLIDRRFAELPACIAAGDLLVFNDTQVLKARFFGNKASGGKIEVLIERIIGTRTALAQIRASKRPAVGSTLRLADAFEVTIGEPQQADAPASFYTLHFPEDCLSLIERYGRLPLPPYITHAPDATDEARYQTVYAANPGAVAAPTAGLHFDQALLAQLDARGVQRATLTLHVGAGTFQPVRTENLAQHRMHSEWYQISPSLVAAIARTRAAGRRVIAVGTTSLRALEAAAQSSAAQGTDTDLLCAGSGETDIFITPGYRFRVVDQLITNFHLPKSTLLMLVCAFAGFDVIHTAYQYAISQKYRFFSYGDAMFLTHRPC

SEQ ID NO: 69157 - protein, 353 aa, Mycobacterium colombiense
  REGION 1..353: note = tr|A0A1A3RHD8|A0A1A3RHD8_9MYCO S-adenosylmethionine:tRNA ribosyltransferase-isomerase; OS = Mycobacterium colombiense OX=339268 GN=A5653_08455 PE=3; SV = 1
MTLTAPRTRFHRAPGSDAFEPPEAHGIARDAVKLLVARPDRVTHARFADLGDHLRPGDLLVVNDSETLPAAVDGRRDGQPIAVHFSTRRAERIWVVELRPAGDAAGHLPDVRPGERIDMPGGGVLVIESSYPQPGISGARLWSARIVVEGDVGSYLARHGRPIRYSYVPRPWPLHYYQTVFARRPGSAEMPSAARPFSTELVTDLVSAGIAIAPITLHAGVSSADAGEPPVAEPLHVPAATARLVNFTRETGGRVIAVGTTVTRALESAATADGVVRQVDGWTDLVLGPDRPCRIVDGLVTGWHDAGASHLLLLEAVAGPGLVARAYREAVDHGYLWHEFGDSALLLPGRATT

SEQ ID NO: 69158 - protein, 353 aa, Mycobacterium colombiense
  REGION 1..353: note = tr|A0A1A0VWD4|A0A1A0VWD4_9MYCO S-adenosylmethionine:tRNA ribosyltransferase-isomerase; OS = Mycobacterium colombiense OX=339268 GN=A5760_25300 PE=3; SV = 1
MTASRTPASPQTHFHRAPTSDATEPPEVRGVARDAVKLLVARPGRVDHARFSDLGDYLRPGDLLVVNDSATLPAAVDGDRAGRPIAIHFSTARAALVWVVELRPAGNAVGHLTDIRPGERIEMPGGGALVIESSYPDPGISGARLWVARVVVEGDAASYLATHGRPIRYSYVPRPWPLHYYQTVFARRPGSAEMPSAARPFSTELVTDLVAAGIAIAPITLHAGVSSADAGEPPVAEPVHVPAATARLVNFTRATGGRVIAVGTTVTRALESAATADGLVRQVEGWTDLVLGPDRPCRVVGGLVTGWHDAGASHLLLLEAVAGPELVARAYREAVEHGYLWHEFGDSALLLPG

SEQ ID NO: 69159 - protein, 351 aa, unidentified
  source 1..351: note = Mycobacterium decipiens
  REGION 1..351: note = tr|A0A1X2LXU3|A0A1X2LXU3_9MYCO S-adenosylmethionine:tRNA ribosyltransferase-isomerase; OS = Mycobacterium decipiens OX=1430326 GN=B8W66_05425 PE=3; SV = 1
MTLANRPRPLLHRAATSHATEPPEARGVARDQVRLLVARPDGVDHARFADLGDHLRPGDLLVVNNSATLPAAVDGHRAGYPVTVHFSCARAAKVWVVELRPAENATGYLPNVRVGDRVEMPGGGAVVVASSYPKPGVAGGRLWTARLVVEGDVVGYLARHGRPIRYSYVPHSWPLRYYQTVFARRPGSAEMPSAARPFSTELVTALVADGIAIAPVTLHAGVSSAEPDEPPAAEPFHVPPATARLVNLTRASGGRVIAVGTTVTRALESAANADGAVRQADGWTDLMLGPARLGRVVDGLITGWHDAGASHLLLLEAVAGRQLVATAYREAGGHGYLGHEFGDSALLLPGK

SEQ ID NO: 69160 - protein, 356 aa, Mycobacterium haemophilum
  REGION 1..356: note = tr|A0A0I9U390|A0A0I9U390_9MYCO S-adenosylmethionine:tRNA ribosyltransferase-isomerase; OS = Mycobacterium haemophilum OX=29311 GN=ABH38_11170 PE=3; SV = 1
MLAVRPRTHFHRPPNSDATEPPEARGLARDAVRLLVARSSGVSHARFADLGDYLQAGDLLVVNNSATLAAAVDGRRAGNLIAIHFCTALADQLWVVELRPDGNATGHLTDVRPGERIDMPGGGAIVIGSSYPRAGIDGARLWTARVAVEGLGGSVVSYLARYGRPIRYSYVPRQWPLHYYQTVFARHLGSAEMPSAARPFTTELVTALVADGIAIAPITLHAGVSSAQLGEPPVAELYAVGPATARLVNLTHAAGGRVVAVGTTVTRALESAASADGLVQPAVGWTNLVLGAGRPRRVVDGLITGWHEAGASHLMLLEAVAGQDLVATAYREAVEQGYLWHEFGDSALLLPAVGCH

SEQ ID NO: 69161 - protein, 355 aa, Mycobacterium heckeshornense
  REGION 1..355: note = tr|A0A2G8BC23|A0A2G8BC23_9MYCO S-adenosylmethionine:tRNA ribosyltransferase-isomerase; OS = Mycobacterium heckeshornense OX=110505 GN=ACT16_05640; PE = 3 SV=1
MSRAAPRTQFQRPPGSDATEPPEARGLPRDAVKLLVAQPSGISHVRFADLGNYLRAGDLLVVNNSATLPAAVDARRGGRPITVHFSTARTADVWVVELRPAGTATGHLKDIRPGERIELPAGAALVIGASYPVAGVDGARLWTARVVVEGDDGRVAAYLALYGRPIRYAYVQRHWPLEHYQTVFARHPGSAEMPSAARPFSTTLVTALVAAGVVIAPVTLHAGVSSAEAGEPPAPEWFEVLPSTAHLVNLAHAAGGRVIAVGTTVARALESAAGTDGIVRPARGWTDLVLGPDHRARVVDGLITGWHEAGASHLFLLEAVAGAELVAAAYREAAEHGYLWHEFGDSALLLPEPTT

SEQ ID NO: 69162 - protein, 347 aa, Mycobacterium interjectum
  REGION 1..347: note = tr|A0A1X1X505|A0A1X1X505_9MYCO S-adenosylmethionine:tRNA ribosyltransferase-isomerase; OS = Mycobacterium interjectum OX=33895 GN=AWC11_04290 PE=3; SV = 1
MRPRTHFRRPPGSDAVEPPEARGVARDAVKLLVARPGRVAHARFADLGDHLRPGDLLVVNNSATLPAAVEGRRAGRPIAVHFSTARGEKAWVVELRPAGDAAGHLGDVRPGERIDLPGGAALIIGSSYPEPEVDGARLWAARVMLEGDVLSYLARHGRPIRYAYVPRPWPLRYYQTVFARRPGSAEMPSAARPFSAELVTTLVSAGIGIAPVTLHAGVSSAEAGEPPTPELFEVPAATARAVNSARAGGGRVIAVGTTVTRALESAAGAAGVVRPALGHTDLVLGPDRPCRVVDGLITGWHDAGASHLLLLEAVAGPDLVALAYREAVSHGYLWHEFGDSALLLPER

SEQ ID NO: 69163 - protein, 352 aa, Mycobacterium noviomagense
  REGION 1..352: note = tr|A0A1X0GC48|A0A1X0GC48_9MYCO S-adenosylmethionine:tRNA ribosyltransferase-isomerase; OS = Mycobacterium noviomagense OX=459858 GN=BST37_19110; PE = 3 SV=1
MNLPSPLTAFQRPPGSDATGPPEARGVARDAVKLLVAQPSGISHARFTDLGDYLRPGDLLVVNNSATLPAAVDGRRRGQPVTVHFSTARTANTWVVEVRPAGTATAHLPDIRPGERIDLPHGAALDVRSSYPVAGVEGARLWTARVAVEGGVPSYLGRHGRPIRYAYVPRQWPLSYYQTVFARRPGSAEMPSAARPFSTELVTALVAAGVVIAPITLHAGVSSAEAGEPPAPEPFEVPAATARLVNLAHAMGRRVIAVGTTVTRALESAADGRGMVIPRVGWTNLVLGPDHPARVVDGLITGWHDAGVSHLLLLEAVAGPDMVAAAYREAVDHGYLWHEFGDSALLFPAPTT

SEQ ID NO: 69164 - protein, 334 aa, unidentified
  source 1..334: note = Mycobacterium paraense
  REGION 1..334: note = tr|A0A1X2AA27|A0A1X2AA27_9MYCO S-adenosylmethionine:tRNA ribosyltransferase-isomerase; OS = Mycobacterium paraense OX=767916 GN=AWB90_13035 PE=3; SV = 1
MIAAIEPPEARGLARDAVKLLVARPGRVAHARFADLGDHLRPGDLLVVNNSATLPAAVDGRRAGRPIAVHFSTARAEKAWVVELRPAGDAVGHLTDVRPGERIELPGGAALVIGSSYPEPEVDGARLWTARVVLEGEVGSYLARHGRPIRYAYVPRQWPLRYYQTVFARHPGSAEMPSAARPFSAELVTSLVSSGIAIAPLTLHTGVSSAEAGEPPAPELFEVPAATARMVNSTRAAGGRVIAVGTTATRALESAADAAGVVRHAVGWTELVLGPQRPARVVDGLITGWHDAGASHLLLLEAVAGADLVALAYREAAAHGYLWHEFGDSALLLP

SEQ ID NO: 69165 - protein, 364 aa, Mycobacterium riyadhense
  REGION 1..364: note = tr|A0A1X2DFG5|A0A1X2DFG5_9MYCO S-adenosylmethionine:tRNA ribosyltransferase-isomerase; OS = Mycobacterium riyadhense OX=486698 GN=AWC22_10245 PE=3; SV = 1
MHAQTRFQRPPNSDAAEPPEARGVARDDVKLLVARRSGVSHARFGELGDYLHPGDLLVVNNSATLPAAVDGRRDGHPVAIHFSTPRAEKVWVVELRPAVRATGYLPDIRVGERIEMPGGGAIVIESSYPAPGVDGGRLWRARVAVEGDVMSYLARNGRPIRYAYVPQHWPVAYYQTVFARRPGSAEMPSAARPFSAEVVSALVAEGVAIAPITLHTGVSSAEPGEPPAPELFDVPPATARLVNVTRGAGRRVVAVGTTVTRAVESAADGDGVVHPAFGWTDLVLGPDRPCRVVDGLITGWHEAGASHLLLLEAVAGPELVAMAYREAVEHGYLWHEFGDSALLLPERAADVQSAHADSRAPGRE

SEQ ID NO: 69166 - protein, 354 aa, Mycobacterium sp.
  REGION 1..354: note = tr|L0J0A9|L0J0A9_9MYCO S-adenosylmethionine:tRNA ribosyltransferase-isomerase OS=Mycobacterium sp. JS623; OX = 212767 GN=Mycsm_03385 PE=3 SV=1
MTIAMPRTRFERPPGSDAVEPPEAHGVARDGVKLMVATPDGIAHRRFTDLGEHLEAGDLLVVNNSATLPAAVDGVRHNAPIAVHFSTALDDHTWVVELRPAVDATSHLHDVEPGERVGLPDGAALVVIASYPRSGVVGSRLWTTRLAIEGDVTSYLGRHGRPIRYNYVLRPWPLESYQTVFARRPGSAEIPSAARPFSAELVTSLVAAGIVITPITLHAGVSSAEQGEPPAAEPFEVPPSTARLINTTRASGGRVISVGTTATRAVESAADADGTVQPAAGWTDVVLGPERPPRVVDGLISGWHDAGASHLLLLEAVAGPEVVAAAYREAIAAGYLWHEFGDSALLLPTVPRSR

SEQ ID NO: 69167 - protein, 343 aa, Mycobacterium sp.
  REGION 1..343: note = tr|A0A1A2GU55|A0A1A2GU55_9MYCO S-adenosylmethionine:tRNA ribosyltransferase-isomerase; OS = Mycobacterium sp. E3198 OX=1834143 GN=A5673_24280 PE=3; SV = 1
MTISTISGAAAIEPPEARGVARDAVKLLVVRPGRVAHARFADLGDHLRPGDLLVVNNSATLPAAVDGRRAGQPIAVHFSTPRADKAWVVELRPASDAVGHLTDVRPGERIDLPGGAALVIGSSYPEPEVDGARLWTARVILEGEVGSYLARHGRPIRYAYVPRQWPLRYYQTVFARHPGSAEMPSAARPFSADLVTALVSAGIAIAPVTLHAGVSSAEAGEPPTPELFEVPAPTARMVNSARAAGGRVIAVGTTVTRALESAAGAAGVVRPAVGWTDLVLGPGRACRVVDGLITGWHEAGASHLLLLEAVAGGDLVALAYREAAAHGYLWHEFGDSALLLPDK

SEQ ID NO: 69168 - protein, 355 aa, Mycobacterium xenopi
  REGION 1..355: note = tr|I0RNJ5|I0RNJ5_MYCXE S-adenosylmethionine:tRNA ribosyltransferase-isomerase OS=Mycobacterium xenopi RIVM700367 OX=1150591 GN=MXEN_13151 PE=3 SV=1
MSRAAPITRFQRPPGSDATEPPEARGLARDAVKLLVARPSGISHARFADLGDYVCPGDLLVVNNSATLPAAVDARRDGRPITVHFSTARADDVWVVELRPAGTATGHLSDIRPGERIELPAGGALVVGASYPAAGVAGARLWTARVIVEGDDNRVAAYLALHGRPIRYAYVPRQWPLRDYQTVFARHAGSAEIPSAARPFTTELVTALVAAGVVIAPVTLHAGVSSAEAGEPPAPERFEVSSRTAHLVNLAHATGSRVIAVGTTVTRALESAAGPDGIVRPAEGWTDLVLGPDHRARVVDGLITGWHEAGASHLLLLEAVAGAELVAAAYQEAAEHGYLWHEFGDSALFLPGPTT

SEQ ID NO: 69169 - protein, 77 aa, Mycobacterium xenopi
  REGION 1..77: note = tr|X8BKA4|X8BKA4_MYCXE S-adenosylmethionine:tRNA ribosyltransferase-isomerase OS=Mycobacterium xenopi 4042; OX = 1299334 GN=I553_8230 PE=3 SV=1
MRPAEGWTDLVLGPDHRARVVDGLITGWHEAGASHLLLLEAVAGAELVAAAYQEAAEHGYLWHEFGDSALFLPGPTT

SEQ ID NO: 69170 - protein, 354 aa, unidentified
  source 1..354: note = Mycolicibacterium moriokaense
  REGION 1..354: note = tr|A0A318I036|A0A318I036_9MYCO S-adenosylmethionine:tRNA ribosyltransferase-isomerase; OS = Mycolicibacterium moriokaense OX=39691 GN=C8E89_103319; PE = 3 SV=1
MTIAVPQTQFERPPTSDAVEPPEAHGVARDGVKLMVATSGGVVHTRFADLGSHLAPGDLLVVNNSATLAAAVDGFRDGAPIAVHFSAALDDHVWVVELRPATNATAHLPDIEPGERIGLPDGAALVVIASHPRPGVAGSRLWTSRLAIEGDVTSYLARHGRPIRYGYVPQPWPLSSYQTVFATRPGSAEMASAARPFSAQLVTSLVSAGIAIAPITLHAGVSSAEQGEPPAAEPFEVPAATARLVNLTRASGARVIAVGTTATRALESAAGTDATVHPMAGWTDLVLGPDRPPRVVDGLITGWHDAGASHLLLLEAVAGPGLVAAAYRDAIAHGYLWHEFGDSALLLPTAPRSR

SEQ ID NO: 69171 - protein, 361 aa, Mycoplana dimorpha
  REGION 1..361: note = tr|A0A2T5B7U6|A0A2T5B7U6_MYCDI S-adenosylmethionine:tRNA ribosyltransferase-isomerase; OS = Mycoplana dimorpha OX=28320 GN=queA PE=3 SV=1
MRIDLFDFELPEERIALRPATPREEARLLVVRPGQPDRFADRKVGDLPDFLEPGDALVFNDTRVIPAQLEGIRHREGAGGQQVSATLHMRVAADRWKAFARPGKRIKVGDRISFGHSGRVCLLGTLDATVEEKGENGEVTLRFDFFGPTLDEAIATVGHIPLPPYIASKREDDEADRRDYQTIYAREEGAVAAPTAGLHFTEALFERLDRKGVERHFVTLHVGAGTFLPVKADDTDDHVMHEELGYVSKQTAEALNAVRARGGRIVCVGTTSLRLLESAAREDGTIEPWSGATGIFITPGYRFRTADVLMTNFHLPKSTLFMLVSAFSGLDTMRAAYAHAIDTGYRFYSYGDASLLFRNDQ

SEQ ID NO: 69172 - protein, 340 aa, Mycoplasma sp.
  REGION 1..340: note = tr|R7NE78|R7NE78_9MOLU S-adenosylmethionine:tRNA ribosyltransferase-isomerase OS=Mycoplasma sp. CAG:776; OX = 1262906 GN=queA PE=3 SV=1
MKLTDFDYELPEELIAQTPIQNRDQSKLMILDKSTGELEHQHFYDILNELNSGDVLVLNDTKVIPARLIGEKEETGAVIELLLLKDLGSNIWECLSRPAKRLKVGTIISFSDKLKAEVTQKKDEGIVCVKLIYEGILMEILDELGSMPLPPYIHEKLQDKDRYQTVYAKNIGSAAAPTAGLHFTNELLEKLKNKGVEILFVTLHVGLGTFRPVEVENVLEHHMHSEFYQMTKEVAERLNIAKKENRKIYAVGTTSVRTLETIMHQYHEFRECSGNTEIFIYPGFQFQAIDGLITNFHLPKSTLLMLVSALSSKEYILNAYQEAIKNKYRFFSFGDAMFIR

SEQ ID NO: 69173 - protein, 341 aa, Mycoplasma sp.
  REGION 1..341: note = tr|R5M422|R5M422_9MOLU S-adenosylmethionine:tRNA ribosyltransferase-isomerase OS=Mycoplasma sp. CAG:877; OX = 1262907 GN=queA PE=3 SV=1
MKVEDFDYYLPEKLIAQTPLEKRDTSRLMVLDKTTGKIEHKHFYNIVDYLEEGDTLVLNDTKVLPARLIGEKEETKAVIEILLLKNISGDDWECLVKPARRIKVGTIVTFGSGELKAKCIKEEPEGIRHFTLIYDGILMEILEHLGTMPLPPYIHEKLKDQSRYQTVYAKEIGSAAAPTAGLHFTKELLEQLTKKGVNIAYITLHVGLGTFRPVSVDKVEEHEMHSEYYQMTKETAELLKKTKENNKRIIAVGTTSTRTLETIMTKYNEFTECSGWTNIFIYPGYKFKAIDALITNFHLPKSTLVMLVSALAGRENILNAYKTAVQEEYRFFSFGDAMLIK

SEQ ID NO: 69174 - protein, 349 aa, unidentified
  source 1..349: note = Myroides guanonis
  REGION 1..349: note = tr|A0A1I3SU39|A0A1I3SU39_9FLAO S-adenosylmethionine:tRNA ribosyltransferase-isomerase; OS = Myroides guanonis OX=1150112 GN=queA PE=3 SV=1
MKLSHFNLDIPEKLLAEFPSENRDEARLMVVDRKTQTIEHKLFKDLIDYFDEGDVMVLNNTKVFPARLYGNKEKTGARIEVFLLRELSAEQRLWDVLVDPARKIRIGNKLYFGDDESLVAEVIDNTTSRGRTLRFLYDGSYEEFREKLTELGETPLPKYLNREVVPEDAERYQTIYATEEGAVAAPTAGLHFSKHLLKRLEIKGVDFAEVTLHIGLGTFNPVEVEDLSKHKMDSEEMQITQEACDIVNKAKENKKRVCAVGTTSMRALESTVSSSHTLNPYEGWTNKFIFPPYDFSIANCMITNFHMQKSTLLMMVSAFCGHDLMKKAYAEAIKENYRFYTYGDAMLIL

SEQ ID NO: 69175 - protein, 349 aa, unidentified
  source 1..349: note = Myroides indicus
  REGION 1..349: note = tr|A0A4R7EYN1|A0A4R7EYN1_9FLAO S-adenosylmethionine:tRNA ribosyltransferase-isomerase; OS = Myroides indicus OX=1323422 GN=queA PE=3 SV=1
MKLSNFNFDLPENLLAEFPAENRDESKLMVIDRKTGEIEHKLFKDIVDYFGEGDVMVLNNTKVFPARLYGNKEKTGARIEVFLLRELSEEQRLWDVLVDPARKIRIGNKLYFGDDDSLVAEVIDNTTSRGRTLRFLYDGSYEEFRQKLQELGETPIPKYINREVVPEDAERYQTIYAKEEGAVAAPTAGLHFSKHLMKRLEINGIKFAEVTLHIGLGTFNPVEVEDLSKHKMDSEEIFITQEACDIVNEAKAEKKKVCAIGTTCMRALESSVSSNQTLNPFVGWTNKFIFPPYDFSIANCMVTNFHMPKSTLLMMISAFCGHDLMMKAYKEAVEKGYKFYSYGDAMLIL

SEQ ID NO: 69176 - protein, 349 aa, Myroides marinus
  REGION 1..349: note = tr|A0A163XQF8|A0A163XQF8_9FLAO S-adenosylmethionine:tRNA ribosyltransferase-isomerase; OS = Myroides marinus OX=703342 GN=queA PE=3 SV=1
MKLSNFNFDLPEELLAEFPAENRDEARLMVVDRKTGTIEHKLFKDLIDYFDEGDVMVLNNTKVFPARLYGNKEKTGARIEVFLLRELNAEQRLWDVLVDPARKIRIGNKLYFGDDDSLVAEVIDNTTSRGRTLRFLYDGSYEEFRFKLQELGETPIPKYINREVVPEDAERYQTIYATEEGAVAAPTAGLHFSKHLLKRLEIKGVEFANVTLHIGLGTFNPVEVEDLSKHKMDSEEMFVNQEACDIVNAAKERKNRVCAIGTTSMRALESSVSSSQTLNPFVGWTNKFIFPPYDFSIADCMVTNFHMPKSTLLMMISAFCGHDLMMKAYKEAVEEKYKFYSYGDAMLIL

SEQ ID NO: 69177 - protein, 349 aa, Myroides odoratimimus; identical to SEQ ID NO: 69176
  REGION 1..349: note = tr|A0A0E1ZMZ6|A0A0E1ZMZ6_9FLAO S-adenosylmethionine:tRNA ribosyltransferase-isomerase; OS = Myroides odoratimimus CCUG 10230 OX=883150 GN=queA PE=3; SV = 1

SEQ ID NO: 69178 - protein, 349 aa, Myroides odoratimimus; identical to SEQ ID NO: 69176
  REGION 1..349: note = tr|A0A0S7EKH3|A0A0S7EKH3_9FLAO S-adenosylmethionine:tRNA ribosyltransferase-isomerase; OS = Myroides odoratimimus OX=76832 GN=queA PE=3 SV=1

SEQ ID NO: 69179 - protein, 349 aa, Myroides odoratus
  REGION 1..349: note = tr|A0A378RU54|A0A378RU54_MYROD S-adenosylmethionine:tRNA ribosyltransferase-isomerase; OS = Myroides odoratus OX=256 GN=queA PE=3 SV=1
MKLSNFNFDLPEELLAEFPAENRDEARLMVIDRKTGTIEHKLFKDVVDYFGEGDVMVLNNTKVFPARLYGNKEKTGARIEVFLLRELNEEQRLWDVLVDPARKIRIGNKLYFGEDDSLVAEVIDNTTSRGRTLRFLYDGSYEEFRTKLQELGETPIPKYINREVVPEDAERYQTIYAKEEGAVAAPTAGLHFSKHLMKRLEINGIKFAEITLHIGLGTFNPVEVEDLSKHKMDSEEFVVSQEACDIVNNAKEEKHRVCAVGTTCMRALESSVSSSQTLNPYRGWTNKFIFPPYDFSIADCMITNFHMPKSTLLMMISAFCGHDLMMKAYKEAVEEGYKFYSYGDAMLIL

SEQ ID NO: 69180 - protein, 349 aa, Myroides odoratus; identical to SEQ ID NO: 69179
  REGION 1..349: note = tr|H1ZA09|H1ZA09_MYROD S-adenosylmethionine:tRNA ribosyltransferase-isomerase OS=Myroides odoratus DSM 2801; OX = 929704 GN=queA PE=3 SV=1

SEQ ID NO: 69181 - protein, 349 aa, Myroides phaeus
  REGION 1..349: note = tr|A0A1G8EZB6|A0A1G8EZB6_9FLAO S-adenosylmethionine:tRNA ribosyltransferase-isomerase; OS = Myroides phaeus OX=702745 GN=queA PE=3 SV=1
MKLSNFNFDLPTELLAEFPAENRDESRLMVIDRKAGTIDHKEFKDLIDYFDEGDVMVLNNTKVFPARLYGNKEKTGARIEVFLLRELNAEQRLWDVLVDPARKIRIGNKLYFGEDDSLVAEVIDNTTSRGRTLRFLYDGSYEEFRVKLQELGETPIPKYINREVVPEDAERYQTIYATEEGAVAAPTAGLHFSKHLLKRLEIKGIKFAEVTLHIGLGTFNPVEVEDLSKHKMDSEEMFVTQEACDIVNEAKVRKSRVCAVGTTSMRALESSVSSNQTLNPFVGWTNKFIFPPYDFSIADCMVTNFHMPKSTLLMMISAFCGHDLMMKAYKEAVKEKYKFYSYGDAMLIL

SEQ ID NO: 69182 - protein, 349 aa, Myroides profundi; identical to SEQ ID NO: 69176
  REGION 1..349: note = tr|A0A0B5RGK2|A0A0B5RGK2_9FLAO S-adenosylmethionine:tRNA ribosyltransferase-isomerase; OS = Myroides profundi OX=480520 GN=queA PE=3 SV=1

SEQ ID NO: 69183 - protein, 343 aa, unidentified
  source 1..343: note = Myxococcaceae bacterium
  REGION 1..343: note = tr|A0A3N5H7E4|A0A3N5H7E4_9DELT S-adenosylmethionine:tRNA ribosyltransferase-isomerase; OS = Myxococcaceae bacterium OX=2484252 GN=EHM78_06055 PE=3; SV = 1
MKHALQDAPATVSKQAGRLLHVDLRRGTLVDTRIDSLPELLRPGDLLVVNDAATLPASLPGTARGEPIEVRLAGEEPDGTWRAVVFGAGDWRTPTESRPPPPALAPGDSLRLGPGLQARVTARSDVSTRLLWIRFAASAERFWSALYLHGRPVQYAYEPSPLSLDRVQTPYAARPWASEMPSAGRPLTLELLGRLRSRGVALARLTHAAGLSSTGDAVLDGALPLPERYELPAATVRAVAETRRQRGRVVAVGTTVVRALEGAALSAGGELRPGPGLTDLRIGRGFEPRLVSGLLSGIHARDSSHFELLSAFLPGALELLYTLHAAAGGYRGHEFGDSTLVLG

SEQ ID NO: 69184 - protein, 354 aa, unidentified
  source 1..354: note = Myxococcaceae bacterium
  REGION 1..354: note = tr|A0A521TXX1|A0A521TXX1_9DELT S-adenosylmethionine:tRNA ribosyltransferase-isomerase; OS = Myxococcaceae bacterium OX=2484252 GN=EPO40_24170 PE=3; SV = 1
MAPATGPRGDALAERLLVIDPATGRLSDRRIADLPELLREGDLLVLNDAATLPASLMATGPMGEPMELRLAHARDDGAWDVALFGDGDWRTRTEHRPAPPVVGVGEALLLGDDLRALVESVSAVSPRLVTVRFSHSGDAFWRRLYQLGRPVQYAHLHGALALWDVQTPVASRPWAMEMPSAGRPLSWALLERVKSRGVALATVTHAAGLSSIGDEALDAGLPWPERSEVPQATVDAVGRCRARGGRVVAVGTSVVRALEGRAERSTGDGLLEAGSAVTGLVIGEGFRPRVVDGVLSGMHEPGSSHFALLTAFADAALLHASLRFASSRGYLQHEFGDSALVLGVSHGLAPRISA

SEQ ID NO: 69185 - protein, 259 aa, unidentified
  source 1..259: note = Myxococcales bacterium
  REGION 1..259: note = tr|A0A0S8EP46|A0A0S8EP46_9DELT S-adenosylmethionine:tRNA ribosyltransferase-isomerase (Fragment) OS=Myxococcales bacterium SG8_38_1 OX=1703408; GN = AMJ63_15985 PE=3 SV =1
MRISDLDYDLPEGLIAQEPLVARDSSRLLVVDVEQAEIDARMFSDLPSLLPPSLFVFNDTRVFPARLTGHKASGGKVELLLLRKRAEGENRWLAMGRSSKGLRAGMALSLCEGRIGARIVRALDHGQVEVELHAEGDVDALIEEAGDLPLPPYIRRPAGDADRERYQTVYAKKPGAVAAPTAGLHFTEETLASLRQAGHEIAYVTLHVGPGTFRPVQADHLDDHEMHEEAYEVPATTIAAIHRARAEGRPVVAVGTTVV

SEQ ID NO: 69186 - protein, 362 aa, unidentified
  source 1..362: note = Myxococcales bacterium
  REGION 1..362: note = tr|A0A2E6VWK5|A0A2E6VWK5_9DELT S-adenosylmethionine:tRNA ribosyltransferase-isomerase; OS = Myxococcales bacterium OX=2026763 GN=queA PE=3 SV=1
MSELLSSYDYHLPKSLIAAHPPEDRIASRLLVLTSDASRPIDAQFARLKEFLQPGDVLVLNDTRVLPARLLGQKEETGGKVEVLLSRPVTLHKWIALIKASKKSKPGTSLVFTGDAGTTLRATVGPAIGDEPGAFEVDFDQDVRAFAEAHGEIPLPPYMQRQADASDKERYQTVFADPNKNFAAAAPTAGLHFDPNHLATLAQRGVEQVKVTLHVGPGTFLPVRDDDISQHQMHAEPWHLSETAAATLNRAKDQGRRVVSVGTTCVRVLESATNEEGRLQSGSGLTKLFLRPGKQFAVVDALLTNFHLPKSTLLMLVSAAVGRDRLLRAYQHAVEQKYRFFSYGDACFFEVSQDNKKPWPKP

SEQ ID NO: 69187 - protein, 362 aa, Myxococcus fulvus
  REGION 1..362: note = tr|F8C743|F8C743_MYXFH S-adenosylmethionine:tRNA ribosyltransferase-isomerase OS=Myxococcus fulvus (strain ATCC BAA-855 / HW-1) OX=483219 GN=queA PE=3 SV=1
MSSRLSDYDFALPESQIAQAPLAERDASRLMTVSRSSGAWSHRRFADLQELLRPGDVLVLNDARVIPARLLGQKAGTGGRVELLVVRPAAQHTLTSAALGEAPESLDWVCLGQASKGLKPGQRVSFAGGLEAEIQEALGGGEYRVRFQAPAGTSLAELLDAAGRLPLPPYISREPDAADAERYQTVYARASGAVAAPTAGLHFTQETLAALEARGIHRALVTLDVGPGTFLPVREDDLDKHHMHPERYTVPESTATAVNAARAEGRRVVAVGTTVVRTLESATDAETGRLRAGPGETTLFIRPGFAFRQVDLLLTNFHLPRSTLVVLVSALLGRERTLEAYAEAVRAGYRFFSYGDAMLVSE

SEQ ID NO: 69188 - protein, 341 aa, Myxococcus fulvus
  REGION 1..341: note = tr|A0A511T1V1|A0A511T1V1_MYXFU S-adenosylmethionine:tRNA ribosyltransferase-isomerase; OS = Myxococcus fulvus OX=33 GN=MFU01_23850 PE=3 SV=1
MKPARWPGDHPEEGRLLHVEPRASRFKDAHLADLPSLLREKDLLVVNDAATFPASLLGRTASGERMELRLLSHEPDGTWLAVLFGAGDWRKRTEDRPSPPVLEAGARFTVVGLSARVVEVLPPSPRLLRVAFEDDGAELWSALYQGGRPVQYAHTLAPLSLWHVQTGYGARPWAVEAPSAGLPLTWNLLLALRRRGVRLASLTHAAGLSSTGDAVLDAALPRPERSDIPAVTVAQVEATRAEGGRVVAVGTTVVRALEGRAAMNGGRLVAGESVTDLLLGPGFVPRVVDGLLTGMHEPGTSHHALLQAFAPLSLLGDVAAHAEAKGYLGHEFGDSCLILDT

SEQ ID NO: 69189 - protein, 341 aa, unidentified
  source 1..341: note = Myxococcus hansupus
  REGION 1..341: note = tr|A0A0H4WJY3|A0A0H4WJY3_9DELT S-adenosylmethionine:tRNA ribosyltransferase-isomerase; OS = Myxococcus hansupus OX=1297742 GN=A176_000573 PE=3 SV=1
MNPARWPSERPEEGRLLHVEPRARRFQDARVADLPSLLRAGDLLVVNDAGTLPASLPGRTTSGERIELRLLSREPDGTWTVVLFGAGDWRRRTEDRPLPPLVSEGEGLLIGGLKARVVQVLPPSPRLLRVAFDATGAALWSGLYRSGRPVQYAYTEAPLSLWHVQTAYGARPWSAEPPSAGLPLTWSVLLALRRQGVRLASLTHAAGLSSTGDAVLDAALPRPERSDIPEATVEAVLHTRASGGRVVAVGTTVVRALEGRAAQHGGWLVAGDEVTDLLLGPGFVPRMVHGLLTGVHEPGSSHHALLQAFAPLPLLQEVAAHAEARGYLGHEFGDSCLLLDA

SEQ ID NO: 69190 - protein, 362 aa, unidentified
  source 1..362: note = Myxococcus hansupus
  REGION 1..362: note = tr|A0A0H4XBI8|A0A0H4XBI8_9DELT S-adenosylmethionine:tRNA ribosyltransferase-isomerase; OS = Myxococcus hansupus OX=1297742 GN=queA PE=3 SV=1
MSSRLSDYDFALPESQIAQAPLAERDASRLMTLSRSSGAWSHRRFSDLQELLRPGDVLVLNDARVIPARLLGQKAGTGGRVELLVVRPAAQHTLTSAALGDAPESLDWICLGQASKGLKPAQRVTFAGGLEGEIQEALGGGEYRVRFHAPKGTSLAALLDEAGRLPLPPYITREPDAADAERYQTVYARASGAVAAPTAGLHFTQDVLAALEARGVHRALVTLDVGPGTFLPVREDDLDRHHMHPERYTVPESTAKAVNAAKADGRRVVAVGTTVVRTLESATDPETGRLREGPGETTLFIRPGFAFRQVDVLLTNFHLPKSTLVVLVSALLGRERTLEAYAEAVREGYRFFSYGDAMLVSE

SEQ ID NO: 69191 - protein, 362 aa, unidentified
  source 1..362: note = Myxococcus macrosporus
  REGION 1..362: note = tr|A0A250JYZ3|A0A250JYZ3_9DELT S-adenosylmethionine:tRNA ribosyltransferase-isomerase; OS = Myxococcus macrosporus DSM 14697 OX=1189310 GN=queA; PE = 3 SV=1
MSSRLSDYDFALPESQIAQAPLAERDASRLMTVSRSSGAWSHRRFADLQELLRPGDVLVLNDARVIPARLLGQKAGTGGRVELLVVRPAAQHTLTSAALGEAPESLDWVCLGQASKGLKPGQRVSFAGGLEAEIQEALGGGEYRVRFQAPAGTSLAELLDAAGRLPLPPYISREPDATDAERYQTVYARASGAVAAPTAGLHFTQETLAALEARGIHRALVTLDVGPGTFLPVREDDLDKHHMHPERYTVPESTAMAVNAARAEGRRVVAVGTTVVRTLESATDAETGRLRAGPGETTLFIRPGFAFRQVDLLLTNFHLPRSTLVVLVSALLGRERTLEAYAEAVRAGYRFFSYGDAMLVSE

SEQ ID NO: 69192 - protein, 341 aa, unidentified
  source 1..341: note = Myxococcus macrosporus
  REGION 1..341: note = tr|A0A250K3X8|A0A250K3X8_9DELT S-adenosylmethionine:tRNA ribosyltransferase-isomerase; OS = Myxococcus macrosporus DSM 14697 OX=1189310; GN = MYMAC_006058 PE=3 SV=1
MKPARWPADRPDEGRLLHVEPRARRFHDARVADLPSLLRDGDLLVVNDAATLPASLWGRTASGERIELRLLSREPDGTWTVVLFGAGDWRRRTEDRPPPPAVSEGAELMVGGLKARVVAVLPPSPRLLRVAFDATGAALWSGLYRSGRPVQYAYTEAPLSLWHVQTAYGARPWSVEPPSAGLPLTWSVLLALRRRGVRLASLTHAAGLSSTGDAALDAALPRPERSDLPAATVEAVLHTRALGGRVVAVGTTVVRALEGRAAQHGGWLVAGEEVTDLLLGPGFVPRLVHGLLTGVHEPGSSHHALLQAFAPLPLLQEVAAHAEARGYLGHEFGDSCLLLDA

SEQ ID NO: 69193 - protein, 361 aa, Myxococcus sp.
  REGION 1..361: note = tr|A0A540X2Z0|A0A540X2Z0_9DELT S-adenosylmethionine:tRNA ribosyltransferase-isomerase; OS = Myxococcus sp. AM401 OX=2590453 GN=queA PE=3 SV=1
MSSRLSDYDFELPESQIAQAPLAQRDASRLMLVRRSTGDVSHRQFSDVLELLRPGDLLVLNDARVIPARLLGQKAGTGGRVELLVVRPAASTLTSAALDGAPESLDWLCLGQASKGLKPPQRLTFAGGLEAEVLEVLGGGEYRVRFHARPGASLASLLDAAGRLPLPPYITREPDAADAERYQTVYARASGAVAAPTAGLHFTQDTLDALAAKGVRRALVTLDVGPGTFLPVREEELDKHHMHPERFTVPEATAREVNAARAEGRRVVAVGTTVVRTLESATDPTTGLLREGPGETTLFIRPGFTFRQVDALLTNFHLPRSTLVVLVSALLGRERTLAAYAEAVREGYRFFSYGDAMLVSE

SEQ ID NO: 69194 - protein, 341 aa, Myxococcus sp.
  REGION 1..341: note = tr|A0A540WJA8|A0A540WJA8_9DELT S-adenosylmethionine:tRNA ribosyltransferase-isomerase; OS = Myxococcus sp. AM401 OX=2590453 GN=FJV41_46330 PE=3 SV=1
MKPARWPVDHPEEGRLLHIEPRGRRFSDARVADLPSLLRDGDLLVVNDAATFPASLLGRTASGERVELRLVSREEDGTWTAVLFGAGDWRKRTEDRPPPPVLPVGTRFTVVGLPVQVVEVLPPSPRLLRVAFDEDGAALWSALYQGGRPVQYAYTVAPLSLWHVQTGYGARPWATEAPSAGLPLTWNVLLALRRRGVRLASLTHAAGLSSTGDAVLDAALPRPERSDIPVATVAQVEATRAAGGRVVAVGTTVVRALEGRAAMNGGRLVAGEAVTDLLLGPGFVPRVVHGLLTGMHEPGSSHHALLQAFAPSLLLKEAAAHAEARGYLGHEFGDSSLVLDA

SEQ ID NO: 69195 - protein, 370 aa, Myxococcus stipitatus
  REGION 1..370: note = tr|L7UC36|L7UC36_MYXSD S-adenosylmethionine:tRNA ribosyltransferase-isomerase OS=Myxococcus stipitatus (strain DSM 14675 / JCM 12634 / Mx s8) OX=1278073 GN=queA; PE = 3SV=1
MGAATSASPVSSRLSDYDFELPESQIAQAPLAQRDASRLMHVRRSSGDVSHRRFSDVMELLRPGDLLVLNDARVIPARLLGQKSGTGGRVELLVVRPAASTLTSAALEGAPETLDWLCLGQASKGLKPTQRLTFAGGLEAEVLEVLGGGEYRVRFHAPPGASLAALLDAAGKLPLPPYITREPDAADAERYQTVYARASGAVAAPTAGLHFTQEMLAALEARGVRRVLVTLDVGPGTFLPVREDDLDKHHMHPERFTVPEATAREVNAARAEGRRVVAVGTTVVRTLESATDPTTGRLREGPGETTLFIRPGFTFRQVDALLTNFHLPRSTLVVLVSALLGRERTLAAYAEAVRDGYRFFSYGDAMLVSE

SEQ ID NO: 69196 - protein, 341 aa, Myxococcus stipitatus
  REGION 1..341: note = tr|L7UJX9|L7UJX9_MYXSD S-adenosylmethionine:tRNA ribosyltransferase-isomerase OS=Myxococcus stipitatus (strain DSM 14675 / JCM 12634 / Mx s8) OX=1278073; GN = MYSTI_069 43 PE=3 SV=1
MKPARWPVDQPEEGRLLHVEPREGRLTDARVADLPSLLRDGDLLVVNDAATFPASLLGRTVLGERIELRLLSQEPDGTWLAVLFGAGDWRKRTEDRPTPPAMPAGTRFTVVGLPVRVVEVLPPSPRFLRVAFEEEGAGLWSALYQGGRPVQYAHTLAPLSLWHVQTGYGARPWATEAPSAGLPLTWNLLLTLRRRGVRLASLTHATGLSSTGDEALDALLPRPERSDIPAATVAQVEATRAAGGRVVAVGTTVVRALEGRAAMNGGRLVAGESVTDLLLGPGFVPRVVSGLFTGMHEPGTSHFALLQAFCSRTLLREASAHAEARGYLGHEFGDSCLLLDA

SEQ ID NO: 69197 - protein, 362 aa, Myxococcus virescens
  REGION 1..362: note = tr|A0A511HDB9|A0A511HDB9_9DELT S-adenosylmethionine:tRNA ribosyltransferase-isomerase; OS = Myxococcus virescens OX=83456 GN=queA PE=3 SV=1
MSSRLSDYDFALPESQIAQAPLAERDASRLMTISRSSGTWSHRRFADLQELLRPGDLLVLNDARVIPARLLGQKAGTGGRVELLVVRPAAQNTLTSAALRAAPESLDWVCLGQASKGLKPGQRVTFASGLEAEIQEALGGGEYRVRFHAPPGASLAALLDAAGRLPLPPYITREPDAADAERYQTVYARASGAVAAPTAGLHFTQESLAALDARGVHRALVTLDVGPGTFLPVREDDLDKHHMHPERYTVPEATAKAINAARAEGRRVVAVGTTVVRTLESATDPETGRLRAGPGETTLFIRPGFAFRQVDLLLTNFHLPRSTLVVLVSALLGRERTLEAYAEAVRAGYRFFSYGDAMLVSE

SEQ ID NO: 69198 - protein, 341 aa, Myxococcus virescens
  REGION 1..341: note = tr|A0A511H993|A0A511H993_9DELT S-adenosylmethionine:tRNA ribosyltransferase-isomerase; OS = Myxococcus virescens OX=83456 GN=queA PE=3 SV=1
MKPARWPADHPDEGRLLHVEPRARRYRDTRVADLPSLLRAGDLLVVNDAATLPASLVGRTESGERIELRLLSREPDGTWTGVLFGAGDWRRRTEDRPPPPVLAVGAGLVVGGLKARVVAVLPPSPRLLRVAFDETGAALWSGLYRSGRPVQYAYMEAPLSLWHVQTAYGARPWSVEAPSAGLPLSWSVLLTLRKQGVRLASLTHAAGLSSTGDSTLDAALPRPERSDIPAATVEAILHTRASGGRVVAVGTTVVRALEGRAARHGGWLVAGEEVTDLLLGPGFVPRLVHGLLTGVHEPGSSHHALLQAFAPLPLLQEVAAHAEARGYLGHEFGDSCLLLDA

SEQ ID NO: 69199 - protein, 371 aa, Myxococcus xanthus
  REGION 1..371: note = tr|A0A4Y6CG72|A0A4Y6CG72_MYXXA S-adenosylmethionine:tRNA ribosyltransferase-isomerase; OS = Myxococcus xanthus OX=34 GN=queA PE=3 SV=1
MGAATSATPVSSRLSDYDFALPESQIAQAPLAERDASRLMTISRSSGTWSHRRFADLQELLRPGDLLVLNDARVIPARLLGQKAGTGGRVELLVVRPAAQNTLTSAALGAAPESLDWVCLGQASKGLKPGQRVTFASGLEAEIQEALGGGEYRVRFHAPPGASLAALLDAAGRLPLPPYITREPDAADAERYQTVYARASGAVAAPTAGLHFTQETLAALAARGVHRALVTLDVGPGTFLPVREDDLDKHHMHPERYTVPEVTAKAINAARAEGRRVVAVGTTVVRTLESATDPETGRLRAGPGETTLFIRPGFAFRQVDLLLTNFHLPRSTLVVLVSALLGRERTLEAYAEAVRAGYRFFSYGDAMLVSE

SEQ ID NO: 69200 - protein, 364 aa, Myxococcus xanthus
  REGION 1..364: note = tr|Q1CYS4|Q1CYS4_MYXXD S-adenosylmethionine:tRNA ribosyltransferase-isomerase OS=Myxococcus xanthus (strain DK 1622) OX=246197 GN=MXAN_6324 PE=3 SV=1
MGGVAVGVGALGRPPGGGEAGGRMKPARWPADRPEEGRLLHVEPRARRYRDTRVADLPSLLRAGDLLVVNDAATLPASLVGRTESGERIELRLLSREPDGTWTGVLFGAGDWRRRTEDRPPPPVLAVGAGLVVGGLKALVVAVLPPSPRLLRVAFDATGAALWSGLYRSGRPVQYAYLEAPLSLWHVQTAYGARPWSVEAPSAGLPLTWSVLLTLRKQGVRLASLTHAAGLSSTGDAALDAALPWPERSDIPAATVEAVLHTRASGGRVVAVGTTVVRALEGRAARHGGWLVAGEEVTDLLLGPGFVPRLVHGLFTGVHEPGSRHHALLQAFAPLPLLQEVAAHAEARGYLGHEFGDSCLLLDA

SEQ ID NO: 69201 - protein, 358 aa, Nannocystis exedens
  REGION 1..358: note = tr|A0A1I2BCT1|A0A1I2BCT1_9DELT S-adenosylmethionine:tRNA ribosyltransferase-isomerase; OS = Nannocystis exedens OX=54 GN=SAMN02745121_04608 PE=3; SV = 1
MRPATAPRDDRAGARLLLLDPRTGARADARVRDLPRWLAPGDLLIVNDAATLPASLPARVWRKNHVSQDMSSEDVEVRLTGAGEATWRVALLGAGDWRTPTERRAPPPALQVGDRLVFGAALAAEVVHVSPISPRLCELRFDREGAALWGALYRLGRPVQYAYVSEPLALWSVQTVFAARPWAAEMPSAGRPFDWETLLALRRAGVEIAAVTHAAGLSSVGDPDLDAALPLPERFDVPAATVAAIARARARGGRVIAVGTTVVRALEGNARRFGELRAGSGETDLVLGPGFVPRVVDGVVTGMHGPGESHFELLRAFAGEAALRAAFEHATAAGYLAHEFGDAALIVPGLAPASARAA

SEQ ID NO: 69202 - protein, 347 aa, Nannocystis exedens
  REGION 1..347: note = tr|A0A1I2GD86|A0A1I2GD86_9DELT S-adenosylmethionine:tRNA ribosyltransferase-isomerase; OS = Nannocystis exedens OX=54 GN=queA PE=3 SV=1
MGPDAYDYVLPPEQIAQTPAARRGDARLLVQRDAGPPVHARARELPRFLDPRALVVVNDSRVVPARLRVLHGARELELLVCDPRPGLGPGQTFRAWVRGAKRLRPGDIVSCGDQIARYLEPDVIDPRARVFVVEAGEWMGALQRRGEVPLPPYIRRPEGPTADDASRYQTIYAAQPGSVAAPTAGLHWEPEVLAQLDVVRVTLHVGPGTFLPLEAEDVREHKVGAERIEVDAAAAGRIAAAKAEGRPVVAIGTTATRALEAVARAGGGTVVPFSGSTDLVIAPGFEFRVVDAIVTNFHLPRSSLLMLVCCLGGRERVLAAYAEAVAAGYRFYSYGDCMLLTRMDGAR

SEQ ID NO: 69203 - protein, 343 aa, Natranaerobius thermophilus
  REGION 1..343: note = sp|B2A5L1|QUEA_NATTJ S-adenosylmethionine:tRNA ribosyltransferase-isomerase OS=Natranaerobius thermophilus (strain ATCC BAA-1301 / DSM 18059 / JW/NM-WN-LF) OX=457570GN=queA PE=3 SV=1
MKLEEFNYELPEELIAQKPLANRSKSRLMVVSINSSDVQHNHFEKLPQYVKDGDLFVINNSRVIPARLFGNKKQTGGKLEMVLLHPLEGKDEWEVLVKPGKRAKPGNVFEFGQETLEAEILDITPEGSRRVKFYYQGNFQQVLDQLGQMPLPPYIKEELEDPERYQTVYAKESGSVAAPTAGLHFTPEIISDIKDQGGEVAELTLHVGLGTFRPVETPNIEEHEMHAEYYQLPEETAKKINQAKQRGNRVIAVGTTVVRTLETVKTDDGLVQPGKGWTDIFIYPGYEFKVVDAMLTNFHLPKSTLLMLVSAFAGKDLIMSAYQAAIEERYRFFSFGDAMFIKN

SEQ ID NO: 69204 - protein, 344 aa, Natranaerobius trueperi
  REGION 1..344: note = tr|A0A226BZB7|A0A226BZB7_9FIRM S-adenosylmethionine:tRNA ribosyltransferase-isomerase; OS = Natranaerobius trueperi OX=759412 GN=queA PE=3 SV=1
MKLEEFDYNLPEELIAQKPLFNRSDSRLMMVNREFKEIKNESFKNIIDYVQKGDLFIVNNSKVMPARLFGKKKETGGKLEMVLIHPTENEGEWEVLVKPGKRAKPGTIFEFGDGILEAEIKSTTPEGGRIVKFNYQGNFQQILDQLGEMPLPPYIKRQLDDPDRYQTVYAKERGSVAAPTAGLHFTPDLIEKIKEKGGDVIELTLHVGLGTFRPVKVTDIEKHKMHSEYYYLPVESAEKINNAKRNGCRVIAVGTTAVRTLETCKTEEKGKCVKSSKGWTDIFIYPGYEFKVVDSLVTNFHLPKSTLLMLVSAFASNELIMEAYQEAVQEKYRFFSFGDAMFIE

SEQ ID NO: 69205 - protein, 341 aa, Natranaerovirga hydrolytica
  REGION 1..341: note = tr|A0A4R1MSF3|A0A4R1MSF3_9FIRM S-adenosylmethionine:tRNA ribosyltransferase-isomerase; OS = Natranaerovirga hydrolytica OX=680378 GN=queA PE=3 SV=1
MKLEDFDFVLPEELIAQDPIKERSHSRMLVLDKETGQIEHKVFADIIDQLDPKDCLVLNNTKVMPARLIGEREKTQARIEFLLLNRLEGDEWEVMVKPGKKAKVNERVVFGEGILIAHIKEKLDNGNRLVKFEYEGIFEQVLDELGEMPLPPYITRKLEDKERYQTVYAKHIGSAAAPTAGLHFTNELLEKLKNKGIHIAYITLHVGIGTFRPVKVDNIEEHEMHSEHYWITKEEADKIKKAKENGGRIIPVGTTSCRTLETIMQEYGEIKESKGWTDIFMYPGYEFKIVDGLITNFHLPQSTLIMLVSALAEREKVMKAYQEAINKHYRFYSFGDAMFIK

SEQ ID NO: 69206 - protein, 341 aa, Natranaerovirga pectinivora
  REGION 1..341: note = tr|A0A4V2V0B9|A0A4V2V0B9_9FIRM S-adenosylmethionine:tRNA ribosyltransferase-isomerase; OS = Natranaerovirga pectinivora OX=682400 GN=queA PE=3 SV=1
MKVEDFNFELPEELIAQDPIKERTDSRLLVLNKKTGKVDHKIFKDIIECLNPNDCLVLNNTKVIPARLIGIREKTGAKIEFLLLNRQENDQWEVMVKPGKKVVIGERIIFGEGLLIANILEKLENGNRIIQFEYKGIFEQILDELGEMPLPPYISHQLEDKDRYQTVYAKHAGSAAAPTAGLHFTNELLEKIKGKGVEIAYITLHVGIGTFRPVKVDNIEEHDMHSEFYWITEEEASKINNAKAKGGRVIAVGTTSCRTLETVANDNGTINESKGWTDIFIYPGYKYKMVDALITNFHLPESTLIMLVSALAGKENVMGAYQVAIENKYRFYSFGDAMMIL

SEQ ID NO: 69207 - protein, 347 aa, Natribacillus halophilus
  REGION 1..347: note = tr|A0A1G8NXX1|A0A1G8NXX1_9BACI S-adenosylmethionine:tRNA ribosyltransferase-isomerase; OS = Natribacillus halophilus OX=549003 GN=queA PE=3 SV=1
MDVNDFDFDLPEELIAQQPLPNRDASRLLVLDRATGDIDHRQFSEIASFLQAGDCLVLNDTRVLPARLFGEKKETGGKVEVLLLNEGEADEWTTLVKPAKRVKAGTEIVFGDGSLTATCIAIGDQGERVLRFAYEGIFLEVLEALGEMPLPPYITEQLEESERYQTVYARNAGSAAAPTAGLHFTTARLDELRAKGVKICYITLHVGLGTFRPVSADRVEDHEMHAEYYEVDRETAEALQETKENGRDIVACGTTSARTLETVMNTYGAFKPTSGWTDIFIYPGYVFRAVDGLITNFHLPKSTLIMLVSAFAGKGAIMRAYQEAIGERYRFFSFGDVMYIRKGVTSV

SEQ ID NO: 69208 - protein, 341 aa, Natronincola ferrireducens
  REGION 1..341: note = tr|A0A1G9CY33|A0A1G9CY33_9CLOT S-adenosylmethionine:tRNA ribosyltransferase-isomerase; OS = Natronincola ferrireducens OX=393762 GN=queA PE=3 SV=1
MRTKDFYFDLPQELIAQKPLDKRDQSRLMILDKTTGEITHTFFYNIIDFLKAGDCLVLNNTRVLPARLIGEKEGTGGKIEFLLLKRIKLDTWETLVKPGKKAKIGTTFNFGGGVLKGKVIAIGEEGSRIVEFDYDGIFEDILDQLGKMPLPPYITETLEDNERYQTVYSKNKGSAAAPTAGLHFTEELLEQIEKKGVKIAYITLHVGLGTFRPVKVEDIESHKMHSEYYMISEEAAKIINETKIQGGKVIAVGTTSCRTLESAANATGEMKEGSGWTDIFIYPGYKFKVVDNLITNFHLPESTLIMLVSALAEKNQTMHAYTTAVKEKYRFFSFGDAMFIK

SEQ ID NO: 69209 - protein, 341 aa, Natronincola peptidivorans
  REGION 1..341: note = tr|A0A1H9YXE8|A0A1H9YXE8_9CLOT S-adenosylmethionine:tRNA ribosyltransferase-isomerase; OS = Natronincola peptidivorans OX=426128 GN=queA PE=3 SV=1
MKTKDFDFELPEELIAQIPLEKRDESRLMILDKQTGEICHSHFYDIVHHVNEGDCLVLNNTRVLPARLIGEKELTGGKIEFLLLKRIDIDTWETLVKPGKKAKIGSSFQFGNGLLKAVVLDIGDEGSRIIKFLYHGVFEEILDQLGEMPLPPYITAELNDKERYQTVYSTETGSAAAPTAGLHLTDELLQKISRKGVKIAYITLHVGLGTFRPVKVESIEKHKMHAEYYMINKEAAETINDTKKKGGKIIAVGTTSCRTLESAVMTSGEIIESSGWTDIFIYPGYQFKMVDNLITNFHLPESTLIMLVSTLAGKENTLKAYATAVKEKYRFFSFGDAMFIK

SEQ ID NO: 69210 - protein, 400 aa, Natronoflexus pectinivorans
  REGION 1..400: note = tr|A0A4R2GKH7|A0A4R2GKH7_9BACT S-adenosylmethionine:tRNA ribosyltransferase-isomerase; OS = Natronoflexus pectinivorans OX=682526 GN=queA PE=3 SV=1
MPVPEINISDFNYHLPDERIAKYPLANRDESNLLVYKNLSVNHTNFKNLTEYLPDNTMLVFNNTRVIRARIHFFKSTGAKIEIFCLEPHSPSDAAMAFQQTHEVEWVCLVGNLKKWKGETLSAVANTAVGDVEVSALLTDRINDACIIKFSWKNQHVNFADILEGMGQTPIPPYLNRKSEIIDTERYQTVYSKLNGSVAAPTAGLHFSEAILKKIEEQNHKRLEITLHVGAGTFQPVKSEKISGHAMHTEQFEISCTSIEKLINHNNPVVAVGTTSVRTLESLYYAGVRIINGLPYNKIEQWDGFELPSDASVKCALTSLLNQLKRSNEDSFKASTSIMIAPGYKFKIVHGLITNFHQPKSTLLLLISALIGDNWKEVYEYAMNNDFRFLSYGDSSILIP

SEQ ID NO: 69211 - protein, 361 aa, Natronoflexus pectinivorans
  REGION 1..361: note = tr|A0A4R2GPM8|A0A4R2GPM8_9BACT S-adenosylmethionine:tRNA ribosyltransferase-isomerase; OS = Natronoflexus pectinivorans OX=682526 GN=queA PE=3 SV=1
MLINVSFNDIVVMKLSKFKYKLPEELIALHPTQNRDESRLMVVHRDTGKIEHKIFKEIIDYFKTDDVFVFNDTKVFPARLYGNKEKTGAEIEVFLLRELNTEQRLWDVLVDPARKIRIGNKLYFGDDDALVAEVIDNTTSRGRTLRFLYDGSHEDFKKTLYSLGETPLPKFIKREVEPEDSERYQTIFARNEGAVAAPTAGLHFSRELLKRLEIKGTHFSYITLHVGLGNFRTVDVEDLTKHKMDSEQILISDEAANIINAGKDRKNKICAVGTTVMRTLETSVSTFGHVKPFEGWTNKFIFPAYDFQVANCMISNFHLPYSTLLMMVAAFGGYDLVMKAYKTAVKEKYRFGTYGDAMLII

SEQ ID NO: 69212 - protein, 349 aa, unidentified
  source 1..349: note = Natronospirillum operossus
  REGION 1..349: note = tr|A0A4Z0W794|A0A4Z0W794_9BACT S-adenosylmethionine:tRNA ribosyltransferase-isomerase; OS = Natronospirillum operossus OX=2562806 GN=queA PE=3 SV=1
MRVTDFDFELPPELIARYPAEQRTASRLLCLDGPTGQLLHGVFTDIEQLLQPGDLLVMNDTRVIPARLFGHKASGGRVEILIERVLDDRQALAHVRASRAPRPGVSLVLASGVEIAVTGRRENLFELALQEGQSWLDVLHAEGHMPLPPYIDRPDETADAERYQTVYARHEGAVAAPTAGLHFDEDLLQRLRESGVEQTFVTLHVGAGTFQPVKVERVEDHLMHAERIEVNADTVAAVERCRQRGGRVVAVGTTSVRSLESAALSGTLQPFTGESDIFIYPGYRFRVVDALVTNFHLPQSTLLMLVSAFSGYEAIMRAYQAAITERYRFFSYGDAMFLTRKEHQESPHE

SEQ ID NO: 69213 - protein, 336 aa, Nautilia profundicola
  REGION 1..336: note = tr|B9LA80|B9LA80_NAUPA S-adenosylmethionine:tRNA ribosyltransferase-isomerase OS=Nautilia profundicola (strain ATCC BAA-1463 / DSM 18972 / AmH) OX=598659 GN=queA; PE = 3 SV=1
MVSSYDYNLPENLIARYPVTPRDSAKLLVYDRKTDRITHTVFRNILDFVGESHFIFNNTKVIKARIFGTKETGGKVELLLNRPYRDGYLVYIRGKVKPGSRLFFDKGLMAEVVELLDDGSRVVKFKVKSEKCKTEKEIDFLQLVKILEEIGHVPLPPYIKREDEKIDEKEYQTVFAKKEGAVAAPTASLHFTDELLNKIDKKSYLTLHVGAGTFKPVDVEDIREHKMHSEFFEIPEDTARVLDGSEEIVAVGTTVTRTVEYYARTGKLSGECDLFLNPLNPPIRVNHLLTNFHLPKSTLIMLVAAFIGRKKTLELYEEAIKNEYRFYSYGDAMLII

SEQ ID NO: 69214 - protein, 337 aa, Nautilia sp.
  REGION 1..337: note = tr|A0A432RUN7|A0A432RUN7_9PROT S-adenosylmethionine:tRNA ribosyltransferase-isomerase; OS = Nautilia sp. OX=2231114 GN=queA PE=3 SV=1
MNSPDLLVNSYDYFLPKELIATYPVTPRDSAKLLVYDRKTDKITHTIFRNILDFIGDSHFIFNDTKVVKARIFGKKETGGKIELLLNRPFEDKFLVYIRGKVKIGTELFFDKNLKAIVFQLNDDGSRLVKFYQNDEEIDFIKLVDVLNEIGHIPLPPYINREDESLDENEYQTVFAQKPGAVAAPTASLHFTDELLNQIENKSFLTLHVGAGTFKPVEVENILEHPMHSEFFEIPEDTAKILDNKEIKITAVGTTATRTIEYYAREKRLFGECDLFLHPQNRPIRVNHLLTNFHLPKSTLIMLVSAFIGREKTLELYDIAIKEKYRFYSYGDAMLII

SEQ ID NO: 69215 - protein, 347 aa, Nautilia sp.
  REGION 1..347: note = tr|A0A3T0L2R8|A0A3T0L2R8_9PROT S-adenosylmethionine:tRNA ribosyltransferase-isomerase; OS = Nautilia sp. PV-1 OX=2579250 GN=queA PE=3 SV=1
MKSDQLINKDVLVSSYDYNLPENLIARYPVTPRDSAKLLVYNRKTDKITHTVFRNILDFVGESHFIFNNTKVIKARIFGTKETGGKVELLLNRPYKDGYLVYIRGKVKVGTKLFFDKGLMAEVVELLDDGSRVVKFKVKSEKCKTEKEIDFLQLVKILEEIGHVPLPPYIKREDEKIDEKEYQTVFARKVGAVAAPTASLHFTDELLNKIDKKSYLTLHVGAGTFKPVDVEDIREHKMHSEFFEIPEDTARVLDGSEEIVAVGTTVTRTVEYYARTGKLSGECDLFLNPLNPPIRVNHLLTNFHLPKSTLIMLVAAFIGRKKTLELYEEAIKNEYRFYSYGDAMLII

SEQ ID NO: 69216 - protein, 343 aa, unidentified; identical to SEQ ID NO: 63900
  source 1..343: note = Negativibacillus sp.
  REGION 1..343: note = tr|A0A3A8Y478|A0A3A8Y478_9FIRM S-adenosylmethionine:tRNA ribosyltransferase-isomerase; OS = Negativibacillus sp. 1xD8-3 OX=2320085 GN=queA PE=3 SV=1

SEQ ID NO: 69217 - protein, 338 aa, Negativicoccus succinicivorans
  REGION 1..338: note = tr|W1U0V4|W1U0V4_9FIRM S-adenosylmethionine:tRNA ribosyltransferase-isomerase OS=Negativicoccus succinicivorans DORA_17_25 OX=1403945 GN=queA PE=3 SV=1
MNVSEFNYDLPEELIAQTPVEPRDTSRLLTLDRQTGATKQGIFRDILADVRPDDVWVFNNTRVIPARLYGKRPTGGRVEVLLLHPLGEDRWEVLVRPGKKALPGTALTFDAGVTATVEDRTEFGGRVLKFTYDGDFYERLDEIGEMPLPPYIHERLQDRERYQTVYSKTPGSAAAPTAGLHFTPEVMKEIAARGATVCYVTLDVGLGTFRPVSVTQIEAHHMHSETYNVSEETARLINEAKRAGRRIVAVGTTSVRTLEAAGQSGVVKAGRDATELFIYPGYEFKIVDAMVTNFHLPQSTLLMMISAFAGKDHVLAAYREAVAAKYRFFSFGDAMWIR

SEQ ID NO: 69218 - protein, 343 aa, Neisseria animalis
  REGION 1..343: note = tr|A0A3N3EFV9|A0A3N3EFV9_NEIAN S-adenosylmethionine:tRNA ribosyltransferase-isomerase; OS = Neisseria animalis OX=492 GN=queA PE=3 SV=1
MNISDFDFALPEALIAQHPPEIRGSSRLLAALPDTPLADRNFADITDYIAAGDVLVFNNTKVMKARLFGQKASGGKIEALIERVLDNHTALAHIRSSKSPKPGTELIFENALRAVMTERAGELFCLRFEGTQTVYELLEQYGKLPLPPYIERAADGSDDSRYQTVYAKHQGAVAAPTAGLHFTDELLTALRAKGVQTAEVTLHVGAGTFQPVRVENIAEHKMHSEWFDIPSETVAAIQAAQARGSKIWAVGTTSMRALESAAQTGSLKAGQGDTDIFITPGYRFKVIDRLITNFHLPKSTLLMLVSAFSGMEHIRNVYRHAIEQQYRFFSYGDAMILGRKETE

SEQ ID NO: 69219 - protein, 345 aa, Neisseria animaloris
  REGION 1..345: note = tr|A0A3S5BW58|A0A3S5BW58_9NEIS S-adenosylmethionine:tRNA ribosyltransferase-isomerase; OS = Neisseria animaloris OX=326522 GN=queA PE=3 SV=1
MHISDFDFELPDELIAQHPPAVRGSSRLLVALPGKQLCDGIFNDLPEYVDAGDVLVFNNTKVMKARLFGQKASGGKIEALIERVLDEHTALAHIRSSKSPKPGTELVFDGGIAATMVERAGELFCLRFGGSQSVYDLLENNGRLPLPPYIERAADDNDDNRYQTVYAKHQGAVAAPTAGLHFTEELLTALRGKGIQTAEVTLHVGAGTFQPVRVENIAEHKMHSEWFDVPSETVEMVEAAHRRGNKVWAVGTTSMRALESAARETGRLKAGRGDTDIFITPGYSFKVVDRLVTNFHLPKSTLLMLVSAFSGTEHIRHVYRHAVEQKYRFFSYGDAMLLGREDDDS

SEQ ID NO: 69220 - protein, 85 aa, unidentified
  source 1..85: note = Neisseria arctica
  REGION 1..85: note = tr|A0A0J0YP56|A0A0J0YP56_9NEIS S-adenosylmethionine:tRNA ribosyltransferase-isomerase (Fragment) OS=Neisseria arctica OX=1470200 GN=PL75_11095; PE = 3 SV=1
SVKENGGSVNTVGTTSIRTVETIGSNLDGQMQADSGWTNIFINPGYEWKVVDAFSTNFHLPKSTLVMLVSAFAGRELVLGAYHHA

SEQ ID NO: 69221 - protein, 341 aa, unidentified
  source 1..341: note = Neisseria arctica
  REGION 1..341: note = tr|A0A0J0YS64|A0A0J0YS64_9NEIS S-adenosylmethionine:tRNA ribosyltransferase-isomerase; OS = Neisseria arctica OX=1470200 GN=queA PE=3 SV=1
MHINDFDFDLPDALIAQHPPEVRGSSRLLEAFPGQPLRDLRFADLASLVSAGDVLVFNNTKVMKARLFGQKASGGKIEALVERVIDGHTALAHIRSSKSPKPGTELQFEGGITATMLAREGELFCLRFDGDADIYELLEKNGRLPLPPYIERAADDNDDSRYQTVYAKYQGAVAAPTAGLHFTEALLDGLKNKGVNIGEVTLHVGAGTFQPVRVENIAEHKMHSEWFEVPSETVAAIEAAKAAGKRVWAVGTTSMRALESAARATGCLQAGRGDTDIFITPGYRFNVVDCLVTNFHLPKSTLLMLVSAFSGTEHIRNVYRHAIEQEYRFFSYGDAMVLGRA

SEQ ID NO: 69222 - protein, 474 aa, Neisseria bacilliformis
  REGION 1..474: note = tr|F2BE76|F2BE76_9NEIS S-adenosylmethionine:tRNA ribosyltransferase-isomerase OS=Neisseria bacilliformis ATCC BAA-1200 OX=888742 GN=queA2 PE=3 SV=1
MMVPDFPVQPVNRAAVGAFDAAVGLDGQENARVAVPGFVARAAAMQRQLLRRDDDGFLVRVAHGWFLYFRLRRAASQMVQNGGILLDKPLPVHGRGRLKAAFQTASPPQLRYNRAFSQRLCVPRFFRRLPMLLSDFDFHLPEHLIAQHPPAERGASRLLVALPDGTLRDETFAFLPQLVRAGDLFVFNNTKVVKARLFGQKESGGRIEALIERVLDAHTALAHIRASKSPKPGTVLLFDGGIRAEMTERAGELFTLRFAGEQSVWQILERHGRLPLPPYIARAAAAEDEARYQTVYAKHQGAVAAPTAGLHFTEALLAELEARGARTAEITLHVGAGTFQPVRTENVAEHKMHSEWYDIPAETAEAVAETKALGGRVWAVGTTSVRALESAARATGCLSAGSGDTDIFLTPGCRFNVADCLITNFHLPKSTLLMLVSAFAGTEEIRRIYRHAVEREYRFFSYGDAMVLGRKEAV

SEQ ID NO: 69223 - protein, 342 aa, Neisseria canis
  REGION 1..342: note = tr|A0A1X3CVR4|A0A1X3CVR4_9NEIS S-adenosylmethionine:tRNA ribosyltransferase-isomerase; OS = Neisseria canis OX=493 GN=queA PE=3 SV=1
MHISDFDFELPEQLIAQHPPEERGNSRLLVALSGMPPQDKMFADLPMWLEPGDVLVFNNTKVIKARLFGQKASGGKIEALVERVLDEHRALAHIRASKSPKPGAELWFEGGIKAVMEERQGELFCLRFEGGPNVYELLEQHGHLPLPPYIERAAGANDDSRYQTVYAKEQGAVAAPTAGLHFTEAMLAGLAAKGVEMAEVTLHVGAGTFQPVRVDNIAEHKMHSEWYEVSETTVEKIRQARQAGHRVWSVGTTSMRALESAARSGVLQAGQGDTDIFITPGYRFKVVDRLITNFHLPKSTLLMLVSAFSGTQHIRDIYAHAIREQYRFFSYGDAMILGRAQD

SEQ ID NO: 69224 - protein, 356 aa, Neisseria cinerea
  REGION 1..356: note = tr|A0A2X3ZGE2|A0A2X3ZGE2_NEICI S-adenosylmethionine:tRNA ribosyltransferase-isomerase; OS = Neisseria cinerea OX=483 GN=queA PE=3 SV=1
MAAVPNESVTMDISDFDFTLPEKLIAQHPPEVRGSSRLLVALPDMPLQDRVFGDLPDYVGEGDVLVFNNTKVMKARLFGQKDSGGRIEALIERVLDSHTALAHIRSSKSPKPGMGLVFEGGIRAVMVERAGALFCLRFEGGQTVYELLERNGHLPLPPYIERAADADDDSRYQTVYAKYQGAVAAPTAGLHFTEELLRRLKDKGVETAEVTLHVGAGTFQPVRVEKIEEHKMHSEWFEVPSETVAAVEAAKARGNKVWAVGTTSMRALESAARATGYLKDGQGDTDIFITPGYRFNVVDRLVTNFHLPKSTLLMLVSAFSGMGHIRAVYRHAVEREYRFFSYGDAMILGRNEGGGL

SEQ ID NO: 69225 - protein, 356 aa, Neisseria cinerea
  REGION 1..356: note = tr|D0W3N4|D0W3N4_NEICI S-adenosylmethionine:tRNA ribosyltransferase-isomerase OS=Neisseria cinerea ATCC 14685 OX=546262 GN=queA PE=3 SV=1
MAAVPNESVTMDISDFDFTLPEKLIAQHPPEVRGSSRLLVALPDMPLQDRVFGDLPDYVGEGDVLVFNNTKVMKARLFGQKDSGGRIEALIERVLDSHTALAHIRSSKSPKPGMGLVFEGGIRAVMVERAGALFCLRFEGGQTVYELLEQNGHLPLPPYIERAADADDDSRYQTVYAKYQGAVAAPTAGLHFTEELLLRLKGKGVETAEVTLHVGAGTFQPVRVEKIEEHKMHSEWFEVPSETVAAVEAAKARGNKVWAVGTTSMRALESAARETGHLKDGQGDTDIFITPGYRFNVVDRLVTNFHLPKSTLLMLVSAFSGMGHIRAVYRHAVEREYRFFSYGDAMILGRNEGGGL

SEQ ID NO: 69226 - protein, 346 aa, Neisseria dentiae
  REGION 1..346: note = tr|A0A1X3D451|A0A1X3D451_9NEIS S-adenosylmethionine:tRNA ribosyltransferase-isomerase; OS = Neisseria dentiae OX=194197 GN=queA PE=3 SV=1
MHISDFDFELPEALIAQQPSAERGGSRLLVALPGMAPADTLFAALPEYLNEGDVLVFNNTKVMKARLFGAKESGGRIEALIERVLDGSSALAHVRASKSPKAGTVLVFDGGIRAVMEAREGELFRLRFEGALSVYDILEQTGRLPLPPYIERAADDGDDERYQTVYAKHQGAVAAPTAGLHFTDALLQTLRNKGVRTAEVTLHVGAGTFQPVRVENIAEHKMHSEWFDVPPETVAAVEAAKQRGGRVWAVGTTSMRALESAARETGRLKAGTGDTDIFITPGYRFNVADRLITNFHLPKSTLLMLVSAFSGTAHIRSIYRHAVEQQYRFFSYGDAMLLGRQEDALS

SEQ ID NO: 69227 - protein, 350 aa, unidentified
  source 1..350: note = Neisseria dumasiana
  REGION 1..350: note = tr|A0A1X3DM04|A0A1X3DM04_9NEIS S-adenosylmethionine:tRNA ribosyltransferase-isomerase; OS = Neisseria dumasiana OX=1931275 GN=queA PE=3 SV=1
MHISDFDFELPEALIAQHPPVERGGSRLLVALPDRPVADAVFSALPDYLEAGDVLVFNNTKVMKARLFGTKASGGKIEALIERVLDEHTALAHVRSSKSPKPGSELVFEGGIRAVMEERAGELFRLRFEDSRSVYDILEHVGKLPLPPYIERAADDDDDARYQTVYAKHQGAVAAPTAGLHFTDGLLEAIRAKGVHTAEVTLHVGAGTFQPVRVENIAEHTMHSEWFDVPSETVAAIEAARQRGSKIWAVGTTSMRALESAARETGRLKAGTGDTDIFITPGYRFRVVDRLITNFHLPKSTLLMLVSAFSGTEHIRSIYRHAVGQQYRFFSYGDAMILGCADSSQREAQD

SEQ ID NO: 69228 - protein, 161 aa, unidentified
  source 1..161: note = Neisseria dumasiana
  REGION 1..161: note = tr|A0A1X3D1T7|A0A1X3D1T7_9NEIS S-adenosylmethionine:tRNA ribosyltransferase-isomerase (Fragment) OS=Neisseria dumasiana OX=1931275; GN = BV912_12950 PE=3 SV=1
YIERAAGANDDSRYQTVYAKEQGAVAAPTAGLHFTEAMLAGLAAKGVEMAEVTLHVGAGTFQPVRADHIAEHKMHSEWYEVSETTVEKIRQARQAGRRVWSVGTTSMRALESAARSGVLQAGQGDTDIFITPGYRFKVVDRLITNFHLPKSTLLMLVSAFS

SEQ ID NO: 69229 - protein, 347 aa, Neisseria elongata
  REGION 1..347: note = tr|A0A378TVQ0|A0A378TVQ0_NEIEL S-adenosylmethionine:tRNA ribosyltransferase-isomerase; OS = Neisseria elongata OX=495 GN=queA PE=3 SV=1
MQLSDFDFDLPEHLIAQQPPAERGASRLLSALPGQPLRDEMFSVLPQLAGRGDVLVFNNTKVMKARLFGQKASGGKIEALIERVLDAHTALAHIRSSKSPKPGTRLLFDGGIGAEMTAREGELFRLHFDGEETVYRLLEQHGRLPLPPYIERAANGDDESRYQTVYAKHQGAVAAPTAGLHFTDTLLAELKAKGVRLAEVTLHVGAGTFQPVRTENIAEHKMHSEWYDVPPETVAAVEAAKAEGTKVWAVGTTSMRALESAARETGRLKAGRGDTDIFITPGYRFRVADRLITNFHLPKSTLLMLVSAFSGIEEIRAVYRHAVAKEYRFFSYGDAMLLGRKDDAESL

SEQ ID NO: 69230 - protein, 347 aa, Neisseria elongata
  REGION 1..347: note = tr|D4DMZ9|D4DMZ9_NEIEG S-adenosylmethionine:tRNA ribosyltransferase-isomerase OS=Neisseria elongata subsp. glycolytica ATCC 29315 OX=546263 GN=queA PE=3 SV=1
MQLSDFDFDLPEHLIAQQPPAERGASRLLSALPGESLRDEMFSVLPQLAGRGDVLVFNNTKVMKARLFGQKTSGGKIEALIERVLDAHTALAHIRSSKSPKPGTRLLFDGGIGAEMTAREGELFRLHFDGEETVYRLLEQHGQLPLPPYIERAADGDDESRYQTVYAKHQGAVAAPTAGLHFTDTLLAELKAKGVRLAEVTLHVGAGTFQPVRTENIAEHKMHSEWYDVPPETVAAVEAAKAEGAKVWAVGTTSMRALESAARETGRLKAGRGDTDIFITPGYRFRVADRLITNFHLPKSTLLMLVSAFSGIEEIRAVYRHAVAKEYRFFSYGDAMVLGRKDDAEPL

SEQ ID NO: 69231 - protein, 363 aa, Neisseria flavescens
  REGION 1..363: note = tr|A0A154UD70|A0A154UD70_NEIFL S-adenosylmethionine:tRNA ribosyltransferase-isomerase; OS = Neisseria flavescens OX=484 GN=queA PE=3 SV=1
MPSENQLCAYNGACFFKVCATMDISDFDFELPEKLIAQHPPEVRGSSRLLVALPILPIEDQYFGDLPDYVAPGDVLVFNNTKVMKARLFGQKASGGKIEALIERVLDAHTALAHIRSSKSPKPGTELIFEGDIRAVMMERAEELFCLKFEGEQTVYELLEQNGHLPLPPYIERAADDEDDSRYQTVYAKYQGAVAAPTAGLHFTDELLGRLKAKGVETAEVTLHVGAGTFQPVRVDKIEEHKMHSEWFDVPAETVATVEAAKARGNKVWAVGTTSMRALESAARETGRLKAGRGDTDIFITPGYRFNVADRLITNFHLPKSTLLMLVSAFSGMEHIRSVYRHAVEQEYRFFSYGDAMILGKVE

SEQ ID NO: 69232 - protein, 363 aa, Neisseria flavescens
  REGION 1..363: note = tr|C5TKI4|C5TKI4_NEIFL S-adenosylmethionine:tRNA ribosyltransferase-isomerase OS=Neisseria flavescens SK114; OX = 596320 GN=queA PE=3 SV=1
MPSENQLYAYNGACFFKVCTTMDISDFDFELPEKLIAQHPPEVRGSSRLLVALPTLPIEDKHFGDLPDYVAPGDVLVFNNTKVMKARLFGQKASGGKIEALIERVLDTHTALAHIRSSKSPKPGTELIFEGDIRAVMMERAEELFCLKFEGEQTVYELLEQNGHLPLPPYIERAADDEDDSRYQTVYAKYQGAVAAPTAGLHFTDELLGRLKAKGVETAEVTLHVGAGTFQPVRVDKIEEHKMHSEWFDVPAETVAAVEAAKARGNKVWAVGTTSMRALESAARETGRLKAGRGDTDIFITPGYRFNVADRLITNFHLPKSTLLMLVSAFSGMEHIRSVYRYAVEQEYRFFSYGDAMILGKAE

SEQ ID NO: 69233 - protein, 346 aa, Neisseria gonorrhoeae
  REGION 1..346: note = sp|Q5FAH3|QUEA_NEIG1 S-adenosylmethionine:tRNA ribosyltransferase-isomerase OS=Neisseria gonorrhoeae (strain ATCC 700825 / FA 1090) OX=242231 GN=queA PE=3 SV=1
MDISDFDFTLPEHLIAQHPPEVRGSSRLLVALSDMPLQDRVFGDLPDYVEAGDVLVFNNTKVMKARLFGQKDSGGRIEALIERVLDNHTALAHIRSSKSPKPGMGLVFEGGIRAVMVGREGELFCLRFEGGQTVYELLEQNGHLPLPPYIERAADADDDSRYQTVYAKYQGAVAAPTAGLHFTEELLRRLKDKGAVTAEVTLHVGAGTFQPVRVDKIEEHKMHSEWFEVPSETVAAVEAAKARGNKAWAVGTTSMRALESAARATGYLKDGQGDTDIFITPGYRFNVVDRLVTNFHLPKSTLLMLVGAFSGMGHIRAVYRHAIEREYRFFSYGDAMVLGRNEGGGL

SEQ ID NO: 69234 - protein, 346 aa, Neisseria gonorrhoeae
  REGION 1..346: note = tr|A0A1D3GS63|A0A1D3GS63_NEIGO S-adenosylmethionine:tRNA ribosyltransferase-isomerase; OS = Neisseria gonorrhoeae OX=485 GN=queA PE=3 SV=1
MDISDFDFTLPEHLIAQHPPEVRGSSRLLVALPDMPLQDRVFGDLPDYVEAGDVLVFNNTKVMKARLFGQKDSGGRIEALIERVLDNHTALAHIRSSKSPKPGMGLVFEGGIRAVMVGREGELFCLRFEGGQTVYELLEQNGHLPLPPYIERAADADDDSRYQTVYAKYQGAVAAPTAGLHFTEELLRRLKDKGAVTAEVTLHVGAGTFQPVRVDKIEEHKMHSEWFEVPSETVAAVEAAKARGNKAWAVGTTSMRALESAARATGYLKDGQGDTDIFITPGYRFNVVDRLVTNFHLPKSTLLMLVGAFSGMGHIRAVYRHAIEREYRFFSYGDAMVLGRNEGGGL

SEQ ID NO: 69235 - protein, 346 aa, Neisseria iguanae
  REGION 1..346: note = tr|A0A2P7TY66|A0A2P7TY66_9NEIS S-adenosylmethionine:tRNA ribosyltransferase-isomerase; OS = Neisseria iguanae OX=90242 GN=queA PE=3 SV=1
MDISDFDFDLPEKLIAQHPPKVRGSSRLLAALPDMPVKDVHFADLPDYVERGDVLVFNNTKVIKARLFGKKASGGKIEALIERVLDGHTALAHVRSSKSPKPGTELVFEGGIKAVMVERQEELFCLRFEGRQTVYELLEQNGHLPLPPYIERTADSEDDSRYQTVYAKHQGAVAAPTAGLHFTDELLAALKAKGVEMAEVTLHVGAGTFQPVRVDNIADHKMHREWFDVPSETVAVIEAVKARGNRVWSVGTTSMRALESAARETGRLKAGQGDTDIFITPGYRFNVVDRLITNFHLPKSTLLMLVSALSGIQRIRDIYRHAVMQEYRFFSYGDAMILGHVENVED

SEQ ID NO: 69236 - protein, 346 aa, Neisseria lactamica
  REGION 1..346: note = tr|E4ZF69|E4ZF69_NEIL0 S-adenosylmethionine:tRNA ribosyltransferase-isomerase OS=Neisseria lactamica (strain 020-06) OX=489653 GN=queA PE=3 SV=1
MDISDFDFTLPEKLIAQHPPEVRGSSRLLVALPDMPLQDRVFGDLPDYVGEGDVLVFNNTKVMKARLFGQKDSGGRIEALIERVLDNHTALAHIRSSKSPKPGMGLVFEGGIRAVMVGREGELFCLCFEGGQTVYELLEQNGHLPLPPYIERAADADDDSRYQTVYAKYQGAVAAPTAGLHFTEELLRRLKDKGAVTAEVTLHVGAGTFQPVRVEKIEEHKMHSEWFEVPSETVAAVEAAKARGNKVWAVGTTSMRALESAARATGRLKAGQGDTDIFITPGYRFNVADRLVTNFHLPKSTLLMLVSAFSGMGHIRAAYRYAVEHEYRFFSYGDAMILGRNEGVVR

SEQ ID NO: 69237 - protein, 356 aa, Neisseria lactamica
  REGION 1..356: note = tr|D0WDG7|D0WDG7_NEILA S-adenosylmethionine:tRNA ribosyltransferase-isomerase OS=Neisseria lactamica ATCC 23970 OX=546265 GN=queA PE=3 SV=1
MAACPNESVAMDISDFDFTLPEKLIAQHPPEVRGSSRLLVALPDMSLQDRVFGDLPDYVEAGDVLVFNNTKVMKARLFGQKDSGGRIEALIERVLDNHTALAHIRSSKSPKPGMGLVFEGGIRAVMVGREGELFCLRFEGGQTVYELLEQNGHLPLPPYIERAADADDDSRYQTVYAKYQGAVAAPTAGLHFTEELLRRLKDKGAVTAEVTLHVGAGTFQPVRVEKIEEHKMHSEWFEVPSETVTAVEAAKARGNKVWAVGTTSMRALESAARATGRLKAGQGDTDIFITPGYRFNVVDRLVTNFHLPKSTLLMLVSAFSGMGHIRAAYRYAVEREYRFFSYGDAMILGRNEGGGL

SEQ ID NO: 69238 - protein, 343 aa, Neisseria macacae
  REGION 1..343: note = tr|F9F0C2|F9F0C2_9NEIS S-adenosylmethionine:tRNA ribosyltransferase-isomerase OS=Neisseria macacae ATCC 33926 OX=997348 GN=queA2 PE=3 SV=1
MDISDFDFTLPDRLIAQHPPEVRGSSRLLVALPDISLQDRVFGDLPDYIEAGDVLVFNNTKVMKARLFGQKESGGKIEALIERVLDNHTALAHIRSSKSPKTGTKLIFEGDICAVMVERADELFCLRFEGGQTVYELLEQNGHLPLPPYIERAAGADDDTRYQTVYAKHQGAVAAPTAGLHFTDELLGRLKAKGVETAEVTLHVGAGTFQPVRVDKIEEHKMHSEWFDVPPETVAAIEAAHARGNKVWAVGTTSMRALESAARETGRLKAGQGDTDIFITPGYRFRVIDRLITNFHLPKSTLLMLVSAFSGMEHIRAVYRHAVEHEYCFFSYGDAMVLGRSEP

SEQ ID NO: 69239 - protein, 346 aa, Neisseria meningitidis
  REGION 1..346: note = sp|Q9JXW4|QUEA_NEIMB S-adenosylmethionine:tRNA ribosyltransferase-isomerase OS=Neisseria meningitidis serogroup B (strain MC58) OX=122586 GN=queA PE=3 SV=1
MDISDFDFTLPEKLIAQHPPEVRGSSRLLVALPDMPLQDRVFGDLPDYVEAGDVLVFNNTKVMKARLFGQKDSGGRIEALIERVLDNHTALAHIRSSKSPKPGMGLVFEGGIRAVTVGREGELFCLRFEGGETVYELLEQNGHLPLPPYIERAADADDDSRYQTVYAKYQGAVAAPTAGLHFTEELLHRLKDKGAVTAEVTLHVGAGTFQPVRVDKIEEHKMHSEWFEVPSETAAAVEAAKARGNKVWAVGTTSMRALESAARATGRLKAGQGDTDIFITPGYRFNVVDRLVTNFHLPKSTLLMLVSAFSGMGHIRAAYRHAVEREYRFFSYGDAMVLGRNEGVVR

SEQ ID NO: 69240 - protein, 346 aa, Neisseria meningitidis
  REGION 1..346: note = sp|A9M1H2|QUEA_NEIM0 S-adenosylmethionine:tRNA ribosyltransferase-isomerase OS=Neisseria meningitidis serogroup C (strain 053442) OX=374833 GN=queA PE=3 SV=1
MDISDFDFTLPEKLIAQHPPEVRGSSRLLVALPDMPLQDRVFGDLPDYVEAGDVLVFNNTKVMKARLFGQKDSGGRIEALIERVLDSHTALAHIRSSKSPKPGMGLVFEGGIRAVMVGREGELFCLRFEGGETVYELLEQNGHLPLPPYIERAADADDDSRYQTVYAKYQGAVAAPTAGLHFTEELLRRLKDKGAVTAEVTLHVGAGTFQPVRVDKIEEHKMHSEWFEVPSETAAAVEAAKARGNKVWAVGTTSMRALESAARATGRLKAGQGDTDIFITPGYRFNVVDRLVTNFHLPKSTLLMLVSAFSGMGHIRAAYRHAVEREYRFFSYGDAMVLGRNEGVVR

SEQ ID NO: 69241 - protein, 347 aa, Neisseria mucosa
  REGION 1..347: note = tr|A0A2R4AWZ2|A0A2R4AWZ2_NEIMU S-adenosylmethionine:tRNA ribosyltransferase-isomerase; OS = Neisseria mucosa OX=488 GN=queA PE=3 SV=1
MDISDFDFTLPDRLIAQHPPEVRGSSRLLVALPDMPLQDRVFGDLPDYIEAGDVLVFNNTKVMKARLFGQKESGGKIEALIERVLDNHTALAHIRSSKSPKPGTKLIFEGDICAVMVERADELFCLRFEGEQTVYELLEQNGHLPLPPYIERAAGADDDKRYQTVYAKHQGAVAAPTAGLHFTDELLGRLKAKGVETAEVTLHVGAGTFQPVRVDKIEEHKMHSEWFDVPPETVAAIEAAHAHGNKVWAVGTTSMRALESAARETGRLKAGQGDTDIFITPGYRFRVIDRLITNFHLPKSTLLMLVSAFSGMEHIRSVYRHAVEHEYRFFSYGDAMVLGRRETDIED

SEQ ID NO: 69242 - protein, 347 aa, Neisseria mucosa
  REGION 1..347: note = tr|D2ZYW1|D2ZYW1_NEIMU S-adenosylmethionine:tRNA ribosyltransferase-isomerase OS=Neisseria mucosa ATCC 25996 OX=546266 GN=queA PE=3 SV=1
MDISDFDFTLPDQLIAQHPPEVRGSSRLLVALPDMPLQDRAFGNLPDYIEAGDVLVFNNTKVMKARLFGQKESGGKIEALIERVLDNHTALAHIRSSKSPKPGTKLIFEGDICAVMVERADELFCLRFEGEQTVYELLEQNGHLPLPPYIERAAGADDDKRYQTVYAKHQGAVAAPTAGLHFTDELLGRLKTKGVETAEVTLHVGAGTFQPVRVDKIEEHKMHSEWFDVPPETVAAIEAAHARGNKVWAVGTTSMRALESAARETGRLKAGQGDTDIFITPGYRFRVIDRLITNFHLPKSTLLMLVSAFSGMEHIRTVYRHAVEHEYRFFSYGDAMVLGRSETDIAD

SEQ ID NO: 69243 - protein, 342 aa, Neisseria perflava
  REGION 1..342: note = tr|A0A2I1QWV5|A0A2I1QWV5_NEIPE S-adenosylmethionine:tRNA ribosyltransferase-isomerase; OS = Neisseria perflava OX=33053 GN=queA PE=3 SV=1
MDISDFDFELPEKLIAQHPPEVRGSSRLLVALPTLPIEDQYFGDLPDYVAPGDVLVFNNTKVMKARLFGQKASGGKIEALIERVLDAHTALAHIRSSKSPKPGTELIFEGDICAVMMERAEELFCLKFEGEQTVYELLEQNGHLPLPPYIERAADDEDDSRYQTVYAKYQGAVAAPTAGLHFTDELLGRLKAKGVETAEVTLHVGAGTFQPVRVDKIEEHKMHSEWFDVPAETVAAVEAAKARGNKVWAVGTTSMRALESAARETGRLKTGRGDTDIFITPGYRFNVADRLITNFHLPKSTLLMLVSAFSGMEHIRSVYRHAVEQEYRFFSYGDAMILGKAE

SEQ ID NO: 69244 - protein, 356 aa, Neisseria polysaccharea
  REGION 1..356: note = tr|E2PBT0|E2PBT0_NEIPO S-adenosylmethionine:tRNA ribosyltransferase-isomerase OS=Neisseria polysaccharea ATCC 43768 OX=546267 GN=queA PE=3 SV=1
MAACPNESAAMDISDFDFTLPEHLIAQHPPEVRGSSRLLVALPDMPLQDRVFGDLPDYVGEGDVLVFNNTKVMKARLFGQKDSGGRIEALIERVLDSHTALAHIRSSKSPKPDTKLIFEGGIEAVMLERVGELFCLRFNSKQTVYELLEQNGHLPLPPYIERAADADDDSRYQTVYAKYQGAVAAPTAGLHFTEELLRRLKDKGVETAEVTLHVGAGTFQPVRVEKIEEHKMHSEWFEVPSETVAAVGAAKARGNKVWAVGTTSMRALESAARETGHLKDGQGDTDIFITPGYRFNVADRLITNFHLPKSTLLMLVSAFSGMGHIRAVYRHAVEREYRFFSYGDAMILGRNEGGGL

SEQ ID NO: 69245 - protein, 367 aa, Neisseria shayeganii
  REGION 1..367: note = tr|G4CGT3|G4CGT3_9NEIS S-adenosylmethionine:tRNA ribosyltransferase-isomerase OS=Neisseria shayeganii 871; OX = 1032488 GN=queA2 PE=3 SV=1
MASFFLPVSRMQLADFDFDLPEHLIAQHPPAERGGSRLLAALPGQLPQDSRFADLPDWLSPGDVLVFNNTKVMKARLFGQKASGGRIEALVERVVDAETVLAHVRSSKSPKPGTELHFEGGVRAVMQERTGELFCLRFVLSGSQTVYDILERHGHLPLPPYIERPAGADDDERYQTVYAKHQGAVAAPTAGLHFTEALLARLAERGIETAEVTLHVGAGTFQPVRVENIAEHTMHSEWYRISEDTVQAVAAAQARGNRVWAVGTTSLRCLESAAASGSLRAGEGDTDIFITPGYRFRVVDGLITNFHLPKSTLLMLVSAFSGMEHIRRTYRHAIEQQYRFFSYGDAMLLQRNEEGGQTPLSFSGSPL

SEQ ID NO: 69246 - protein, 347 aa, Neisseria sicca
  REGION 1..347: note = tr|A0A2I1XB27|A0A2I1XB27_NEISI S-adenosylmethionine:tRNA ribosyltransferase-isomerase; OS = Neisseria sicca OX=490 GN=queA PE=3 SV=1
MDISDFDFTLPDRLIAQHPPEVRGSSRLLVALPDMPLQDRAFGDLPNYIEAGDVLVFNNTKVMKARLFGQKESGGKIEALIERVLDNHTALAHIRSSKSPKPGTKLIFEGDIRAVMIERADELFCLRFEGEQTVYELLEQNGHLPLPPYIERAAGADDDKRYQTVYAKHQGAVAAPTAGLHFTDELLGRLKTKGVETAEVTLHVGAGTFQPVRVDKIEEHKMHSEWFDVLPETVAAIEAAHARGNKVWAVGTTSMRALESAARETGRLKAGQGDTDIFITPGYRFRVIDRLITNFHLPKSTLLMLVSAFSGMEHIRAVYRHAVEHEYRFFSYGDAMVLGRNETDIAD

SEQ ID NO: 69247 - protein, 343 aa, Neisseria sicca
  REGION 1..343: note = tr|I2NR21|I2NR21_NEISI S-adenosylmethionine:tRNA ribosyltransferase-isomerase OS=Neisseria sicca VK64; OX = 1095748 GN=queA PE=3 SV=1
MDISDFDFTLPDRLIAQHPPEVRGSSRLLVALPDMPLQDRVFGDLPDYIEAGDVLVFNNTKVMKARLFGQKESGGKIEALIERVLDNHTALAHIRSSKSPKPGTKLIFEGDICAVMVERADELFCLRFEGEQTVYELLEQNGHLPLPPYIERAAGADDDTRYQTVYAKHQGAVAAPTAGLHFTDELLGRLKAKGVETAEVTLHVGAGTFQPVRVDKIEEHKMHSEWFDVPPETVAAIEAAHTRGNKVWAVGTTSMRALESAARETGRLKAGQGDTDIFITPGYRFRVIDRLITNFHLPKSTLLMLVSAFSGMEHIRAVYRHAVEHEYRFFSYGDAMVLGRSEP

SEQ ID NO: 69248 - protein, 347 aa, Neisseria sp.
  REGION 1..347: note = tr|A0A1F1S9H4|A0A1F1S9H4_9NEIS S-adenosylmethionine:tRNA ribosyltransferase-isomerase; OS = Neisseria sp. HMSC31F04 OX=1581075 GN=queA PE=3 SV=1
MQLSDFDFDLPDHLIAQQPPAERGASRLLSALPGEPLRDEMFSVLPQLVGRGDVLVFNNTKVMKARLFGQKASGGKIEALIERVLDAHTALAHIRSSKSPKPGMRLLFDGGIGAEMTAREGELFRLHFDGEETVYRLLEQHGRLPLPPYIERAADGDDESRYQTVYAKHQGAVAAPTAGLHFTDTLLAELKAKGVRLAEVTLHVGAGTFQPVRTENIAEHKMHSEWYDVPPETVAAVEAAKAEGAKVWAVGTTSMRALESAARETGRLKAGRGDTDIFITPGYRFRVADRLITNFHLPKSTLLMLVSAFSGIEEIRAVYRHAVAKEYRFFSYGDAMVLGRKDDAESF

SEQ ID NO: 69249 - protein, 345 aa, Neisseria sp.
  REGION 1..345: note = tr|A0A2H9X1Z0|A0A2H9X1Z0_9NEIS S-adenosylmethionine:tRNA ribosyltransferase-isomerase; OS = Neisseria sp. N95_16 OX=2024408 GN=queA PE=3 SV=1
MDIADFDFELPEKLIAQHPPEVRGSSRLLVALPDMPLKDAHFADLPDYVGRGDVLVFNNTKVIKARLFGQKASGGKIEALIERVLDEHTALAHVRSSKSPKPGTELIFEGGINAVMVERQEELFCLRFDGTQTVYELLEQNGHLPLPPYIERAADDKDDSRYQTVYAKHQGAVAAPTAGLHFTDELLAALKAKGVEMAEVTLHVGAGTFQPVRVDNIADHKMHSEWFEVPSETVAAIEAAKARGNRVWSIGTTSMRALESAARETGRLKAGQGDTDIFITPGYRFKVVDRLITNFHLPKSTLLMLVSALSGMQHIRDVYQHAVEQEYRFFSYGDAMILGRVEHTD

SEQ ID NO: 69250 - protein, 342 aa, Neisseria subflava
  REGION 1..342: note = tr|A0A4D7X117|A0A4D7X117_NEISU S-adenosylmethionine:tRNA ribosyltransferase-isomerase; OS = Neisseria subflava OX=28449 GN=queA PE=3 SV=1
MDISDFDFELPEKLIAQHPPEVRGSSRLLVALPTLPIEDKHFGDLPDYVAPGDVLVFNNTKVMKARLFGQKASGGKIEALIERVLDAHTALAHIRSSKSPKPGTKLIFEGDIHAVMMERAEELFCLKFEGGQTVYELLEQNGHLPLPPYIERAADDEDDSRYQTVYAKYQGAVAAPTAGLHFTDELLGRLKAKGVETAEVTLHVGAGTFQPVRVDKIEEHKMHSEWFDVPAETVAAVEAAKARGNKVWAVGTTSMRALESAARETGRLKAGRGDTDIFITPGYRFNVADRLITNFHLPKSTLLMLVSAFSGMEHIRNVYRHAVEQEYRFFSYGDAMILGKAE

SEQ ID NO: 69251 - protein, 342 aa, Neisseria subflava
  REGION 1..342: note = tr|D3A855|D3A855_NEISU S-adenosylmethionine:tRNA ribosyltransferase-isomerase OS=Neisseria subflava NJ9703; OX = 546268 GN=queA PE=3 SV=1
MDISDFDFELPEKLIAQHPPEVRGSSRLLVALPTLPIEDKHFGDLPDYVAPGDVLVFNNTKVMKARLFGQKASGGKIEALIERVLDAHTALAHIRSSKSPKPGTELIFEGDIRAVMMERAEELFCLKFEGEQTVYELLEQNGHLPLPPYIERVADDEDDSRYQTVYAKYQGAVAAPTAGLHFTDELLGRLKAKGVETAEVTLHVGAGTFQPVRVDKIEEHKMHSEWFDVPAETVAAIEAAKARGNKVWAVGTTSMRALESAARETGRLKAGRGDTDIFITPGYRFNVADRLITNFHLPKSTLLMLVSAFSGMEHIRSVYRHAVEQEYRFFSYGDAMILGKAE

SEQ ID NO: 69252 - protein, 342 aa, Neisseria wadsworthii
  REGION 1..342: note = tr|G4CQK3|G4CQK3_9NEIS S-adenosylmethionine:tRNA ribosyltransferase-isomerase OS=Neisseria wadsworthii 9715; OX = 1030841 GN=queA2 PE=3 SV=1
MHISDFDFQLPEQLIAQHPPEIRGNSRLLVALPDKPFQDKVFADLPMWLETGDVLVFNNTKVIKARLFGQKASGGKIEALVERVLDTNRALAHIRSSKSPKPGTELWFEGGIKAVMEERRGELFCLRFEGGLNVYELLEQHGHLPLPPYIERAAGENDDSRYQTVYAKEQGAVAAPTAGLHFTEEMLKVLAAKGVEMAEVTLHVGAGTFQPVRVDNIAEHKMHSEWYEVSEETVNKIHKAKQAGRRVWSVGTTSMRALESAARSGVLSAGQGDTDIFITPGYRFEVIDRLITNFHLPKSTLLMLVSAFSGTQNIRDIYAHAIEQQYRFFSYGDAMILGRVED

SEQ ID NO: 69253 - protein, 351 aa, Neisseria weaveri
  REGION 1..351: note = tr|A0A3S4ZDX7|A0A3S4ZDX7_9NEIS S-adenosylmethionine:tRNA ribosyltransferase-isomerase; OS = Neisseria weaveri OX=28091 GN=queA PE=3 SV=1
MHISDFDFELPDDLIAQHPPEIRGSSRLLVACPGEPLGDGQFEHLPDWIAAGDVLVFNNTKVIKARLFGMKASGGKIEALVERVLDEHTALAHIRSSKSPKPGTELVFEGGIRAVMVERAGELFCLRFDGEKNVYELLEENGHLPLPPYIERAAGEEDDSRYQTVYAKHQGAVAAPTAGLHFTEALLQRLRDKGVCTTEVTLHVGAGTFQPVRVENVAEHKMHSEWFEVSEATVRLIEDAHARGNRVWAVGTTSMRALESAALETGRLKSGCGDTDIFITPGFRFKVVDGLITNFHLPKSTLLMLVSAFSGVEHIRSVYRHAVEKRYRFFSYGDAMLLKRCDGGDVTVNQS

SEQ ID NO: 69254 - protein, 344 aa, unidentified
  source 1..344: note = Neisseria zalophi
  REGION 1..344: note = tr|A0A5J6PTG6|A0A5J6PTG6_9NEIS tRNA preQ1(34) S-adenosylmethionine ribosyltransferase-isomerase QueA; OS = Neisseria zalophi OX=640030 GN=queA PE=4 SV=1
MHISDFDFELPESLIAQYPPAERSSSRLLAALPGQPLTDTVFTSLPDYLADGDVLVFNNTKVMKARLFGAKASGGKIEALIERVIDHDTALAHIRSSKSPKPGTELIFEGDIHAVMEERAGELFRLRFHSSNSVYEILEQAGHLPLPPYIERAADDHDDARYQTVYAKHQGAVAAPTAGLHFTDSLLETIRAKGVHTTEVTLHVGAGTFQPVRVDNIEEHKMHSEWFEVPPETVAAIEAAKQRGNHVWSVGTTSMRALESAAKETGRLKAGTGDTDIFITPGYQFNVVDRLITNFHLPKSTLLMLVSAFSGIEHIRHVYQHAIEAQYRFFSYGDAMLLGYDKHK

SEQ ID NO: 69255 - protein, 350 aa, Neisseria zoodegmatis
  REGION 1..350: note = tr|A0A378WK02|A0A378WK02_9NEIS S-adenosylmethionine:tRNA ribosyltransferase-isomerase; OS = Neisseria zoodegmatis OX=326523 GN=queA PE=3 SV=1
MHISDFDFELPEALIAQHPPAERGASRLLVALPDAPVTDTVFSALPDYLEAGDVLVFNNTKVMKARLFGAKASGGKIEALIERVLDAHTALAHVRSSKSPKPGTELIFEGDIRAVMEERAGELFRLRFEDSRSVYEILEHVGKLPLPPYIERTADDDDDARYQTVYAKHQGAVAAPTAGLHFTDGLLDAIRAKGVHTAEVTLHVGAGTFQPVRVENIAEHTMHSEWFEVPSETVAAIEAAQQRGNKVWAVGTTSMRALESAARETGRLKAGTGDTDIFITPGYRFHVADRLITNFHLPKSTLLMLVSAFSGTEHIRNIYRHAVGQQYRFFSYGDAMILGRADSSRHEAQD

SEQ ID NO: 69256 - protein, 350 aa, Neisseria zoodegmatis
  REGION 1..350: note = tr|A0A1X3CP00|A0A1X3CP00_9NEIS S-adenosylmethionine:tRNA ribosyltransferase-isomerase; OS = Neisseria zoodegmatis OX=326523 GN=queA PE=3 SV=1
MHISDFDFELPEALIAQHPPAERGASRLLVALPDAPVADTVFSALPDYLEAGDVLVFNNTKVMKARLFGTKASGGKIEALIERVLDAHTALAHVRSSKSPKPGTELIFEGNIRAVMEERAGELFRLRFEDSRSVYEILEHVGKLPLPPYIERAADDDDDARYQTVYAKHQGAVAAPTAGLHFTDGLLEAIRTKGVHTAEVTLHVGAGTFQPVRVENIAEHTMHSEWFEVPSETVAAIEAAQQRGNKVWAVGTTSMRALESAARETGRLKAGTGDTDIFITPGYRFHVADRLITNFHLPKSTLLMLVSAFSGTEHIRNIYRHAVGQQYRFFSYGDAMILGRAYSSRHETQD

SEQ ID NO: 69257 - protein, 341 aa, unidentified
  source 1..341: note = Neisseriaceae bacterium
  REGION 1..341: note = tr|A0A2I7N8Y3|A0A2I7N8Y3_9NEIS S-adenosylmethionine:tRNA ribosyltransferase-isomerase; OS = Neisseriaceae bacterium DSM 100970 OX=2052837 GN=queA; PE = 3 SV=1
MKLSDFDYYLPEQLIATAPLKERHDSRLLIVSDKLLDQQFKDISKYISPGDLLVLNNTRVIKARLFGHKPSGGKVEVMLERIVDDYSLIAHVRTSKSIKLGMQITLPELEVEITEILGGLFKVSSKIPVNWIDYFDKHGNLPLPPYMQRQAELSDEERYQTVYAKDEGSVAAPTAGLHFSKEILDKLEAQGTKIAYVTLHVGSGTFKPVSVENISEHKMHSEIFNISQETIDKIIHTKKKGGKIVAVGTTSMRTLETVAKRGLVAQSGETDIFITPGFKFEIVDKLITNFHLPKSTLLMLVMAFAGINEIKNAYQYAIENKYRFFSYGDAMLLTRKESNHE

SEQ ID NO: 69258 - protein, 71 aa, unidentified
  source 1..71: note = Neisseriaceae bacterium
  REGION 1..71: note = tr|A0A431HMM1|A0A431HMM1_9NEIS S-adenosylmethionine:tRNA ribosyltransferase-isomerase (Fragment) OS=Neisseriaceae bacterium OX=2014784; GN = EKK64_05625 PE=3 SV=1
MKLSDFDYHLPEELIASLALENRSASRLLVASDDELIDKQFSDIIDYLQAGDLLVLNNTRVVKARLFGSKP

SEQ ID NO: 69259 - protein, 338 aa, unidentified
  source 1..338: note = Neisseriales bacterium
  REGION 1..338: note = tr|A0A3D5YT37|A0A3D5YT37_9NEIS S-adenosylmethionine:tRNA ribosyltransferase-isomerase; OS = Neisseriales bacterium OX=2053582 GN=queA PE=3 SV=1
MQLSDFDYHLPEQLIACQPLANRDDSRLLVVDETPQDRQFKHILDYLNAGDLLVLNNTRVVKARLFGHKPTGGKVEVMLERVINNHEIIAHVGTSKAIKIGMQIELPAGISMQVIERMENIFRLRIVQDIDIYAYLEQHGNLPLPPYMQRQAVLDDETRYQTVFAQHNGSVAAPTAGLHFTPELLAQIRAKGVQISYVTLHVGSGTFKPVSVENIAEHKMHSEVFEISADTIELIKQTKLAGGKVIAVGTTSLRTLESVAKRGLYPQRGETDIFITPGFKFELVDKLITNFHLPKSTLLMLVAAFSGKTQIDASYQHAIQNNYRFFSYGDAMLLTRQD

SEQ ID NO: 69260 - protein, 338 aa, unidentified
  source 1..338: note = Neisseriales bacterium
  REGION 1..338: note = tr|A0A5C8BAS0|A0A5C8BAS0_9NEIS S-adenosylmethionine:tRNA ribosyltransferase-isomerase; OS = Neisseriales bacterium OX=2053582 GN=queA PE=3 SV=1
MKLSDFDYHLPEELIAKNPLSNRSDSRLLVVNEHLEDHNFSEIINYINPGDLLIRNDTRVVKARIFGHKPSGGKVEVMLERIIDQQHFIAHVRTSKRINLGMEIILPDDLVVTVSETLDGLFALQTRTPIDLYAYLEHHGNLPLPPYMQRQAEIADESRYQTVYAAHNGSVAAPTAGLHFTPEILAQIEAKGAQIASVTLHVGSGTFKPVSVENISEHKMHSEVFQINEKTIELIKQTKARGGKIIAVGTTSLRTLESVAKRGLHAQSGETDIFITPGFKFKLVDKLITNFHLPKSTLLMLVSAFSSKDKINMAYQHAIKNNYRFFSYGDAMLLTRQD

SEQ ID NO: 69261 - protein, 353 aa, Neoasaia chiangmaiensis
  REGION 1..353: note = tr|A0A1U9KSF4|A0A1U9KSF4_9PROT S-adenosylmethionine:tRNA ribosyltransferase-isomerase; OS = Neoasaia chiangmaiensis OX=320497 GN=queA PE=3 SV=1
MTQPAPPSAMAAFDFVLPPENIALAPARPRDSARLLHVQPGAPLAETAVRALPTLLRKGDLLIANDTAVIRAQLAAHRGTARIGITLDRILPNGEWHALARNARKLKAGDTLTFGEDPVTATVTENEGDGAVRLAFSVAGGDFDAFLLRVGALALPPYISRPFGPTEQDDIDYRTIFSRQKGAVAAPTAGLHFTPELLTALDAAGITRRTLTLHVGAGTFLPVRDDDIDRHRMHAEWGEIDAETAAAINETRARGGRIVAVGTTSLRLLESAADKNGIVHPWRGETDIFIRPGYRFRAVDVLMTNFHLPRSTLFMLVCAFSGTQTMRETYQYAVSNGFRFYSYGDACLLERAP

SEQ ID NO: 69262 - protein, 345 aa, Neochlamydia sp.
  REGION 1..345: note = tr|A0A0C1K7G1|A0A0C1K7G1_9BACT S-adenosylmethionine:tRNA ribosyltransferase-isomerase; OS = Neochlamydia sp. TUME1 OX=1478174 GN=queA PE=3 SV=1
MKDWHSLNNYLYDLPEELIAQYPCEPRDATRLLVVDRASGNMHEMVFHELADFLGKGDSLVFNNTKVLPSRLIGSRSSGGKAEIFLIKRLPTGDWEALVKPGKKLGKGSNVTFNEGFSCKIIDVLADGKRVVNFDYEGDITQALEKFGHVPLPPYMRRAAIPELDKERYQTVYAQHPGSVAAPTAGLHFTDKLLQRLEEKSVQVDKLTLHIGLGTFLPVKVEDIREHQMHDESFEISQETAERLNKRPINKRQICVGTTSCRALEAAASASGMITGGKYNTNIFIHPGYQFKYVQHLLTNFHQPGSSLLMLVSAFASPELIKEAYNKAIKERYRFLSYGDAMLIL

SEQ ID NO: 69263 - protein, 304 aa, Neochlamydia sp.
  REGION 1..304: note = tr|A0A3Q9XP54|A0A3Q9XP54_9BACT S-adenosylmethionine:tRNA ribosyltransferase-isomerase; OS = Neochlamydia sp. S13 OX=1353976 GN=queA PE=3 SV=1
MHEMVFHELADFLGKGDSLVFNNTKVLPSRLIGSRSSGGKAEIFLIKRLPTGDWEALVKPGKKLGKGSNVTFKEGFSCKIIDVLADGKRVVNFDYEGDIAQALEKFGHIPLPPYMRRTAIPALDKERYQTVYAQHPGSVAAPTAGLHFTDNLLQKLEEKSVQVDKLTLHIGLGTFLPVKVEDIREHQMHAESFEISQETAERLNKRPINKRQICVGTTSCRALEAAASASGMITGGKYNTNIFIHPGYQFKYVQHLLTNFHQPGSSLLMLVSAFASPELIKEAYNKAIKERYRFLSYGDAMLIL

SEQ ID NO: 69264 - protein, 351 aa, Neokomagataea sp.
  REGION 1..351: note = tr|A0A506US94|A0A506US94_9PROT S-adenosylmethionine:tRNA ribosyltransferase-isomerase; OS = Neokomagataea sp. Jb2 OX=2558904 GN=queA PE=3 SV=1
MVDDMAPYDFHLPESRIATHPARPRESARLLHVRPTSASQAVLNTHRITDLPTLLRPGDLLVANNTEVIHAKLEAMRGQARIGITLDRPLPGGTWHVLARNARKLRAGDLLTFGTDCVTAEVVANEGAGAAELRFSVEGAPFDAFLERCGVLALPPYIARPQGPTAQDERDYRTIFSRYRGAVAAPTAGLHFTPDLLEALAQRGIAQRTVTLHVGAGTFLPVRSSLAEHRMHAEWGHIDEATAQAINTTRAQGGRIVAVGTTSLRLLESAADENGLIHPWRGETSIFIRPGYRFRAVDVLMTNFHLPRSTLFMLVCAFAGTTNMQTAYHQAITDRMRFYSYGDACLLERQP

SEQ ID NO: 69265 - protein, 347 aa, Neokomagataea tanensis
  REGION 1..347: note = tr|A0A4Y6V7X1|A0A4Y6V7X1_9PROT S-adenosylmethionine:tRNA ribosyltransferase-isomerase; OS = Neokomagataea tanensis OX=661191 GN=queA PE=3 SV=1
MTDELALFDFDLPRSNIATEPARPRDTARLLHVPAQGSSTLGIVRDLPSFLRPGDLLIANDTAVIRAQLSATRGTARIGITLDRILPDRSWHALARNSRKLRPGDILNFGDDVVTAEIIENEGDGAIQLRFSVEGDDFDAFLDRVGALALPPYIERPTGPTHQDDDDYKTIFSDKRGAVAAPTAGLHFTPELLAALDARGITRRTLTLHVGAGTFLPVRSSISEHRMHAEWGEITAETAQLINDTRAKGGRVIAVGTTSLRLLESAAQEDGTVRPWSGETSIFIRPGYRFRAVDLLMTNFHLPRSTLFMLVCAFSGTETMRAAYERAIREDMRFYSYGDACLLERAE

SEQ ID NO: 69266 - protein, 362 aa, unidentified
  source 1..362: note = Neorhizobium alkalisoli
  REGION 1..362: note = tr|A0A561QV26|A0A561QV26_9RHIZ S-adenosylmethionine:tRNA ribosyltransferase-isomerase; OS = Neorhizobium alkalisoli OX=528178 GN=queA PE=3 SV=1
MRVDLFDFDLPEENIALRPADPRDSARLLVVQPDGETVLSDHGVFELPSFLKPGDALVFNDTKVIPAQLEGIRHREGAGGQQVSATLHMRAGADVWKAFAKPGKRIKIGDRIEFGHAGDNTCLAGSLMATVEEKGEGGEVTLRFDLSGPALDEAIMAVGHIPLPPYIAAKRPEDEKDRKDYQTIYAREKGAVAAPTAGLHFTPDLFAALDAAGIERHFVTLHVGAGTFLPMKADDTDDHKMHEEIGYVSAETAERLNAVKARGGRVICVGTTSLRLIESAAADDSRIQPWSGATGIFITPGYRFKAVDMLMTNFHLPKSTLFMLVSAFAGLETMREAYAHAIATGYRFYSYGDSSLLFRKDR

SEQ ID NO: 69267 - protein, 361 aa, unidentified
  source 1..361: note = Neorhizobium galegae
  REGION 1..361: note = tr|A0A0T7HLE6|A0A0T7HLE6_RHIGA S-adenosylmethionine:tRNA ribosyltransferase-isomerase; OS = Neorhizobium galegae bv. orientalis OX=323655 GN=queA; PE = 3 SV=1
MRVDLFDFDLPEKNIALRPASPRDSARLLVVRPEGEPVLADHRVSDLPGFLRPGDALVFNDTKVIPAQLEGIRHREGAGGQQVSATLHMRVAPDRWKAFAKPGKRIKTGDRIEFGDSGNACLIGSLAATVEDKGEGGEVTLRFDLSGPALDEAIMAVGHIPLPPYIAAKRPEDAQDQKDYQTIYAREEGAVAAPTAGLHFTPELFASLDAVGIERHFVTLHVGAGTFLPVKADDTAEHKMHQEIGHVSAETAARLNAVKRAGGRIVCVGTTSLRLIESAAADDGTIKPWSGATGIFITPGYRFKAVDMLMTNFHLPRSTLFMLVSAFCGLETMRSAYAHAIETGYRFYSYGDSSLLFRDNR

SEQ ID NO: 69268 - protein, 361 aa, unidentified
  source 1..361: note = Neorhizobium galegae
  REGION 1..361: note = tr|A0A0T7FPN7|A0A0T7FPN7_RHIGA S-adenosylmethionine:tRNA ribosyltransferase-isomerase; OS = Neorhizobium galegae bv. officinalis OX=323656 GN=queA; PE = 3 SV=1
MRVDLFDFDLPEKNIALRPASPRDSARLLVVRPEGQPVLADHHVSDLPGFLKSGDALVFNDTKVIPAQLEGIRHREGAGGQQVSATLHMRVAPDRWKAFAKPGKRIKIGDRIEFGHGGNACLIGSLAATVEDKGEGGEVTLCFDLSGPALDEAIMAVGHIPLPPYIAAKRPEDAQDQKDYQTIYAREEGAVAAPTAGLHFTPELFAALDAVGIERHFVTLHVGAGTFLPVKADDTAEHKMHQEIGHVSAETAARLNAVKRAGGRIVCVGTTSLRLIESAAADDGTIKPWSGATGIFITPGYRFKAVDMLMTNFHLPRSTLFMLVSAFCGLETMRAAYSHAIETGYRFYSYGDSSLLFRDNR

SEQ ID NO: 69269 - protein, 362 aa, unidentified
  source 1..362: note = Neorhizobium sp.
  REGION 1..362: note = tr|A0A4R3A999|A0A4R3A999_9RHIZ S-adenosylmethionine:tRNA ribosyltransferase-isomerase; OS = Neorhizobium sp. JUb45 OX=2485113 GN=queA PE=3 SV=1
MRVDLFDFDLPDDNIALRPANPRDSARLLVVKPGNEPELADHVVRDLVDFLKPGDALVFNDTKVIPAQLEGIRHRDGAGGQQVSATLHMRTEPDVWKAFAKPGKRIKVGDRIEFGKSDANTCLIGSLMATVEDKGEGGEVTLRFDLSGPALDEAIMGSGHIPLPPYIAAKRPEDEQDRKDYQTIYAREEGAVAAPTAGLHFTPDLFARLDAAGIERHFVTLHVGAGTFLPVKADDTDDHKMHLEIGHVSAETAEALNAVKARGGRIVCVGTTSLRLIESAASDDGLIHPWSDATGIFITPGYRFKAVDLLMTNFHLPKSTLMMLVSAFAGLETMQRAYAHAIDTGYRFYSYGDSSLLHRMPR

SEQ ID NO: 69270 - protein, 361 aa, unidentified
  source 1..361: note = Neorhizobium sp.
  REGION 1..361: note = tr|A0A4R3X4U8|A0A4R3X4U8_9RHIZ S-adenosylmethionine:tRNA ribosyltransferase-isomerase; OS = Neorhizobium sp. S3-V5DH OX=2485166 GN=queA PE=3 SV=1
MRVDLFDFDLPEENIALRPASPRDSARLLVVRPDGEPLLADHCVSDLARFLRAGDALVFNDTKVIPAQLEGQRIREGGNELPVSATLHMRAGPERWKAFARPGKRIKVGDRIAFGHTGNACLLGTLNATVEAKGEGGEITLLFDLTGPALDEAIMAVGHIPLPPYIADKRPEDDRDRKDYQTIYARERGAVAAPTAGLHFTPELFAVLDAAGIERHFVTLHVGAGTFLPVKADDTADHKMHEEIGHVSAETAARLNAVKARGGRIVCVGTTSLRLIESAASEDGQIHAWSGATDIFITPGYRFKAVDILMTNFHLPKSTLFMLVSAFSGLETMRSAYTHAIQSGYRFYSYGDASLLFRASK

SEQ ID NO: 69271 - protein, 378 aa, unidentified
  source 1..378: note = Neosynechococcus sphagnicola
  REGION 1..378: note = tr|A0A098TLC5|A0A098TLC5_9CYAN S-adenosylmethionine:tRNA ribosyltransferase-isomerase; OS = Neosynechococcus sphagnicola sy1 OX=1497020 GN=queA; PE = 3 SV=1
MSGKLTASDRSLTSAPDASSDYDLAAYHFELPAERIAQNPVTPRDESRLLVVESTQRHRHCIFRDLPQLLRPGDLLVLNDTRVIPARLYGHKVGGTMVEVLLLEPRSPDCWLALVKPGKRLPPGTLIKFTAAHDPGLHLQATVLERDAATGGRILQFQLQSGNDSLAAALAAVGQVPLPPYITASQADPEQYQTVYAQRPGAVAAPTAGLHFTPELLSQLTHQGIEQTCLTLHVGVGTFRPVNTEDIRNHTLHGEWVEVPAPTVEKIQQTQARGDRVIAVGTTVARALEAAAQVNGLQPFCGKTNLYIYPGYQWQVVDGLITNFHLPGSSLLMLVSALIGRQRLLDLYQGAIDQNYRFYSFGDAMLVLPEARWESGHP

SEQ ID NO: 69272 - protein, 350 aa, Neptuniibacter sp.
  REGION 1..350: note = tr|A0A136H9N3|A0A136H9N3_9GAMM S-adenosylmethionine:tRNA ribosyltransferase-isomerase; OS = Neptuniibacter sp. Phe_28 OX=1795871 GN=queA PE=3 SV=1
MQVKDFYFELPDELIASFPLKERSASRLLSLNGESGELIHGVFRDVLQFIQPGDLMVFNDTRVIPARLFGQKASGGRVEVLIERVLDRQRALAHIRSSRSPKPGTRLTLDGGINAEMVARHDNLFELKFLIDGNIIDLLEEHGHMPLPPYMKREDQLSDRERYQTVYNKKPGAVAAPTAGLHFDDQLLADLDAKGVKRAFVTLHVGAGTFQPVKVDNIDEHVMHSEYIEVSPDVCELVRETRANGGRVIAVGTTSVRSLESASQGGEIEPFFGDSDIFIFPGYRFKSVDAMITNFHLSESTLLMLVSAFSGYEHIKAAYKEAVEQRYRFFSYGDAMYLTRKLDSQSELQG

SEQ ID NO: 69273 - protein, 348 aa, Neptunomonas antarctica
  REGION 1..348: note = tr|A0A1N7N497|A0A1N7N497_9GAMM S-adenosylmethionine:tRNA ribosyltransferase-isomerase; OS = Neptunomonas antarctica OX=619304 GN=queA PE=3 SV=1
MQVKDFYFELPEELIASYPLEQRSASRLLCLEGNSGELAHRHFSDVLDLLHPGDLVVFNNTRVIPARLFGEKATGGKIEVLVERILDQHRVLAHVRSSRSPKPGALLFLEGDTEATMVARHDNLFELEFAGDTSVLDLLETHGHMPLPPYMKREDQLEDRERYQTVYNSQPGAVAAPTAGLHFDEALLAKLDEKGIEKAFVTLHVGAGTFQPVKVERIEDHIMHAEYIEVDESVCAAVKATRARGGRVVAVGTTSVRSLESASQSGEIQPFFGDSSIFIFPGYEFKSVDVLITNFHLSESTLLMLVSAFAGYAHTMKAYKVAIKERYRFFSYGDAMCISRKTDMTEAL

SEQ ID NO: 69274 - protein, 348 aa, unidentified
  source 1..348: note = Neptunomonas qingdaonensis
  REGION 1..348: note = tr|A0A1I2U1Z4|A0A1I2U1Z4_9GAMM S-adenosylmethionine:tRNA ribosyltransferase-isomerase; OS = Neptunomonas qingdaonensis OX=1045558 GN=queA PE=3 SV=1
MQVKDFHFDLPEELIASYPLAQRTASRLLCMDGNTGELAHRHFSDVLELLTPDDLVVFNNTRVIPARLFGEKASGGKVEVLVERVLDQHRVLAHVRSSRSPKPGTVLILEGVAQATMVARHENLFELEFAGETPVLDLLEQHGHMPLPPYMKREDQLEDRERYQTVYSSQPGAVAAPTAGLHFDEALLAKLDEKGIQKAFVTLHVGAGTFQPVKVERIEDHIMHAEYIEVDEKVCEAVRATRARGGRVVAVGTTSVRSLESASQNGEIEPFFGDSSIFITPGYEFKSVDLLITNFHLSESTLLMLVSAFAGYAHTMHAYAVAVKERYRFFSYGDAMCISRKTDTTEAL

SEQ ID NO: 69275 - protein, 348 aa, Neptunomonas sp.
  REGION 1..348: note = tr|A0A437Q622|A0A437Q622_9GAMM S-adenosylmethionine:tRNA ribosyltransferase-isomerase; OS = Neptunomonas sp. HPM-16 OX=1815562 GN=queA PE=3 SV=1
MQVKDFHFELPEELIASYPLDKRSASRLLCLDGNSGAVEHRQFSDILEYLDPGDVVVFNNTRVIPARLFGTKASGGKVEVLVERVLDSHRVLAHVRSSRSPKEGAVLLLEGEIQATMLGRHENLFELEFAGEASVFSLLEAHGHMPLPPYMKREDQLSDRERYQTVYGTQPGAVAAPTAGLHFDEELLAALDEKGVHKAFVTLHVGAGTFQPVKVDKIEDHVMHSEYIEVDQSVCDAVKAARARGNKVVAVGTTSVRSLESASKSGEIAPYQGDSDIFIFPGYEFKSVDLLITNFHLPESTLMMLVSAFAGYEHTMAAYRDAVAEKYRFFSYGDAMCIRRKTDQGEAA

SEQ ID NO: 69276 - protein, 353 aa, Nereida ignava
  REGION 1..353: note = tr|A0A0U1NLQ6|A0A0U1NLQ6_9RHOB S-adenosylmethionine:tRNA ribosyltransferase-isomerase; OS = Nereida ignava OX=282199 GN=queA PE=3 SV=1
MKLSDFDFDLPDNLIATRPAVPRTSAQLLVASGANTGAITDARVSDLTKYLRKGDRLVLNNTKVIPARLTGTRTRDAGQGPVSAKIEVTLLTPQPDGGWSALIKPLRKVAEGEVIVFTDDLTATLTAKADGQGILEFNLTGDDFDAALNAAGAMPLPPYIEAKRKADAQDKTDYQTVFARHTGAVAAPTASLHFDKPLLEALAAQGVTFTEVTLHVGAGTFLPVKVDDISEHKMHAEWGEITKSAAAEINQTKAEGGRVIPVGTTALRLIESAAKNGTLAEWRGETDIFITPGFEFQITDGLMTNFHLPKSTLMMLVSALMGQERIVEIYDHAVRTGYRFFSYGDSSLLLPNG

SEQ ID NO: 69277 - protein, 361 aa, Nesiotobacter exalbescens
  REGION 1..361: note = tr|A0A1U7JFG6|A0A1U7JFG6_9RHOB S-adenosylmethionine:tRNA ribosyltransferase-isomerase; OS = Nesiotobacter exalbescens OX=197461 GN=queA PE=3 SV=1
MRVDEFDFDLPPESIALRPVKPRDAARMLVVRPGQNPLLDDNAVLSLPDLLNPGDALVFNNTKVIPAQLVGFRDREGARAKLGVTLHQKTQTDSWRAFVKPAKKLRPGDVIQFFVEENADSDPLLRARVEEKSAAGDVLLQFDRGAGELDAAIAQVGHIPLPPYIASRRPEDAQDRQDYQTVYAEHKGAVAAPTAGLHFTERLLNALDSRGIQRHFITLHVGAGTFLPVKVDDTNDHQMHEEWGEITSETADALNAVRKRGNKVVAVGTTSLRILESATSEDHVIHPISGSTDIFITPGYRFKAVDGLMTNFHLPKSTLFMLVSAFAGLSEMRRAYEFAISNGYRFYSYGDSSLLFPKGDQ

SEQ ID NO: 69278 - protein, 346 aa, unidentified
  source 1..346: note = Nevskiales bacterium
  REGION 1..346: note = tr|A0A2E9ZU11|A0A2E9ZU11_9GAMM S-adenosylmethionine:tRNA ribosyltransferase-isomerase; OS = Nevskiales bacterium OX=2026766 GN=queA PE=3 SV=1
MQKSDFHFDLPDHLIAQHPLPDRSGARMLDVDGATGQLRDARVLDLPERLQPGDLVVTNDVRVMPARVFGRKASGGRVEVMIERLVQPRVAWAHVRASKTPKPGGQLVLEGGHAVEVQGRQDDGLFVLELAQGTWPEVLEAVGHMPLPPYIRRADTPDDAERYQTVFARQPGAVAAPTAGLHFDDALMAAIQARGAELASTTLWVGAGTFQPVRSERIDEHRMHAERVQVPQATVDAVEATRARGGRVVAIGTTVVRALEAAAAQGQLAAMDGDTRLFIKPGDQFRVVDALFTNFHLPESTLLMLVCAFAGYDTVMHAYRHAVTQQYRFFSYGDAMWLTPQPEARA

SEQ ID NO: 69279 - protein, 349 aa, unidentified
  source 1..349: note = Niabella drilacis
  REGION 1..349: note = tr|A0A1G6SMV4|A0A1G6SMV4_9BACT S-adenosylmethionine:tRNA ribosyltransferase-isomerase; OS = Niabella drilacis OX=1285928 GN=queA PE=3 SV=1
MKLSQFQFDLPLNLIAQHPTKKREDARMMVVHRQTGQMENKNFRDILDYFDDKDVFVVNNTKVFPARMYGRKEKTGAKIEVFLLRELNKQNRLWDVIVDPARKIRVGNKLYFGENEELVAEVIDNTTSRGRTIRFLWEGSEDAFKAQLEALGETPLPKYIKRKPDDEDKERYQTVYAKHEGAVAAPTAGLHFSRELIKRLEIKGIRFAEVTLHTGLGTFRPIEVEDLSKHKMDAEYYHIDDTACRVVNKAKETNHRICSIGTTTMRAMESSFTAQKLLKPSEGWTNMFIHPPYDFNIANALVTNFHLPKTSLMIMTSAFAGYELTIEAYKKAIKDKYRFFSYGDALLII

SEQ ID NO: 69280 - protein, 410 aa, unidentified
  source 1..410: note = Niabella drilacis
  REGION 1..410: note = tr|A0A1G6RYT8|A0A1G6RYT8_9BACT S-adenosylmethionine:tRNA ribosyltransferase-isomerase; OS = Niabella drilacis OX=1285928 GN=queA PE=3 SV=1
MHPKDLNIADFTYELPEAKIAFFPLTQRDASRLLVYQAGTITTGTYRHIDQYIPEHSLAVFNNTKVVEARILFKKPTGGQIEVFCLEPHESYADITTAMAQQGKVLWCCLIGGASKWKSGQVLTRSIAGPKGETVLEARFIEKRSDSFLIELSWTPAFLSFAEILHATGQIPLPPYIKRIADKADEERYQTVYAAHDGSVAAPTAGLHFTEDVLKKLHAKNIQTDFVTLHVGAGTFKPVKAAIMNDHEMHAEFIVVTPGLIRKIAGHQGHPLIAVGTTSLRTLESLYWLGAKLLQDPDCFSSELPHVDQWDPYEESLQQYTVTDALEALAAHLSEKHSGTLVAKTQIIIAPGYPFKIADALVTNFHQPSSTLLLLVAAFIGDDWRKVYDYALANDFRFLSYGDGSLLWRG

SEQ ID NO: 69281 - protein, 349 aa, unidentified
  source 1..349: note = Niabella ginsenosidivorans
  REGION 1..349: note = tr|A0A1A9I6T7|A0A1A9I6T7_9BACT S-adenosylmethionine:tRNA ribosyltransferase-isomerase; OS = Niabella ginsenosidivorans OX=1176587 GN=queA PE=3 SV=1
MKLSQFQFDLPLNLIAQHPAKKREDARMMVVHRQTGQMENKHFRDILDYFDDKDVFVVNNTKVFPARMYGRKEKTGAKIEVFLLRELNKQNRLWDVIVDPARKIRVGNKLYFGDNEELVAEVIDNTTSRGRTIRFLWEGSEDDFKAQLEALGETPLPKYIKRKPDEEDKERYQTVYAKHEGAVAAPTAGLHFSRELIKRLEIKGIRFAEVTLHTGLGTFRPIEVEDLSKHKMDAEYYHIDDMACRIVNKAKETNHRICSIGTTTMRAMESSFTAQKLLKPSEGWTNMFIHPPYEFNIANALVTNFHLPKTSLMIMTSAFAGYELTIEAYKKAIKDKYRFFSYGDALLII

SEQ ID NO: 69282 - protein, 412 aa, unidentified
  source 1..412: note = Niabella ginsenosidivorans
  REGION 1..412: note = tr|A0A1A9I3S6|A0A1A9I3S6_9BACT S-adenosylmethionine:tRNA ribosyltransferase-isomerase; OS = Niabella ginsenosidivorans OX=1176587 GN=queA PE=3 SV=1
MHPRNLNISDFTYPLPEDKIAFFPLEQRDQSRLLIYKNGALSTDIYQHIDQYLPAGSLAVFNNTKVVEARLLFKKPTGGQIELFCLEPHESYADITTAMAQQSRVLWLCLIGGASKWKNGQVLQLSIPDQPHTIVLEARFIEKTTDCFVIELSWEPAFLSFAEVLHKAGQIPLPPYIKRKADSKDAERYQTIYARYDGSVAAPTAGLHFTEAVLQKLAQKSIQTDFVTLHVGAGTFKPVKADTMKDHEMHAEFIAVKPALIKKIMQQKDAPVIAVGTTSLRTIESLYWLGARLLRDAHCFDNQFPYLHQWDAYEATLQNFSLKESFSAILNYMEQRNLPELMAKTQIIIAPGYSFKVAAGLVTNFHQPASTLLLLVAAFIGEDWRKVYEYALENDFRFLSYGDGSLLWRKYP

SEQ ID NO: 69283 - protein, 349 aa, Niabella soli
  REGION 1..349: note = tr|W0EY19|W0EY19_9BACT S-adenosylmethionine:tRNA ribosyltransferase-isomerase OS=Niabella soli DSM 19437; OX = 929713 GN=queA PE=3 SV=1
MKLSQFQFDLPLNLIAQHPAKKREDARMMVVHRQTGQMENKHFRDILDYFDDKDVFVVNNTKVFPARMYGRKEKTGAKIEVFLLRELNKQNRLWDVIVDPARKIRVGNKLYFGDNEELVAEVIDNTTSRGRTIRFLWEGSEEEFKAQLEALGETPLPKYIKRKPDEDDKERYQTVYAKHEGAVAAPTAGLHFSRELIKRLEIQGIRFAEVTLHTGLGTFRPIEVEDLSKHKMDAEYYHIDEAACRVVNKAKETNHRICSIGTTTMRAMESSFTAQKLLKPSEGWTNMFIHPPYDFHIANALVTNFHLPKTSLMIMTSAFAGYELTTEAYKKAIKDKYRFFSYGDALLII

SEQ ID NO: 69284 - protein, 411 aa, Niabella soli
  REGION 1..411: note = tr|W0F2N5|W0F2N5_9BACT S-adenosylmethionine:tRNA ribosyltransferase-isomerase OS=Niabella soli DSM 19437; OX = 929713 GN=queA PE=3 SV=1
MHPKELNISDFTYQLPEEKIAFFPLQQRDQSKLLVYNNGIISTDIYQHIDKQLPAGTLAVFNDTKVVEARLLFKKPTGGQIELFCLEPHESYADITTAMLQQGKVRWLCLIGGASKWKNGQVLQLGFPEHDPKMMLEARFLEKRSDCFAIEFSWMPAVLTFAEILHQTGHIPLPPYIKRAADATDEERYQTVYAEHDGSVAAPTAGLHFTKTVLEKLVQKRVQTDFVTLHVGAGTFKPVKATVMQEHEMHAEFISVNAELIKKIIAQEGRPVVAIGTTSLRTLESLYWLGTKLLQNKDCFDDGLPFLSQWEVYELPPAPLTAALNALLEYMEQKQSAAFVAKTQIIIAPGYAFKVVDGLVTNFHQPSSTLLLLVAAFIGEDWRRVYNYALENDFRFLSYGDGSLLWRRRDA

SEQ ID NO: 69285 - protein, 349 aa, Niastella koreensis
  REGION 1..349: note = tr|G8T9V1|G8T9V1_NIAKG S-adenosylmethionine:tRNA ribosyltransferase-isomerase OS=Niastella koreensis (strain DSM 17620 / KACC 11465 / GR20-10) OX=700598; GN = queA PE=3SV=1
MKLSQFRFDLPLNLIAQHPTKKREDARLMVVHRSTGQIENKHFRDIMDYFDDKDVFVVNNTKVFPARMYGRKEKTGAKIEVFLLRELNKPNRLWDVIVDPARKIRVGNKLYFGENDELIAEVIDNTTSRGRTIRFLWDGTDEEFRNMLEFLGETPLPKYIKRKPEAEDKERYQTVYAKHEGAVAAPTAGLHFSIELIKRLEIKGIRFAEVTLHTGLGTFRPIEVEDLSKHKMDAEYYKIDDLSCKVVNKAIEGKHRICSVGTTTMRAIESSYTAEKLLKPSEGWTNIFIHPPYQFNIADSLVTNLHLPKTSLLIMVCAFAGYDLAMEAYRKAIKDKYRFFSYGDAMLVI

SEQ ID NO: 69286 - protein, 409 aa, Niastella koreensis
  REGION 1..409: note = tr|G8TCS2|G8TCS2_NIAKG S-adenosylmethionine:tRNA ribosyltransferase-isomerase OS=Niastella koreensis (strain DSM 17620 / KACC 11465 / GR20-10) OX=700598; GN = Niako_731 2 PE=3 SV=1
MHPKELSVHDFTYELPEQQIARYPLPERDSSRLLIYKEGAIQESIYRDIYQHLPPDSLLIFNNTKVVAARLLFQKPTGAVVEIFCLEPPPQYADMTTAMTQKGSVTWICLIGGASKWKPGQILEKKMSWNGEEIILHARYLGKEKDSFAIELSWTPEGLTFAEVLHVAGNIPLPPYIKREAEQADSDRYQTIYANTEGSVAAPTAGLHFTDALFNQLDHKHIQREYVTLHVGAGTFKPVKSETMGEHPMHAEFIDVSTGAIERILQYLDKHITVVGTTSLRTIESLYWLGVKTVHQPNLPLEELVVHQWDPYEMEGKRVAAKTALESLLQYMHAHSTDRIITKTSLLIAPGYTFQIPRALVTNFHQPQSTLLLLVAAFVGNDWRKIYTYALENEFRFLSYGDGCLLFRQ

SEQ ID NO: 69287 - protein, 349 aa, Niastella populi
  REGION 1..349: note = tr|A0A1V9FCU1|A0A1V9FCU1_9BACT S-adenosylmethionine:tRNA ribosyltransferase-isomerase; OS = Niastella populi OX=550983 GN=queA PE=3 SV=1
MKLSQFRFDLPLNLIAQHPTKRREDARLMVVHRSTGQIENKHFRDIMDYFDDKDVFVVNNTKVFPARMYGRKEKTGAKIEVFLLRELNKPNRLWDVIVDPARKIRVGNKLYFGENDELIAEVIDNTTSRGRTIRFLWDGTDEEFRNMLEFLGETPLPKYIKRKPEAEDKERYQTVYAKHEGAVAAPTAGLHFSIELIKRLEIKGVRFAEVTLHTGLGTFRPIEVEDLSKHKMDAEYYKIDDLSCKIVNKAIEGKHRICSIGTTTMRAIESSYTAEKLLKPSEGWTNIFIHPPYQFNIADSLVTNLHLPKTSLLIMVCAFAGYDLAMEAYKKAIKDKYRFFSYGDAMLVI

SEQ ID NO: 69288 - protein, 409 aa, Niastella populi
  REGION 1..409: note = tr|A0A1V9F693|A0A1V9F693_9BACT S-adenosylmethionine:tRNA ribosyltransferase-isomerase; OS = Niastella populi OX=550983 GN=A4R26_06915 PE=3 SV=1
MHPKDLSVHDFTYELPEQKIARYPLPERDSSRLLIYKEGAIQEDIYRNIPQYVAAGSLLLFNNTRVVAARLLFQKPTGAVVEIFCLEPPPQYADMTTAMTQKGQVTWICLIGGASKWKPGQILEKRMAWNDDEIVLQARYLGKEKDSFSIELSWTPASLTFAEVLQVAGNIPLPPYIKRTVEQTDSERYQTIYANAEGSVAAPTAGLHFTDAVFKAFDQKQVHLEYVTLHVGAGTFKPVKSETMSGHPMHAEFIDVSIDTINCLLNYLDKQITVVGTTSLRTVESLYWLGVKATRQPDCPPEELVVHQWDPYELNGDPVPAKTALENLLNYLQQHQLDRIITKTSLLIAPGYTFRIPNALVTNFHQPQSTLLLLVAAFIGADWRKLYTYALENDFRFLSYGDGCLLFRH

SEQ ID NO: 69289 - protein, 349 aa, Niastella sp.
  REGION 1..349: note = tr|A0A1E4EAH3|A0A1E4EAH3_9BACT S-adenosylmethionine:tRNA ribosyltransferase-isomerase; OS = Niastella sp. SCN 39-18 OX=1660119 GN=queA PE=3 SV=1
MKLSQFRFDLPLNLIAQHPAKKREDSRLMVVHRDTGEIENKQFRDIMEYFDDKDVFVVNNTRVFPARMYGRKEKTGAKIEVFLLRELNRPNRLWDVIVDPARKIRVGNKLYFGENDELVAEVIDNTTSRGRTIRFLWDGTEEEFRKMLEFMGETPLPKYIKRKPEAEDKERYQTVYAKHEGAVAAPTAGLHFSKELIKRLEIQGIRFAEVTLHTGLGTFRPIEVEDLSKHKMDAEYYKIEQAACDIVNKAKETNHRICSIGTTTMRAMETSYTAQKLLKPSEGWTNHFIHPPYNFNIADALVTNFHLPKTSLLIMACAFAGYDLMMEAYKKAIKEKYRFFSYGDAMLII

SEQ ID NO: 69290 - protein, 412 aa, Niastella sp.
  REGION 1..412: note = tr|A0A1E4EC51|A0A1E4EC51_9BACT S-adenosylmethionine:tRNA ribosyltransferase-isomerase; OS = Niastella sp. SCN 39-18 OX=1660119 GN=ABS68_05405 PE=3; SV = 1
MHPQHISILDFSYALPEDKIAWRPPARRDASKLLIYKNGEIKETHFNAIVDALPANTLMIFNNTKVINARILFKKETGASIEIFCLEPSGQITGYTSAMAKQQHTEWKCFIGGVAKWKNEILQKEIEIAGQTVLLKAELKQKEADAYIVRFSWEPDHLDFAHIIEAAGKVPLPPYIKRETEGEDSSRYQTIFAMQQGSVAAPTASLHFTPEIVARFPQKNIHSSFVTLHVGAGTFKPVKSATMQDHDMHAEYIEVSRQTIEDLLLAQGPIAVAGTTSLRTVETIYWLGVKAFDTPTAEQLSLGQWDVYDAALAAKDFTAKQALQSLLQWMIANQTDKIFTQTQLLIAPGYRFRIANILVTNFHQPQSTLLLLVAAAVGPSWRSLYEYALNHDFRFLSYGDANLIFINENSKA

SEQ ID NO: 69291 - protein, 409 aa, unidentified
  source 1..409: note = Niastella vici
  REGION 1..409: note = tr|A0A1V9FSL2|A0A1V9FSL2_9BACT S-adenosylmethionine:tRNA ribosyltransferase-isomerase; OS = Niastella vici OX=1703345 GN=A3860_06575 PE=3 SV=1
MHPKDLSVHDFTYELPEQKIARYPLPERDSSRLLIYKDGAISENIYRNIHELLSPGSLLLFNNTKVVAARLLFQKPTGAVVEIFCLEPPPQYADMTTAMNQKGRVTWICLIGGASKWKPGQILEKRMEYNGEEVLLQARYLGKEKDSFAIELSWSPVSLTFAEVLHVAGNIPLPPYIKRTVEQTDSERYQTIYANSEGSVAAPTAGLHFTDAVFAELDRKHIHREYVTLHVGAGTFKPVKADTMGEHPMHAEFIDVSTSTLECLLQYLNKQITVVGTTSLRTLESLYWLGVKAGRQPNLPLEELVVHQWDPYELNGTPVPAKAALENLLQYLQKKGLNRIITKTSLLIAPGYKFQIPQALVTNFHQPQSTLLLLVAAFVGNDWRKIYSYALENDFRFLSYGDGCLLLRQ

SEQ ID NO: 69292 - protein, 349 aa, unidentified
  source 1..349: note = Niastella vici
  REGION 1..349: note = tr|A0A1V9FUT2|A0A1V9FUT2_9BACT S-adenosylmethionine:tRNA ribosyltransferase-isomerase; OS = Niastella vici OX=1703345 GN=queA PE=3 SV=1
MKLSQFRFDLPLNLIAQHPTKRREDARLMVVHRQTGQIENKHFRDIMDYFDDKDVFVVNNTKVFPARMYGRKEKTGAKIEVFLLRELNKPNRLWDVIVDPARKIRVGNKLYFGENDELIAEVIDNTTSRGRTIRFLWDGTDEEFRNMLEFLGETPLPKYIKRKPEADDKERYQTVYAKHEGAVAAPTAGLHFSIELIKRLEIKGVRFAEVTLHTGLGTFRPIEVEDLSKHKMDAEYYKIEDLACKIVNKAIQGNHRICSIGTTTMRALESSYTAEKLLKPSEGWTNIFIHPPYQFNIADSLVTNLHLPKTSLLIMTCAFAGYDLAMEAYKKAIKDKYRFFSYGDAMLVI

SEQ ID NO: 69293 - protein, 409 aa, Niastella yeongjuensis
  REGION 1..409: note = tr|A0A1V9ENR7|A0A1V9ENR7_9BACT S-adenosylmethionine:tRNA ribosyltransferase-isomerase; OS = Niastella yeongjuensis OX=354355 GN=A4H97_30855 PE=3; SV = 1
MHPKDLSVHDFTYELPEQQIARYPLPERDSSRLLIYKEGALQEAIYRDIYQHLPPDSLLIFNNTKVVAARLLFQKPTGAVVEIFCLEPPPQYADMTTAMTQKGRVTWICLIGGASKWKPGQILEKKMSWNGQEIVLQARYLGKEKDSFAIELSWEPASLTFAEVLHVAGNIPLPPYIKREVEQADSDRYQTIYANTEGSVAAPTAGLHFTDTLFEQLDRKQIQREYVTLHVGAGTFKPVKSETMGEHPMHAEFIDVNTGTIARILQYLDKHITVVGTTSLRTIESLYWLGVKTVHEPNLPLEDLVVHQWDPYELNGMPVTAKAALESLLQYMHARKMDRIITKTSLLIAPGYTFQIPRALVTNFHQPQSTLLLLVAAFVGNDWRKIYTYALENEFRFLSYGDGCLLFRQ

SEQ ID NO: 69294 - protein, 349 aa, Niastella yeongjuensis
  REGION 1..349: note = tr|A0A1V9EYY5|A0A1V9EYY5_9BACT S-adenosylmethionine:tRNA ribosyltransferase-isomerase; OS = Niastella yeongjuensis OX=354355 GN=queA PE=3 SV=1
MKLSQFRFDLPLNLIAQHPTKKREDARLMVVHRSTGQIENKHFRDIMDYFDDKDVFVVNNTKVFPARMYGRKEKTGAKIEVFLLRELNKPNRLWDVIVDPARKIRVGNKLYFGENDELIAEVIDNTTSRGRTIRFLWDGTDEEFRNMLEFLGETPLPKYIKRKPEAEDKERYQTVYAKHEGAVAAPTAGLHFSIELIKRLEIKGIRFAEVTLHTGLGTFRPIEVEDLSKHKMDAEYYKIDDLSCKVVNKAIEGKHRICSVGTTTMRAIESSYTADKLLKPSEGWTNIFIHPPYQFNIADSLVTNLHLPKTSLLIMVCAFAGYDLAMEAYRKAIKDKYRFFSYGDAMLVI

SEQ ID NO: 69295 - protein, 361 aa, unidentified
  source 1..361: note = Nibricoccus aquaticus
  REGION 1..361: note = tr|A0A290QNZ0|A0A290QNZ0_9BACT S-adenosylmethionine:tRNA ribosyltransferase-isomerase; OS = Nibricoccus aquaticus OX=2576891 GN=queA PE=3 SV=1
MTLPTALFDYDLPAHLIAQTPAARRDASRLLVVDRASRTIAHHHFSDLPQFLRAGDTLFRNNAAVLPARLFAQRPTGGAVECFLTRPEPARGENVWWCLVRPGKKLPGGATFAHENNFTGEVLEKNAEGGALIRFTIPSGESVTALANRLGEVPLPPYITRDESELISKRAHDLERYQTVYANRDRQVAVAAPTAGLHFTPELLTQLSASGVTATDVTLHVGLGTFKPIMTETVEEHAIHRELYELPVATQRALFAPTGRRIAVGTTSVRTLEDFLSRHTSPLTNPFLAEADIFIYPPRTFRGVDALITNFHQPRSTLLCLVSAFLTPGSTDGIAWLKKIYAEAIAREYRFFSYGDAMLIV

SEQ ID NO: 69296 - protein, 363 aa, Nicoletella semolina
  REGION 1..363: note = tr|A0A4R2N8G6|A0A4R2N8G6_9PAST S-adenosylmethionine:tRNA ribosyltransferase-isomerase; OS = Nicoletella semolina OX=271160 GN=queA PE=3 SV=1
MQVSDFHFDLPDDLIARYPTEERTASRLLYLNGETGNYQDQQFTDLLSHLNTGDLLIFNNTRVIPARLYGRKLSGGKLEVLIERVLDNHRCLAHIRASKAPKEEAILILGEDKLGDGNGLEVKMVARHDSLFELHFCSETPLFELLQQAGHIPLPPYIDRPDEKADQERYQTVYSQILGAVAAPTAGLHFDEATLKKLKNKGIETAFVTLHVGAGTFQPVRVTTLEEHKMHAEYAEVSQEVVDKILATKAQGKRVICVGTTSVRTIESAAQKAEEIGELIVPFNADTTIFLYPSKIFRVVDVLITNFHLPESTLIMLVSAFAGYNHCMQAYQHAVEKKYRFFSYGDAMFITKNPNALNDLPSN

SEQ ID NO: 69297 - protein, 354 aa, unidentified
  source 1..354: note = Nioella sp.
  REGION 1..354: note = tr|A0A2E2F1N7|A0A2E2F1N7_9RHOB S-adenosylmethionine:tRNA ribosyltransferase-isomerase; OS = Nioella sp. OX=1912091 GN=queA PE=3 SV=1
MNLSDFDFDLPEHLIATRPARPRSSARLLVADGDTTRDLHVRDLPDLLRAGDRLILNDTKVIPARLTGQRWRDSAQGRVAAKIEVTLLEPGPDGTWSALAKPMRKLKPGESIGFPGGLSADVVALEGGLRLRFNLAGDDFDAALNAAGAMPLPPYIAARRPADERDREDYQTVWARNKGAVAAPTASLHFDDALLATLLARGISFTHVTLHVGAGTFLPVTVEDVTTHKMHAEWGEISDQAAQEIAATKAAGGRIIPVGTTALRLIETAARETGQITPWQGETDIFIYPGFRFNVTDALMTNFHLPKSTLMMLVSALMGVDRIRALYAHAVAGGYRFFSYGDASLLIPQSAAND

SEQ ID NO: 69298 - protein, 344 aa, Nisaea sp.; identical to SEQ ID NO: 64789
  REGION 1..344: note = tr|A0A2D7JMZ7|A0A2D7JMZ7_9PROT S-adenosylmethionine:tRNA ribosyltransferase-isomerase; OS = Nisaea sp. OX=2024842 GN=queA PE=3 SV=1

SEQ ID NO: 69299 - protein, 344 aa, Nisaea sp.
  REGION 1..344: note = tr|A0A2D7Z6A4|A0A2D7Z6A4_9PROT S-adenosylmethionine:tRNA ribosyltransferase-isomerase; OS = Nisaea sp. OX=2024842 GN=queA PE=3 SV=1
MRVDLFDYDLPAELIADAPVEPRRQARLLDQTGAVFTDRRVGDLPELLRAGDILVFNDTKVLPARLVGRRGAAKVEVTLHKSLGQGQWLAFARPGRRLRVGDEVTFTEDLSAEVRAKDPRGDVTLDFGRPESDLRTLLWRHGSMPLPPYIKRDTPRGSDYDDYQTIFAAREGAVAAPTAGLHFTEDLLADLAAAGVATAAITLHVGAGTFLPVKVADADDHVMHSEWGEVSAATVARIAAAKAAGGRVVAVGTTSLRILESAARDGRLAPFSGDTDLFITPGFQFHAVDLLLTNFHLPRSTLLMLVAAFHGRVRMLEAYDHAKAAGYRFYSYGDCCLLDRRGDD

SEQ ID NO: 69300 - protein, 356 aa, unidentified
  source 1..356: note = Nissabacter sp.
  REGION 1..356: note = tr|A0A4P8SEE7|A0A4P8SEE7_9GAMM S-adenosylmethionine:tRNA ribosyltransferase-isomerase; OS = Nissabacter sp. SGAir0207 OX=2126321 GN=queA PE=3 SV=1
MRVADFSFELPESLIARYPQAERSGCRLLSLDGPTGELTHGVFTDLLEKLEAGDLLVFNNTRVIPARMFGRKVSGGKIEVLVERVLDDHRVLAHVRASKAPKVGAELLLGDDESLSATMVARHDALFELRFNDARDVFTVLNDIGHMPLPPYIDRPDEESDRELYQTVYSEKPGAVAAPTAGLHFDEPLLAALKTKGVEMAFVTLHVGAGTFQPVRVESIEDHIMHSEYAEVPQEVVDAVLACKARGKRVIAVGTTSVRSLESAAQASQEAPLAPFFGDTQIFIYPGYEYQVVDALVTNFHLPESTLIMLVSAFAGYRPTMKAYAEAVAEQYRFFSYGDAMFITRNPLAPQQQVGQ

SEQ ID NO: 69301 - protein, 343 aa, Nitratifractor salsuginis
  REGION 1..343: note = tr|E6X1G8|E6X1G8_NITSE S-adenosylmethionine:tRNA ribosyltransferase-isomerase OS=Nitratifractor salsuginis (strain DSM 16511 / JCM 12458 / E9I37-1) OX=749222; GN = queAPE=3 SV=1
MKADELDWLTQSYDYTLPPKQIATQPVEPPDAARMLVFDRRDGSIHHARFRDLERFLPSETALFLNDTRVIKARLYGTKATGGRVELLLNKPLPDNEYLAMIRGRVREGTRLSFDEGLQAEVRALLPDGARRVRFYQEDKELDFSRLVEILERIGHVPLPPYMNREDTPEDTRHYQSLFAREAGAVAAPTASLHFTPEQLERLKSTHPCYTLTLHVGAGTFKPVESEKILEHPMHSEYFRIPPEAAEYLRGDAPLLAVGTTVTRTVEYFARTSRTEGECDLFLHPGNPPRRVNHLLTNFHLPKSTLIMLVSAFIGREKTLELYREAIREGYRFYSYGDAMLIL

SEQ ID NO: 69302 - protein, 358 aa, Nitratireductor aquibiodomus
  REGION 1..358: note = tr|I5BUS7|I5BUS7_9RHIZ S-adenosylmethionine:tRNA ribosyltransferase-isomerase OS=Nitratireductor aquibiodomus RA22 OX=1189611 GN=queA PE=3 SV=1
MRVDIFDFELPEERIALRPVSPRDSARLLTVQDGRIRDHVVRELPELLQPGDALVFNDTKVIPARLGGIRRRGEAQARIEATLHMREGPDRWRAFLKPAKRVNVGERIQFGHDGESCFLGTLEATVAEKGEGGEALLVFDFSGPVLDEAIAAAGHMPLPPYIAGKRAEDARDEVDYQTIYAREEGAVAAPTAGLHFTPELMQALDAAGIERHFVTLHVGAGTFLPVKVDDTDDHRMHSERGEVSAETAAALNAVRARGGRIVSVGTTSLRLLESASQRTGVLEAWSGATDIFITPGYRFRTVDVLMTNFHLPRSTLFMLVSAFSGTETMKRAYQHAIGNDYRFYSYGDASLLFRDDQS

SEQ ID NO: 69303 - protein, 357 aa, Nitratireductor basaltis
  REGION 1..357: note = tr|A0A084UB33|A0A084UB33_9RHIZ S-adenosylmethionine:tRNA ribosyltransferase-isomerase; OS = Nitratireductor basaltis OX=472175 GN=queA PE=3 SV=1
MRVEQFDFELPEELIALRPASPRDSARLLEVEGARLDNRHVRDLTQILRAGDALVFNDTKVVPARLNGIRQRGEAIAHIEATLHMRTGADRWKAFIKPAKRVKEGEIIRFGADGGACEGATLDATVAEKGEAGEVLLVFDMSGPVLDERIAMVGQMPLPPYIAAKRPEDERDAIDYQTVYAKEEGAVAAPTAGLHFTPELLENLAAMGVEEHYVTLHVGAGTFLPVKVEDTNDHKMHSEWGEVDEATADALNAVKARGGRIVSVGTTSLRLLESAVDEKGRIIPWSGETDIFITPGYRFHTADMLMTNFHLPKSTLFMLVSAFAGFETMKRAYAHAIEYGYRFYSYGDSSLLYREDQ

SEQ ID NO: 69304 - protein, 358 aa, Nitratireductor indicus
  REGION 1..358: note = tr|K2P0M0|K2P0M0_9RHIZ S-adenosylmethionine:tRNA ribosyltransferase-isomerase OS=Nitratireductor indicus C115 OX=1231190 GN=queA PE=3 SV=1
MRVDLFDFDLPEERIALRPASPRDSARLLVVEGEGFGDRTVSDLPALLRAGDALVFNDTKVIPARLNGLRQRGENQARIEATLHMRMSPDSWKAFIKPAKRVAVGDRISFGHEGRICLLGTLVATVAEKGDGGEVLLNFDFSGPVLDEAIATVGHMPLPPYIAGKREEDERDNADYQTIYAREEGAVAAPTAGLHFTPDLLSALDSAGIERHFVTLHVGAGTFLPVKAEDTEQHRMHSEWGVVTPETAAALNAVQARGGRIVSVGTTSLRLLESAARETGRLQGWSGATDIFITPGYRFRTADILMTNFHLPRSTLFMLVSAFSGMERMKNAYAHAINNGYRFYSYGDSSLLFRDDNA

SEQ ID NO: 69305 - protein, 358 aa, Nitratireductor pacificus
  REGION 1..358: note = tr|K2M622|K2M622_9RHIZ S-adenosylmethionine:tRNA ribosyltransferase-isomerase OS=Nitratireductor pacificus pht-3B OX=391937 GN=queA PE=3 SV=1
MRVDLFDFDLPEDRIALRPASPRDAARMLVVEGETLSDRVVSDLSGLLRPGDALVFNDTRVIPARLNGLRRRGETEARVEATLHMRTGADRWKAFLKPAKRVNIGERISFGHDGESCFLGALDATVAEKGEGGEALLVFDFSGPVLDEAIAAAGHMPLPPYIAGKRPEDERDQTDYQTVYAREDGAVAAPTAGLHFTSELFAALDAAGIERHFVTLHVGAGTFLPVKAEDTDDHRMHAEWGEVSAETAAALNAVQARGGRIVSVGTTSLRLLESAARETGMLKAWSGATDIFITPGYRFHTADILMTNFHLPRSTLFMLVSAFSGTERMKAAYRHAIDGGYRFYSYGDASLLFRDDQA

SEQ ID NO: 69306 - protein, 358 aa, Nitratireductor sp.
  REGION 1..358: note = tr|A0A1H4ITF2|A0A1H4ITF2_9RHIZ S-adenosylmethionine:tRNA ribosyltransferase-isomerase; OS = Nitratireductor sp. ES.061 OX=1855335 GN=queA PE=3 SV=1
MRVDIFDFELPEERIALRPVSPRDSARLLTVQDGRIRDHVVRELPEILQPGDALVFNDTRVIPARLGGIRRRGEAQARIEATLHMREGPDRWRAFLKPAKRVNVGERIQFGHDGESCFLGTLEATVAEKGEGGEALLVFDFSGPVLDEAIAAAGHMPLPPYIAGKRAEDARDEVDYQTIYAREEGAVAAPTAGLHFTPELMQALDAAGIERHFVTLHVGAGTFLPVKVDDTDDHRMHSERGEVSAETAEALNAVRARGGRIVSVGTTSLRLLESASQRTGVLEAWSGATDIFITPGYRFRTVDVLMTNFHLPRSTLFMLVSAFSGTETMKRAYQHAIGNDYRFYSYGDASLLFRDDQS

SEQ ID NO: 69307 - protein, 358 aa, Nitratireductor sp.
  REGION 1..358: note = tr|A0A2E0JAD2|A0A2E0JAD2_9RHIZ S-adenosylmethionine:tRNA ribosyltransferase-isomerase; OS = Nitratireductor sp. OX=1872084 GN=queA PE=3 SV=1
MRVDIFDFELPEERIALRPANPRDSARLLKVEGGALTDHVVRALPEILRPGDALVFNDTKVIPARLSGVRRRGETEARIEATLHMREGPDRWRAFLKPAKRVNAGERIQFGHDGESCFLGTLGATVAEKGEGGEALLVFDFSGPVLDEAIAAAGHMPLPPYIAGKRAEDERDEVDYQTIYAREEGAVAAPTAGLHFTPELMQALDLAGIERHFVTLHVGAGTFLPVKVDDTDDHKMHSEWGEVDAETAEALNAVRKRGGRVVSVGTTSLRLLESASQRTGTLEAWSGATDIFITPGYRFRTVDVLMTNFHLPRSTLFMLVSAFCGTATMKRAYDHAIRNEYRFYSYGDASLLFRDDQL

SEQ ID NO: 69308 - protein, 340 aa, Nitratiruptor sp.
  REGION 1..340: note = sp|A6Q446|QUEA_NITSB S-adenosylmethionine:tRNA ribosyltransferase-isomerase OS=Nitratiruptor sp. (strain SB155-2) OX=387092 GN=queA PE=3 SV=1
MLDPLKVDSYDYHLPPHLIAKEPVQPADRAKLLIYDRKTDTITHTIFKNLPQFLPQKTHIVFNDTKVIKARIFGHKSSGGKIELLINRPLENERFNVFIRGKVKVGTTLHFSQGLQAIVEELIEDGTRIVTFYHDEKRLSFHELLPILDTIGSIPLPPYIDRAAKKEDETNYQPIFAKKAGAVAAPTASLHFTEQMLNSMAKEFPFHFVTLHVGAGTFKPVEANLITEHAMHSEYYEIPKDTIEVIESDEKVLAVGTTVTRTIEYYVRTKKSFGECDLFLNPLNPPKRVDHLLTNFHLPKSTLIMLVASFIGLETTKRVYQEAIEKEYRFYSYGDAMLIL

SEQ ID NO: 69309 - protein, 343 aa, Nitratiruptor tergarcus
  REGION 1..343: note = tr|A0A1W1WT64|A0A1W1WT64_9PROT S-adenosylmethionine:tRNA ribosyltransferase-isomerase; OS = Nitratiruptor tergarcus DSM 16512 OX=1069081 GN=queA; PE = 3 SV=1
MKRKLDPTLVSSYDYELPSSAIAKYPANPPDSAKLLVYERETQKITHAIFRDLPQFLPKDVALVFNDTKVIKARIFGKKESGGKIELLLNRPVADKRFSVFIKGRVKKGTKLFFDEELEAQVVELLLDGSRIVIFYKDGKVLTFEELLPILEKIGHVPLPPYIDRADSKEDEIFYQPLFAQKPGAVAAPTASLHFTKELLAKLQKEHPFFSVTLHVGAGTFKPVESEKITEHSMHSEYYEIPPATCAMLDSKQPILAVGTTVTRTIEYYARTKRCFGECDLFLHPKNPPIRVNHLLTNFHLPKSTLIMLVASFIGLEKTLELYEIAIKEKYRFFSYGDAMLII

SEQ ID NO: 69310 - protein, 349 aa, Nitrincola lacisaponensis
  REGION 1..349: note = tr|A0A063Y3X2|A0A063Y3X2_9GAMM S-adenosylmethionine:tRNA ribosyltransferase-isomerase; OS = Nitrincola lacisaponensis OX=267850 GN=queA PE=3 SV=1
MRVSDFSFELPDELIARFPLEQRSASRLLCLDGTTGALQHRQFSDLTGLLRPGDLLVFNDTRVIPARLYGQKASGGQVEVLIERLQGDQQALAHIRASRAPKPGSQLLLEGGIQVEVTGRQGSLFVLQFDPLGDVMAQLEAHGHMPLPPYMQREDQPSDRERYQTVYNRRPGAVAAPTAGLHFDQPLLDALQQQGIETAFVTLHVGAGTFQPVKVDRVEEHTMHAEYIEVSETVCEAVRAARARGGRVVAVGTTSVRSLETASQSGELQPFSGDSQIFIYPGYRFRSVDAMITNFHLPESTLLMLVSAFAGQDNIRAAYAEAIAERYRFFSYGDAMFMTRQSAVIEESV

SEQ ID NO: 69311 - protein, 348 aa, unidentified
  source 1..348: note = Nitrincola nitratireducens
  REGION 1..348: note = tr|W9UZM8|W9UZM8_9GAMM S-adenosylmethionine:tRNA ribosyltransferase-isomerase OS=Nitrincola nitratireducens; OX = 1229521 GN=queA PE=3 SV=1
MRVRDFYFELPDELIARFPLQERSHSRLLCLDAQEGRLQHRIFSDILELLTPGDLLVFNDTRVIPARLHGQKASGGKVEVLIERVLTPNTALAHVRSSRSPKPGSRLQLEGGVDVEVTGRKENLFELSFNIEGHLLEVLDAVGHIPLPPYMQREDQASDRERYQTVYNRKPGAVAAPTAGLHFDQALLDALKRKGVDIAFVTLHVGAGTFQPVKVDRIEDHVMHAEYIEVPDDVVDAVKAARARGKRVIAVGTTSVRSLESASQAGEIAPFYGDSQIFIYPGYEFKSVDALITNFHLPESTLLMLVSAFSGYDNIMRAYQEAIEQRYRFFSYGDAMFLTRLTQSEELV

SEQ ID NO: 69312 - protein, 349 aa, Nitrincola sp.
  REGION 1..349: note = tr|A0A099PBC2|A0A099PBC2_9GAMM S-adenosylmethionine:tRNA ribosyltransferase-isomerase; OS = Nitrincola sp. A-D6 OX=1545442 GN=queA PE=3 SV=1
MRVSDFTFELPDELIARFPLETRSASRLLCVDGNDGLLQHLQFSELTELLNPGDLLVFNDTRVIPARLFGQKASGGKIEVLIERLQGEQRALAHIRSSRAPKVGARLLLEGGVEAEVLGRQENLFILQFDLGGDLLAALEAHGHMPLPPYMQRDDQPSDRERYQTVYNRKPGAVAAPTAGLHFDQPLLDKLQALGVETAFVTLHVGAGTFQPVKVDRVEDHHMHAEYIDVPESVCEAVRATRARGGRVIAVGTTSVRSLESASQSGEIQPFSGDSSIFIYPGYQFRSVDALITNFHLPESTLLMLVSAFAGYDHIKAAYAEAILQKYRFFSYGDAMFMTRQDLSAEEQA

SEQ ID NO: 69313 - protein, 350 aa, Nitrincola sp.
  REGION 1..350: note = tr|A0A5A9W749|A0A5A9W749_9GAMM S-adenosylmethionine:tRNA ribosyltransferase-isomerase; OS = Nitrincola sp. MEB193 OX=1708751 GN=queA PE=3 SV=1
MQLSDFYFDLPDELIARYPLEQRSASRLLCVEGNTGARQHRQFTDLVALLEPGDLLVFNDTRVIPARLYGQKASGGKIELLIERILGEDHALAHLRASRAPKPGTELILEGGLQAEVLGRRGNLFELRFQAMSCSLLQALEDHGHIPLPPYMQREDQHSDRERYQTVYNAKPGAVAAPTAGLHFDEPLLAKLKDQGINTAFVTLHVGAGTFQPVKVDNIHEHQMHAEYIEVSEQVCAAVRAARARGRRVVAVGTTSVRALESASQSGEIAPFCGDSQIFIYPGYQFRSVDALITNFHLPESTLLMLVSAFAGYRSMMEAYQEAIAERYRFFSYGDAMFLTRRTLLDEESL

SEQ ID NO: 69314 - protein, 348 aa, unidentified
  source 1..348: note = Nitrincola tibetensis
  REGION 1..348: note = tr|A0A364NRP9|A0A364NRP9_9GAMM S-adenosylmethionine:tRNA ribosyltransferase-isomerase; OS = Nitrincola tibetensis OX=2219697 GN=queA PE=3 SV=1
MRVRDFYFELPDELIARFPLQERSQSRLLCLDAQAGRLQHRIFSDILELLTPGDLLVFNDTRVIPARLHGQKASGGKVEVLIERVLTPTTALAHVRSSRSPKPGSRLQLEGGVDAEVTGRKDNLFELSFHIEGHLLEVLEAVGHIPLPPYMQREDQASDRERYQTVYNRKPGAVAAPTAGLHFDQALLDALKHKGVDIAFVTLHVGAGTFQPVKVDRIEDHVMHAEYIEVPDVVVDAVKAARARGKRVIAVGTTSVRSLESASQSGEIAPFYGDSQIFIYPGYEFKSVDALITNFHLPESTLLMLVSAFSGYDNIMRAYQDAIEQRYRFFSYGDAMFLTRLTQSEELV

SEQ ID NO: 69315 - protein, 349 aa, Nitritalea halalkaliphila
  REGION 1..349: note = tr|I5C0T6|I5C0T6_9BACT S-adenosylmethionine:tRNA ribosyltransferase-isomerase OS=Nitritalea halalkaliphila LW7 OX=1189621 GN=queA PE=3 SV=1
MKLSDFKFEVPKKLISQYPVDNRDESRLMVVHRATGEIEHKLFKEIVTYFGEGDVFVMNNTKVFPARLYGNKEKTGAKIEVFLLRELNQELRLWDVLVDPARKIRVGNKLYFGDSDLVAEVIDNTTSRGRTIRFLFDGTDEAFYKAIDSLGETPLIKEHIERKVEPEDRERYQTIFAKHVGAVAAPTAGLHFTPHLLKRLELVGVQVSPITLHVGLGTFRQVDVEDLTKHKMDSENYEIPQETVEHVNQALDQKKRVVAVGTTSLKTIESSVTANNRLKASAGWTDKFIIPPYEFKIANALITNFHLPESTLLMTASAFGGYDLIMRAYQEAIKEKYRFFSYGDAMLIL

SEQ ID NO: 69316 - protein, 409 aa, Nitritalea halalkaliphila
  REGION 1..409: note = tr|I5C9Q5|I5C9Q5_9BACT S-adenosylmethionine:tRNA ribosyltransferase-isomerase OS=Nitritalea halalkaliphila LW7 OX=1189621 GN=A3SI_02306 PE=3 SV=1
MAEKPGATSARKLYLPLPDERIARYPLADRAASKLLRYRAGEITAHGFTEIEDQLPAEALLVYNDTKVIPARMAFFRPTGARIELFLLKPLPADSPMEQAMAETKEAHWSCMIGNARKWKAEEILQMDLEIAGRTVRVEARRGRKEDSDVFFTWSEPLPFVQIVEAMGQVPLPPYLNRAAEESDRQRYQTVFSRSAGAVAAPTAGLHFTPEILAALQAKGLQMAELTLHVGAGTFQPVKEQQVMHHAMHSEQIVVQRETVQQLMRHAGPVIPVGTTSMRSLESLYWLGVKLLKGQCAARYFHIEKLYPYTEEEVRFSRQEAFAAIDAFMKVEQLEQLTGETSIMLMPGYRFRVCDALITNFHQPGSTLILLVAAFIGEDWRKVYDFALAQDFRFLSYGDSSLLWRNAPA

SEQ ID NO: 69317 - protein, 365 aa, Nitrobacter hamburgensis
  REGION 1..365: note = tr|Q1QMG3|Q1QMG3_NITHX S-adenosylmethionine:tRNA ribosyltransferase-isomerase OS=Nitrobacter hamburgensis (strain DSM 10229 / NCIMB 13809 / X14) OX=323097 GN=queA; PE = 3 SV=1
MTAYSMRTDLFDFELPSESIALRPASPRDSARMLVVQPGAGLHDQRVSDLPKWLRPGDQLVVNDTRVIAAQLRGRRIGRDAEPRIEATLIKRLDGSRWNALVKPARKLIAGDIVRFGNEGRVCFLGHLDAQVESKGEEGEVTFAFSFHGPTLDQAIADLGSPPLPPYIASKREPDDRDVADYQTMFAVHEGAVAAPTAGLHFTPAVEAVLRERGVGLHRLTLHVGAGTFLPVKTEDTVGHRMHSEWGTISAETADALNAARASGGRIVAVGTTSLRLLESATADDGRIAPFTGETAIFITPGYRFRAVDILMTNFHLPRSTLFMLVSAFSGLETMKQAYAHAIAAGYRFYSYGDACLLFPGTSDA

SEQ ID NO: 69318 - protein, 360 aa, Nitrobacter sp.
  REGION 1..360: note = tr|A0A1M3CMF3|A0A1M3CMF3_9BRAD S-adenosylmethionine:tRNA ribosyltransferase-isomerase; OS = Nitrobacter sp. 62-23 OX=1895798 GN=queA PE=3 SV=1
MRTDLFDFELPSGSIALRPASPRDSARMLVVQPAAGLHDQHVGDLANWLRPGDQLVVNDTRVIAAQLHGRRIGRGAEPRIDATLIKRLDGSRWKALVKPAKKLDAGDIVRFGNEGRVCFLGHLDAKVESKGEEGEVTLAFSFHGPTLDQAIADLGSPPLPPYIASRRAPDDRDAADYQTMFAAHEGAVAAPTAGLHFTPAMEAALRDRGVGINRLTLHVGAGTFLPVKAEDTGGHRMHPEWGTISAETAEALNAARANGGRIVAVGTTSLRLLESAATEDGRVTPFTGETSIFITPGYRFRAVDILMTNFHLPRSTLFMLVSAFSGLDTMKQAYAHAIAGGYRFYSYGDACLLFPAAPAA

SEQ ID NO: 69319 - protein, 371 aa, Nitrobacter sp.
  REGION 1..371: note = tr|A3WZK9|A3WZK9_9BRAD S-adenosylmethionine:tRNA ribosyltransferase-isomerase OS=Nitrobacter sp. Nb-311A; OX = 314253 GN=queA PE=3 SV=1
MTSYIRRLDHSMRTDLFDFELPAESIALRPASPRNSARMLVVHPGTRLHDQRVSDLPEWLRPGDQLVVNDTRVIAAQLHGRRIGREAEPRIDATLIKRLDGSRWSALVRPAKKLVAGDVVRFGNDGRVCFLGHLDAQVESKGEEGEVTFAFSFHGPTLDRAIAELGSTPLPPYIASKRAPDDQDAADYQTMFAAHEGAVAAPTAGLHFTPVIETALRERGVGLHRITLHVGAGTFLPVKAEDTAGHRMHSEWGTISAETADALNTARSRGGRIVAVGTTSLRLLESAAAEDGRIAPFTGETAIFITPGYRFRAIDILMTNFHLPRSTLFMLVSAFSGLKTMKQAYAHAIAAGYRFYSYGDACLLFPERSGA

SEQ ID NO: 69320 - protein, 360 aa, Nitrobacter vulgaris
  REGION 1..360: note = tr|A0A1V4HY65|A0A1V4HY65_NITVU S-adenosylmethionine:tRNA ribosyltransferase-isomerase; OS = Nitrobacter vulgaris OX=29421 GN=queA PE=3 SV=1
MRTDLFDFELPAESIALRPASPRDSARMLVVQPGAGLRDQRVRDLPEWLRPGDQLVVNDTRVIAAQLHGRRIGRETEPRIDATLIKRLDGSRWSALVRPAKKLMTGDIVRFGNEGRVCFLGHLDAQVESKGEEGEVTFAFSFHGPTLDQAIADLGSTPLPPYIASKRAPDDRDAADYQTMFAAHEGAVAAPTAGLHFTPAIEAALRERDVGLHRITLHVGAGTFLPVKAEDSAGHRMHSEWGTISAETAAALNATRASGGRIVAVGTTSLRLLESAAGDDGQIAPFTGETAIFITPGYRFRAVDILMTNFHLPRSTLFMLVSAFSGFETMKHAYAHAIAGGYRFYSYGDACLLFPDRSDA

SEQ ID NO: 69321 - protein, 360 aa, Nitrobacter winogradskyi
  REGION 1..360: note = sp|Q3SRN4|QUEA_NITWN S-adenosylmethionine:tRNA ribosyltransferase-isomerase OS=Nitrobacter winogradskyi (strain ATCC 25391 / DSM 10237 / CIP 104748 / NCIMB 11846 / N b-255) OX=323098 GN=queA PE=3 SV=1
MRTDLFDFELPAGSIALRPASPRDSARMLVVQPGSGVRDQQVSDLPEWLRPGDQLVVNDTRVIAAQLHGRRIGREAEPRIDATLIKRLDGSRWSALVRPARKLMAGDIVRLGNEGRVCFLGHLDARVESKGEEGEVTFAFSFHGPMLDQAIAELGSTPLPPYIASKRAPDDRDASDYQTMFATHEGAVAAPTAGLHFTPEIETALRGRGVGLHRITLHVGAGTFLPVKVDDTAGHRMHSEWGAISTETADALNAARSRGGRIVAVGTTSLRLLESAADDDGRIKPFTGETAIFITPGHRFRAVDILMTNFHLPRSTLFMLVSAFSGLETMKQAYAHAISAGYRFYSYGDACLLFPERAGA

SEQ ID NO: 69322 - protein, 360 aa, Nitrobacter winogradskyi
  REGION 1..360: note = tr|A0A4Y3WBP1|A0A4Y3WBP1_NITWI S-adenosylmethionine:tRNA ribosyltransferase-isomerase; OS = Nitrobacter winogradskyi OX=913 GN=queA PE=3 SV=1
MRTDLFDFELPAGSIALRPASPRDSARMLVVQPGSGVSDQRVSDLPEWLRPGDQLVVNDTRVIAAQLHGRRIGREAESRIDATLIKRLDGSRWSALVRPARKLMAGDIVRFGNEGRVCFLGHLDAQVESKGEEGEVTFAFSFHGPMLDQAIAELGSTPLPPYIASKRAPDDRDASDYQTMFAAHEGAVAAPTAGLHFTPAIEAALRGRGVGLHRITLHVGAGTFLPVKVDDTAGHRMHSEWGAISTETADALNAARSRGGRIVAVGTTSLRLLESAVDDDGRIKPFTGETAIFITPGYSFRAVDILMTNFHLPRSTLFMLVSAFSGLETMKQAYAHAISAGYRFYSYGDACLLFPERSSA

SEQ ID NO: 69323 - protein, 347 aa, Nitrococcus mobilis
  REGION 1..347: note = tr|A4BST9|A4BST9_9GAMM S-adenosylmethionine:tRNA ribosyltransferase-isomerase OS=Nitrococcus mobilis Nb-231; OX = 314278 GN=queA PE=3 SV=1
MRVSDFHFELPDELIASTPLPERTASRLLVIDAATGACQDRRFDALVELLRRGDLLVVNDTRVIPARLYGVKESGGRVEVLLERLLDAHSALVHVRANKAPRPGTRLWLEEALPALVLGRQGELYRLRFETTEPLLELLERYGHVPLPPYLRRADTPVDRERYQTVFAARPGAVAAPTAGLHFDQALLQRLAQKGVAQARVTLHVGAGTFQPLRTERVEQHQMHAEYLEVDSAVCARVAQTRAQGGRVVAVGTTVVRALETAARSGALQPYRGETDLFIYPGYRFRTVDALITNFHLPGSSLLMLVCAFAGREPVLSAYRHAVAARYRFYSYGDAMFIHPAQSEARA

SEQ ID NO: 69324 - protein, 354 aa, unidentified
  source 1..354: note = Nitrolancea hollandica
  REGION 1..354: note = tr|I4ECE0|I4ECE0_9CHLR S-adenosylmethionine:tRNA ribosyltransferase-isomerase OS=Nitrolancea hollandica Lb; OX = 1129897 GN=queA PE=3 SV=1
MNEHSSAVDDRPLLLSDYDYELPADLIAQTPADRRDGSRLMVVDRQSGTFRHHAFPDITTFLRPGDLLVINDTRVLPARLHGRKPTGGNVELLLLRRLEPGLWEAMGKPGRRLRPGSAVRLLTREGDPSDSSVVIEHRRDGGLFAVRLPVEVEGQLDRFGEMPLPPYIHTRLSDPERYQTVYSEKVGSAAAPTAGLHFTPELLAELDVRGVRIARVTLHVGLGTFLPVKVEDMRQHEMHAEWFHVPAGTRTAIQETKARGGRVIAVGTTSCRTLESVASSKDEGDLSGWTSLFITPGYRWKTVDALITNFHLPRSTLLLLVSAFAGRDLMLDAYREAIRQRYRFYSFGDALLIT

SEQ ID NO: 69325 - protein, 350 aa, unidentified
  source 1..350: note = Nitrosococcus halophilus
  REGION 1..350: note = tr|D5C3R2|D5C3R2_NITHN S-adenosylmethionine:tRNA ribosyltransferase-isomerase OS=Nitrosococcus halophilus (strain Nc4) OX=472759 GN=queA PE=3 SV=1
MLKFSVMQLSDFSYDLPERLIAQYPPERRGESRLLFLDGASGALRDQRFAELPALLSEGDLLVFNDTQVIPARLLGVKDSGGKVEVLIERILDQHRALAHVRASKPPRSGRRLVLEQSVEVEVGERVADLFELRFLDPRPLLQLLEAVGRMPLPPYIRRETTPIDRERYQTVYASRPGAVAAPTAGLHFNGPLLEQLQAQGVELGYVTLHVGAGTFQPVRVENIAEHRMHAEYVEVPEQVCAQVRETQRLGGRVVAVGTTTVRALETAAAGGAIAPYQGETEIFIFPGYRFRAVDALITNFHLPETTLLMLVCAFAGRDRVLAAYRHAVKEGYRFFSYGDAMLVTGAGAG

SEQ ID NO: 69326 - protein, 344 aa, Nitrosococcus oceani
  REGION 1..344: note = tr|A0A0E2Z1D2|A0A0E2Z1D2_9GAMM S-adenosylmethionine:tRNA ribosyltransferase-isomerase; OS = Nitrosococcus oceani C-27 OX=314279 GN=queA PE=3 SV=1
MQLSDFTYNLPKQLIAQYPPKRRGESRLLSLEGASGIVKDRQFIELPELLSTKDLLIFNNTKVIPARIQGTKDSGGKIEILIERFLDQHRALAHIRANNPPRAGRRLVMEQSVEVEVKGRVKELFELRFLDPRPLPQLLEAIGQMPLPPYIQRKTVPVDKERYQTIYASRPGAVAAPTAGLHFDKPLLKRLQAQGIRSGYITLHVGAGTFQPVRVKNITQHQMHSEYVEVSEQICAQIRDTQQAGGRVVAVGTTTVRALEAASAKGVIAPYQGETEIFIFPGHRFHTVNALITNFHLPETTLLMLVCAFAGSEHVLAAYRHAIKKGYRFFSYGDAMFITEAKTG

SEQ ID NO: 69327 - protein, 344 aa, Nitrosococcus oceani; identical to SEQ ID NO: 69326
  REGION 1..344: note = sp|Q3JAM9|QUEA_NITOC S-adenosylmethionine:tRNA ribosyltransferase-isomerase OS=Nitrosococcus oceani (strain ATCC 19707 / BCRC 17464 / NCIMB 11848 / C-107); OX = 323261GN=queA PE=3 SV=1

SEQ ID NO: 69328 - protein, 344 aa, unidentified
  source 1..344: note = Nitrosococcus wardiae
  REGION 1..344: note = tr|A0A4P7C175|A0A4P7C175_9GAMM S-adenosylmethionine:tRNA ribosyltransferase-isomerase; OS = Nitrosococcus wardiae OX=1814290 GN=queA PE=3 SV=1
MQLSDFSYDLPERLIAQYPPERRGESRLLFLDGACGALGDRWFAELPTLLSEGDLLVFNDTKVIPARLLGVKDSGGKVEVLIERLLDQHRALAHVRASKPPRPGRRLVLEQSVEVEVGERVADLFELRFQDPRPLLQLLEAVGRMPLPPYIHRETKPIDRERYQTVYAARPGAVAAPTAGLHFNRPLLEQLQAQGVGLGYVTLHVGAGTFQPVRVENITEHRMHAEYVEVPEQVCVQVRETQRQGGRVVAVGTTTVRALESAAVGGTLAPYQGETEIFIFPGYRFHTVDALITNFHLPETTLLMLVCAFAGRDQVLAAYRHAVKEGYRFFSYGDAMLVTGAGAR

SEQ ID NO: 69329 - protein, 344 aa, unidentified
  source 1..344: note = Nitrosococcus watsoni
  REGION 1..344: note = tr|D8K665|D8K665_NITWC S-adenosylmethionine:tRNA ribosyltransferase-isomerase OS=Nitrosococcus watsoni (strain C-113) OX=105559 GN=queA PE=3 SV=1
MQLSDFTYNLPKQLIAQYPPKRRGGSRLLSLEGSSGIVKDQQFIELPELLSTGDLLVFNNTKVIPAKIQGVKDSGGKIEVLIERFLDQHRALAHVWANNPPRAGQSLVMEQSVEVEVRKRIKGLFELRFLDPRPLPQLLEAIGQIPLPPYIQRKTTSVDKERYQTVYASRPGAIAAPTAGLHFDKLLLKRLQAQGIQSGYITLHVGAGTFQPVRVKNITQHQMHSEYVEVSEQICTQIRDTQQAGGRIVAVGTTTVRALEAASAKGIIAPYQGETEIFIFPGYRFRTVNALITNFHLPETTLLMLVCAFAGSKQVLTAYRHAVKKGYRFFSYGDAMFITESKID

SEQ ID NO: 69330 - protein, 344 aa, unidentified
  source 1..344: note = Nitrosomonadaceae bacterium
  REGION 1..344: note = tr|A0A2E6UQR5|A0A2E6UQR5_9PROT S-adenosylmethionine:tRNA ribosyltransferase-isomerase; OS = Nitrosomonadaceae bacterium OX=2026767 GN=queA PE=3 SV=1
MKTQDFNFSLPSELIAQFPVSKRSSSRMLYLDGKKGTLQDTMFTDLPDYMQPGDVMVLNDTRVIKARLFGTKESGGKLEVMVERILDEHCVLAMIRASHAPKIGSIFNISGVVPVTVLGREHNFYRLYFDHKDTVIELLDRYGNLPLPPYIPREITQEDEVRYQTVYAKEKGAVAAPTAGLHFDEAMILKLRKMRIIIAYVTLHVGSGTFQPVQVENINDHKMHKEVYHVPEETIEAIHLAKSLGGRVLAVGTTSLRALEAAAKTGNGKLIPGHGNTDIFITPGYRLNIVDRLLTNFHSPCSTLMMLVSAFGGSENICQAYQHAIDKGYRFLSYGDAMLIERKV

SEQ ID NO: 69331 - protein, 342 aa, unidentified
  source 1..342: note = Nitrosomonadaceae bacterium
  REGION 1..342: note = tr|A0A4P5UG62|A0A4P5UG62_9PROT S-adenosylmethionine:tRNA ribosyltransferase-isomerase; OS = Nitrosomonadaceae bacterium OX=2026767 GN=queA PE=3 SV=1
MKIQDFDFSLPSELIAQIPIERRASSRLLHLDGKTGVLRDLMFVDLTRHLRAGDVVVLNDTYVIKARLFGIKNTGGEIEVMVERVLSGHCVLAMIRASHAPKINAKFVIAGQILVTVLHRDHNLYTLHFDHEKTVSELLDLYGSLPLPPYILRAATSIDETRYQTVYAKERGAVAAPTAGLHFDQAMLTSLQEMGVIVTYVTLHVGAGTFQPVYVENIIDHKMHKEFFHVPEEAVNAIRYAKINKRKVLAVGTTSLRALEAATVAGNGELKSGHGETDIYITPGYRFCVVDCLLTNFHLPCSTLLILVSAFGGLENIHRSYRHAINERYRFFSYGDAMLIER

SEQ ID NO: 69332 - protein, 81 aa, unidentified
  source 1..81: note = Nitrosomonadales bacterium
  REGION 1..81: note = tr|A0A524M8N0|A0A524M8N0_9PROT S-adenosylmethionine:tRNA ribosyltransferase-isomerase (Fragment) OS=Nitrosomonadales bacterium OX=2026761; GN = E4H07_08960 PE=3 SV=1
MKTQDFNFFLPPELIAQFPIAKRAGSRMLYLDARNDTLKDAMFADLPKYLRSGDVMVFNDTRVIKARLFGVKESGGKIEVM

SEQ ID NO: 69333 - protein, 358 aa, unidentified
  source 1..358: note = Nitrosomonadales bacterium
  REGION 1..358: note = tr|A0A1E4GI10|A0A1E4GI10_9PROT S-adenosylmethionine:tRNA ribosyltransferase-isomerase; OS = Nitrosomonadales bacterium SCN 54-20 OX=1660164 GN=queA; PE = 3 SV=1
MKIQDFDFDLPPELIAQFPAEKRGNSRMLHLDAASGALQDRMFADLPSYLRPGDVIVFNDTRVIKARLHGVRDTGGRVEILVERVLDRQRVLAAIRASHSPKPGSKLFLADAIEVIVLSRELDFYTLQFEHEGAVIELLERYGNLPLPPYISRPVEKSDEQRYQTIYATRPGAVAAPTAGLHFDEPMLELLRKMGVVMAHVTLHVGSGTFQPVRMENIADHRMHSEVFEVSTETVECIRSAKAEGGRVLAVGTTSLRALEAAAATEERAEPDDKREEGARIKCGAGETDIFITPGYQFRVVDCLLTNFHLPRSTLLMLVSAFGGVENIRRAYQHAIKERYRFFSFGDAMLIGKTEDMD

SEQ ID NO: 69334 - protein, 344 aa, Nitrosomonas aestuarii
  REGION 1..344: note = tr|A0A1I4C650|A0A1I4C650_9PROT S-adenosylmethionine:tRNA ribosyltransferase-isomerase; OS = Nitrosomonas aestuarii OX=52441 GN=queA PE=3 SV=1
MKTQDFDFDLPPALIAKYPAEQRTSSRLLYLDSTQNRLHDAQFLYLPDYLRPGDVMVFNDTRVIKARLLGQKESGGKIEVMIERILDEHRVQASIRASHAPKSGSKLLLANHISAIVAERKDSFYTLCFEHEKSIYELLEYYGQLPLPPYIDRAVSAADESRYQTVYAKNAGAVAAPTAGLHFDDDLLAQLKIMGVVIVYVTLHVGAGTFQPVRVDNIADHTMHSELFHIPEETVRTIERAKKTGNRIMAVGTTSLRALEASATQNQGKLVAGLSETSIFITPGYRFQIAERLLTNFHLPRSTLLMLVSAFGGMENIRTAYHHAIANKYRFFSYGDAMLIERKS

SEQ ID NO: 69335 - protein, 344 aa, Nitrosomonas communis
  REGION 1..344: note = tr|A0A1H2Z726|A0A1H2Z726_9PROT S-adenosylmethionine:tRNA ribosyltransferase-isomerase; OS = Nitrosomonas communis OX=44574 GN=queA PE=3 SV=1
MKIQDFDFFLPNDLIAQFPPQHRVDSRLLYLDSPSNKFQDALFVDLTTYLSAGDVIVFNNTRVIKARLWGSKQTGGKIEVMVERVLDSHHVLAMIRASHAPKIGSSLLLGNKINAVVKGHEQNLYILHFAHELPVIELLEQYGNLPLPPYIERQATQLDEERYQTIFAKEVGAVAAPTAGLHFDETMLAKLHELGVIIAYVTLHVGAGTFQPVRTDNILNHQMHTEIYHIPAETIDAIQQAKQIGNRVLAVGSTSLRALEACANANNGELKSGHGETNLFITPGFNFRIVDRLLTNFHLPRSTLIMMVSAFAGMENIRCAYQHAISQRYHFFSYGDAMLIERKV

SEQ ID NO: 69336 - protein, 346 aa, Nitrosomonas communis
  REGION 1..346: note = tr|A0A0F7KAP2|A0A0F7KAP2_9PROT S-adenosylmethionine:tRNA ribosyltransferase-isomerase; OS = Nitrosomonas communis OX=44574 GN=queA PE=3 SV=1
MKIQDFDFFLPNDLIAQFPPQHRVDSRLLYLDSPSNKFQDALFVDLTTYLRAGDVIVFNNTRVIKARLWGSKQTGGKIEVMVERVLDSHHVLAMIRASHAPKIGSSLLLGNKINAVVQGHEQNLYILHFAHELPVIELLEQYGNLPLPPYIERQATQLDEERYQTIFAKEMGAVAAPTAGLHFDETMLAKLHELGVIIAYVTLHVGAGTFQPVRTDNILNHQMHTEIYHIPAETIDAIQQAKQIGNRVLAVGSTSLRALEACANANNGELKSGHGETNLFITPGFNFRIVDRLLTNFHLPRSTLLMMVSAFAGMENIRCAYQHAISQRYHFFSYGDAMLIEKKYEI

SEQ ID NO: 69337 - protein, 344 aa, unidentified
  source 1..344: note = Nitrosomonas cryotolerans
  REGION 1..344: note = tr|A0A1N6I4U4|A0A1N6I4U4_9PROT S-adenosylmethionine:tRNA ribosyltransferase-isomerase; OS = Nitrosomonas cryotolerans ATCC 49181 OX=1131553 GN=queA; PE = 3 SV=1
MKTRDFDFYLPTELIAQFPAERRTSSRMLYLDGVNDQLQDTLFTQLPDYLRAGDVLVFNDTRVIKARLLGVKSSGGKIEVMVERILDNHRIQATIRASHAPQIGSRLLLADAIHVTVMAREQTFYTLLFEHEKTVTELLEQYGTLPLPPYISRQATAADETRYQTVYAKNTGAVAAPTAGLHFDTALLTKLHEMGIIISYVTLHVGAGTFQPVRVENIADHTMHSETFHIPTETVNAIQHAKASGKRILAVGTTSLRALEASALAHNGELTAGYGDTRIFITPGFRLRIVERLLTNFHLPCSTLLMLVSAFGGIRNIQRAYQHAITNRYRFFSYGDAMLIEKKS

SEQ ID NO: 69338 - protein, 344 aa, Nitrosomonas europaea
  REGION 1..344: note = tr|A0A1I0C6E5|A0A1I0C6E5_NITER S-adenosylmethionine:tRNA ribosyltransferase-isomerase; OS = Nitrosomonas europaea OX=915 GN=queA PE=3 SV=1
MKTDDFDFHLPDELIAQFPLANRSDSRMLYVNGKHADLRDAAFRNLPDYLKRGDVIVLNNTRVVKARLSGVKSTGGKVEVMVERILDTHRARVLIRASHALVIGSTLLLENKITAQVEAREQDIYTLCFMHSLPLIELLDQFGHTPLPPYIGRNATVSDENRYQTVFAQESGAVAAPTAGLHFDETMLQTLRTLGVKIIYVTLHVGAGTFQPVRVQNIDQHVMHTEPYHIPTETVEAIQMCKSAGGSVLAVGTTSLRALESCMLTNDGTLVAGAGETNLFITPGFRFRIVDRLLTNFHLPRSTLLMLVSAFAGMETIRHAYRHAIDNHYRFFSYGDAMLIDSQP

SEQ ID NO: 69339 - protein, 353 aa, Nitrosomonas europaea
  REGION 1..353: note = sp|Q82VF1|QUEA_NITEU S-adenosylmethionine:tRNA ribosyltransferase-isomerase OS=Nitrosomonas europaea (strain ATCC 19718 / CIP 103999 / KCTC 2705 / NBRC 14298); OX = 228 410 GN=queA PE=3 SV=1
MLAIGIIRSMKTDDFDFHLPDELIAQFPLANRSDSRMLYVNGKHADLRDAAFRNLPDYLKRGDVIVLNNTRVVKARLSGVKSTGGKVEVMVERILDTHRARVLIRASHALVIGSTLLLENKITAQVEAREQDIYTLCFMHSLPLIELLDQFGHTPLPPYIGRNATVSDENRYQTVFAQESGAVAAPTAGLHFDETMLQTLRTLGVKIIYVTLHVGAGTFQPVRVQNIDQHVMHTEPYHIPTETVEAIQMCKSAGGSVLAVGTTSLRALESCMLTNDGTLVAGAGETNLFITPGFRFRIVDRLLTNFHLPRSTLLMLVSAFAGMETIRHAYRHAIDNHYRFFSYGDAMLIDSQP

SEQ ID NO: 69340 - protein, 346 aa, Nitrosomonas eutropha
  REGION 1..346: note = tr|A0A1I7G273|A0A1I7G273_9PROT S-adenosylmethionine:tRNA ribosyltransferase-isomerase; OS = Nitrosomonas eutropha OX=916 GN=queA PE=3 SV=1
MKTDDFNFPLPDELIAQFPLANRADSRMLYVNSNQSALRDAAFKDLPAYLKQGDVIVFNNTRVVKARLAGFKSTGGKVEVMIERILDTQLARALIRASHAPAIGSTLLLENVITAQVEAREQDIYTLRFIHSQPLIELLDQYGHTPLPPYIERIATISDESRYQTVFAQETGAVAAPTAGLHFDETMLTTLQTLGVKVAWITLHVGAGTFQPVRVENIDQHIMHTEQYHIPAETIEIIRECKAGGGSVLAVGTTSLRALEASALIGDGELVAGSNETNLFITPGFQFRVVDQLLTNFHLPRSTLLMLVSAFAGIETIRHAYQHAVDNHYRFFSYGDAMLIKGDSQS

SEQ ID NO: 69341 - protein, 346 aa, Nitrosomonas eutropha
  REGION 1..346: note = sp|Q0AG56|QUEA_NITEC S-adenosylmethionine:tRNA ribosyltransferase-isomerase OS=Nitrosomonas eutropha (strain DSM 101675 / C91) OX=335283 GN=queA PE=3 SV=1
MKTDDFDFSLPNELIAQLPLANRADSRMLYINSRQSDLRDAAFKDLPAYLKQGDVIVFNNTRVVKARLAGFKSTGGKVEVMIERILGTHQARALIRASHAPAIGSTLLLENAITVQVEAREQDIYTLRFIHSQPLIELLDQYGHTPLPPYIGRIATASDESRYQTVFAQETGAVAAPTAGLHFDETMLTTLQTLGIKIAWVTLHVGAGTFQPVRVENINQHIMHTEQYHIPTETIEIIRRCKAGGGSVLAVGTTSLRALEASALIGDGELVAGSNETNLFITPGFQFRVVDRLLTNFHLPRSTLLMLVSAFAGIETIRHAYQHAVNNHYRFFSYGDAMLIEGDSRS

SEQ ID NO: 69342 - protein, 358 aa, Nitrosomonas halophila
  REGION 1..358: note = tr|A0A1H3GGT3|A0A1H3GGT3_9PROT S-adenosylmethionine:tRNA ribosyltransferase-isomerase; OS = Nitrosomonas halophila OX=44576 GN=queA PE=3 SV=1
MVSEKGCAIGIIRGMKTDTFDFYLPDDLIAQFPLANRTDSRMLYVGGTAQHIKDATFRDLPDYMRRGDLLVLNNTRVIKARLSGFKPTGGKVEIMVERLLDVHRAQALIRASHAPAVGSTLSLSDGITAVVEARQQDIYTLRFLHPLPLLELLDRYGRVPLPPYIERTVTNSDESRYQTIFAQESGAVAAPTAGLHFDQAMLDTLRAMGVAIAYITLHVGAGTFQPVRAENIEDHVMHAERYSIPPDTIEAIRACKAGGGRVLAVGTTCLRALEACARAHEGQLIAGQGETNLFITPGYRFQVVDRLLTNFHLPRSTLLMLVSAFAGMDAIQRAYQHAVAARYRFFSYGDAMLLEIQS

SEQ ID NO: 69343 - protein, 344 aa, Nitrosomonas marina
  REGION 1..344: note = tr|A0A1H8GLU2|A0A1H8GLU2_9PROT S-adenosylmethionine:tRNA ribosyltransferase-isomerase; OS = Nitrosomonas marina OX=917 GN=queA PE=3 SV=1
MNIREFDFDLPPELIAQHPAQQRASSRLLHLDSTSGQIRDLQFSCLPEYLRSGDVAVFNDTRVIKARLFGRKSSGGKIEILVERVLDEHHVQAAIRASHAPRPNSQLFLADEIPVTVLDRENAFYTLRFDHPQSIYELLERFGQLPLPPYISRSASSADESRYQTVYAKNAGAVAAPTAGLHFDENILNLLRAKGVMITYVTLHVGAGTFQPVRVETITDHTMHSELFHIPQQTADAIGHAKKNGGRILAVGTTSLRALEASAAQYHGQVTAGSGETDIFITPGYRFQVADRLLTNFHLPRSTLIMLVSAFGGMSNIRNAYQHAIKQQYRFFSYGDAMLIERKP

SEQ ID NO: 69344 - protein, 344 aa, Nitrosomonas marina
  REGION 1..344: note = tr|A0A1I0DD51|A0A1I0DD51_9PROT S-adenosylmethionine:tRNA ribosyltransferase-isomerase; OS = Nitrosomonas marina OX=917 GN=queA PE=3 SV=1
MNIREFDFDLPSELIAQHPAQQRASSRLLHLDSASRQIRDLQFSCLPEYLRSGDVAVFNDTRVIKARLFGRKSSGGKIEILVERVLDDHHVQATIRASHAPRPDSRLVLADEIPVTVLDRGNAFYTLRFDHPQTVYELLERFGQLPLPPYIGRSASLADESSYQTVYAKNAGAVAAPTAGLHFDETTLNQLKTKGVMITYVTLHVGAGTFQPVRVEKITDHTMHSELFHIPQQTADAIGHAKKNGGRILAVGTTSLRALEASAAQHHGQVTAGSGETDIFITPGYRFHVADRLLTNFHLPRSTLIMLVSAFGGLSNIRNAYQHAIKQHYRFFSYGDAMLIERKP

SEQ ID NO: 69345 - protein, 350 aa, unidentified
  source 1..350: note = Nitrosomonas mobilis
  REGION 1..350: note = tr|A0A1G5SDT6|A0A1G5SDT6_9PROT S-adenosylmethionine:tRNA ribosyltransferase-isomerase; OS = Nitrosomonas mobilis OX=51642 GN=queA PE=3 SV=1
MRTSPSMQTTEFDYHLPAELIAQFPLEKRTASRMLYVDPAGPVIRGDHFTQLPDYLRVNDLLILNDTRVIKARLHGVKQSGGKVEVMIERVLDDHRVLAMIRASHAPAIGSILLLEQEVSVMVEARQQSLYVLSFPEDRVLDELLERYGRLPLPPYIERAATAIDENRYQTVFAHVNGAVAAPTAGLHFDEIMLTSLQQQGINIAYVTLHVGAGTFQPVKTEMVEEHVMHAERYHISAETIDAIERCHAQGGRVLAVGTTCLRALEACAQANHGELLAGSGETRLFIAPGFDFQIVDRLLTNFHLPRSTLLMLVSAFAGMDTIRHAYQYAIAARYRFFSYGDAMLLEKSA

SEQ ID NO: 69346 - protein, 344 aa, Nitrosomonas nitrosa
  REGION 1..344: note = tr|A0A1I4KSI3|A0A1I4KSI3_9PROT S-adenosylmethionine:tRNA ribosyltransferase-isomerase; OS = Nitrosomonas nitrosa OX=52442 GN=queA PE=3 SV=1
MKIQDFDYFLPNDLIAQFPPKQRTDSRMLYLDSRRDSFKDALFRDLPQYLRKGDVVVLNDTRVIKARLEGVKETGGKIEVLVERVLDDHHVQAMIRASHAPKTGSRLLLENNISATVQEHADNFYILQLAHEQAVIELLEQYGRLPLPPYIEREATHLDEDRYQTVFAKAPGAVAAPTAGLHFDDAMLKNLQAMGVTTRYVTLHVGAGTFQPVRVENILDHQMHTEIYHIPAETIDAINDAKHAGGRVLAVGSTSLRALEACAHKHEGELIAGYGETNLFITPGFHFHIVDRLLTNFHLPRSTLLMMVSAFAGIENIRHAYQHAIAQRYRFFSYGDAMLIEKKT

SEQ ID NO: 69347 - protein, 344 aa, Nitrosomonas nitrosa
  REGION 1..344: note = tr|A0A3D0FDJ4|A0A3D0FDJ4_9PROT S-adenosylmethionine:tRNA ribosyltransferase-isomerase; OS = Nitrosomonas nitrosa OX=52442 GN=queA PE=3 SV=1
MKIQDFDYFLPNDLIAQFPPKQRTDSRMLYLDSRCDSFKDALFRDLPQYLRKGDVVVLNDTRVIKARLEGVKETGGKIEVLVERVLDDHHVQAMIRASHAPKTGSRLLLENNISATVQEHADNFYILQLAHEQAVIELLEQYGRLPLPPYIEREATHLDEDRYQTVFAKAPGAVAAPTAGLHFDDAMLKNLQAMGVTTRYVTLHVGAGTFKPVRVENILDHQMHTEIYHIPAETIDAINDAKLAGGRVLAVGSTSLRALEACAHKHEGKLIAGYGETNLFIIPGFHFHIVDRLLTNFHLPRSTLLMMVSAFAGIENIRHAYQHAVAQRYRFFSYGDAMLIEKKT

SEQ ID NO: 69348 - protein, 344 aa, Nitrosomonas oligotropha
  REGION 1..344: note = tr|A0A2T5H9W4|A0A2T5H9W4_9PROT S-adenosylmethionine:tRNA ribosyltransferase-isomerase; OS = Nitrosomonas oligotropha OX=42354 GN=queA PE=3 SV=1
MKTQDFDFYLPAELIAQFPSEQRTGSRLLYLDSNNNQWQDALFSNLPSFLRAGDVMVFNDTQVIKARLFGKKDSGGKVEVMVERILGDHHVLAAIRASHAPKPDSTLLLADAIPVTVIAREQEFYTLRFEHEKTTAELLECYGQLPLPPYIARPATAADEARYQTVYARNAGAVAAPTAGLHFDAVMMDRLRAMGIIIAYVTLHVGAGTFQPVRVENIADHTMHNETYHIPQATVDAIRQARLSGGRILAVGTTSLRALESCASSQDDQLIAGYGDTRIFITPGYRFQVVERLLTNFHLPCSTLLMLVSAFAGMENIRLAYRHAVTERYRFFSYGDAMLIEKKS

SEQ ID NO: 69349 - protein, 344 aa, Nitrosomonas oligotropha
  REGION 1..344: note = tr|A0A1H8UKR9|A0A1H8UKR9_9PROT S-adenosylmethionine:tRNA ribosyltransferase-isomerase; OS = Nitrosomonas oligotropha OX=42354 GN=queA PE=3 SV=1
MKTQDFDFYLPAELIAQFPAEQRTGSRLLYLDSNNHQWQDALFSNLSSFLRAGDVMVFNDTQVIKARMFGKKDSGGKVEVMVERILDDRHVLAAIRASHAPKPDSTLLLADAITATVIAREQEFYTLRFEHEKTTAELLECYGQLPLPPYIARPATAADEARYQTVYARNAGAVAAPTAGLHFDTGMMDQLRAMGITIAYVTLHVGAGTFQPVRVENIADHTMHSETYHIPQATVDAIRQAKLSGGRILAVGTTSLRALESCASSHHDQLIAGYGDTRIFITPGYHFQVVERLLTNFHLPCSTLLMLVSAFADMENIRLAYRHAVTERYRFFSYGDAMLIERKS

SEQ ID NO: 69350 - protein, 344 aa, Nitrosomonas sp.
  REGION 1..344: note = tr|A0A1H3Q6F4|A0A1H3Q6F4_9PROT S-adenosylmethionine:tRNA ribosyltransferase-isomerase; OS = Nitrosomonas sp. Nm58 OX=200126 GN=queA PE=3 SV=1
MKTQDFDFFLPSDLIAQFPPTQRTDSRMLYLDSPCDKFQDTLFIDLPKYLRAGDVIVFNDTRVIKARLWGIKQTGGKIEVMVERVLDSHHVLAMIRASHAPKIGSRLLLENTINAIVQGHEQNFYILRFTHELSVIQLLEQYGSLPLPPYIERQATQLDEDRYQTIFAKQVGAVAAPTAGLHFDEAMLINLREIGVVITYVTLHVGAGTFQPVRAENILDHQMHTEIYYIPAETIGAIQQAKGTGNRVLAVGSTSLRALEACAKTNDGQLKPGYGETNLFVMPGFNFRIVDRLLTNFHLPRSTLLMMVSAFAGMENIHRAYQHAITQRYHFFSYGDAMLIERKV

SEQ ID NO: 69351 - protein, 344 aa, Nitrosomonas sp.
  REGION 1..344: note = tr|A0A1H3PPP4|A0A1H3PPP4_9PROT S-adenosylmethionine:tRNA ribosyltransferase-isomerase; OS = Nitrosomonas sp. Nm33 OX=133724 GN=queA PE=3 SV=1
MKIQDFDFFLPSDLIAQFPPQHRADSRLLYLDSSSNKFQDTFFIDLPTYLRAGDVIVFNDTRVIKARLWGIKQTGGKIEVMVERILDSHHVLAMIRASHAPKIGSNLLLENKINAVVQGHEQNFYILHFAHELPVIELLEQYGSLPLPPYIERQVTQLDEDRYQTIFAKKTGAVAAPTAGLHFDEAMLVKLREMGVIITYVTLHVGAGTFQPVRAENILDHQMHTEIYHIPAATIDAIQQAKHIGNRVLAVGSTSLRALEACANANDGELKPGYGETNLFITPGFNFHIVDRLLTNFHLPRSTLLMMVSAFAGMENIRRTYQHAITQRYHFFSYGDAMLIERKV

SEQ ID NO: 69352 - protein, 346 aa, unidentified
  source 1..346: note = Nitrosomonas stercoris
  REGION 1..346: note = tr|A0A4Y1YMA1|A0A4Y1YMA1_9PROT S-adenosylmethionine:tRNA ribosyltransferase-isomerase; OS = Nitrosomonas stercoris OX=1444684 GN=queA PE=3 SV=1
MKTDDFDFDLPAELIAQFPLAKRTDSRLLYVNSKQDSLRDATFKALPTFLTPGDVIVFNNTRVVKARLSGIKSTGGKVEVMIERIVDAHQVRALIRASHAPAIGSTLQLENEITAQVEARAQDIYTLRFMHTQPLTELLAQYGHTPLPPYIERAATLADESRYQTVFAQNEGAVAAPTAGLHFDQSMLDSLQTLGIKIAWLTLHVGAGTFQPVRSENIEQHHMHTEQYHIPAETVAMIQACKAKGGKILAVGTTSLRALEASALAGNGTLVAGSNETNLFVTPGFQFQIVDCLLTNFHLPRSTLLMLVSAFAGMGTIRHAYLHAIDQRYRFFSYGDAMLIEGNTYA

SEQ ID NO: 69353 - protein, 355 aa, Nitrosomonas ureae
  REGION 1..355: note = tr|A0A1H5VYK9|A0A1H5VYK9_9PROT S-adenosylmethionine:tRNA ribosyltransferase-isomerase; OS = Nitrosomonas ureae OX=44577 GN=queA PE=3 SV=1
MENLLTGIIHRMKTQDFDFYLPPGLIAQFPAEQRTGSRLLYLDGINNHWQDALFANLPDFLRAGDVLVFNDTQVIKARLLGKKASGGKVEVLVERVLDDRHVVATVRASHAPKLDSQLVLADAISLTVIAREQEFYTLRFEHEKTVAELLESYGQLPLPPYIARPATMIDEARYQTVYARTPGAVAAPTAGLHFDIDMLEQLRAIGVTIAYVTLHVGAGTFQPIRVENIADHTMHRETYHIPQSTADAIKQAKISGGRILAVGTTSLRALEACASLHQGGLVAGYGDTRIFITPGYRFQVIDRLLTNFHLPCSTLLMLVSAFAGMENIRQAYQHAIKGQYRFFSYGDAMLIEREL

SEQ ID NO: 69354 - protein, 344 aa, Nitrosomonas ureae
  REGION 1..344: note = tr|A0A2T5I557|A0A2T5I557_9PROT S-adenosylmethionine:tRNA ribosyltransferase-isomerase; OS = Nitrosomonas ureae OX=44577 GN=queA PE=3 SV=1
MKTQDFDFYLPTELIAQFPTEQRTGSRLLYLDSINNHWQDALFASLPNFLRAGDVLVFNDTQVIKARLMGKKASGGKVEVLVERVLDDRHVVATVRASHAPKLDSQLVLADAISLTVIAREQEFYTLRFEHEKTVAELLESYGQLPLPPYIARPATMIDEARYQTVYARTPGAVAAPTAGLHFDIDMLEQLRAIGVTIAYVTLHVGAGTFQPIRVENIADHIMHRETYHIPQSTADAIKQAKISGGRILAVGTTSLRALETCASLHQGGLVAGYGDTRIFITPGYRFQVIDRLLTNFHLPCSTLLMLVSAFAGMENIRQAYQHAIKGQYRFFSYGDAMLIERKL

SEQ ID NO: 69355 - protein, 350 aa, Nitrosospira briensis
  REGION 1..350: note = tr|A0A1I5C4I0|A0A1I5C4I0_9PROT S-adenosylmethionine:tRNA ribosyltransferase-isomerase; OS = Nitrosospira briensis OX=35799 GN=queA PE=3 SV=1
MKIQDFDFDLPPELIAQFPAGQRASSRMLHMEGSTGGLRDAMFADLPDYLHAGDVMVFNDTRVIKARLYGVKDSGGRVEVMVERVLDTHRVLAVIRAGHSPKPASKLFLADAIEVTVLAHEHGFYTLHFDHETAVIELLERYGNLPLPPYISRPATQADEARYQTVYATQTGAVAAPTAGLHFDDVILKKLTDMGVVTAYITLHVGSGTFQPVRVENIADHKMHREIFHVPPETVESIRQAKAGGGRVLAVGTTSLRALEAAAASIEGIDGSGGELKPGRGETDIFITPGYRFRVVERLLTNFHLPRSTLLMLVSAFGGLENIRRAYRHAIDERYRFFSYGDAMLIERES

SEQ ID NO: 69356 - protein, 344 aa, unidentified
  source 1..344: note = Nitrosospira lacus
  REGION 1..344: note = tr|A0A1W6SKR9|A0A1W6SKR9_9PROT S-adenosylmethionine:tRNA ribosyltransferase-isomerase; OS = Nitrosospira lacus OX=1288494 GN=queA PE=3 SV=1
MKIQDFDFDLPSELVTQFPTEERASSRMLHLEGSSGVLRDAMFADLPRYLRAGDVMVFNDTRVIKARLFGVKSSGGRVEVMVERVLDAHCALTVIRASHSPKPGSKLLLADAIEVTVLAHEQDLYTLRFDHERTVIELLECYGSLPLPPYISRPATETDEARYQTVYAKQAGAVAAPTAGLHFDESMLSTLSEMGVVLAHVTLHVGLGTFQPVRVENIADHKMHKEIFDVPQETVDSIRRAKAGGGRVLAIGTTSLRALEAAAAAGKGELQSGHGDTDIFITPGYRLRVVERLLTNFHLPRSTLLMLVSAFGGAENIRRAYQHAINERYRFFSYGDAMLIERGS

SEQ ID NO: 69357 - protein, 356 aa, Nitrosospira multiformis
  REGION 1..356: note = sp|Q2Y6A2|QUEA_NITMU S-adenosylmethionine:tRNA ribosyltransferase-isomerase OS=Nitrosospira multiformis (strain ATCC 25196 / NCIMB 11849 / C 71) OX=323848 GN=queA; PE = 3 SV=1
MKIQDFDFDLPPELIAQFPAEKRGNSRMLHLDATSGALQDRMFADLPSYLRPGDVIVFNDTRVIKARLYGVRDTGGRVEVLVERVLDSHCALAAIRASHSPKPGSKLFLAGAIEVTVLSREHGFYILQFEHESGVMELLERYGNLPLPPYISRPVEKSDELRYQTVYAARPGAVAAPTAGLHFDEHMLGLLRKMGVVMAHVTLHVGSGTFQPVRVENIADHRMHSEVFYVSAETVECIRHAKAEGGRVLAVGTTSLRALEAAAAFAGERAEADNGDGVRIKCGAGETDIFITPGYQFRVVDCLLTNFHLPRSTLLMLVSAFGGVENIRCAYRHAIKERYRFFSFGDAMLIGRAEGI

SEQ ID NO: 69358 - protein, 357 aa, Nitrosospira multiformis
  REGION 1..357: note = tr|A0A1I0C4K2|A0A1I0C4K2_9PROT S-adenosylmethionine:tRNA ribosyltransferase-isomerase; OS = Nitrosospira multiformis OX=1231 GN=queA PE=3 SV=1
MKIQDFDFDLPPELIAQFPAEKRGNSRMLHLDAASGALQDRMFADLPSYLRPGDVIVFNDTRVIKARLYGVRDTGGRVEVLVERVLDRQRVLAVIRASHSPKPGSKLFLADAIEVTVLSREHDFYTLQFEHEGAVSELLERYGNLPLPPYISRPVEKSDELRYQTVYANNPGAVAAPTAGLHFDEHMLELLRKMGVVMAHVTLHVGSGTFQPVRVENIADHRMHSEIFYVSAETVECIKHAKAEGGRVLAVGTTSLRALEAAAVATEEGAEADNGEDGVRIKCGAGETDIFITPGYQFRVVDCLLTNFHLPRSTLLMLVSAFGGVENIRLAYRHAIKERYRFFSFGDAMLIERAEGI

SEQ ID NO: 69359 - protein, 361 aa, Nitrosospira sp.
  REGION 1..361: note = tr|A0A495END4|A0A495END4_9PROT S-adenosylmethionine:tRNA ribosyltransferase-isomerase; OS = Nitrosospira sp. Nsp44 OX=1945879 GN=queA PE=3 SV=1
MKIQDFDFDLPPELIAQFPIEQRVSGRMLRLDGSAGVIQDSQFADLPEFVRAGDVMVFNDTRVIKARLYGVKDTGGKVEVLVERVLDTHCALAVMRASHPSKPGTKLLLAESIEVTVLACEGEFYILRFEHECSVADLLERYGHLPLPPYISRSADKVDETRYQTIYARQPGAVAAPTAGLHFDENMLNALRNMGVVIAYVTLHVGSGTFQPVRVEDIADHKMHREIFHVPAETAEAIGRAKAEGRAVIAVGTTSLRALEAAAAAAEGLEGGESISRPVHGDTDIFITPGYRFRVVEHLLTNFHLPRSTLLMLVAAFGGLENVRNAYQHAISHRYRFFSYGDAMLIARGSRESSVSIRPML

SEQ ID NO: 69360 - protein, 351 aa, Nitrosospira sp.
  REGION 1..351: note = tr|A0A1G4Y3V1|A0A1G4Y3V1_9PROT S-adenosylmethionine:tRNA ribosyltransferase-isomerase; OS = Nitrosospira sp. Nsp1 OX=136547 GN=queA PE=3 SV=1
MKIQDFDFNLPPELIAQFPVEQRASSRMLHLKGSGGALGDAMFADLPRLVRPGDVMVFNDTRVIKARLHGVRDTGGRVEVMVERVLDAHCVLAIMRASHMPKPGSKLFLAGAIDVTVLARERDFYTLRFDHANTVTDLLERYGNLPLPPYISRLPGKMDEARYQTIYAKQAGAVAAPTAGLHFDENMLAALREMGVLIAYVTLHVGSGTFQPVRVDNIADHKMHREIFHVPPETIDIIRRAKSGGGRVLAVGTTSLRALEGAAAQTAGAEAVERMDELKSGHGETDIFITPGYRFRVVERLLTNFHLPRSTLLMLVSAFGGTENIRRAYQHAVNERYRFFSYGDAMLIESQ

SEQ ID NO: 69361 - protein, 350 aa, unidentified
  source 1..350: note = Nitrosovibrio sp.
  REGION 1..350: note = tr|A0A497X8M7|A0A497X8M7_9PROT S-adenosylmethionine:tRNA ribosyltransferase-isomerase; OS = Nitrosovibrio sp. Nv12 OX=2135773 GN=queA PE=3 SV=1
MKIQDFDFHLPPELIAQFPPEQRASSRMLHLEGSTGALQDAMFTDLPGYLRAGDVMVFNDTRVIKARLYGVKDSGGKVEVMVERVLDAHRAMAIIRASHSPKPGSKLFLADAIEVTVLDSEDHFYTLRFDHDSTVIDLLERYGNLPLPPYISRTATQADEARYQTVYAKQTGAVAAPTAGLHFDEPMLETLRGIGVVISHVTLHVGSGTFQPVRVENIADHKMHREIFHVPAETVESIRHAKAVGGRVLAVGTTSLRALEAAATAIEGVDEDGYELITGHGETDIFITPGYRFRVVERLLTNFHLPRSTLLMLVSAFGGLENIRRAYQHAIEERYRFFSYGDAMLIERES

SEQ ID NO: 69362 - protein, 344 aa, unidentified
  source 1..344: note = Nitrosovibrio sp.
  REGION 1..344: note = tr|A0A1K1M9B3|A0A1K1M9B3_9PROT S-adenosylmethionine:tRNA ribosyltransferase-isomerase; OS = Nitrosovibrio sp. Nv17 OX=1855339 GN=queA PE=3 SV=1
MRVQDFDFALPPELIAQFPAVRRGDSRLLHLTGASGALRDATFADLPRFMRTGDVMVLNDTRVIKARLSGVKDSGGRVEVMVERVLDAHRVLAVIRASHAPLPGSGLRLAGVLEATVLAREADLYTLRFDCAETVAELLERHGSVPLPPYISRPAAQADESRYQTVFARHAGAVAAPTAGLHFDEAMLEALARMGVVVAYVTLHVGLGTFQPVRVERLAEHRMHRESFHVPEETVAAIQRARASGGRVLAVGTTSLRALEAAAAAGGGELRPGHGDTDLFIAPGYRLQVAERLLTNFHLPRSTLLMLVSAFAGMENIRRAYRHAIEARYRFFSYGDAMLIEGRT

SEQ ID NO: 69363 - protein, 359 aa, unidentified
  source 1..359: note = Nitrosovibrio tenuis
  REGION 1..359: note = tr|A0A1H7GDI8|A0A1H7GDI8_9PROT S-adenosylmethionine:tRNA ribosyltransferase-isomerase; OS = Nitrosovibrio tenuis OX=1233 GN=queA PE=3 SV=1
MCARATGIIPAVKIQDFDFDIPPELIAQFPAEQRASSRMLHLEGSSGVLRDGWFADLPSYLRAGDVVVFNDTRVMKARLYGVRETGGRVEVMVERILDAQCAQAVIRASHAPKPGSRLFLCDAIEVTVVDRDHDLYTLRFEHESTLIDLLERYGTLPLPRYILRSATKTDEARYQTIYAKQAGAVAAPTAGLHFDENMLMTLREMGVVIANVTLHVGLGTFQPVRVENIADHSMHREIFDVPAETVEAIKCAKAIGGRVLAVGTTSLRALEAAAADGELKPGHGETDIFITPGYRFRVVERLLTNFHLPRSTLLMLVSAFGGTENIRRAYQHAIKGRYRFFSYGDAMLIERGAGCAQPG

SEQ ID NO: 69364 - protein, 346 aa, Nitrospina gracilis
  REGION 1..346: note = tr|M1YML0|M1YML0_NITG3 S-adenosylmethionine:tRNA ribosyltransferase-isomerase OS=Nitrospina gracilis (strain 3/211) OX=1266370 GN=queA PE=3 SV=1
MDISDFDFHLPEELIAQTPTEKRDASRLMVVNRITGKIEHMMFPHITEFLTDRPLLVFNNTRVLPAKLEGHRTDNGKPVEWLLARKVESGSWLVLTRGLSKLKPGQTFRFGNGLSAVFEGVEEAMAQVRFSSEELLKTTLNQIGRMPLPHYIKRSGGLGEKMDSLDRERYQTVFAEEAGAIAAPTAGLHFTPELMSLLKEKAELSFLTLHVGPGTFQPLRTNKVVEHQMKEEFYRIPSSTWNQIHQARAEGRPVFAVGTTSTRVLESVNFDTATEKDVEGWTNRFLYPGQIFRNVDRLLTNFHLPRSTLYLLVCAFAGKPLMDQAYREAITRKYRFFSYGDAMLIL

SEQ ID NO: 69365 - protein, 352 aa, Nitrospina sp.
  REGION 1..352: note = tr|A0A0J6YSQ1|A0A0J6YSQ1_9BACT S-adenosylmethionine:tRNA ribosyltransferase-isomerase; OS = Nitrospina sp. SCGC_AAA799_C22 OX=1628279 GN=queA PE=3; SV = 1
MSPLLKLSDFDFELPESLIAQKPVAVRDRSRLMVLDRETGSISHDVFNHLPSQLPPHSLMVFNDTQVTPARLCGHIVGNGRPLEILLVKENEDDHWEALIKGLAKLKPGTEIEFEEKSLKAKLTERRGDRAVLKLTCSKNLQSVLQRVGKMPLPPYIKRSEVDGENLSALDRERYQTVFARNPGAIAAPTAGLHFTPELMKTLHKEGIESVFLTLHVGMGTFQPIRSENITEHKMDAERFHIPKETLKALTRARAEGRDIVAVGSTATRVLESVDPGDIKVKDTCGWTDRFIYPGQEFKSVDRLLTNFHLPKSTLYLLVCAFAGKELIEEAYRKAIEHNYRFFSYGDAMLIL

SEQ ID NO: 69366 - protein, 344 aa, Nitrospina sp.
  REGION 1..344: note = tr|A0A523MVB0|A0A523MVB0_9BACT S-adenosylmethionine:tRNA ribosyltransferase-isomerase; OS = Nitrospina sp. OX=2024844 GN=queA PE=3 SV=1
MKLSDFDFALPEELIAQVPLPERDQSRLMVVDRSTGKISHDHFGSITDHLACSSLVVLNDTRVLPAKLIAFKKGASKPLEMLMVQEEVSGTWKVLLKGLGRLRPGQEFLLDDGRVTAVFLEQQKDIGIFRFSPGGVVPELMDKLGKVPLPHYIRRNQEDEELAKLDRMRYQTVFARHSGAIAAPTAGLHFTEDTIRRLQGKLAYLTLHVGPGTFQPIRADNVVDHKMKSESYNIPADTWNRVVRAKQEGAKVVAVGTTATRVLETVDFDSAKTEDVSGWTDRFIYPGQTFKNIDGLLTNFHLPMSTLYLLVCAFAGKTLMQEAYMKAVREKYRFFSYGDAMLIL

SEQ ID NO: 69367 - protein, 346 aa, unidentified
  source 1..346: note = Nitrospinae bacterium
  REGION 1..346: note = tr|A0A1G1EDY4|A0A1G1EDY4_9BACT S-adenosylmethionine:tRNA ribosyltransferase-isomerase; OS = Nitrospinae bacterium RIFCSPLOWO2_12_FULL_45_22; OX = 1801687 GN=queA PE=3 SV=1
METKELYYSLPEEFIAQYPAEEREASRLMILDRKGKSWGHSRFDSLPNYLQSGDLLVLNDTRVIPARLIGCKVNTHRKIEVLLVKEVAPRSWEALVKPGKKAPINTQIIFGKGDLKGVVTAVCGPGKRVIEFFANGYLEAKLKQYGMVPIPPYIKRDSHHPLELDQVRYQTVYARIEGAIAAPTAGLHFTERLLERIKEQGVQILSLTLHIGPGTFRPIKSRVVGEHPMEPEYYIIEPETADIITRAKEDGRRIVAVGTSVTRALETIFGSPYQPRPLEGWTDLFMYPGYCFKVVDSLVTNFHLPGSTLLALVFAFAGKELILKAYQAAIKERYRFYSYGDAMLII

SEQ ID NO: 69368 - protein, 319 aa, unidentified
  source 1..319: note = Nitrospinae bacterium
  REGION 1..319: note = tr|A0A1G1F043|A0A1G1F043_9BACT S-adenosylmethionine:tRNA ribosyltransferase-isomerase (Fragment) OS=Nitrospinae bacterium RIFCSPLOWO2_12_FULL_47_7 OX=1801688 GN=A3K0 9_08240 PE=3; SV = 1
MIVHRETGEICQDIFSNFTKYFTVRPLMVFNNTRVFPAKLYGHKRGAEKSFEILMLREHLPSVWEVLIKGLGKIKVGTEITFGNGELAAILVDKNQEHGFLQFQYTGDFVSILNRVGKPPLPPYIRRGFHDEEELQRMDRERYQTIYAEKTGAIAAPTAGLHFTPTLLDAIKLHYADTATLTLHVGAGTFQSPRHDELSRHKMEKEYFNIPSETWNRLLTSLKDNQKILAVGTTATRALESVEINSPVSQDVSGWTDRFIHPGQKFNIVQQLLTNFHLPKSTLYLLVCAFAGKSLVEKAYNEAIRQKYRFFSYGDAMLI

SEQ ID NO: 69369 - protein, 385 aa, unidentified
  source 1..385: note = Nitrospira bacterium
  REGION 1..385: note = tr|A0A0S8CBH4|A0A0S8CBH4_9BACT S-adenosylmethionine:tRNA ribosyltransferase-isomerase; OS = Nitrospira bacterium SG8_3 OX=1704023 GN=queA PE=3 SV=1
MYFLGDYDYPLPEALIAHAPVRQRDQARLMLLERGGRRISHYAFADLAGLLHPGDLLVVNDTRVIPGRLTGTKETGGKVEVLLLSYPGEIRGEQGLTCHRGSGCPPLEPMVAQGAENSEAWPSRRSPGHLVCDCLVKASKPPRPGSKIDFAGGLRATVLGATDGVYNMAFEFSGDFDALLDKIGQVPLPPYIKRNGQTPLGCDDRQAYQTVYAEKNGAVAAPTAGLHFSRQLLDQLKERGIEVVAVTLHVSYGTFLPVRVTDIRQHKIHPETYELTDAAASAINEAKDAGRRIIAVGTTTVRVLEHIAHLTGRVGPGSGQCDLFIYPGFQYKVIHGLITNFHLPKSTLLMLVSAFAGRQLILDAYEEAIRRKYRFYSYGDAMLIW

SEQ ID NO: 69370 - protein, 184 aa, unidentified
  source 1..184: note = Nitrospira bacterium
  REGION 1..184: note = tr|A0A0S8E7N3|A0A0S8E7N3_9BACT S-adenosylmethionine:tRNA ribosyltransferase-isomerase (Fragment) OS=Nitrospira bacterium SM23_35 OX=1704026; GN = AMK74_06210 PE=3 SV=1
MKTADFDYVLPEFLIAEKPLKERSVSRLLVLHRNGRTEHRHFFDLPSYLEQGDTLIINNTKVFPARLTGTKKNGKTLDILLVKEEFPGTWEVLSKGNFSGRLRISEELEVDLQRGTSARFQYSGDLMDLIWKYGDMPLPPYIGRSPDQSDKQAYQTVYATKEGSIAAPTAGLHFTGPLLEAIAS

SEQ ID NO: 69371 - protein, 346 aa, unidentified
  source 1..346: note = Nitrospira defluvii
  REGION 1..346: note = tr|D8PC12|D8PC12_9BACT S-adenosylmethionine:tRNA ribosyltransferase-isomerase OS=Nitrospira defluvii; OX = 330214 GN=queA PE=3 SV=1
MLLSEFDFPFDPVLVADHPVIPRDRARLLVLDRQGGERLHRQVADLPSLLQSGDLVVVNNTKVMPARVPAQVRSNGRLLDLLFVEDLGQGLWEVLIKGRFRPGAVIEFPGGGTGEIVERSRLRTTVRVWGVTSVYELMQATGTMPLPPYIKREPSADDQEWYQTMFAQHEGAIAAPTAGLHFTRELVQALTGKGIELAEVTLHVGPGTFRSVKTERIEDHRMLAERIEVSAQTVEQIRRVRERGHRVVAVGTTVVRALETAGRGGRGIEPFQGQAELFITPGFEFQVIDAMVTNFHLPRTTLLMLVSAFVGVQPLRAAYEEAVAERYRFYSYGDAMLIGSGWATVT

SEQ ID NO: 69372 - protein, 344 aa, unidentified
  source 1..344: note = Nitrospira japonica
  REGION 1..344: note = tr|A0A1W1I5C1|A0A1W1I5C1_9BACT S-adenosylmethionine:tRNA ribosyltransferase-isomerase; OS = Nitrospira japonica OX=1325564 GN=queA PE=3 SV=1
MQVAEFDFPFDPRLVASEPVLPRDQAKLLVLPASHRSSHSMMHHRVADLPHLLAPGDLIVVNDTKVMPVRLTGRKQPTGNAVDILFVREVAEGLWEVLIKGRLRPGQRIDLGVDGVLEVQSRDRVRTVVRLDCAMSPREFFARWGMMPLPPYIDRAPGDMDREWYQTVFAQEEGAIAAPTAGLHFTPELLTRLNQAGIGVARVTLHVGIGTFKPITTDHVEDHRMGSEWFEVGAETVQAIAHTKEKGGRIVAVGTTVVRALETAAARQGALGPQRGETSLFITPGFSFQVVDALMTNFHLPKTTLLMLVSAFAGTSLLRQAYEEAVRERYRFYSYGDAMLILKS

SEQ ID NO: 69373 - protein, 339 aa, unidentified
  source 1..339: note = Nitrospira lenta
  REGION 1..339: note = tr|A0A330L2H0|A0A330L2H0_9BACT S-adenosylmethionine:tRNA ribosyltransferase-isomerase; OS = Nitrospira lenta OX=1436998 GN=queA PE=3 SV=1
MNLSEFDFPFDPTLIASEPVLPRHAARLLCLDSQTGNLSNRRVADLPELLAPGDLLVVNDTKVMAARLSGRKQPTGTVVDVLFVKDCGDAVWEVMLKGHFRVGQAILFEGDASATVVQRDEHGTKIKVASSVPVVEFLRTHGCMPLPPYIKRSAQPEDHVWYQTCFADREGAIAAPTAGLHFTPELMARLRDRGVETAAVTLHVGPGTFKPVVVERIEEHQMGTEWFDVSERTVEAILKTKRAGGRVIAIGTTAVRALESAAQQAGGLQPTVGESRLFISPGFRFNVVDALMTNFHLPRTTLLMLVSALAGVDMMRKAYAEAVEQRYRFYSYGDAMLIL

SEQ ID NO: 69374 - protein, 339 aa, Nitrospira moscoviensis
  REGION 1..339: note = tr|A0A0K2G8N3|A0A0K2G8N3_NITMO S-adenosylmethionine:tRNA ribosyltransferase-isomerase; OS = Nitrospira moscoviensis OX=42253 GN=queA PE=3 SV=1
MQLSDFDFPFDPNLVAAQPVEPRDRARLLVLERSTGALMHRHVADLPALLHPGDLLVLNDTKVVPARITGITHPTGKPVEILFVKDLGGDCWEVMAKGNLRVGQILDFGPGARATIVQRDAAGTRVKVQSRIPVRDILYAQGSMPLPPYIKRPATDEDRRWYQTVFAKHEGAIAAPTAGLHFTPEVLAELERWGIGRTMVTLHVGPGTFKPVTTERIEDHRMGAEAFEIGEETARAVERTKHAGRRVVAVGTTVVRALETAAAAQGRVVPMAGDSTLFITPGFRFQAIDALMTNFHLPKTTLLMLVSALAGLDLVRKAYEEAVRERYRFYSYGDAMLIL

SEQ ID NO: 69375 - protein, 339 aa, Nitrospira sp.
  REGION 1..339: note = tr|A0A177QGH4|A0A177QGH4_9BACT S-adenosylmethionine:tRNA ribosyltransferase-isomerase; OS = Nitrospira sp. SCGC AG-212-E16 OX=1799664 GN=queA PE=3; SV = 1
MQLSEFDFPFDSSLIADHPSLPRDHARLLVLQRHDRSLAHRRVDELPDLLHPGDLLVVNNTKVLAARVAGRKHPSGAEVEILFVKDLGDATWEVLIKGTFRPGQILEMGAEAVAVVVERGPIRTTVRVESPIPLSEWLRQYGRMPLPPYMKRAPTDQDREWYQTLFAQHEGAIAAPTAGLHFTPSLLARLQQRGIGLTTVTLHVGVGTFKPVVVDQIEDHRMGAEWIEVGAEAVRAIEQVRVTGKRIVAVGTTVARALETAARADGLIRPYRGETDLFITPGCPFKVVDTLLTNFHLPRTTLLMLVSALTGTEFLRQAYTEAVRERYRFYSYGDAMLIL

SEQ ID NO: 69376 - protein, 346 aa, Nitrospira sp.
  REGION 1..346: note = tr|A0A3C1QF10|A0A3C1QF10_9BACT S-adenosylmethionine:tRNA ribosyltransferase-isomerase; OS = Nitrospira sp. OX=70125 GN=queA PE=3 SV=1
MLLSEFDFPFDPVLVADHPVIPRDRARLLVLDRQGGERVHRQVADLPSLLKPGDLVVVNNTKVMPARVPAQVRSNGKLLDLLFVEDLGQGIWEVLIKGRFRPGAVIEFPGGGTGEIVERSRLRTTVQVSGVASVYELMQATGTMPLPPYIKREPSADDQEWYQTMFAQHEGAIAAPTAGLHFTRELVQALARKGIELAQVTLHVGPGTFRSVKTERIEDHRMLAERIEVSAQTVAQIRLTRERGNRVVAVGTTVVRALETAARGGRGIEPFQGPAELFITPGFEFQVIDAMVTNFHLPRTTLLMLVSAFVGVQPLRAAYEEAVAQRYRFYSYGDAMLIGSGWATVT

SEQ ID NO: 69377 - protein, 344 aa, unidentified
  source 1..344: note = Nitrospiraceae bacterium
  REGION 1..344: note = tr|A0A3A4WLB2|A0A3A4WLB2_9BACT S-adenosylmethionine:tRNA ribosyltransferase-isomerase; OS = Nitrospiraceae bacterium OX=2026770 GN=queA PE=3 SV=1
MKLSDFDYHIPREQIAQHPLPERDVSKLFVVRRDLNKFEHATFIDLTGYLRAGDVLVLNDTRVIPARLFGTKSSGGRVEILLLKELCANTWEALVKGLREGNVIVNKDIIAHVSRSNGAPATVRFEFNNVGAGFKPAPTPDIKKILHNIGVMPLPPYIKRDPVESDMKQYQTVYADKEGAVAAPTAGLHFTERLLDALRVKGVEIQYVTLHVGHGTFKPVKADDVRQHTMDKESYEIPGPTACAINRAKSEGRRIIAVGTTVTRTLESAALPTPSGPGTASIFIYPGYRFRVIDALITNFHQPKSTPVMLTSAFAGLNLLKKAYSTARQRGYRFFSYGDAMLII

SEQ ID NO: 69378 - protein, 347 aa, unidentified
  source 1..347: note = Nitrospiraceae bacterium
  REGION 1..347: note = tr|A0A349EK31|A0A349EK31_9BACT S-adenosylmethionine:tRNA ribosyltransferase-isomerase; OS = Nitrospiraceae bacterium OX=2026770 GN=queA PE=3 SV=1
MITEAAEHLLLSDFDYDLPEALIAQEPLPARDQSRLLVLGRSSGRIEHHRFHDILELLQDGDLLIVNNTKVFSCRLPARKPGGGKAEVFLLAEQDPNVWQALVKAPPARGKRLVIDEGVEAEVLSQGDDGLSTVRFHCTGNIRDLLPSLGKTPLPPYIKREPRTGDQERYQTVFASQPGAVAAPTAGLHFTEGLIETLKQQGVQMASVTLHVGPGTFLPVRCERVAEHRMFSESYEVPQETAVAINSARSEGRRVIAVGTTSVRTIETAAGPDGRIAAGRGSSSLYIYPGFTFKITDGLITNFHLPKSTLLLLVSAFAGRESVLAAYQEAVAKKYRFFSYGDAMLIS

SEQ ID NO: 69379 - protein, 340 aa, unidentified
  source 1..340: note = Nitrospirae bacterium
  REGION 1..340: note = tr|A0A1G1HZN3|A0A1G1HZN3_9BACT S-adenosylmethionine:tRNA ribosyltransferase-isomerase; OS = Nitrospirae bacterium RIFCSPLOW2_12_42_9 OX=1801722; GN = queA PE=3 SV=1
MKQRIEDFDYEFDPELIAQYPSEKRDHSRLLVLDRMSGLIKHRRFFEIRDYLKPGDVLVLNNTKVVPCRLFGKKAKTGGSVELLLIKKLGNDIWEVMAKGRVNKGTRIIFTSSFSCEVMESSHERTVVRFYYKGDWVDHISRIGSVPIPPYIKREPIEEDREWYQTVYAKEDGSIAAPTAGLHFTEDILYSLSSDGIMIVFITLHVGTGTFKPVKAELIEDHKMGYEWFEVGKEAVDIIKKARCNNGRIVAAGTTAVRALEKAAIDGELKPAKGETDLFIYPGFKFNVVDSMITNFHLPKSTLLMLVMAFAGRENILNAYNEAVRLRYRFYSYGDAMLII

SEQ ID NO: 69380 - protein, 335 aa, unidentified
  source 1..335: note = Nitrospirae bacterium
  REGION 1..335: note = tr|A0A1G1FXY7|A0A1G1FXY7_9BACT S-adenosylmethionine:tRNA ribosyltransferase-isomerase; OS = Nitrospirae bacterium RBG_13_39_12 OX=1801703 GN=queA; PE = 3 SV=1
MKVADFDFSLPKTLIAKRPLKERSSSRLLVLHRDGTIEHKLFSDLPSYLNKGDLLLMNNTKVFPARLTGIKQNGGNIEILMVRKNPDNSWEVFTKGKFNGTLKISDNMLLELYNGKKAVFKYSGDFMDIIWEKGNMPLPPYIRRLPDESDKERYQTVFAKKEGSIAAPTAGLHFTDRLLKVIKSKGTILRELTLHVGVGTFRPIRTENIEEHYMDLEYFELDKDLISEIKKIKVSDNRVFSVGTTTTRAIEGYISGRCNVTSRNGKLSGITDAFIYPGYKFRIVDSLITNFHLPRSTPLMLTSAICSWEKLKTAYTEAVARRYRFLSYGDAMLIL

SEQ ID NO: 69381 - protein, 337 aa, unidentified
  source 1..337: note = Nitrospirales bacterium
  REGION 1..337: note = tr|A0A4Y7WTS1|A0A4Y7WTS1_9BACT S-adenosylmethionine:tRNA ribosyltransferase-isomerase; OS = Nitrospirales bacterium LBB_01 OX=2552947 GN=queA PE=3; SV = 1
MLNTSDFNYDLPAELIAMRPAEKRQRARLMVLKRDGSTVQSVFENLPEYLNSGDMLILNETKVVPARLIGKTQGGKPLDILITGKTAEGRHSILSRGKYSGILYFDGGFSCRVYEGKEAEFQSSENFTKLIFKNGLMPLPPYITRHPEDSDKERYQCVYAKYEGSIAAPTAGLHFTEDLLAQIKTKGVTIRAVTHHVGTGTFRPVKTKFVEEHRMDEERFEMNSSLVHDIASVRANGGRVIYVGTTVTRAVESVLSGVAVIDDSTDGKLRGRTSFFIYPGYVFKGADAIITNFHLPRSTPLFLVSAFIGRDNVLSAYKEAIKGGYRFFSYGDAMLLI

SEQ ID NO: 69382 - protein, 339 aa, unidentified
  source 1..339: note = Nitrospirales bacterium
  REGION 1..339: note = tr|A0A524ITF8|A0A524ITF8_9BACT S-adenosylmethionine:tRNA ribosyltransferase-isomerase; OS = Nitrospirales bacterium OX=2358460 GN=queA PE=3 SV=1
MNLSDFHFPFDPTLVAKHPIHPRDHARLLVLNRHQGQIVDRQVKDLPEILQPGDLLVVNDTKVIPARLLGKKVPSGGRIEMLFVKAIDATHAEVLMNGRVGIGQRVEFQGAGQAQVVEKQPGRTVIHWLGPDSLQAHLQQYGALPLPPYLKREPVVGDNEDYQTMFANVEGAVASPTASLHFTPSLIQALLDNGIGCATITLHVGPGTFQPVKSEVVEEHTMHAEWFEVSEHVVKQIQEVRQRGGRVVAVGTTVARSLESAAKAGREVRSGSGETQLFILPGYQFKVVDVLMTNFHFPETTLLMLVSAFAGVELIRDAYAHAMQERYRLYSYGDAMLIQ

SEQ ID NO: 69383 - protein, 357 aa, unidentified
  source 1..357: note = Nocardia amikacinitolerans
  REGION 1..357: note = tr|A0A285LU25|A0A285LU25_9NOCA S-adenosylmethionine:tRNA ribosyltransferase-isomerase; OS = Nocardia amikacinitolerans OX=756689; GN = SAMN04244553_5384 PE=3 SV=1
MSKHGNVRAATESAGWARSFELPDRHNADSPPEARGLARDEVRLLVAGDQLTHARFRELPRYLRPGDLVVVNNSATTSAAVDATLADLPITLHFATWLDDGGWVVEARTRDRTPLPDRELRGGTVFELAGGARATLREPWLPAARRLWIADVTVDPRVLMSEHGRPITYSYVPRRWSPSYYTTVFGRIPGSAEMASAARPFTQDVVLDLVTSGVSLAPITLHTGVSSPEAGEPPSPERFAVPAATARLVIDTKNAGGRVVAVGTTVTRALESAADEDGRVRPAGGWTDLVLGANRPARVVDGLITGWHAPGASHLDLLVAVAGETTVRRAYAEALDTGYLWHEFGDSALLFRDDGRH

SEQ ID NO: 69384 - protein, 353 aa, unidentified
  source 1..353: note = Nocardia bhagyanarayanae
  REGION 1..353: note = tr|A0A543FBU7|A0A543FBU7_9NOCA S-adenosylmethionine:tRNA ribosyltransferase-isomerase; OS = Nocardia bhagyanarayanae OX=1215925 GN=FB390_2910 PE=3; SV = 1
MSGGAATPSAAWARTFELPDRHSADSPPEARGLARDDVRLLVAGDRSTHARFRELPRYLRSGDLVVVNNSATTSAAVDATLADLPITLHFATWLDDGGWVVEVRTRERTPLTDRELRAGAVLELAGEARATLREPWLPGARRLWIADVTVDPRILMGEHGRPITYSYVPRRWSPSYYTTVFGRIPGSAEMPSAARPFTHDVVLDLVTSGVSLAPVTLHTGVSSPEAGEPPSPERFAVPAATARLVNDTKSAGGRIVAVGTTVTRALESAADADGRVRPAGGWTELVLAANRPARVVDGLITGWHAPGASHLDLLVAVAGETTVRRAYTEALDTGYLWHEFGDSALLFRGDGRD

SEQ ID NO: 69385 - protein, 346 aa, Nocardia brasiliensis
  REGION 1..346: note = tr|A0A379BWT1|A0A379BWT1_9NOCA S-adenosylmethionine:tRNA ribosyltransferase-isomerase; OS = Nocardia brasiliensis OX=37326 GN=queA PE=3 SV=1
MTVLVDRPRFVLPPERNAVAPPEARGLARDEVRLLVAGAGLTHARFRELPRQLRPGDLVVVNNSATLAAAVDGRLDDRPMALHFATWLDDGGWVVEVRTTARTPFPAEELSAGAVIRLPDGVRATLRSPWLAGARRLWVADLTADPRQLFAVYGYPITYSYVPQRWSPSYYETVFGRVPGSAEMPSAARPFTERLVLDLVAAGVGLAPITLHTGVSSPEAGEPPSPERLTVPASTARRVNDTKAAGGRVIAVGTTVTRALETAGDAAGVVHPVLGWTELVLGAGRPARVVDGLITGWHAPGASHLDLLVAVAGEATVRAAYAAALETGYLWHEFGDSALLLGGADD

SEQ ID NO: 69386 - protein, 342 aa, Nocardia brasiliensis
  REGION 1..342: note = tr|K0F4B7|K0F4B7_9NOCA S-adenosylmethionine:tRNA ribosyltransferase-isomerase OS=Nocardia brasiliensis ATCC 700358 OX=1133849 GN=O3I_032325 PE=3 SV=1
MTVLIDRPRFVLPPERNAVAPPEARGLARDEVRLLVAGASLTHARFRELPRQLRPGDLVVVNNSATLAAAVDGRLDDRPMALHFATWLDDGGWVVEVRTTARTPFPAEELSAGAVIRLPDGVRATLRSPWLPGGRRLWVADLTADPRQLFAVYGYPITYSYVPQRWSPSYYETVFGRVPGSAEMPSAARPFTERLVLDLVAAGIGFAPITLHTGVSSPEAGEPPSPERLTVSASTARRVNDTKAAGGRVIAVGTTVTRALETAGDAAGVVHPVHSWTELVLGARRPARVVDGLITGWHAPGASHLDLLVAVAGQATVDAAYAAALETGYLWHEFGDSALLLG

SEQ ID NO: 69387 - protein, 343 aa, Nocardia mexicana
  REGION 1..343: note = tr|A0A370HCE9|A0A370HCE9_9NOCA S-adenosylmethionine:tRNA ribosyltransferase-isomerase; OS = Nocardia mexicana OX=279262 GN=DFR68_102502 PE=3 SV=1
MTVTLDEFTVPAERAATAPPEARGSARDGVRLLVSDRGVLTHARFRELPRFLRPGDLVVVNNSATLAAAVDARYLGHPAVLHFATRLDDGGWVVELRSPDGVPFTAANPEPAARVELPGATAVLRGPWLPPARRLWIADIDAAVPQLLARHGRPITYSYVTQRWSPDYYRTVFGREPGSAEMPSAGRPFTDRLVTDLVTTGVTLAPITLHTGVSSPEAGEPPSPERYAVPENTARLVNSTRATGGRVIAVGTTVTRALESAADPSGRLHPASGWTEVVLGAARPARVVDGLITGWHEPGASHLELLQAVAGTETVRTAYRTALDSGYLWHEFGDTALLFTPSG

SEQ ID NO: 69388 - protein, 343 aa, Nocardia ninae
  REGION 1..343: note = tr|A0A511M8U7|A0A511M8U7_9NOCA S-adenosylmethionine:tRNA ribosyltransferase-isomerase; OS = Nocardia ninae NBRC 108245 OX=1210091 GN=NN4_14800 PE=3; SV = 1
MTVTLAQPSFVLPPERNAVAPPEARGLARDGVRLLVAGDSLTHARFCELPQHLTPGDLVVVNNSATLAAAIDGRMDSGPIAVHFATWLDDGGWVVELRTTARTPVPAEELSAGMRIQLPEGAHATLREPWLAGARRLWIADVTTDPRRLLDVYGYPITYSYVPQRWSASYYSTVFGRILGSAEMPSAARPFTEHLVLDLIAAGIGIAPITLHTGVSSPEAGEPPSPERFAVPDATARTVNDTKAAGGRVIAVGTTVTRALETAADPSGRVHPAHGWTELVLGEDRPARVVDGLITGWHAPGASHLDLLVAVAGETTVHAAYSVALDTGYLWHEFGDSALLLRG

SEQ ID NO: 69389 - protein, 385 aa, Nocardia puris
  REGION 1..385: note = tr|A0A366E3D9|A0A366E3D9_9NOCA S-adenosylmethionine:tRNA ribosyltransferase-isomerase; OS = Nocardia puris OX=208602 GN=DFR74_101910 PE=3 SV=1
MKVEGRRFRESGRAGSPDRHVDSGRIGGAREGGPGRVYRPFDANFVLPERLNATAPPEARGLSRDDVRLLVADGGLTHTRFHRLPEHLAPGDVLVVNNSAMVTAAVEGEVAGAPVVVHFSTWLDDGTWVIELRTKDRLPLADRSFEPGDAVDLPGDARMTLRAPWLPGGRRLWIAEVSTDVRALLWQYGNPITYAYVPERWLPTYYSTVFGRERGSAEMPSAARPFTHELVLDLVASGVWLAPITLHTGVSSPEAGEPPSPERFDVPAATAHLVNDARAAGGRIVAVGTTVTRALESATAPDGFVHAASGWTDLVLGPARPARVVDGLITGWHAPGASHLDLLVAVAGEDTVRRAYAEALDAGYLWHEFGDSALLFAPDRTLRSR

SEQ ID NO: 69390 - protein, 351 aa, Nocardia seriolae
  REGION 1..351: note = tr|A0A0B8NAT9|A0A0B8NAT9_9NOCA S-adenosylmethionine:tRNA ribosyltransferase-isomerase; OS = Nocardia seriolae OX=37332 GN=NS07_v2contig00039-0031; PE = 3 SV=1
MTAGLDAHAFVLPDELSATSPPEARGLGRDEVRLMVADAGTLTHARFRELASFLRPGDLVVVNNSAMINAAVDAHYDGDAAVLHFSTRLDDGRWAVELRDPAGVPWRGRPLECGASVRLPAGYVATVWARWLPDGDRLWIADIIAPGRTAGEDARVLLARHGRPIAYSYVTERWSASYYRTVFGREPGSAEMPSAGRPFTEGLVTELVAGGVGLAPITLHTGVSSPDSGEPPSPERFAVPEMTARLVNATHAERGRVVAVGTTVTRALESATGADGSVHAAAGWTELVLDGSRPARAVDGLITGWHAPGASHLHLLESVAGAGVVREAYRAALESGYLWHEFGDSALLLRE

SEQ ID NO: 69391 - protein, 351 aa, Nocardia seriolae
  REGION 1..351: note = tr|A0A1I9ZFA1|A0A1I9ZFA1_9NOCA S-adenosylmethionine:tRNA ribosyltransferase-isomerase; OS = Nocardia seriolae OX=37332 GN=queA PE=3 SV=1
MTAGLDAHAFVLPDELSATSPPEARGLGRDEVRLMVADAGTLTHARFRELASFLRPGDLVVVNNSAMINAAVDAHYDGDAAVLHFSTRLDDGRWAVELRDPAGVPWRGRPLECGASVRLPAGYVATVWARWLPDGDRLWIADIIAPGRTAGEDARVLLARHGRPIAYSYVTERWSASYYRTVFGREPGSAEMPSAGRPFTEGLVTELVAGGVGLAPITLHTGVSSPESGEPPSPERFAVPEMTARLVNATHAERGRVVAVGTTVTRALESATGADGSVHAAAGWTELVLDGSRPARAVDGLITGWHAPGASHLHLLESVAGAGVVREAYRAALESGYLWHEFGDSALLLRE

SEQ ID NO: 69392 - protein, 343 aa, Nocardia sp.
  REGION 1..343: note = tr|A0A4P7H1K5|A0A4P7H1K5_9NOCA S-adenosylmethionine:tRNA ribosyltransferase-isomerase; OS = Nocardia sp. CS682 OX=1047172 GN=DMB37_10960 PE=3 SV=1
MTITLAQPSFVLPPERNAVAPPEARGLARDEVRLLVAGDGLTHARFRELPQHLTQGDLVVVNNSATLAAAIDGRMNCGPIAVHFATWLDDGGWVVELRTTARTPVPVEELSAGMHIQLPEGAHATLREPWLAGARRLWIADITTDPRRLLDVYGYPITYSYVPQRWSASYYSTVFGRIPGSAEMPSAARPFTEHLVLDLIAAGIGIAPITLHTGVSSPEAGEPPSPERFAVPDSTARTVNDTKAAGGRVIAVGTTVTRALETAADPSGRVHPAHGWTELVLGEDRPARVVDGLITGWHAPGASHLDLLVAVVGETTVHAAYSAALDTGYLWHEFGDSALLLRG

SEQ ID NO: 69393 - protein, 354 aa, Nocardia sp.
  REGION 1..354: note = tr|A0A3A4JWS7|A0A3A4JWS7_9NOCA S-adenosylmethionine:tRNA ribosyltransferase-isomerase; OS = Nocardia sp. YIM PH 21724 OX=2340916 GN=D5S18_16630; PE = 3 SV=1
MTVLVSARTFHLPPERSATAPPEARGLARDEVRLLVTGGAESNRNELTHAVFRELPRQLRPGDLVVVNNSATLAAAVDGVLDGAPVVVHFSTRLEDGRWAIEVRLPQQRPYPGESLHADTVIGLPGGARATLREPWLPPARRLWIADIDVAVLGLLAAHGRPITYSYVPQRWSADYYETVFGRIPGSAEMPSAARPFTQRLVLDLMTSGVGLAPITLHTGVSSPETGEPPSPERFAVPAATARLVNEARAAGGRIIAVGTTVTRALESAADPSGRVESASGWTELVLGEHRPARVVDALITGWHAPGASHLDLLVAVAGADTVAAAYSSALDNGYLWHEFGDSALLFGWTSRSR

SEQ ID NO: 69394 - protein, 344 aa, Nocardia tenerifensis
  REGION 1..344: note = tr|A0A318KE20|A0A318KE20_9NOCA S-adenosylmethionine:tRNA ribosyltransferase-isomerase; OS = Nocardia tenerifensis OX=228006 GN=DFR70_105406 PE=3; SV = 1
MTVTLARRSFVLPPERNAVAPPEARGLARDEVRLLVAGDGLTHARFRELPAHLRPGDLVVVNNSATLAAAVDGRMADGPIALHFATWLDDGGWVVEVRTTTRTPYPTDELSAGTTIRLPEGARATLREPWLPGGRRLWIADLTVDPRRLLEVYGYPITYSYVPQRWSASYHSTVFGRIPGSAEMPSAARPFTERLVLDLIAAGVGLAPITLHTGVSSPEAGEPPSPERFVVPDSTARAVNDAKAAGGRVIAVGTTVTRALESAADPAGRVHAASGWTELVLGADHPARAVDGLITGWHAPGASHLDLLVAVAGEATVHEAYSAALDTGYLWHEFGDSALLLRGR

SEQ ID NO: 69395 - protein, 341 aa, Nocardia terpenica
  REGION 1..341: note = tr|A0A291RFW2|A0A291RFW2_9NOCA S-adenosylmethionine:tRNA ribosyltransferase-isomerase; OS = Nocardia terpenica OX=455432 GN=CRH09_10020 PE=3 SV=1
MTVILENFALPADRAATEPPEARGLARDDVRMLVSDNGVHTHARFRELPRFLRPGDLVVVNNSATLNAAVDAHYLGRPVVLHFAARLDDGGWVVELRDPAGVPFTAAEPKPGRRVLLADTAVTLRRPWLPPARRLWIADPDGDVPALLARHGRPITYSYVAQRWSPEYYRTVFGREPGSAEMPSAGRPFTDNLVTDLVAAGVTLAPITLHTGVSSPETGEPPSPERYTVPEVTARLVNATHATGGRVIAVGTTVTRALESATVGTEVHPASGWTDLILDADHPTRSVDALITGWHEPGASHLHLLEAVAGTDTVRDAYEAALSTGYLWHEFGDTALLFRPR

SEQ ID NO: 69396 - protein, 341 aa, Nocardia terpenica
  REGION 1..341: note = tr|A0A161WR50|A0A161WR50_9NOCA S-adenosylmethionine:tRNA ribosyltransferase-isomerase; OS = Nocardia terpenica OX=455432 GN=AWN90_21010 PE=3 SV=1
MTVILENFALPADRAATEPPEARGLARDDVRMLVSDNGVHTHARFRELPRFLRPGDLVVVNNSATLNAAVDAHYLGRPAVLHFAARLDDGGWVVELRDPAGVPFTAAEPKPGRRVLLAGTAVTLRRPWLPPARRLWIADPDGDVPALLARHGRPITYSYVAQRWSPEYYRTVFGREPGSAEMPSAGRPFTDNLVTDLVAAGVTLAPITLHTGVSSPETGEPPSPERYTVPEVTARLANATHATGGRVIAVGTTVTRALESATVGAEVRPASGWTDLILDADHPTRSVDALITGWHEPGASHLHLLEAVAGTDTVRDAYEAALDTGYLWHEFGDTALLFRPR

SEQ ID NO: 69397 - protein, 353 aa, unidentified
  source 1..353: note = Nocardioides albertanoniae
  REGION 1..353: note = tr|A0A543A7U3|A0A543A7U3_9ACTN S-adenosylmethionine:tRNA ribosyltransferase-isomerase; OS = Nocardioides albertanoniae OX=1175486 GN=FB381_2553; PE = 3 SV=1
MTLLVEHPTTTFPAPDDTTAPAPAEWRGRGRDEVRMLVARPDGVSHARFGDLADHLSPGDLVVVNDSATEARQLDADMVGRGRVVVHLAQRLDSGWALEIRSAPDASRAVLDASEGDVVVTGGLRATLLEPYPDGRTSSPTGEGNRLWRAEITGDVAAELEGAGRPIAYGYLDRRYPLSAYQTVFGRRPGSAEMPSAARPFTQSLVTDLVSRGIQIAPITLHTGVSSQEAGEAPGAEWFEVSETTARVVEQTRLAGGRVVAAGTTVTRALESAVVEATGVVRAASGWTDRVVTPANPPYVVNGLITGWHDPQASHLLLVEAVAGTELTQSAYDAAVAEGYLWHEFGDSALLLP

SEQ ID NO: 69398 - protein, 350 aa, Nocardioides alpinus
  REGION 1..350: note = tr|A0A1I0ZBK4|A0A1I0ZBK4_9ACTN S-adenosylmethionine:tRNA ribosyltransferase-isomerase; OS = Nocardioides alpinus OX=748909 GN=SAMN05192575_105167; PE = 3 SV=1
MTALAETPHTHFTASAFAPRPAEERGLARDEVRLLVGTPDGLEHARFRDLPDHLRAGDVLVVNTSATVPAEVDAVLDGRPVVLHVAHALDDGDRVVELRTAPDAARALLDASTGAAVSVGDVRLVLRSPWPDARPSSPTGEGNRLWRASVRGDLDRQLDRDGRPIAYGYLDRRYPISAYQTVFGTRPGSAEMASAGRPFTHELVTRLVTAGVQIAPITLHTGVSSQEAGEAPGPEWFEVPPSSARTINTARAAGGRVIAVGTTATRAVESTVRGGHVVAGRGWTSRVITPGDPPCVVDGLVTGWHDPMASHLLLVEAVAGQRLTQAAYDAAVAEGYLWHEFGDAALLLRR

SEQ ID NO: 69399 - protein, 322 aa, unidentified
  source 1..322: note = Nocardioides bacterium
  REGION 1..322: note = tr|A0A3D0S4M1|A0A3D0S4M1_9ACTN S-adenosylmethionine:tRNA ribosyltransferase-isomerase; OS = Nocardioides bacterium OX=1565122 GN=DEQ43_19910 PE=3; SV = 1
MSLAATAPPEARGLARDEVRMAVVTSERTHHRQARELPLWLEPGDLLVVNTSATLPSALPGGVHVSAELDDGSWVVELRRADGRGPRLPQPGEVVRLPGGVRLRLHQAHPAGQTRLWRATTLPVVDRVAYLRRYGEPIRYSYLHGSWPIEDLQNVYADVPGSAEMPSAGRPLSREVLVGLMSAGVVVAPLVLHTGVSSQEGHEPPQPEWFAVPSPTADLVELTRSRGGRVVAVGTTVARALETWAEGRATGWTSLVLAPARPAYVVDGLLTGLHEPEASHLDLLRAVAGEELVARAYADIATPDAPAYLWHEFGDSMLLLPG

SEQ ID NO: 69400 - protein, 377 aa, unidentified
  source 1..377: note = Nocardioides bacterium
  REGION 1..377: note = tr|A0A4V3YR85|A0A4V3YR85_9ACTN S-adenosylmethionine:tRNA ribosyltransferase-isomerase; OS = Nocardioides bacterium OX=1565122 GN=E7Z54_13445 PE=3; SV = 1
MTLLSERPAVRFLAPRDTFAPAPAERRGLRRDQVRLLVADEDRGLTHTSFAHLAEHLAPGDVVVVNDSATVPAQLDAVSTRHGPVVVHLATGLDDGSWVVEVRRAPDADRAVLDAEDGDLLSVAAGTTYLRLTEPYPEPGSSPTRTGNRLWRAVIADGDRVLRGVARRYGRPISYGYLADRYPLADYQTVFSHRPGSAEMPSAGRPFTADLVTRLVSRGVTITPVTLHTGVSSQEAGESPQPEWFEVPGSSAAVVNAARAGGGRVVAVGTTVTRALESAVVAAADGSARLVARSGWTTRVVTPLEPPRVVDGLVTGWHDPEASHLLLVEAVAGAELAQQAYEAAVAEGYLWHEFGDSCLLLPRAEGVRPGRRDQGES

SEQ ID NO: 69401 - protein, 356 aa, unidentified
  source 1..356: note = Nocardioides currus
  REGION 1..356: note = tr|A0A2R7YYV6|A0A2R7YYV6_9ACTN S-adenosylmethionine:tRNA ribosyltransferase-isomerase; OS = Nocardioides currus OX=2133958 GN=C7S10_05675 PE=3 SV=1
MTTLSEAPGVHFEASDFAPQPAESRGLARDEVRLLVGTGDGVTHARFRDLPDHLRAGDVLVVNNSATVPGEVDATLHGAEVVLHVAARLDDGDRVVELRSAPDASRALLDAWPGDVVLAGDVRVTLAAPWPTGEASSPTRAGNRLWRARVRGDFDAVLARTGRPIAYGYLDRPYPLQAYQTVFGTRPGSAEMASAGRPFTEALVTSLVARGVAFAPVTLHTGVSSQEAGEAPGPEWFEVPDASARTVNAARAGGGRVVAVGTTATRAVESAVRDGALVSATGWTDRVVTPAAPPVVVDGLITGWHDPHASHLLLVEAVAGRALTQAAYDAAVANHYLWHEFGDSALLMPWRREGSE

SEQ ID NO: 69402 - protein, 349 aa, Nocardioides exalbidus
  REGION 1..349: note = tr|A0A1H4QIU1|A0A1H4QIU1_9ACTN S-adenosylmethionine:tRNA ribosyltransferase-isomerase; OS = Nocardioides exalbidus OX=402596 GN=SAMN04489844_1856; PE = 3 SV=1
MSTLTETPHTRFAASDFAPQPAEARGLERDEVRLLVGTPDGLSHVRFRDLPDHLRPGDVLVVNTSATVNAEVDATIDGQPVVLHVAHHLEDGDRVVEVRSAPDAGRAVLDRAAGDVVRVGDVRLVLRSPWPGEASSPTGAGNRLWRASVRGDLDRQLGWNGRPIAYGYLDWRYPLADYQTVFGTRPGSAEMASAGRPFTPSLVTRLVTAGVQLAPVTLHTGVSSQEAGEAPGPEWFEVPPTSARTINVARENGGRVIAVGTTATRAVESSVLGRHVVASRGWTSRVVTPAQPPRVVDGLVTGWHDPMASHLLLVEAVAGERLTQAAYDAAVAEGYLWHEFGDSALLLRR

SEQ ID NO: 69403 - protein, 349 aa, Nocardioides ganghwensis
  REGION 1..349: note = tr|A0A4Q2SH65|A0A4Q2SH65_9ACTN S-adenosylmethionine:tRNA ribosyltransferase-isomerase; OS = Nocardioides ganghwensis OX=252230 GN=EUA07_06425 PE=3; SV = 1
MTLLHETPHTRFEASSFAPQPPEARGLARDEVRLLVATPDGISHGQFRDLPDHLRAGDVLVVNTSATVAAEVDADLDGRAVVLHVAHRLDDGDSVVELRTAPDAARAVLDASAGAVVRVGDVRLTLRAPWPGGASSPTGSGNRLWRASVRGDLDRQLAWNGRPISYGYLDRRYPLADYQTVFGTRPGSAEMASAGRPFTPVLVTRLVTAGVQLAPVTLHTGVSSQEAGEAPGPEWFEVPATSARVINQARDNGGRVVAVGTTATRAVESAVLGRHVVASRGWTSRVVSPAQPPRVVDGLVTGWHDPMASHLLLVESVAGPRLTQAAYDAAVAEGYLWHEFGDSALLLRR

SEQ ID NO: 69404 - protein, 349 aa, unidentified
  source 1..349: note = Nocardioides glacieisoli
  REGION 1..349: note = tr|A0A4Q2RR16|A0A4Q2RR16_9ACTN S-adenosylmethionine:tRNA ribosyltransferase-isomerase; OS = Nocardioides glacieisoli OX=1168730 GN=EUA06_12305 PE=3; SV = 1
MTQLTETPHTHFAASAFAPQPAEERGLARDEVRLLVGTPDGLSHERFRDLPDHLAAGDVLVVNTSATIAAEVDAELDNRPVVLHVAHHLDDGDRVVELRTAPDAGRAILDRRPGDEITVGDVRLTLREPWPGAASSPTGVGNRLWRATVRGDLDRQLDWNGRPIAYGYLDRRYPLASYQTVFGRHPGSAEMASAGRPFTDALVTRLVTAGVQLAPVTLHTGVSSQEAGEAPGPEWFEVPPTSARIINGARANGGRVIAVGTTATRAVESAVNGRHVVAHRGWTDRVITPEAPPQVVDGLVTGWHDPMASHLLLVEAVAGQRLTQAAYDAAVAEGYLWHEFGDSALLMRR

SEQ ID NO: 69405 - protein, 371 aa, unidentified
  source 1..371: note = Nocardioides immobilis
  REGION 1..371: note = tr|A0A417XYY5|A0A417XYY5_9ACTN S-adenosylmethionine:tRNA ribosyltransferase-isomerase; OS = Nocardioides immobilis OX=2049295 GN=D0Z08_18850 PE=3; SV = 1
MPLLDERPATSFAAPRSVFAPAPAERRGVARDRVRLLVADADRGLTHTRFTHLTEHLRPGDVVVVNDSATVAAQLDALSDRHGPVVVHLAIPLPDDTWVVEVRRAPDADRAVLDAEVGDVLEVAAGVARLRLVAPSISVESTSAHSVSLVNSPTGTGNRLWRAEAEGDLAAAARRYGRPISYGYLADRYPLSDYQTVFGHRPGSAEMPSAGRPFTSELVTRLVAGGVMVAPVTLHTGVSSQEAGEAPQAERFEVTATTAAVVNAARAGGGRVIAVGTTVTRALESAVEPERDGSRLVPARGWTSRVVTPADPPRIVDGLITGWHDPEASHLLLVEAVAGAELTQRAYAAAVDARYLWHEFGDSALLLPTPR

SEQ ID NO: 69406 - protein, 350 aa, unidentified
  source 1..350: note = Nocardioides lianchengensis
  REGION 1..350: note = tr|A0A1G6SM42|A0A1G6SM42_9ACTN S-adenosylmethionine:tRNA ribosyltransferase-isomerase; OS = Nocardioides lianchengensis OX=1045774; GN = SAMN05421872_106202 PE=3 SV=1
MRMLEEHPSTTFAPAAFAPAPAEERGLTRDATRLLVAGPDGVRHTRFRELARHLSPGDVVVVNNSATVAGQLDAVSSRHGPVVVHLATPLDDGDWVVEVRSAPDAARAVLDAAPGEELRAGPVRLRLRAPYPRDGSSPTGRGDRLWRASVEGDLACHASRHGRPISYGYLDRAYPLAAYQTVFATEPGSAEMPSAGRPFTPALVTELVSRGIAVTPITLHTGVSSQEAGEAPQPERFEVSAATARLVEAARAGGGRVVAVGTTVTRALESAVDGRGRLAAARGWTERVVTPADPPRVVTGLVTGWHDPAASHLLLVEAVAGADLTQTSYDAAVAGGYLWHEFGDAALLLP

SEQ ID NO: 69407 - protein, 353 aa, Nocardioides luteus
  REGION 1..353: note = tr|A0A1J4NBT5|A0A1J4NBT5_9ACTN S-adenosylmethionine:tRNA ribosyltransferase-isomerase; OS = Nocardioides luteus OX=1844 GN=UG56_003320 PE=3 SV=1
MTMLAERPTTTFPFPEDTTAPAPAEWRGLERDGVRLLVASPEGVRHARFRSLAEHLSPGDLVVVNDSITEARQLDADLIGRGRVVLHLAQRLDTGWAVELRSAPDASRSVLDAAEGDVVVTAGLRVTLREPYPDGRPSSPTGEGNRLWRAEVTGDVAAELARSGRPIAYGYLDRRYPLDAYQTVFGHRPGSAEMPSAARPFTHPLVTELVTRGIQIAPVTLHTGVSSQEAGEAPGAEWFEVSETTARLVEQTRYAGGRVVAAGTTVTRALESAVVPATGAMRAASGWTDRVITPANPPYVVNGLITGWHDPQASHLLLVEAVAGPELTQRAYDAAVAEGYLWHEFGDSALLLP

SEQ ID NO: 69408 - protein, 349 aa, Nocardioides oleivorans
  REGION 1..349: note = tr|A0A4Q2RXL2|A0A4Q2RXL2_9ACTN S-adenosylmethionine:tRNA ribosyltransferase-isomerase; OS = Nocardioides oleivorans OX=273676 GN=EUA93_05025 PE=3; SV = 1
MSLLAETPHTRFAASDFAPQPAESRGLERDEVRLLVGTPDGLAHVRFRDLPDHLHAGDVLVVNTSATVNAEVDATLDGEPVVLHVAHHLEDGDRVVELRSSPDAGRAILDRTSGDVVRVGDVRLVLRSPWPGEASSPTGAGNRLWQASVAGDLDRQLEWNGRPIAYGYLDRRYPLADYQTVFGTRPGSAEMASAGRPFTPALVTRLVTAGVQLAPVTLHTGVSSQEAGEAPGPEWFEVPPTSARTINGARENGGRVIAVGTTATRAVESSVLGRHVVASRGWTSRVVTPAQPPRVVDGLVTGWHDPMASHLLLVEAVAGERLTQAAYDAAVAEGYLWHEFGDSALLLRR

SEQ ID NO: 69409 - protein, 357 aa, Nocardioides sp.
  REGION 1..357: note = tr|A0A0Q8DPF9|A0A0Q8DPF9_9ACTN S-adenosylmethionine:tRNA ribosyltransferase-isomerase; OS = Nocardioides sp. Root614 OX=1736571 GN=ASD81_24010 PE=3; SV = 1
MSQLEAQEFAPAPAERRGLARDQVQLLVATDRGITHTRFHRLDEHLDPGDVVVVNNSATVAAAVDAVSDRHGPVVLHLATPLDDATWVVEVRRPPDAARAVLDAQAGDRIDLVGGAATVQLLEPYPAPGSSPTGAGNRLWRAAAVGDPLAVARRLGRPIAYGYLDARYPLADYQTVFGQRPGSAEMPSAGRPFSADLVTRLVAKGVLVAPITLHTGVSSQEAGEAPQAERFEVPPATAAAVNAVRAAGGRVIAVGTTATRALESAVEVDRDGPHVVPASGWTSRIISPADPPRVTDGLVTGWHDPNASHLLLVEAVAGTQLTRRAYTAAAASGYLWHEFGDSCLLLPTSGRSQGKSR

SEQ ID NO: 69410 - protein, 350 aa, Nocardioides sp.
  REGION 1..350: note = tr|A0A4Q2T101|A0A4Q2T101_9ACTN S-adenosylmethionine:tRNA ribosyltransferase-isomerase; OS = Nocardioides sp. HLT2-9 OX=1168729 GN=EUA94_12440 PE=3; SV = 1
MTLLTETPHTHFESSAFAPQPAEARGLARDEVRLLVATPDGLSHQRFRDLPDHLGAGDVLVVNTSATVPAEADATLDGAPVVVHVAHHLEDGDRVVELRSAPDAARALLDASVGDVVEVGDVRLVLRAPWPSYAPSSPTGVGNRLWRVSVRGNLDRQLDWNGRPIAYGYLDGRYPLADYQTVFGRRPGSAEMASAGRPFTPELVTRLVTAGVQFAPVTLHTGVSSQEAGEAPGPEWFEVPPTSARLINGACDNGGRVIAVGTTATRAVESSVQGRYVVASRGWTSRVVTPAQPPRVIDGLITGWHDPMASHLLLVEAVAGQRLTQAAYDAAVVEGYLWHEFGDSALLLRR

SEQ ID NO: 69411 - protein, 356 aa, Nocardioides terrae
  REGION 1..356: note = tr|A0A1I1KY71|A0A1I1KY71_9ACTN S-adenosylmethionine:tRNA ribosyltransferase-isomerase; OS = Nocardioides terrae OX=574651 GN=SAMN04487968_10965; PE = 3 SV=1
MTLLSEQPAIRFPAPDDTTAPAPAEWRGYARDEVRLLVADRTGVVHTRFRSIADHLDRGDLLVVNDSATEPRELDAVLSGRGPVVLHLADRLRDGEWAVELRTAPDARRAVLDAGEGDVVTAAGLRLTLTAAYPDRPSSPTGRGNRLWRATVAGDVAAAIRQHGRPIAYGYLDRRYPLDAYQSVFGVRPGSAEMPSAARPFTADLVATLVARGVQIAPVTLHTGVSSQEAGEAPAPEWFEVTATTARIVRETKSAGGRVVAVGTTVTRALESAVVRRGRTGTTVRAARGWTDRVVTPRQPPVVVDGLITGWHDPHASHLLLVEAVAGRALTQRAYDEAVAAGYLWHEFGDAALLLP

SEQ ID NO: 69412 - protein, 354 aa, Nocardiopsis alba
  REGION 1..354: note = tr|J7L5V2|J7L5V2_NOCAA S-adenosylmethionine:tRNA ribosyltransferase-isomerase OS=Nocardiopsis alba (strain ATCC BAA-2165 / BE74) OX=1205910 GN=B005_4327 PE=3 SV=1
MRTEEFDFDTEKRVMPADPVELRGKKRENGRMVVLDRSADTVEHTVFSDIVDHLRPGDLLVLNDSYTLSNTLTFRHGDRTLDLNVYGHEPGGTNIVKISSGERLRRGEALTSVDDERLTCTLLESQPDDLWKVAFEPAELLIETLDRHGRRVDENIHLDPTSWRERPDAYRSVYAKTPGSLEIPSAGLHFSKELLDRVVDKGVELAYITLHVGATEILAVRHISAEKVEDHEVRPEYFEIGSEAATRLTRAVSEGRRVVAVGTTVMRALESLPIDKESGGTIEPRKDWTDLYIHPGYRFKIIDVLLTNLHRPRSSHIVLTAAFGGKDLVMRSYSEIVDDGEYEFDMFGDSMLIL

SEQ ID NO: 69413 - protein, 398 aa, Nodularia sp.
  REGION 1..398: note = tr|A0A218Q9J3|A0A218Q9J3_9CYAN S-adenosylmethionine:tRNA ribosyltransferase-isomerase; OS = Nodularia sp. NIES-3585 OX=1973477 GN=queA PE=3 SV=1
MVEGGVNSVEPEIAHTNLNQLSQKDGELDFSLAGYNYTLPNELIAQNPVFPRDSSRLLVVNSPTTGKESPPIHQIFQDLPELLRADDLLIINDTKVIPARLYGHKSTGAEIEVLLLEERQYNCWLALVKPGKRFKPGTEIIFEPRGLGIRNPKDSHPFPTQLTAKVLETDAATGGRLLRFDVPEGKALVEVLDQFGEIPLPPYITASTAADEQYQTVYAQQPGAIAAPTAGLHFTPELLSKLSDRGINQAFITLHVGVGTFRPVEIEDVTSHQMHEEWISVPPATVEQIRATKAAGGRIIAVGTTAVRALEGAAKSGDLQPFCGKTDLFIYPGYQWRVVDGLITNFHLPRSSLLMLVSALIGRQRLLNIYQEAIASKYRFYSFGDAMLILPEARGIQG

SEQ ID NO: 69414 - protein, 374 aa, Nodularia spumigena
  REGION 1..374: note = tr|A0A2S0Q5T5|A0A2S0Q5T5_NODSP S-adenosylmethionine:tRNA ribosyltransferase-isomerase; OS = Nodularia spumigena UHCC 0039 OX=1914872 GN=queA PE=3; SV = 1
MEPEIVHTQTETPEVNLDCSLAGYNYTLPTELIAQNPVFPRDSSRLLVVNSPTTGTQTAPLHQIFRDLPELLRTGDLLIINDTKVIPARLYGRKSTGAEVEVLLLEERQYNCWLALVKPGKRFKPGTKIIFPPRGKDSQPLPTELSATVIDTDPATGGRLLRFDVPEGKPLVEVLDQFGEIPLPPYITASTAADEQYQTVYAQQPGAIAAPTAGLHFTPELLKKLGDRGINQASITLHVGIGTFRPVEIEDVTSHQMHEEWISVPPATVEQIRATKAAGGRIIAVGTTAVRALEGAAKSGDLQTFCGKTDLFIYPGYEWRVVDGLITNFHLPRSSLLMLVSALIGRERLLSIYQEAIALKYRFYSFGDAMLILR

SEQ ID NO: 69415 - protein, 374 aa, Nodularia spumigena
  REGION 1..374: note = tr|A0A161UUG6|A0A161UUG6_NODSP S-adenosylmethionine:tRNA ribosyltransferase-isomerase; OS = Nodularia spumigena CENA596 OX=1819295 GN=queA PE=3 SV=1
MEPEIVHTQTETPEVNLDCSLAGYNYTLPTELIAQNPVFPRDSSRLLVVNSPTTDTETPPLHQIFRDLPELLRTGDLLIINDTKVIPARLYGRKSTGAEVEVLLLEERQYNCWLALVKPGKRFKPGTKIIFPPRGKDSQPLPTELTATVIDTDPATGGRLLRFDVPEGKPLVEVLDQFGEIPLPPYITASTAADEQYQTVYAQQPGAIAAPTAGLHFTPELLKKLGDRGINQASITLHVGIGTFRPVEIEDVTSHQMHEEWISVPPATVEQIRATKAAGGRIIAVGTTAVRALEGAAKSGELQPFCGKTDLFIYPGYEWRVVDGLITNFHLPRSSLLMLVSALIGRERLLSIYQEAIALKYRFYSFGDAMLILR

SEQ ID NO: 69416 - protein, 350 aa, Nonlabens agnitus
  REGION 1..350: note = tr|A0A2S9WV43|A0A2S9WV43_9FLAO S-adenosylmethionine:tRNA ribosyltransferase-isomerase; OS = Nonlabens agnitus OX=870484 GN=queA PE=3 SV=1
MKLSQFGYKLPEELIAQHPVENRDESRLMVLHKKTGEIEHKMFKDVIDYFDEKDVFVMNDTKVFPARLYGNKEKTGARIEVFLLRELNPTTKLWDVLVDPARKIRIGNKLYFGEDESLVAEVIDNTTSRGRTLRFLYDGTYEEFRKKLRELGETPLPKELGREVEPEDEERYQTIYASNEGAVAAPVAGLHFSKHLLKRMEIKGIDVTSVTMHIGLGTFSPVEVEDLSKHKMDSEQAFISQETCNIVNKAIDEKRNICAVGTTTMRSLESAVSSDGHLNTFDGWTNKFIFPEYEFSIANAMITNFHNPKSTLMMQAAAFAGYDFLKKAYDVAMKEKYRFSTYGDAMLIID

SEQ ID NO: 69417 - protein, 350 aa, unidentified
  source 1..350: note = Nonlabens arenilitoris
  REGION 1..350: note = tr|A0A2S7UA79|A0A2S7UA79_9FLAO S-adenosylmethionine:tRNA ribosyltransferase-isomerase; OS = Nonlabens arenilitoris OX=1217969 GN=queA PE=3 SV=1
MKLSQFGYKLPENLIAQHPAENRDESRLMVLHKKTGEIEHKMFKDVLDYFEEDDVFVTNNTRVFPARLYGNKEKTGARIEVFLLRELNPTTKLWDVLVDPARKIRIGNKLYFGDDESLVAEVIDNTTSRGRTLRFLFDGSYEEFRQKLKDLGETPLPRELGREVEEEDEERYQTIYATNEGAVAAPVAGLHFSKHLLKRLEIKGIHRTAITMHIGLGTFAPVEVEDLSKHKMDSEQAEITEETCAIVNKAIDARKNVCAVGTTTMRTLESAVSSDGHLNTFDGWTNKFIFPPYDFSIANAMITNFHHPKSTLMMQAAAFAGYDLLKKAYDVAIKEEYKFSTYGDAMLIVD

SEQ ID NO: 69418 - protein, 350 aa, unidentified
  source 1..350: note = Nonlabens dokdonensis
  REGION 1..350: note = tr|L7WA76|L7WA76_NONDD S-adenosylmethionine:tRNA ribosyltransferase-isomerase OS=Nonlabens dokdonensis (strain DSM 17205 / KCTC 12402 / DSW-6) OX=592029 GN=queA; PE = 3SV=1
MKLSQFGYDLPEDRIAQHPAENRDESKLMVLHRKTGKIEHKMFKDVIDYFNEDDVFVFNDTKVFPARLYGNKEKTGARIEVFLLRELNPDTKLWDVLVDPARKIRIGNKLYFGEDESLVAEVIDNTTSRGRTLRFLYDGSYEEFRQALKELGETPLPKELNRDVEPEDEERYQTIFAEKEGAVAAPVAGLHFSKHLLKRLEIKGVKMTAVTMHIGLGTFAPVEVEDLSKHKMDSEQAFITQDTCDMVNKAIDTKRNVCAVGTTTMRTLESAVSSNGHLNTFAEWTNKFIFPPYDFTIANSMITNFHHPKSTLMMQAAAFAGYDFLNEAYEEALKNDYRFSTYGDAMLIID

SEQ ID NO: 69419 - protein, 350 aa, unidentified
  source 1..350: note = Nonlabens dokdonensis
  REGION 1..350: note = tr|A0A1Z8AH03|A0A1Z8AH03_9FLAO S-adenosylmethionine:tRNA ribosyltransferase-isomerase; OS = Nonlabens dokdonensis OX=328515 GN=queA PE=3 SV=1
MKLSQFGYDLPEDRIAQHPAENRDESKLMVLHRKTGEIEHKMFKDVIDYFNEDDVFVFNDTKVFPARLYGNKEKTGARIEVFLLRELNPDTKLWDVLVDPARKIRIGNKLYFGDDESLVAEVIDNTTSRGRTLRFLYDGSYEEFRQALKDLGETPLPKELNREVEPEDEERYQTIFAENEGAVAAPVAGLHFSKHLLKRLEIKGVNMTAVTMHIGLGTFAPVEVEDLSKHKMDSEQAFINQETCDMVNKAIDAKRNVCAVGTTTMRTLESAVSSNGHLNTFDEWTNKFIFPPYDFTIANSMITNFHHPKSTLMMQAAAFAGYDLLKEAYEVALKEDYRFSTYGDAMLIID

SEQ ID NO: 69420 - protein, 350 aa, unidentified
  source 1..350: note = Nonlabens marinus
  REGION 1..350: note = tr|W8VND0|W8VND0_9FLAO S-adenosylmethionine:tRNA ribosyltransferase-isomerase OS=Nonlabens marinus S1-08; OX = 1454201 GN=queA PE=3 SV=1
MKLSQFGYKLPEELVAKHPVENRDDSRLMVLHKKTGEIEHKMFKDIMDYFDEKDVFVMNDTKVFPARLYGNKEKTGARIEVFLLRELNPTTKLWDVLVDPARKIRIGNKLYFGEDESLVAEVIDNTTSRGRTLRFLYDGTYEEFRKKLRELGETPLPKELEREVEPEDEERYQTIYAKNEGAVAAPVAGLHFSKHLLKRMEIKGIITTSVTMHIGLGTFSPVEVEDLSKHKMDSEQAFITQETCNIVNEAIDKRRNICAVGTTTMRSLESAVSSDGHLNTFDGWTNKFIFPEYEFSIANSMVTNFHHPKSTLMMQAAAFAGYDFLKKAYDIAMKEKYRFSTYGDAMLIID

SEQ ID NO: 69421 - protein, 350 aa, unidentified
  source 1..350: note = Nonlabens sediminis
  REGION 1..350: note = tr|A0A090Q7M5|A0A090Q7M5_9FLAO S-adenosylmethionine:tRNA ribosyltransferase-isomerase; OS = Nonlabens sediminis OX=319236 GN=queA PE=3 SV=1
MKLSNFGYNLPQDRIAQYPEENRDESKLMVLHRKSGKIEHKLFKDVIDYFDEKDVFVMNDTKVFPARLYGNKEKTGARIEVFLLRELNPTTKLWDVLVDPARKIRIGNKLYFTEDDSLVAEVIDNTTSRGRTLRFLFDGTYEEFRKKLKDLGETPLPRELERDVEENDEERYQTIFAQNEGAVAAPVAGLHFSKHLLKRMEIKGIDVANVTMHIGLGTFAPVEVEDLSKHKMDSEQAFISQATCDAVNEAIDNKRNVVAVGTTTMRTLESSVSSDGHLNTYDGWTSKFIFPPYDFSIATAMITNFHPPKSTLMMQAAAFAGYDFLKEAYDIALKEGYRFSTYGDAMLIID

SEQ ID NO: 69422 - protein, 350 aa, Nonlabens sp.
  REGION 1..350: note = tr|A0A0Q0XRW9|A0A0Q0XRW9_9FLAO S-adenosylmethionine:tRNA ribosyltransferase-isomerase; OS = Nonlabens sp. YIK11 OX=1453349 GN=queA PE=3 SV=1
MKLSQFGYKLPEELIAQHPVENRDESRLMVLHKKTGEIEHKMFKDVIDYFDEKDVFVMNDTKVFPARLYGNKEKTGARIEVFLLRELNPTTKLWDVLVDPARKIRIGNKLYFGEDESLVAEVIDNTTSRGRTLRFLYDGTYEEFRKKLRELGETPLPKELGRDVEPEDEERYQTIYASNEGAVAAPVAGLHFSKHLLKRMEIKGIDVTSVTMHIGLGTFSPVEVEDLSKHKMDSEQAFISQETCNIVNKAIDEKRNICAVGTTTMRSLESAVSSDGHLNTFDGWTNKFIFPEYEFSIANAMITNFHHPKSTLMMQAAAFAGYDFLKKAYDVAMKEKYRFSTYGDAMLIID

SEQ ID NO: 69423 - protein, 350 aa, Nonlabens sp.
  REGION 1..350: note = tr|A0A2K8X6C5|A0A2K8X6C5_9FLAO S-adenosylmethionine:tRNA ribosyltransferase-isomerase; OS = Nonlabens sp. MB-3u-79 OX=2058134 GN=queA PE=3 SV=1
MKLSQFGFELPEDRIAQHPAENRDESKLMVLHRKTGEIEHKMFKDVIDYFNEDDIFVMNDTKVFPARLYGNKEKTGARIEVFLLRELNPETKLWDVLVDPARKIRIGNKLYFGEDENLVAEVIDNTTSRGRTLRFLYDGSYEEFRQALKELGETPLPKELNRDVEPEDEERYQTIFAEKEGAVAAPVAGLHFSKHLLKRLEIKGIKRTAVTMHIGLGTFAPVEVEDLSKHKMDSEQAFITQETCDIVNHAIDTRKNVCAVGTTTMRTLESAVSSDGHLNTFNEWTNKFIFPPYVFTIANSMITNFHHPKSTLMMQAAAFAGYDFLNEAYQVALKEGYKFSTYGDAMLIID

SEQ ID NO: 69424 - protein, 350 aa, unidentified
  source 1..350: note = Nonlabens spongiae
  REGION 1..350: note = tr|A0A1W6MMC0|A0A1W6MMC0_9FLAO S-adenosylmethionine:tRNA ribosyltransferase-isomerase; OS = Nonlabens spongiae OX=331648 GN=queA PE=3 SV=1
MKLSQFGFDLPEERIAKHPPLNRDESKLMVLHPKTGEIEHKMFKDVLDYFEEDDVFVMNDTKVFPARLYGNKEKTNARIEVFLLRELNPTTKLWDVLVDPARKIRIGNKLYFGEDESLVAEVIDNTTSRGRTLRFLYDGSYEEFRKALNDLGETPLPKELDRDVEEDDEERYQTIFAQNEGAVAAPIAGLHFSKHLLKRMEIKGVKRTSVTMHIGLGTFAPVEVEDLSKHKMDSEQAFITQETCDIVNKAIDNKKKICVVGTTTMRTMESSVSSDGHLNPFDGWTNKFIFPSYEFAIADAMITNFHPPKSTLMMQAAAFAGYDLLKKAYELAIKEEYNFSTYGDAMLIIY

SEQ ID NO: 69425 - protein, 350 aa, Nonlabens tegetincola; identical to SEQ ID NO: 69421
  REGION 1..350: note = tr|A0A2S7THR9|A0A2S7THR9_9FLAO S-adenosylmethionine:tRNA ribosyltransferase-isomerase; OS = Nonlabens tegetincola OX=323273 GN=queA PE=3 SV=1

SEQ ID NO: 69426 - protein, 350 aa, unidentified
  source 1..350: note = Nonlabens ulvanivorans
  REGION 1..350: note = tr|A0A090Q7R5|A0A090Q7R5_NONUL S-adenosylmethionine:tRNA ribosyltransferase-isomerase; OS = Nonlabens ulvanivorans OX=906888 GN=queA PE=3 SV=1
MKLSQFGYKLPENLIAQHPAENRDESRLMVLHKKTGEIEHKMFKDVLDYFEEDDVFVTNNTRVFPARLYGNKEKTGARIEVFLLRELNPTTKLWDVLVDPARKIRIGNKLYFGEDESLVAEVIDNTTSRGRTLRFLFDGSYEEFRQKLKDLGETPLPRELGREVEEEDEERYQTIYATNEGAVAAPVAGLHFSKHLLKRLEIKGIYRTAVTMHIGLGTFAPVEVEDLSKHKMDSEQAEITEETRAIVNKAIDNRKNVCAVGTTTMRTLESAVSSDGHLNTFDGWTNKFIFPPYDFSIANAMITNFHHPKSTLMMQAAAFAGYDLLKKAYDVAIKEEYKFSTYGDAMLIVD

SEQ ID NO: 69427 - protein, 350 aa, unidentified
  source 1..350: note = Nonlabens ulvanivorans
  REGION 1..350: note = tr|A0A084JT03|A0A084JT03_NONUL S-adenosylmethionine:tRNA ribosyltransferase-isomerase; OS = Nonlabens ulvanivorans OX=906888 GN=queA PE=3 SV=1
MKLSQFGYKLPENLIAQHPAENRDESRLMVLHKKTGEIEHKMFKDVLDYFEEDDVFVTNNTRVFPARLYGNKEKTGARIEVFLLRELNPTTKLWDVLVDPARKIRIGNKLYFGEDESLVAEVIDNTTSRGRTLRFLFDGSYEEFRQKLKDLGETPLPRELGREVEEEDEERYQTIYATNEGAVAAPVAGLHFSKHLLKRLEIKGIHRTAVTMHIGLGTFAPVEVEDLSKHKMDSEQAEITEETRAIVNKAIDNRKNVCAVGTTTMRTLESAVSSDGRLNTFDGWTNKFIFPPYDFSIANAMITNFHHPKSTLMMQAAAFAGYDLLKKAYDVAIKEEYKFSTYGDAMLIVD

SEQ ID NO: 69428 - protein, 350 aa, unidentified
  source 1..350: note = Nonlabens xylanidelens
  REGION 1..350: note = tr|A0A2S6ISC2|A0A2S6ISC2_9FLAO S-adenosylmethionine:tRNA ribosyltransferase-isomerase; OS = Nonlabens xylanidelens OX=191564 GN=queA PE=3 SV=1
MKLSQFGYDLPEDRIAQYPAENRDESKLMVLHKKTGEIEHKMFKDVIDYFNEDDIFVMNDTKVFPARLYGNKEKTGARIEVFLLRELNPETKLWDVLVDPARKIRIGNKLYFGDDESLVAEVIDNTTSRGRTLRFLYDGSYEEFRQALKDLGETPLPKELNREVEPEDEERFQTIFAKKEGAVAAPVAGLHFSKHLLKRLEIKGVKMATVTMHIGLGTFAPVEVEDLSKHKMDSEQAFITEETCAAVNEALDNKRNVCAVGTTTMRTLESAVSSNGRLNTFDEWTNKFIFPPYDFSIANSMITNFHPAKSTLMMQAAAFAGYDLLKKAYDVALKEDYKFSTYGDAMLIID

SEQ ID NO: 69429 - protein, 335 aa, unidentified
  source 1..335: note = Nonomuraea fuscirosea
  REGION 1..335: note = tr|A0A2T0MS34|A0A2T0MS34_9ACTN S-adenosylmethionine:tRNA ribosyltransferase-isomerase; OS = Nonomuraea fuscirosea OX=1291556 GN=B0I32_11597 PE=3; SV = 1
MTASLDFLLPPGLSATEPPEARGMARDAVRLMVSRGDAEPGHHHFSDLPRLLEPGDLIVVNNSATLPAAVRLDRLAVHFSTARNDGTWLVELRRRTSKASEPYAGGEPGEWLPLPGRATLRLIERETPRLWRAELDRDVQAYLRVHGTPIRYSYVERDWPIEAYQTVFATVPGSAEMPSAARPFTAELVTALVARGVGIAPITLHTGVASPEKDEPPYAERYEVPASTARLVNLTRANGGRVVAAGTTVVRALETAAGADGLVSAAAGWTRHVVTPEGGVRAVTGLITGLHEPRSSHLLMLTAIAGRPALARAYEAALREGYLWHEFGDTHLILK

SEQ ID NO: 69430 - protein, 335 aa, unidentified
  source 1..335: note = Nonomuraea gerenzanensis
  REGION 1..335: note = tr|A0A1M4DY49|A0A1M4DY49_9ACTN S-adenosylmethionine:tRNA ribosyltransferase-isomerase; OS = Nonomuraea gerenzanensis OX=93944 GN=BN4615_P1009 PE=3; SV = 1
MTAALDFSLPPGLSAHEPPEAKGMARDAVRLMVSRGDRDPSHHRFSDLPGLLDPGDLIVVNNSATLPAAVRLDRLAVHFSTVRPDGTWLVELRRRTAKGSEPYGGGEAGEWLPMPGRATLRLVGRETPRLWRAVLDRDVEAYLRVHGVPIRYSYVERDWPIEAYQTVFATVPGSAEMPSAARPFTVELVTALVARGIGIAPITLHTGVASTEKDEPPYAERYEVPAATAALVNLTRQNGGRVVAAGTTVVRALESAADADGHVTASAGWTGHIVTPEVGVRAVTGLITGLHEPRSSHLLMLTAIAGEAALARAYEEALRKGYLWHEFGDTHLILK

SEQ ID NO: 69431 - protein, 336 aa, Nonomuraea jiangxiensis
  REGION 1..336: note = tr|A0A1G9L3A5|A0A1G9L3A5_9ACTN S-adenosylmethionine:tRNA ribosyltransferase-isomerase; OS = Nonomuraea jiangxiensis OX=633440 GN=SAMN05421869_12765; PE = 3 SV=1
MTAALDFALPADLSAHEPPEARGLSRDSVRLMVSRGTLDPSHHHFSDLPELLAPGDLIVVNNSATLPAAVRLDRLAVHFSTSRQDGTWLVELRRRTSRATEPYGGGEPGEWLPLPGGATLRLLARETPRLWRAVLDQEVEPYLRAYGVPIRYSYVERDWPIEAYQTVFATVPGSAEMPSAARPFTADLVTALVARGVGIAPITLHTGVASPEKDEPPYAERYEVPASTARLVNSSKEGGNRVVAAGTTVVRALETAVGADGRVAAAAGWTRHVVTPERGVRAVTGLITGLHEPRSSHLLMLTAVAGPAALAKAYEAALREGYLWHEFGDTHLILRD

SEQ ID NO: 69432 - protein, 336 aa, Nonomuraea maritima
  REGION 1..336: note = tr|A0A1G9L9W3|A0A1G9L9W3_9ACTN S-adenosylmethionine:tRNA ribosyltransferase-isomerase; OS = Nonomuraea maritima OX=683260 GN=SAMN05421874_12479; PE = 3 SV=1
MTATLDFTLPPGLSAREPAEARGLARDAVRMLVSRGELEPSHHRFGDLPDLLDPGDLVVVNNSATLPAAVRLDRLAVHFSTAAPDGTWLVELRQRSGTATEPYAGGEPGEWLPMPGRATLRLIARETPRLWRATLDRDVEPYLRAHGVPIRYSYVDRDWPIEAYQTVFATVPGSAEMPSAARPFSAELVTALVAHGIGIAPITLHTGVASPEKDEPPYAERYEVPAATARLVGLALANGNRVVAAGTTVVRALETAADAPGHVTASSGWTRHVVTPETGVRAVTGLITGLHEPRSSHLLMLTAIAGAPALARAYDAALGAEYLWHEFGDTHLILKK

SEQ ID NO: 69433 - protein, 337 aa, Nonomuraea polychroma
  REGION 1..337: note = tr|A0A438MLN9|A0A438MLN9_9ACTN S-adenosylmethionine:tRNA ribosyltransferase-isomerase; OS = Nonomuraea polychroma OX=46176 GN=EDD27_9394 PE=3 SV=1
MTAPTLDFVLPPGLTAQEPPEARGMSRDAVRLMVSRGDLEPEHRRFAELPGLLDPGDLIVVNNSATLPAAVRLDRLAVHFSTAREDGTWLVELRRRTAKASEPYGGGEAGEWLPLPGRATLRLIERETPRLWRAALDRDVEAYLRAYGVPIRYSYVERDWPIDAYQTVFATVPGSAEMPSAARPFTTDLVTALVARGVGIAPITLHTGVASPEKDEPPYAERYEVPASTARLVNLARRNGNRVVAAGTTVVRALETAVDAAGRVTAAAGWTRHVVTPERGVRAVTGLITGLHEPRSSHLLMLTAIAGEEALARAYEEALRQGYLWHEFGDTHLILKK

SEQ ID NO: 69434 - protein, 335 aa, Nonomuraea pusilla
  REGION 1..335: note = tr|A0A1H7QV14|A0A1H7QV14_9ACTN S-adenosylmethionine:tRNA ribosyltransferase-isomerase; OS = Nonomuraea pusilla OX=46177 GN=SAMN05660976_02688 PE=3; SV = 1
MTAAPDFALPSELSAHEPPEARGLRRDGVRLLVSQGDLPPRHRRFTDLPALLEPGDLVVVNNSATLPAAVRLDRLAVHFSTAQEDGTWLVELRRRAGRSYEPYRGGEPGEWLPLPGRATLRLLGRVTPRLWRAALDRDVEPYLSAYGVPIRYSYVERDWPIDAYQTVFAAVPGSAEMPSAGRPFSAELVTALVSRGVTVAPVTLHTGVASPEKDEPPYAERFDVPASTARLVNLARENGNRVVASGTTVVRALETAVDGDGRVAAASGWTTHLVTPETGVRAVTGLITGLHEPRSSHLLMLTAIAGERVLARAYEEALRAGYLWHEFGDTHMILD

SEQ ID NO: 69435 - protein, 336 aa, unidentified
  source 1..336: note = Nonomuraea solani
  REGION 1..336: note = tr|A0A1H6CQ64|A0A1H6CQ64_9ACTN S-adenosylmethionine:tRNA ribosyltransferase-isomerase; OS = Nonomuraea solani OX=1144553 GN=SAMN05444920_104230; PE = 3 SV=1
MTAALDFSLPPGLSAHEPPEARGMARDAVRLMVSRGDLDPAHHHFSDLPNLLDPGDLIVVNNSATLPAAVRLDRLAVHFSTVARDGTWLVELRRRTAKGSEPYGGGEPGEWLPMPGRATLRLIERETPRLWRAVLDRDVEAYLRVHGAPIRYSYVERDWPIEAYQTVFATVPGSAEMPSAARPFTADLVTALVARGIGIAPITLHTGVASPEKDEPPYAERYEVPAATARLVNLARQNGGRVVAAGTTVVRALETAVGANGLVTAAQGWTGHVVTPESGVRAVTGLITGLHEPRSSHLLMLTAVAGEPALARAYEEALRNGYLWHEFGDTHLILQK

SEQ ID NO: 69436 - protein, 364 aa, Nonomuraea sp.
  REGION 1..364: note = tr|A0A5C8JFI0|A0A5C8JFI0_9ACTN S-adenosylmethionine:tRNA ribosyltransferase-isomerase; OS = Nonomuraea sp. C10 OX=2600577 GN=FR742_39470 PE=3 SV=1
MTRPTTPPETPPATTATTTATTTTVTAEAANAAFDFVLPPALSAQEPPEARGVGRDGVRLLVSAGDGEPAHHRFTDLPGLLDPGDLIVVNNSATLPAAVRLDRLAVHFSTARPDGTWLVELRRRTATATEQYRGGAPGEWLPLPGGATLRLVGRETPRLWRAVLDRDVETYLRGYGAPIRYAYVTRDWPIEAYQTVFATVPGSAEMPSAARPFTPELVTALVARGVGIAPITLHTGVASPEKDEPPYAERYAVPEATARLVDLTLGSGRRVVAAGTTVVRALETAAAGGLVTASEGWTSHVVTPATGVRAVTGLITGLHEPRSSHLMMLTAIAGERPLRAAYEAALRERYLWHEFGDAHLILRT

SEQ ID NO: 69437 - protein, 342 aa, Nonomuraea sp.
  REGION 1..342: note = tr|A0A4R5EJT3|A0A4R5EJT3_9ACTN S-adenosylmethionine:tRNA ribosyltransferase-isomerase; OS = Nonomuraea sp. 6K102 OX=2530382 GN=E1295_36845 PE=3 SV=1
MTASLTGALDFSLPPGLAAHEPPEARGTARDAVRLMVSRGDLDPGHHRFADLPRLLDPGDLIVVNNSATLPAAVRLDRLAVHFSTAREDGTWLVELRRRTPRASEPYGGGEPGEWLPLPGRATLRLIERETPRLWRAELDRDVKRYLRVHGVPIRYSYVERDWPIEDYQTVFATVPGSAEMPSAARPFTADLVAALVARGIGIAPITLHTGVASPEKDEPPYAERYDVPGHTARLVNLTRENGNRVVAAGTTVVRALETAAAGGADGRVAASAGWTRHIVTPEHGVRAVTGLITGLHEPRSSHLLMLSAIVGESVLARAYEAALRERYLWHEFGDTHLILQH

SEQ ID NO: 69438 - protein, 336 aa, Nonomuraea wenchangensis
  REGION 1..336: note = tr|A0A1I0LKT3|A0A1I0LKT3_9ACTN S-adenosylmethionine:tRNA ribosyltransferase-isomerase; OS = Nonomuraea wenchangensis OX=568860; GN = SAMN05421811_117168 PE=3 SV=1
MTAPALDFELPPGLSAQEPPEVRGRSRDDVRLLVSNGERAPEHRRFRDLPDLLGPGDLLVVNNSATLPAAVRLDRLAVHFSTAREDGTWLVELRRRTGRASEPYAGGEPGEWLPLPGRATLRLIGRETPRLWRAELDRDVEAYLRAYGVPIRYSYVVGEWPIEAYQTVFSTVPGSAEMPSAARPFTEALVTALVARGVGIAPITLHTGVASPEKDEPPYAERYEVPAATARLVELARESGTRVVAAGTTVVRALESAVGADGRVRAASGWTRHLVTPERGVRAVTGLLTGLHEPRSSHLLMLTAIAGEKALAGAYEAALREGYLWHEFGDTHLILK

SEQ ID NO: 69439 - protein, 340 aa, unidentified
  source 1..340: note = Nosocomiicoccus massiliensis
  REGION 1..340: note = tr|A0A2J6NH22|A0A2J6NH22_9STAP S-adenosylmethionine:tRNA ribosyltransferase-isomerase; OS = Nosocomiicoccus massiliensis OX=1232430 GN=queA PE=3; SV = 1
MKLTDFDFHLPESLIAQHPLKNRTDSKLLVLDRETGEMEDRHFYNIIDYLKKDDVLVLNNTRVLPARLHGHKKDSGGHVEMLLLNPETNGYKVLIKPARRVHVGTEIVFGDGELTATPLEKHDNGIYIVKLQYDGILEEVLDGLGEMPLPPYIKAQLEDNERYQTVFSKHSGSAAAPTAGLHFTTELLSQIKEKGVDIVYITLHVGLGTFRPVAVENVEEHDMHSEFYSIEKSTAKRLNEAKEKGHRIISVGTTSTRTLEANFRTYKKFVATSDWTDIFIYPGQDILSVDGLITNFHLPKSTLLMLVSTVSTRENILKAYNHAVEKEYRFFSFGDAMLII

SEQ ID NO: 69440 - protein, 372 aa, unidentified
  source 1..372: note = Nostoc azollae
  REGION 1..372: note = tr|D7E324|D7E324_NOSA0 S-adenosylmethionine:tRNA ribosyltransferase-isomerase OS=Nostoc azollae (strain 0708) OX=551115 GN=queA PE=3 SV=1
MSNLEIQDVDLDRSLSGYDYELPPELIAQNPAVPRDTSRLLVVNSPNIGEEIPALNHIFRDLPDLLQPGDLLVMNNTKVMPARLYGRKLTGAEVEVLLLEEKQPNCWLALVKPGKHFKVGTKIIFGGNKLGRAKHPATTNDDELMAIVVDKDTATGGRLLQFDLPEYRSLVQVLENFGEIPLPPYITGSTAADEQYQTVYAQQTGAIAAPTAGLHFTPELLEKLRARGINQAFLTLHVGVGTFRPVEVEDVTTHQMHSEWIEVNSATVEEIRATKAAGGRIIAIGTTVVRALEGAAQSGDLQPYVGKVNLFIYPGYQWQVVEGLITNFHLPRSSLLMLVSALIGRERLLKIYQQAIASQYRFYSFGDAMLIL

SEQ ID NO: 69441 - protein, 417 aa, Nostoc calcicola
  REGION 1..417: note = tr|A0A1U7IPH6|A0A1U7IPH6_9NOSO S-adenosylmethionine:tRNA ribosyltransferase-isomerase; OS = Nostoc calcicola FACHB-389 OX=1357508 GN=queA PE=3 SV=1
MKQKILQFDLSNTSSSQAKNLELDCSVAGYDYELPPELIAQNPAFPRDSSQLLVVNSPTTGIDTAPLNQIFRDLPALLRSGDLLVMNNTKVIPARLYGHKSTGAQIEVLLLEERQHNCWLALVKPGKRFKQGAKIIFAVKGDEGVAGDEGVAGDEGENTTSSPSSPSSSSSPSSSSSPSSPHLLTATVLETDTATGGRLLQFDVPEGKSLLQLLEVFGELPLPPYITASEAADEQYQTVYAQQPGAIAAPTAGLHFTPELLQKLRDRQINQAFVTLHVGVGTFRPVEVEDVTTHQMHEEWIEVPPATVEQIRATKADGGRIIAVGTTAVRALEGAAQSGDLEPFCGKTNLFIYPGYQWRVVDGLITNFHLPRSSLLMLVSALIGRERLLNIYHEAIASRYRFYSFGDAMLILPEGVG

SEQ ID NO: 69442 - protein, 384 aa, unidentified
  source 1..384: note = Nostoc carneum
  REGION 1..384: note = tr|A0A1Z4HYI3|A0A1Z4HYI3_9NOSO S-adenosylmethionine:tRNA ribosyltransferase-isomerase; OS = Nostoc carneum NIES-2107 OX=1973483 GN=queA PE=3 SV=1
MEQQLTPAALTPDSNNDVVNTELDRSLSAYDYELPTELIAQNPAIPRDSSRLLVVNSRSIHHTFRDLPHLLKAGDLLVMNNTSVIPARLYGRKATGAEIEVLLLEERQYNCWLALVKPGKRFKVGSKIIFAPRRAFQPGSKGAGEDEEVNSSLSLTATVLETDPATGGRLLQFDVPGGVPLVQVLDVFGEVPLPPYITASEATDEQYQTVYAQHPGAIAAPTAGLHFTPELLETLRDRGINQAFITLHVGVGTFRPVEVEDVTTHQMHEEWIEVPAATVEQIRATKAAGGRVIAVGTTAVRSLEGAAQSGELQPFCGKTNLFIYPGYQWRVVDGLITNFHLPRSSLLMLVSALIGRERLLNIYQEAIAARYRFYSFGDAMLILP

SEQ ID NO: 69443 - protein, 401 aa, Nostoc commune
  REGION 1..401: note = tr|A0A2R5FKN9|A0A2R5FKN9_NOSCO S-adenosylmethionine:tRNA ribosyltransferase-isomerase; OS = Nostoc commune NIES-4072 OX=2005467 GN=queA PE=3 SV=1
MKDTSRPQEKDFELDCSVAGYDYELPPELIAQNPAVPRDSSRLLVVDSPTTGIETPPLHHIFHDLPGLLRSGDLLVMNNTRVIPARLYGHKSTGGKIQVLLLEERQYNCWLALVKPGKSFKHGTKIIFEARQAETRGWGLEIGDWEDSSLVPSPQSSVSSPQLTATVLETDAATGGRLLQFDVPEGKSLIQLLEVFGEVPLPPYITTSEAADEQYQTVYAKQPGAIAAPTAGLHFTPELLQKLRDRNIHQAFITLHVGVGTFRPVEVEDVTTHQMHEEWIEVPAATVEQIRATKAAGGRIIAVGTTAVRALEGAAQSGNLQSFCGKTDLFIYPGYQWRVVDGLITNFHLPRSSLLMLVSALIGRQRLLNIYNEAIAFGYRFYSFGDAMLILPSSMGVGRRD

SEQ ID NO: 69444 - protein, 390 aa, unidentified
  source 1..390: note = Nostoc cycadae
  REGION 1..390: note = tr|A0A2H6LIH3|A0A2H6LIH3_9NOSO S-adenosylmethionine:tRNA ribosyltransferase-isomerase; OS = Nostoc cycadae WK-1 OX=1861711 GN=queA PE=3 SV=1
MEPAITQGNFNKVTATGVEEVNLDCSLIGYDYVLPPELIAQNPAVPRDSSRLLVVNSAATGRDSAPLHHIFRDLPELLRPGDLLVMNNTRVIPARLYGNKSTGAEIEVLLLEERQHNCWLALVKPGKRFKSGSQIIFSGKGLENDSSTPQLTATVLETDAATGGRLLQFDVPPGKSLVELLDKFGEIPLPPYITTSAAADEQYQTVYAEQPGAIAAPTAGLHFTPELLEKLRDRNIHQAFVTLHVGVGTFRPVEVEDVTTHAMHEEWIEVPAATVEQIRATQAAGGRIIAVGTTVVRSLEGAAQSGQLQPFCGKTNLFIYPGYQWRVVEGLITNFHLPRSSLLMLVSALIGRQRLLKIYQEAIASRYRFYSFGDAMLILPEGREMLSAEC

SEQ ID NO: 69445 - protein, 387 aa, unidentified
  source 1..387: note = Nostoc flagelliforme
  REGION 1..387: note = tr|A0A2K8SZH2|A0A2K8SZH2_9NOSO S-adenosylmethionine:tRNA ribosyltransferase-isomerase; OS = Nostoc flagelliforme CCNUN1 OX=2038116 GN=queA PE=3 SV=1
MKDTSRPQEKDFELDCSVAGYDYELPPELIAQNPAVPRDSSRLLVVDSPTTGIETAPLHHIFHDLPALLRSGDLLVMNNTRVIPARLYGHKSTGGKIQVLLLEERQYNCWLALVKPGKSFKQGTKIIFDVRQLRIGDLEDSYPVKNPQLTATVLETDAATGGRLLQFDVPEGKSLVQLLEVFGEIPLPPYITTSSAADDQYQTVYAKQPGAIAAPTAGLHFTPELLQKLRDRNINQAFITLHVGVGTFRPVEVEDVTTHQMHEEWIEVPAATVEQIRATKAAGGRIIAVGTTAVRALEGAAQSGNLQPFCQKTDLFIYPGYQWRVVDGLITNFHLPRSSLLMLVSALIGRQRLLNIYNEAIAFGYRFYSFGDAMLILPSAVGVLSQA

SEQ ID NO: 69446 - protein, 433 aa, unidentified
  source 1..433: note = Nostoc linckia
  REGION 1..433: note = tr|A0A2C6W4J1|A0A2C6W4J1_NOSLI S-adenosylmethionine:tRNA ribosyltransferase-isomerase; OS = Nostoc linckia z16 OX=1628751 GN=queA PE=3 SV=1
MKREISQIHLNNTFSSQTKDLELDCSVAGYDYELPPELIAQNPVFPRDSSQLLVVDSPTTGMETPPLNHIFRDLPALLRCGDLLVMNNTKVIPARLYGHKSTGAQIEVLLLEERQDNCWLALVKPGKRFKQGARIVFDVRGAREEDAGTGGRGDAGNGKATSDQRENSSPAYPTLSTSVSSFSVSEGLSVPVSSPYLTATVLETDAATGGRLLQFDVPEGKSLVQLLEVFGEVPLPPYITASAAGDEQYQTVYAQKPGAIAAPTAGLHFTPELLQKLRDRQINQAFVTLHVGVGTFRPVEVEDVTTHQMHEEWIEVPATTVEQIRATKAAGGRIIAVGTTVVRALEGAAQSGNLEPFCGKTNLFIYPGYQWQVVDGLITNFHLPRSSLLMLVSALIGRQRLLNIYKQAIASQYRFYSFGDAMLILPEAVGHAI

SEQ ID NO: 69447 - protein, 402 aa, unidentified
  source 1..402: note = Nostoc linckia
  REGION 1..402: note = tr|A0A1Z4L3A1|A0A1Z4L3A1_NOSLI S-adenosylmethionine:tRNA ribosyltransferase-isomerase; OS = Nostoc linckia NIES-25 OX=1091006 GN=queA PE=3 SV=1
MKQKISQINLNNTFSSQTHDLELDCSVAGYDYELPPELIAQNPAFPRDSSQLLVVNSPTTGIETAPLNHVFRDLPALLRSGDLLVMNNTKVIPARLYGNKSTGAQIEVLLLEERQHNCWLALVKPGKRFKPGAKISFEVRQLGIRDSETSPVPSKESPVNSHQLTATVLETDAATGGRLLQFDLPEGKSLVQLLEFFGEVPLPPYITASEAADEQYQTVYAQKPGAIAAPTAGLHFTPELLQKLCDRQINQAFVTLHVGVGTFRPVEVEDVTTHQMHEEWIEVPANTVEQIRATKAAGGRIIAVGTTVVRALEGAAHSGHLEPFCGKTNLFIYPGYQWRVVDGLITNFHLPRSSLLMLVSALIGRQRLLNIYNEAIASRYRFYSFGDAMLILPEAVTALSQR

SEQ ID NO: 69448 - protein, 404 aa, Nostoc minutum
  REGION 1..404: note = tr|A0A367R578|A0A367R578_9NOSO S-adenosylmethionine:tRNA ribosyltransferase-isomerase; OS = Nostoc minutum NIES-26 OX=1844469 GN=queA PE=3 SV=1
MEQQIAHSNLDRSSIPEAKDMNLDCLLAGYDYELPSELIAQNPAFPRDSSRLLVVNSYTTGNETAPLDQIFRDLPELLHPGDLLVMNNTQVIPARLYGRKSTGAEIEVLLLEERQYNCWLALVKPGKRFKRGARIIFEAGGVGAREQGSKGGSSSSSSSSSSPHLLSATVLETDEATGGRLLQFDVPEGKPLVQLLDAFGEIPLPPYITSSVAADEQYQTVYAQQPGAIAAPTAGLHFTPELLEKLRDRGINQAFVTLHVGVGTFRPVEVEDVTSHHMHEEWIEVPAATVEQIRATKAAGGRIIAVGTTAVRALEGAAQSGDLQSFCGKTNLFIYPGYQWRVVDGLITNFHLPRSSLLMLVSALIGRQRLLNIYKQAIASRYRFYSFGDAMLILPQAVRVLSSE

SEQ ID NO: 69449 - protein, 384 aa, unidentified
  source 1..384: note = Nostoc piscinale
  REGION 1..384: note = tr|A0A0M4SPN3|A0A0M4SPN3_9NOSO S-adenosylmethionine:tRNA ribosyltransferase-isomerase; OS = Nostoc piscinale CENA21 OX=224013 GN=queA PE=3 SV=1
MEPAITKENFNKVTDTGVEDRQLDCSLTGYDYILPPELIAQNPVVPRDSSRLLVINSTATGNNLAPLHHIFRDLPELLHPGDLLVMNNTKVIPARLYGNKSTGAEIEVLLLEERQNNCWLALVKPGKRFKLGSHIIFSGKNSSTPQLTATVLENDAATGGRLLQFDVPPGKSLVELLDNFGEIPLPPYITTTAAADEQYQTVYAKQPGAIAAPTAGLHFTPELLKKLRDRNIHQAFVTLHVGVGTFRPVEVEDVTTHEMHEEWIEVPAVTVEQIRATKAAGGRIIAVGTTVVRSLEGAAQSGELQPFCGKTNLFIYPGYQWRVVDGLITNFHLPRSSLLMLVSALIGRPRLLQIYQEAIASRYRFYSFGDAMLILPEGREKYEV

SEQ ID NO: 69450 - protein, 401 aa, unidentified
  source 1..401: note = Nostoc punctiforme
  REGION 1..401: note = tr|B2IUS4|B2IUS4_NOSP7 S-adenosylmethionine:tRNA ribosyltransferase-isomerase OS=Nostoc punctiforme (strain ATCC 29133 / PCC 73102) OX=63737 GN=queA PE=3 SV=1
MKDTSSPKEKNFELDCSVAGYDYTLPPELIAQNPAVPRDSSRLLVVNSPTTGAETEASHHIFHDLPALLRSGDLLVMNNTRVIPARLYGHKTTGAKIQVLLLEERQYNCWLALVKPGKSFKQGTKIIFEAKQRIGDSKEAEGRSAGGRGENSSPCSLDFSPVTSQQLTATVLETDAATGGRLLQFDVPEGKPLVQLLEVFGEVPLPPYITASSAADEQYQTVYAEQPGAIAAPTAGLHFTPQLLQKLRDRNINQAFVTLHVGVGTFRPVEVEDVTTHQMHEEWIEVPAATVEQIRATKAAGGRIIAVGTTAVRALEGAAKSGNLQAFCGKTDLFIYPGYQWRVVDGLITNFHLPRSSLLMLVSALIGRERLLNIYNEAIASKYRFYSFGDAMLILPEAIKS

SEQ ID NO: 69451 - protein, 408 aa, unidentified
  source 1..408: note = Nostoc punctiforme
  REGION 1..408: note = tr|A0A367R5A2|A0A367R5A2_NOSPU S-adenosylmethionine:tRNA ribosyltransferase-isomerase; OS = Nostoc punctiforme NIES-2108 OX=1356359 GN=queA PE=3; SV = 1
MKQKLVQANLKDTSSPQEKDLELDCSVAGYDYKLPPELIAQNPAVPRDSSRLLVINSPTTGIEAAPLHHIFHDLPALLRSGDLLVMNNTRVIPARLYGYKSTGAKIQVLLLEERQHNCWLALVKPGKSFKRGAKIIFEPREAGIGHSKEAEGRGAGGRGENSPLLLAPSPQLTATVLETDAATGGRLLQFDVPEGKTLVELLEVFGEVPLPPYITTSEAADEQYQTVYAKQPGAIAAPTAGLHFTPELLQKLRDRQINQAFVTLHVGVGTFRPVEVEDVTTHQMHEEWIEVPAATVEQIRATKAAGGRIIAVGTTAVRALEGAAQSGNLQPFCGKTDLFIYPGYQWRVVDGLITNFHLPRSSLLMLVSALIGRQRLLNIYNEAIAFGYRFYSFGDAMLILPSAVGVGS

SEQ ID NO: 69452 - protein, 397 aa, Nostoc sp.
  REGION 1..397: note = sp|Q8YW18|QUEA_NOSS1 S-adenosylmethionine:tRNA ribosyltransferase-isomerase OS=Nostoc sp. (strain PCC 7120 / SAG 25.82 / UTEX 2576) OX=103690 GN=queA PE=3 SV=1
MKKQILQLNLEQTSSAAAEDTNLDCSLAGYDYVLPPERIAQNPAVPRDSSRLLVVNSQTTGKETPPLHQIFRDLPDILRPGDLLIMNNTKVIPARLYGRKSSGAEVEILLLEERKFNCWLALVKPGKRFKKGTQIIFEGLGMRNLGIENSPQYSVASPHQLTATVLETDKATGGRLLQFDLPEGQSLVQLLDKFGEIPLPPYITTSQAADEQYQTVYAEEPGAIAAPTAGLHFTPELLQKLRDRNINQAFITLHVGVGTFRPVEVEDVATHQMHEEWIEVPAATVAQIKATKAAGGRIIAVGTTVVRALEGAAASGNLQEFCGKTNLFIYPGYKWQVVEGLITNFHLPRSSLLMLVSALIGRERLLNIYQEAIASQYRFYSFGDAMLILPEARGVEQ

SEQ ID NO: 69453 - protein, 391 aa, Nostoc sp.
  REGION 1..391: note = tr|K9QXF4|K9QXF4_NOSS7 S-adenosylmethionine:tRNA ribosyltransferase-isomerase OS=Nostoc sp. (strain ATCC 29411 / PCC 7524) OX=28072 GN=queA PE=3 SV=1
MEQQLSQVNHNPISNQAAQVTNLDSSLAGYDYELPPELIAQNPVIPRDSSRLLVVDSPTTGQDSAPLHHIFRDLADILRSGDLLIMNNTKVIPARLYGRKSTGAEVEILLLEERQHNCWLALVKPGKRFKKGSKIFFESGRLGLYSAPSPQLTATVLETDKATGGRLLQFDVPEGQSLVQILDKFGEIPLPPYITASQAADEQYQTVYAEQPGAIAAPTAGLHFTPELLEKLRDRHINQAFITLHVGVGTFRPVEVEDVTSHQMHEEWIEVPADTVEQIRATKQAGGRIIAVGTTVVRALEGAAACGDLQPFCGKTNLFIYPGYQWRVVEGLITNFHLPRSSLLMLVSALIGRERLLNIYQEAIASRYRFYSFGDAMLILPEAKGVVSAES

SEQ ID NO: 69454 - protein, 400 aa, unidentified
  source 1..400: note = Nostocales cyanobacterium
  REGION 1..400: note = tr|A0A1Y0RNA5|A0A1Y0RNA5_9CYAN S-adenosylmethionine:tRNA ribosyltransferase-isomerase; OS = Nostocales cyanobacterium HT-58-2 OX=1940762 GN=queA; PE = 3 SV=1
MQQKLVKNNLNSISSPQKEDVELDICLSGYDYELPQELIAQNPVVPRDSSRLLVVNSPSTGRESVPLNYIFRDLPELLKPKDLLVMNNTRVIPARLYGRKSTGAEVEVLLLEERQHNCWLALVKPGKRFKQGAKIIFEARRVGEVEGVRGEKAPLSSRLSQPSLTATVLETDEATGGRPLQFDLPEGISLVQLLDIFGEVPLPPYITGSDAQHEQYQTVYAKTPGAVAAPTAGLHFTPELLEQLRDRGIHQAFVTLHVGVGTFRPVEVEDIKTHKMHEEWIEVPSSTVEQIRATQASGGRVIAVGTTVVRALEGAAAQGELQPFCGKTNLFIYPGYQWRVVEGLITNFHLPRSSLLMLVSALIGRQRLLNIYQYAVESRYRFYSFGDAMLILPEGKSAEF

SEQ ID NO: 69455 - protein, 362 aa, unidentified
  source 1..362: note = Notoacmeibacter marinus
  REGION 1..362: note = tr|A0A231UY82|A0A231UY82_9RHIZ S-adenosylmethionine:tRNA ribosyltransferase-isomerase; OS = Notoacmeibacter marinus OX=1876515 GN=queA PE=3 SV=1
MKTDLFDFDLPESAIALRPAEPREAARLLLVRPEAAAPFTDRTIADLPDLLQPGDALVFNDTKVIPAQLEGVRQREGAPDARIGATLHMRLDASRWNAFVRGARKLQPGDRIRFGHRNTSCLLGALDATVEQKAQSGEVTLAFDLSGAALDEALHAGGRIPLPPYISGKRAVDEQDRSDYQTIYAREDGAVAAPTAGLHFTPELMARLEAAGIERHFVTLHVGAGTFLPVKADETSEHVMHSERGTLTAQTADALNAVRERGGRIVAVGTTSLRLLESAAGEDGRLAAWSGATDIFITPGYRFRVIDALMTNFHLPRSTLFMLVSAFSGLDRMQAAYHHAIESGYRFYSYGDSSLLFRNDDP

SEQ ID NO: 69456 - protein, 361 aa, unidentified
  source 1..361: note = Notoacmeibacter sp.
  REGION 1..361: note = tr|A0A3L7JFE4|A0A3L7JFE4_9RHIZ S-adenosylmethionine:tRNA ribosyltransferase-isomerase; OS = Notoacmeibacter sp. M2BS9Y-3-1 OX=2448481 GN=queA PE=3; SV = 1
MKTDLFDFDLPEHAIALRPAEPREAARLLEVRPGAPDALNDARIKDLPDILRPGDALVFNDTKVIPAQLEGVRQREGALPARISATLHMRLDLARWKAFVRGAKKLQPGDRILFGSAQSADPSGVLSAAVEEKGDGGETTLVFDLSGAALDEALHALGEVPLPPYISGKRTADERDRADYQTIYARENGAVAAPTAGLHFTDAMMERLDSAGIERHFVTLHVGAGTFLPVKVENTNDHVMHSERGTLSGETAEALNRVRANGGRVVAVGTTSLRLLESAADEAGQLSAWSGATDIFITPGYRFRVIDVLMTNFHLPRSTLFMLVSAFSGLDTMQAAYSHAIAEGYRFYSYGDACLLFRKDI

SEQ ID NO: 69457 - protein, 342 aa, unidentified
  source 1..342: note = Novibacillus thermophilus
  REGION 1..342: note = tr|A0A1U9K590|A0A1U9K590_9BACL S-adenosylmethionine:tRNA ribosyltransferase-isomerase; OS = Novibacillus thermophilus OX=1471761 GN=queA PE=3 SV=1
MDVSQFDFDLPERLIAQTPLAERSESRLLVLRREDGSIRHRRFQDIVEFLQPGDVLVLNDSKVIPARLIGSKADTGAKIELLLLKQLQGDRWETLVKPAKRIKAGTKVVFGQGELVAVAEEEGEAPGGRIFRLEYDGVLMELLNRLGQMPLPPYIKKQLDDPDRYQTVYARHPGSAAAPTAGLHFTPELLNRIEQRGVNIAAITLHVGLGTFRPVTADRVEDHRMHAEYYDVSREAAEAVNKAKANGRRVVAVGTTSCRTLESIADDEGTVYARSGWTDIFIYPGYTFRAVDALITNFHLPKSTLVMLVSAFAGRELTMKSYREAVREEYRFFSFGDAMLII

SEQ ID NO: 69458 - protein, 340 aa, unidentified
  source 1..340: note = Noviherbaspirillum autotrophicum
  REGION 1..340: note = tr|A0A0C2BJ35|A0A0C2BJ35_9BURK S-adenosylmethionine:tRNA ribosyltransferase-isomerase; OS = Noviherbaspirillum autotrophicum OX=709839 GN=queA PE=3; SV = 1
MYSLSDFDFDLPQELIAQLPLPQRSASRLLHVDGDALVDRAFADLVGLLAPGDLLVFNDTRVLKARFFGVKETGGKVEVLVERVLDNRTVHAQVRASKSPQAGSRIRLSDAFDVVVGERAGEFYTLQFPSDVFDLIEAHGRLPLPPYIEHAADDFDEQRYQTVYAKQPGAVAAPTAGLHFDQPLLDALRDKGVQFAYVTLHVGAGTFQPVRVENLAEHKMHSEWYTILPETVDAVRAAKDGGGNVIAVGTTSMRALESASQSGRLQAGSGDTSLFITPGYVFKTVDRLITNFHLPKSTLLMLVSAFAGYQRIRTAYAHAIEKRYRFFSYGDAMLLTNTSC

SEQ ID NO: 69459 - protein, 341 aa, unidentified
  source 1..341: note = Noviherbaspirillum denitrificans
  REGION 1..341: note = tr|A0A254TFY7|A0A254TFY7_9BURK S-adenosylmethionine:tRNA ribosyltransferase-isomerase; OS = Noviherbaspirillum denitrificans OX=1968433 GN=queA; PE = 3 SV=1
MYSLSDFDFDLPQELIAQLPLPERSASRLLHVDSGGLVDRSFSEIVDQLSPGDLLVFNNTRVLKARFFGAKDSGGKVEVLVERVLDTRHVLAQVRASKSPKAGSTIRLADAFDVVVGERAGEFYTLEFPADVFDLIEAHGRLPLPPYIEHAADDFDEKRYQTVYAKEPGAVAAPTAGLHFDQALLDRVREKGVQFAYVTLHVGAGTFQPVRTENLAEHKMHSEWYTIPPETVDAVRAVRSAGSKVVAVGTTSMRALESASQSGELVAGSADTNLFITPGYTFKTVDRLITNFHLPKSTLLMLVSAFAGYQQIRAAYAHAIEKRYRFFSYGDAMLLTRNEQC

SEQ ID NO: 69460 - protein, 339 aa, unidentified
  source 1..339: note = Noviherbaspirillum humi
  REGION 1..339: note = tr|A0A239K994|A0A239K994_9BURK S-adenosylmethionine:tRNA ribosyltransferase-isomerase; OS = Noviherbaspirillum humi OX=1688639 GN=queA PE=3 SV=1
MYSLSDFDFYLPSELIAQTPLAERSASRLLQVQGNALADRHFADIVDLLQPGDLLVFNDTRVLKARFFGAKASGGKVEVLVERILDSRTVHAQVRASKTPGPGTTLRLADAFDVTVGERAGEFFTLAFPGDVFELIDRHGRLPLPPYIEHDADEFDERRYQTVYAREPGAVAAPTAGLHFDEALLDKLRARGVNLAFVTLHVGAGTFQPVRVENLAEHKMHSEWYTISRETVDAVRAARTAGRDVIAVGTTSLRALESASRGGELQPGSDDTNLFITPGYTFRTVTRLITNFHLPKSTLMMLVSAFAGYDEIRRAYAHAIAQRYRFFSYGDAMLLTRNS

SEQ ID NO: 69461 - protein, 338 aa, unidentified
  source 1..338: note = Noviherbaspirillum sp.
  REGION 1..338: note = tr|A0A3A3G2U2|A0A3A3G2U2_9BURK S-adenosylmethionine:tRNA ribosyltransferase-isomerase; OS = Noviherbaspirillum sp. K1S02-23 OX=2320865 GN=queA PE=3; SV = 1
MYSLSDFDFDLPPELIAQIPLASRSASRLLEVDGSRLADWHFADIVDLLSPGDLLVFNDTRVLKARFFGVKQSGGKVEVLIERILDNRTVHAQVRASKSPQPGSTIRLADAFDVTVGERAGEFFTLGFPSDVFELVEAHGRLPLPPYIAHAADDFDEERYQTVYAKAPGAVAAPTAGLHFDQALLARLRARGVQTAFVTLHVGAGTFQPVRHENLAEHKMHSEWYTIAQETVDAVRAAQAAGRAVVAVGTTSLRALESASQSGSLQAGSADTRLFITPGYVFKTVTRLVTNFHLPKSTLLMLVSAFAGYDAIRAAYAHAIAQKYRFFSYGDAMLLSRV

SEQ ID NO: 69462 - protein, 340 aa, unidentified
  source 1..340: note = Noviherbaspirillum sp.
  REGION 1..340: note = tr|A0A5B8NDA5|A0A5B8NDA5_9BURK S-adenosylmethionine:tRNA ribosyltransferase-isomerase; OS = Noviherbaspirillum sp. UKPF54 OX=2601898 GN=queA PE=3; SV = 1
MYSLSDFDFDLPQELIAQVPLPQRSASRLLHVDGDALVDRAFADIVGLIAPGDLLVFNDTRVLKARFFGTKETGGKVEVLIERVLDNRTVHAQVRASKSPHAGSKIRLAEAFDVTVGERAGEFYTLQFPSDVFDLIEAHGRLPLPPYIEHAADEFDEQRYQTVYAKEPGAVAAPTAGLHFDQPLLDALRDKGVRFAYVTLHVGAGTFQPVRTENLAEHKMHSEWYTTPQETVDAVRAAKAAGRNVVAVGTTSMRALESASQSGQLLAGSGDTSLFITPGYVFKTVDRLITNFHLPKSTLLMLVSAFAGYPRIRTAYAHAIEKRYRFFSYGDAMLLTNTSC

SEQ ID NO: 69463 - protein, 342 aa, unidentified
  source 1..342: note = Novimethylophilus kurashikiensis
  REGION 1..342: note = tr|A0A2R5FBA9|A0A2R5FBA9_9PROT S-adenosylmethionine:tRNA ribosyltransferase-isomerase; OS = Novimethylophilus kurashikiensis OX=1825523 GN=queA; PE = 3 SV=1
MRTEDFNFYLPEDLIAQFPAPERRASRLLRLDGNSGALSDAWFKDLPNMLVPGDLLIFNDTRVIKARLLGQKESGGKVEALIERILDEHEALAHVRASHAPKPGQRLIFADAVEAEMVERQGDLFRLRFLGEKPLLDLLDEYGALPLPPYIQHNPDEFDENRYQTVYAREPGAVAAPTAGLHFDDAMLEELKNQGIGIAHVTLHVGAGTFQPVRVDNIAEHRMHSERYNVPQATVDAIEATRAAGRTVTAVGTTAMRALESAARDGQLKAGSGETDIFITPGYQFQVVERLLTNFHLPKSTLLMLVSAFAGVENIREAYRHAVEQRYRFFSYGDAMLIERKR

SEQ ID NO: 69464 - protein, 342 aa, Novosphingobium aromaticivorans
  REGION 1..342: note = sp|Q2G636|QUEA_NOVAD S-adenosylmethionine:tRNA ribosyltransferase-isomerase OS=Novosphingobium aromaticivorans (strain ATCC 700278 / DSM 12444 / CIP 105152 / NBRC 16 084 / F199) OX=279238 GN=queA PE=3 SV=1
MRVDLFDFELPSENIALRPARPRDSARLLGVGRDGPFRDLIVRDLPDLLNPGDVLVFNDTRVIPAQLEGQRGEARVGATLHKRIDLRRWQAFVRNAKRLREGDVIQFGAGVTATAEMRLPDGSWTLFFPGEEPVEVLLERAGRMPLPPYIAGKRPTDEQDREDYQTMFAAKDGAVAAPTAALHFTPSLMEALAARGVATETLTLHVGAGTFLPVKADDTQDHQMHAEWGTIDAATADRLNAARAAGKRVIAVGTTSLRLLESATGEDRVIRPFEGDTSIFITPGYTFRAIDGLMTNFHLPKSTLFMLVSALMGLDRMQAAYAHAIAGGYRFYSYGDSSLLLP

SEQ ID NO: 69465 - protein, 342 aa, unidentified
  source 1..342: note = Novosphingobium barchaimii
  REGION 1..342: note = tr|A0A147EJD0|A0A147EJD0_9SPHN S-adenosylmethionine:tRNA ribosyltransferase-isomerase; OS = Novosphingobium barchaimii OX=1420591 GN=queA PE=3 SV=1
MNVDLFDFELPNERIALRPVKPRDAARMLVADGTAEIADRNVRDLPQMLRAGDVLVFNDTRVIPAQLEGQRGEARIGATLHKRIDLRRWQAFVRNAKRLRPGDVISFPAGVSATAEQRFENGSWTLAFSGDEPVEVLLERAGRMPLPPYIAGKRPTDEADRSDYQTMFATRDGAVAAPTASLHFTPDLVERLDAAGIGRETLTLHVGAGTFLPVKAEDTADHRMHAEWGRIDGDTAARLNAVRKKGGRVIAVGTTSLRLLESAAQDDGQIAPFEGDTAIFITPGYRFRAIDGLMTNFHLPRSTLFMLVSALMGLERMKEAYSHAIENGYRFYSYGDASLLLP

SEQ ID NO: 69466 - protein, 342 aa, unidentified
  source 1..342: note = Novosphingobium barchaimii
  REGION 1..342: note = tr|A0A0J7Y6I0|A0A0J7Y6I0_9SPHN S-adenosylmethionine:tRNA ribosyltransferase-isomerase; OS = Novosphingobium barchaimii LL02 OX=1114963 GN=queA PE=3; SV = 1
MRVDLFDFDLPPESIALRPARPRDAAQMLVVDGERPFCNRHVRDLPDALRAGDVLVFNDTRVIPAQLEGTRGEARIGATLHKRIDLRRWQAFVRNAKRLRAGDLIAFPADVTAVAEERHDDGSWTLAFQGDEPVEVLLERAGRMPLPPYIAGKRPTDEADATDYQTMFAREKGAVAAPTAALHFTPELMKALGTAGIGSETLTLHVGAGTFLPVKADDTAEHRMHAEWGRIDAATADRLNAVRAGGGRLIAVGTTSLRVLESATGEDGVILPFEGDTSIFITPGYRFKAVDGLMTNFHLPKSTLFMLVSALMGLERMQAVYAHAIENGYRFYSYGDSSLLIP

SEQ ID NO: 69467 - protein, 342 aa, unidentified
  source 1..342: note = Novosphingobium fuchskuhlense
  REGION 1..342: note = tr|A0A117UVX2|A0A117UVX2_9SPHN S-adenosylmethionine:tRNA ribosyltransferase-isomerase; OS = Novosphingobium fuchskuhlense OX=1117702 GN=queA PE=3; SV = 1
MRVDLFDFELPPERIALRPASPRDSAKLLGVGAEGPLIDAVVRDLPALLRAGDVLVFNDTRVIPAQLEGEVGNARIGATLHKRIDLRRWQAFVRNGRRLKPGVVVTFGAGVTAVAEERHADGSWTLAFGGEEPVEVLLERAGRMPLPPYIAGKRAVDERDRADYQTMFAARDGAVAAPTAALHFTPELMAALAEAGIGQETLTLHVGAGTFLPVKAEDTDDHAMHAEWGRIEPETAARLNAVRAAGGRIIAVGTTSLRLLESAADSSCVIHPFAGDTSIFITPGYRFRAIDGLMTNFHLPKSTLMMLVSALMGLERMQEAYAYAIANGYRFYSYGDSSLLIP

SEQ ID NO: 69468 - protein, 343 aa, unidentified
  source 1..343: note = Novosphingobium ginsenosidimutans
  REGION 1..343: note = tr|A0A5B8S6H9|A0A5B8S6H9_9SPHN S-adenosylmethionine:tRNA ribosyltransferase-isomerase; OS = Novosphingobium ginsenosidimutans OX=1176536 GN=queA; PE = 3 SV=1
MRVDLFDFELPTDRIALRPARPRDAARLLFVPGQGDFADKGVLDLPSLLEPGDVLVFNDTRVIPAQLEGYRGAARIGATLHKRIDLRRWQAFVRNGKRLKAGDLIEFAAAVSAVAEERHADGSWTLAFAGDEPVEVLLDRAGQVPLPPYIAGKRAIDEQDKSDYQTMFAAKDGAVAAPTAALHFTPRLMEALAAREIGHETLTLHVGAGTFLPVKADDTNDHQMHAEWGVISAETAERLNASRARGNRIVAVGTTSLRLLESAADADRVIHPFEGDTAIFITPGYRFKGIDGLVTNFHLPKSTLFMLVSALMGLDRMQAAYAHAIANEYRFYSYGDSSLLLPS

SEQ ID NO: 69469 - protein, 342 aa, unidentified
  source 1..342: note = Novosphingobium guangzhouense
  REGION 1..342: note = tr|A0A2K2G571|A0A2K2G571_9SPHN S-adenosylmethionine:tRNA ribosyltransferase-isomerase; OS = Novosphingobium guangzhouense OX=1850347 GN=queA PE=3; SV = 1
MRVDLFDFDLPPESIALRPARPRDAAKMLVVAGDAPFEDHHVRDLPSQLRAGDVLVFNDTRVIPAQLEGMRGEARIGATLHKRIDLRRWQAFVRNAKRLREGDRISFPADVTAIAESRLPDGSWTLAFEGDEPVEVLLERAGRMPLPPYIAGKRPTDEADASDYQTMFAREKGAVAAPTAALHFTPELVEALDAAGVARETLTLHVGAGTFLPVKADDTVDHQMHAEFGRIDQATADRLNAARAAGGRVIAVGTTSLRLLESATGEDGVIRPFEGDTAIFITPGYRFRAIDGLMTNFHLPKSTLMMLVSALMGLERMQAVYAYAIANGYRFYSYGDSSLLLP

SEQ ID NO: 69470 - protein, 345 aa, unidentified
  source 1..345: note = Novosphingobium kunmingense
  REGION 1..345: note = tr|A0A2N0I257|A0A2N0I257_9SPHN S-adenosylmethionine:tRNA ribosyltransferase-isomerase; OS = Novosphingobium kunmingense OX=1211806 GN=queA PE=3 SV=1
MRVDLFDFDLPPESIALRPARPRDAARLLLAKGRSAPLEDHVVRDLPGLLRKGDVLVFNDTRVIPAQLEGLRGEARIGATLHKRIDLRRWQAFVRNAKRLRDGDVIAFPAGVGAVAEERGDDGSWTLHFLGDEPVEVLLERAGQMPLPPYIAGKRATDEQDRADYQTMFAAQDGAVAAPTAALHFTPDLIAALDVAGVARETLTLHVGAGTFLPVKVDDTTDHRMHAEWGTIDAATAERLNAARAAGGRVIAVGTTSLRLLESATGEDGLIRSFSGDTAIFITPGYRFRAIDGLMTNFHLPKSTLFMLVSALMGLERMHEIYAHAIAGGYRFYSYGDSSLLLPSA

SEQ ID NO: 69471 - protein, 344 aa, unidentified
  source 1..344: note = Novosphingobium lindaniclasticum
  REGION 1..344: note = tr|T0IHF5|T0IHF5_9SPHN S-adenosylmethionine:tRNA ribosyltransferase-isomerase OS=Novosphingobium lindaniclasticum LE124 OX=1096930 GN=queA PE=3 SV=1
MRVDLFDFDLPPENIALRPARPRDSARMLVVQGRDQGPLVERVVRDLPGELRAGDVLVFNDTRVIPAQLEGRRGEAKIGATLHKRIDLRRWQAFVRNAKRLKAGDRMEFPADVSALAEERHEDGSWTLFFEGDEPVEVLLERAGRMPLPPYIAGKRQTDEQDASDYQTMFAREKGAVAAPTAALHFTPELIERLDAAGIKRETLTLHVGAGTFLPVKADETADHKMHAEWGRIDAATADRLNAARAAGGRVIAVGTTSLRLLESAAGEDDMIRPFEGDTSIFITPGYRFKAIDGLMTNFHLPKSTLFMLVSALMGLERMQEVYAHAISKAYRFYSYGDSSLLLP

SEQ ID NO: 69472 - protein, 343 aa, unidentified
  source 1..343: note = Novosphingobium malaysiense
  REGION 1..343: note = tr|A0A0B1ZPP3|A0A0B1ZPP3_9SPHN S-adenosylmethionine:tRNA ribosyltransferase-isomerase; OS = Novosphingobium malaysiense OX=1348853 GN=queA PE=3 SV=1
MRVDLFDFDLPPERIALRPARPRDAARMLVVEGEAPFTDRHVFDLPGILRRGDVLVFNDTRVIPAQLEGRRGEARIGATLHKRVDLRRWQAFVRNAKRLKSGDRIAFPADVHALAEERHEDGSWTLFFEGDEPVEVLLERAGRMPLPPYIAGKRETDEADASDYQTMFAREKGAVAAPTAALHFTPELVERLDAAGIARETLTLHVGAGTFLPVKAEDTADHRMHAEWGRIDAETADRLNAARAAGGRLIAVGTTSLRLLESAADDDDIIRPFAGDTSIFITPGYRFKAIDGLMTNFHLPKSTLFMLVSALMGLEKMQAAYAHAIAGQYRFYSYGDSSLLLPA

SEQ ID NO: 69473 - protein, 342 aa, Novosphingobium mathurense
  REGION 1..342: note = tr|A0A1U6GW44|A0A1U6GW44_9SPHN S-adenosylmethionine:tRNA ribosyltransferase-isomerase; OS = Novosphingobium mathurense OX=428990 GN=queA PE=3 SV=1
MRVDLFDFDLPTERIALRPAKPRDAARMLVVEGDALFSDRHVRDLPQRLRKGDVLVFNDTRVIPAQLEGRRGEARIGATLHKRIDLRRWQAFVRNAKRLKLGDRIEFPAEVTAIAEARHDDGSWTLAFEGDEPVEVLLERAGRMPLPPYIAGKRETDEADRSDYQTMFAREKGAVAAPTAALHFTPELVDRLDEAGIARETLTLHVGAGTFLPVKADDTADHKMHAEWGRIDQATADRLNAARMAGGRLIAVGTTSLRLLESAAGDDNVIRPFEGDTSIFITPGYRFKAIDGLMTNFHLPKSTLFMLVSALMGLEKMQAVYAHAIAEEYRFYSYGDSSLLLP

SEQ ID NO: 69474 - protein, 342 aa, Novosphingobium nitrogenifigens
  REGION 1..342: note = tr|F1Z8W6|F1Z8W6_9SPHN S-adenosylmethionine:tRNA ribosyltransferase-isomerase OS=Novosphingobium nitrogenifigens DSM 19370 OX=983920 GN=queA PE=3 SV=1
MRVDLFDFDLPPERIALRPARPRDSARLLHVPGKGALGDLHVRDLPGLLRKGDVLVFNDTRVIPAQLEGMRGQARIGATLHKREDLRRWQAFVRNGKRLSPGDTIDFGEGVMALAEVRHPDGSWTLAFQGDEPVEILLERAGRMPLPPYIASKRPTDAADRQDYQTMFAARDGAVAAPTAALHFTPGLLEALADAGIGHETLTLHVGAGTFLPVKAEDTSDHAMHPEWGRIEQETADRLNAVRAGGGRVIAVGTTSLRLLESAAGEDRVIRPFAGDTSIFITPGYTFRAIDGLMTNFHLPKSTLFMLVSALMGLDRMQEAYAHAIREGYRFYSYGDASLLLS

SEQ ID NO: 69475 - protein, 342 aa, Novosphingobium pentaromativorans
  REGION 1..342: note = tr|G6E6T1|G6E6T1_9SPHN S-adenosylmethionine:tRNA ribosyltransferase-isomerase OS=Novosphingobium pentaromativorans US6-1 OX=1088721 GN=queA PE=3 SV=1
MRVDLFDFDLPTERIALRPARPRDAARMLVVDGDAPFSDRHVRDLPQMLRKGDVLVFNDTRVIPAQLEGRRGEARIGATLHKRIDLRRWQAFVRNAKRLRPGDRVEFPAEVTAIAEARHEDGSWTLAFEGDEPVEVLLERAGRMPLPPYIAGKRDTDEADRSDYQTMFAREKGAVAAPTAALHFTPELVERLDEAGIARETLTLHVGAGTFLPVKADDTSDHKMHAEWGRIDQATADRLNAARAAGGRLIAVGTTSLRLLESAAGEDDVIRPFEGDTSIFITPGYRFKAIDGLMTNFHLPKSTLFMLVSALMGLDKMQAVYAHAIGAQYRFYSYGDSSLLLP

SEQ ID NO: 69476 - protein, 344 aa, Novosphingobium pentaromativorans
  REGION 1..344: note = tr|A0A2W5NNH3|A0A2W5NNH3_9SPHN S-adenosylmethionine:tRNA ribosyltransferase-isomerase; OS = Novosphingobium pentaromativorans OX=205844 GN=queA; PE = 3 SV=1
MRVDLFDFDLPPENIALRPARPRDSARMLVVHGRDEGPMAERAVRDLPGELHAGDVLVFNDTRVIPAQLEGRRGEAKIGATLHKRMDLRRWQAFVRNAKRLKAGDRIEFPAEVTALAEERHADGSWTLLFEGDEPVEVLLERAGRMPLPPYIAGKRETDEQDASDYQTMFAREKGAVAAPTAALHFTPELIERLDAAGVKRETLTLHVGAGTFLPVKADETQDHKMHAEWGRIDAETADRLNAARAAGGRIIAVGTTSLRLLESATGEDDVIRPFEGDTSIFITPGYRFKAIDGLMTNFHLPKSTLFMLVSALMGLERMQAVYAHAIDEGYRFYSYGDSSLLLP

SEQ ID NO: 69477 - protein, 342 aa, Novosphingobium resinovorum
  REGION 1..342: note = tr|A0A031K7E2|A0A031K7E2_9SPHN S-adenosylmethionine:tRNA ribosyltransferase-isomerase; OS = Novosphingobium resinovorum OX=158500 GN=queA PE=3 SV=1
MRVDLFDFDLPPESIALRPARPRDAAKMLVVDGDTPFADHHVRDLPAQLRAGDVLVFNDTRVIPAQLEGTRGEARIGATLHKRIDLRRWQAFVRNAKRLREGDRIAFPAEVTAIAESRLPDGSWTLAFEGDEPVEVLLERAGRMPLPPYIAGKRPTDEADASDYQTMFAREKGAVAAPTAALHFTPELVEALDAAGVARETLTLHVGAGTFLPVKADDTVDHQMHAEFGRIDQATADRLNAARAAGGRVIAVGTTSLRLLESATGEDGVIRPFEGDTAIFITPGYRFRAIDGLMTNFHLPKSTLMMLVSALMGLEKMQAVYAHAIANGYRFYSYGDSSLLLP

SEQ ID NO: 69478 - protein, 342 aa, unidentified
  source 1..342: note = Novosphingobium sediminis
  REGION 1..342: note = tr|A0A512AGK7|A0A512AGK7_9SPHN S-adenosylmethionine:tRNA ribosyltransferase-isomerase; OS = Novosphingobium sediminis OX=707214 GN=queA PE=3 SV=1
MRVDLFDFELPPERIALRPASPRDSARLLGVRTEGPFTDAVVRDLPSLLRAGDVLVFNDTRVIPAQLEGEVGNARIGATLHKRIDLRRWQAFVRNGRRLKPGVVVAFGAGVTAVAEERFADGSWTLAFGGEEPVEVLLERAGRMPLPPYIAGKRAVDERDREDYQTMFAAKDGAVAAPTASLHFTPELMAALAGAGIGHETLTLHVGAGTFLPVKADDTDDHAMHAEWGRIEPETAARLNAVRAAGGRIIAVGTTSLRLLESAADEARVIHPFAGDTSIFITPGYRFRAIDGLMTNFHLPKSTLMMLVSALMGLERMKEAYAYAIANEYRFYSYGDSSLLIP

SEQ ID NO: 69479 - protein, 342 aa, Novosphingobium sp.
  REGION 1..342: note = tr|A0A5C7UFX7|A0A5C7UFX7_9SPHN S-adenosylmethionine:tRNA ribosyltransferase-isomerase; OS = Novosphingobium sp. OX=1874826 GN=queA PE=3 SV=1
MRVDLFDFELPQENIALRPARPRDSARLLGVGTDGPFRDLTVLDLPTLLNPGDVLVFNDTRVIPAQLEGQRGEARIGATLHKRIDLRRWQAFVRNGKRLREGDEIMFGAGVTAFAESRFADGSWTLFFPGEEPVEVLLERAGQMPLPPYIAGKRPTDEQDREDYQTMFAAKDGAVAAPTAALHFTPRLMDAIAARGIRTETLTLHVGAGTFLPVKADDTADHQMHAEWGTIDAATADRLNAARAAGNRVIAVGTTSLRLLESAAGEDKRIRPFEGDTAIFITPGYTFRAIDGLMTNFHLPKSTLFMLVSALMGLERMQAAYAHAIASGYRFYSYGDSSLLLP

SEQ ID NO: 69480 - protein, 344 aa, Novosphingobium sp.
  REGION 1..344: note = tr|A0A1W7MCN9|A0A1W7MCN9_9SPHN S-adenosylmethionine:tRNA ribosyltransferase-isomerase; OS = Novosphingobium sp. MD-1 OX=1630648 GN=queA PE=3 SV=1
MRVDLFDFELPPERIALRPARPRDAARMLLAKGDGTLADHVVRDLPALLRAGDVLVFNDTRVIPAQLEGRRGEAKIGATLHKRIDLRRWQAFVRNAKRLREGDVIDFGADVSGTAEQRHDDGSWTLFFPGDEPVEVLLERAGRMPLPPYIAGKRPTDEEDRRDYQTMFAARDGAVAAPTAALHFTDGLMAALAQAGIAHETLTLHVGAGTFLPVKAEDTADHRMHAEWGRIEADTADRLNRARAAGGRVIAVGTTSLRLLESAAGEDNVIRPFAGDTSIFITPGYRFRAIDGLMTNFHLPRSTLFMLVSALMGLETMQAAYAHAIANAYRFYSYGDSSLLLPEG

SEQ ID NO: 69481 - protein, 347 aa, Novosphingobium subterraneum
  REGION 1..347: note = tr|A0A0B9A1C9|A0A0B9A1C9_9SPHN S-adenosylmethionine:tRNA ribosyltransferase-isomerase; OS = Novosphingobium subterraneum OX=48936 GN=queA PE=3 SV=1
MRVDLFDFELPQENIALRPARPRDSARLLGVGMDGPFRDLTVLDLPSLLNPGDVLVFNDTRVIPAQLEGQRPSLNGEGARLGATLHKRIDLRRWQAFVRNGKRLREGDEIRFGAGVSAFAESRFPDGSWTLFFPGEEPVEVLLERAGQMPLPPYIAGKRPTDERDREDYQTMFAAKDGAVAAPTAALHFTPRLMEAIAERGIRTETLTLHVGAGTFLPVKADDTKDHQMHAEWGTIDSATADRLNAARADGNRVIAVGTTSLRLLESAAGEDRVIRPFEGDTAIFITPGYSFRAIDGLMTNFHLPKSTLFMLVSALMGLDRMQAAYAHAIASGYRFYSYGDSSLLLP

SEQ ID NO: 69482 - protein, 342 aa, Novosphingobium taihuense
  REGION 1..342: note = tr|A0A562JXY8|A0A562JXY8_9SPHN S-adenosylmethionine:tRNA ribosyltransferase-isomerase; OS = Novosphingobium taihuense OX=260085 GN=queA PE=3 SV=1
MRVDLFDFELPQENIALRPARPRDSARLLGVGHEGPFRDLTVLDLPSLLNPGDVLVFNDTRVIPAQLEGQRGQARIGATLHKRIDLRRWQAFVRNGKRLRQDDEIRFGAGVTAYAETRHTDGSWTLFFPGEEPVEVLLERAGQMPLPPYIAGKRPTDAQDREDYQTMFAAKDGAVAAPTAALHFTPRLMEALSARGILTETLTLHVGAGTFLPVKAEDTQDHQMHAEWGTIDAATADRLNAARAAGNRVIAVGTTSLRLLESAAGDDKVIRPFEGDTAIFITPGYTFRAIDGLMTNFHLPKSTLFMLVSALMGLDRMQEAYAHAIGAGYRFYSYGDSSLLLP

SEQ ID NO: 69483 - protein, 343 aa, Novosphingobium tardaugens
  REGION 1..343: note = tr|U2ZWY0|U2ZWY0_9SPHN S-adenosylmethionine:tRNA ribosyltransferase-isomerase OS=Novosphingobium tardaugens NBRC 16725 OX=1219035 GN=queA PE=3 SV=1
MRVDLFDFVLPPERIALRPARPRDAARMLVVRGDIAPFGDCTVRDLPAQLRRGDVLVFNDTRVIPAQLEGRRGDARIGATLHKRIDLRRWQAFIRNGKRLRVGDVVQFARDVAAIAEARHDDGSWTLAFVGDEPVEVLLERAGTMPLPPYIAGKRPTDEADRSDYQTMFAREEGAVAAPTAALHFTPDLLAALDEAGIGRETLTLHVGAGTFLPVKVEDTAEHRMHSEWGRIEPDVAARLNAARQAGGRVIAVGTTSLRVLESATGDDGIIQPFSGDTDIFITPGYRFRAIDGLMTNFHLPRSTLFMLVSALMGMERMQAAYAHAIAEHYRFYSYGDGSLLLP

SEQ ID NO: 69484 - protein, 357 aa, Obesumbacterium proteus
  REGION 1..357: note = tr|A0A4Q9D9A3|A0A4Q9D9A3_9GAMM S-adenosylmethionine:tRNA ribosyltransferase-isomerase; OS = Obesumbacterium proteus OX=82983 GN=queA PE=3 SV=1
MRVSDFSFELPDNLIAHYPQAERSACRLLSLDGPTGKLEHGVFTDVLDKIEAGDLLIFNNTRVIPARLFGRKASGGKLEVLVERVLDDTRVLAHVRASKSPKPGAELLLGDNEDIRVTMVARHDTLFELRFDDGRDVLTILNAAGHMPLPPYIDRPDEDADRELYQTVYSSRPGAVAAPTAGLHFDEPLLEKLRAKGVEMAFVTLHVGAGTFQPVRVDTIENHTMHSEYAEVPQDVVDAVLACKARGNRVIAVGTTSVRSIESAAAAAKDALIAPFFDDTQIFIYPGYHYQVIDALITNFHLPESTLIMLVSAFAGYQNTMHAYHEAVAKEYRFFSYGDAMFITRSELAEQEKVSAE

SEQ ID NO: 69485 - protein, 357 aa, Obesumbacterium proteus
  REGION 1..357: note = tr|A0A1B7KJZ3|A0A1B7KJZ3_9GAMM S-adenosylmethionine:tRNA ribosyltransferase-isomerase; OS = Obesumbacterium proteus ATCC 12841 OX=1354268 GN=queA; PE = 3 SV=1
MRVSDFSFELPDNLIARYPQAERSACRLLSLDGPTGKLEHGVFTDVLDKIEAGDLLIFNNTRVIPARLFGRKASGGKLEVLVERVLDDTRVLAHVRASKSPKPGAELLLGDNEDIRVTMVARHDTLFELRFDDGRDVLTILNAAGHMPLPPYIDRPDEDADRELYQTVYSSRPGAVAAPTAGLHFDEPLLEKLRAKGVEMAFVTLHVGAGTFQPVRVDTIENHTMHSEYAEVPQDVVDAVLACKARGNRVIAVGTTSVRSIESAAAAAKDALIAPFFDDTQIFIYPGYHYQVIDALITNFHLPESTLIMLVSAFAGYQNTMHAYHEAVAKEYRFFSYGDAMFITRSELAEQEKVSAE

SEQ ID NO: 69486 - protein, 345 aa, unidentified
  source 1..345: note = Oblitimonas alkaliphila
  REGION 1..345: note = tr|A0A0K1XC01|A0A0K1XC01_9GAMM S-adenosylmethionine:tRNA ribosyltransferase-isomerase; OS = Oblitimonas alkaliphila OX=1697053 GN=queA PE=3 SV=1
MRVEQFHFDLPDELIARYPLAERRASRLLMLKAGEALQHQQFSDLLAEIQPGDLMVFNNTRVIPARLFGQKTTGGKLEVLVERVLDEHRVLAHVRASKAPKVEALLEFSGFQASMLARHDSLFELAFVQPVLQVLQQIGHMPLPPYIDRADELADRERYQTVYAQTAGAVAAPTAGLHFDQAMLDALAAKGVEQAFVTLHVGAGTFQPVRVETIEQHHMHSEWLEVGPEVVEAVEACKARGGRVIAVGTTSVRSLETAALSGKIQPFTGDTDIFIYPGKTFNVVDALVTNFHLPESTLLMLVSAFAGYHETMAAYHAAVANKYRFFSYGDAMFLTRHPQPSIPEE

SEQ ID NO: 69487 - protein, 344 aa, unidentified
  source 1..344: note = Oceanibacterium hippocampi
  REGION 1..344: note = tr|A0A1Y5TA64|A0A1Y5TA64_9PROT S-adenosylmethionine:tRNA ribosyltransferase-isomerase; OS = Oceanibacterium hippocampi OX=745714 GN=queA PE=3 SV=1
MKVDAFDFELPAELIAERPAEPRDSARLLVVGNDGFADRQVADLADLLSPGDLLVFNDTKVIPARLRGLRREAKVEATLHMRLGPGRWAAFARPAKRLKPSDRIDFAEDFHATVAEKGEAGEITLDFDREGAALDEAIAAHGELPLPPYIASRRAVDRRDLDDYQTMFAEKSGAVAAPTAGLHFTPGLIGKLSARDIGHLCITLHVGAGTFLPVKADDTDEHRMHSEIGVIAPDHADRINAVRAGGGRIVAVGTTSLRLLESAADETGQVQPFSGATDIFITPGYRFRAVDLLITNFHLPRSTLFMLVSAFSGLERMRAAYGHAIDRRYRFYSYGDAALLFPGS

SEQ ID NO: 69488 - protein, 342 aa, Oceanibaculum indicum
  REGION 1..342: note = tr|A0A420WQS0|A0A420WQS0_9PROT S-adenosylmethionine:tRNA ribosyltransferase-isomerase; OS = Oceanibaculum indicum OX=526216 GN=queA PE=3 SV=1
MKVDLFDFHLPPERIAQMPAEPRDSARLLDIRPDRLGDCGVLDLPALLNPGDLLVFNDTRVIPARLNGNRGEVAVEVLLHKAEADGTWLAFARPGKRLKIGQTIRFAEDFAADILEKREGGELRLSFTGASDLLEALKRHGSMPLPPYIRGGKAEAADAERYQTIYAREEGAVAAPTAGLHFTDRLMAKLAERGIGTAFLTLHVGAGTFLPVKADDTTDHRMHAEWGSIDADTAARITETKRQGGRVVAVGTTSLRLLESAAREDGTVPAFSGDTDIFITPGYRFKAVDLLMTNFHLPRSTLFMLVSAFSGLERMQSAYSHAIEAGYRFYSYGDACLLHPSR

SEQ ID NO: 69489 - protein, 342 aa, Oceanibaculum indicum
  REGION 1..342: note = tr|K2JP56|K2JP56_9PROT S-adenosylmethionine:tRNA ribosyltransferase-isomerase OS=Oceanibaculum indicum P24; OX = 1207063 GN=queA PE=3 SV=1
MKVDLFDFHLPPERIAQMPAEPRDSARLLDIRPDRLGDCGVLDLPALLNPGDLLVFNDTRVIPARLHGYRGEVAVEVLLHKAEADGTWLAFARPGKRLKTGQTIRFAEDFAADILEKREGGELRLAFAGAADLLEALKRHGSMPLPPYIRGGKAEAADAERYQTIYAREEGAVAAPTAGLHFTDRLMAALAERGIGTAFLTLHVGAGTFLPVKADDTEDHRMHAEWGSIDPETAARITETKRQGGRVVAVGTTSLRLLESAAREDGTVPAFSGDTDIFITPGYRFKAVDLLMTNFHLPRSTLFMLVSAFAGLERMQSAYSHAIEAGYRFYSYGDACLLHPSR

SEQ ID NO: 69490 - protein, 357 aa, Oceanicaulis sp.
  REGION 1..357: note = tr|A0A2T4ZSN7|A0A2T4ZSN7_9RHOB S-adenosylmethionine:tRNA ribosyltransferase-isomerase; OS = Oceanicaulis sp. PT13A OX=2135616 GN=queA PE=3 SV=1
MTQLRLTDFDFHLPEDRIALRPARPRDSARLLLVKDGGVSDLGVLDLPDLLEPGDLLVFNDTRVIPAALTGVRPARAHGGGGDVEIEINLHKRDDEAVWRAFVRPAKRLKENDTLHFKGGLTAQVTDKREGGEVVLTFDRAGVALDKAIVEAGAPPLPPYIASKRAADAADLEDYQTVYAAPDKAGSVAAPTAGLHFTDRLFEALDARGVKRTHVTLHVGAGTFLPVKTEDLSEHQMHAEYYEISEETAALINETRKAGGRIIAVGTTSIRTLESAAEADGTVRAEARDTAIFITPGYRFKVIDALMTNFHLPKSTLFMLVSALAGFDEMHAAYAHAIKQEYRFFSYGDSSLLWRKT

SEQ ID NO: 69491 - protein, 353 aa, Oceanicaulis sp.
  REGION 1..353: note = tr|A0A2D5FR23|A0A2D5FR23_9RHOB S-adenosylmethionine:tRNA ribosyltransferase-isomerase; OS = Oceanicaulis sp. OX=1924941 GN=queA PE=3 SV=1
MRVSDFDFELPEERIALRPARPRDAARLLHIAGNGVFADRGVSDLPELLREGDLMVFNDTRVIPAALTGVRPARSAGGGGPVDVEVNLHKRLDASGWRAFVRPAKRLRVGDVIAFSDALSAEVTGKSEGGDTRLVFNRTGAALDEAIAATGVPPLPPYIARKREVDEQDVEDYQTLFARQDGSVAAPTAGLHFTERLLTALADRGVQQTHVTLHVGAGTFLPVKADDLADHRMHAEWCTVSTRAAEAINTAKAEGRRVIPVGTTALRTIESLAVQPGVIEAGSRDTDIFITPGYDFRITDALMTNFHLPRSTLFMLVSALAGLDVMKRAYAHAIRSGYRFYSYGDASLIERSA

SEQ ID NO: 69492 - protein, 350 aa, unidentified
  source 1..350: note = Oceanicella actignis
  REGION 1..350: note = tr|A0A1M7TZY3|A0A1M7TZY3_9RHOB S-adenosylmethionine:tRNA ribosyltransferase-isomerase; OS = Oceanicella actignis OX=1189325 GN=queA PE=3 SV=1
MRVDEFDFDLPEELIALRPVRPRRAARLLAARGDAIDDLRVADLPRLLRAGDVLVFNDTRVIPARLFGERRRQTADGSGVARIEATLLERAGADAWRALARPAKRLREGDEILFAGGLRARVAERGAGGEVALVFDRAGPELDAAIAAAGVMPLPPYIAARRPADAQDEEDYQTVFAARPGAVAAPTAALHFDQPLLAALDEAGVRSARVTLHVGAGTFLPVKAERVEDHRMHAEWGEISAEAAETIARARAEGGRVIAVGTTALRVLETAADEDGRLRPWSGETDIFITPGYRFRAVDGLMTNFHLPRSTLMMLVSALMGVERIRRIYAHAVAERYRFYSYGDASLLIP

SEQ ID NO: 69493 - protein, 350 aa, unidentified
  source 1..350: note = Oceanicella actignis
  REGION 1..350: note = tr|A0A5D3W7N2|A0A5D3W7N2_9RHOB S-adenosylmethionine:tRNA ribosyltransferase-isomerase; OS = Oceanicella actignis OX=1189325 GN=queA PE=3 SV=1
MRVDEFDFDLPEELIALRPVRPRRAARLLAARGDAIDDLRVADLPRLLRAGDVLVFNDTRVIPARLFGERRRQTADGSGVARIEATLLERAGADAWRALARPAKRLREGDEILFAGGLRARVAERGAGGEVALVFDRAGPELDAAIAAAGVMPLPPYIAARRPADAQDEEDYQTVFAARPGAVAAPTAALHFDQPLLAALDEAGVRSARVTLHVGAGTFLPVKAERVEDHRMHAEWGEISAEAAEAIARARAEGGRVVAVGTTALRVLETAADEDGRLRPWSGETDIFITPGYRFRAVDGLMTNFHLPRSTLMMLVSALMGVERIRRIYAHAVAERYRFYSYGDASLLIP

SEQ ID NO: 69494 - protein, 354 aa, unidentified
  source 1..354: note = Oceanicoccus sagamiensis
  REGION 1..354: note = tr|A0A1X9NMP3|A0A1X9NMP3_9GAMM S-adenosylmethionine:tRNA ribosyltransferase-isomerase; OS = Oceanicoccus sagamiensis OX=716816 GN=queA PE=3 SV=1
MQLSDFHFDLPDSLIARYPMAERTASRLLVLDGAAGAIQHQQFTDLLSLLNKGDLLVFNDTKVLPARLWGKKSTGGRIEILVERVLDENRVLAHMRSSKSPKAGAELHLVADQDSDKVLAKVEVLGRQEALFELLFTEGGNALEVMNAIGHMPLPPYIDRADELDDRERYQTVFGKREGAVAAPTAGLHFTEDFIAQCQAKGVDTTFVTLHVGAGTFQPVRVDNITEHKMHAEYIEVSADVCEQVKTTRANGGRVIAVGTTSVRSLESASQGGELQPFSGDSEIFIYPGYTFKSVDAMVTNFHLPESTLIMLVSAFAGQDNVLAAYKEAVTQQYRFFSYGDAMLVLPSTTTSEN

SEQ ID NO: 69495 - protein, 349 aa, Oceanicola granulosus
  REGION 1..349: note = tr|Q2CD33|Q2CD33_OCEGH S-adenosylmethionine:tRNA ribosyltransferase-isomerase OS=Oceanicola granulosus (strain ATCC BAA-861 / DSM 15982 / KCTC 12143 / HTCC2516); OX = 3 14256 GN=queA PE=3 SV=1
MQLSDFDFDLPDELIAVRPARPRSSARLLLAEGDAIGDRIVSELPRILQPGDRLVLNDTRVIPARLTGTRTRPGAAGEGVARIEVTLLEPRADGLWSALVKPLRKLREGEEVVFSPRLTASLEAREAGQGLLRFNCTGEDFDAALAEAGAMPLPPYIAARRPADAADKDDYQTVWAERPGAVAAPTASLHFDAPLLEAIAARGVEITRVTLHVGAGTFLPVKVEDVTTHRMHAEWGEVTEAAAAEIAATRGAGGRVIPVGTTALRLIETAARASGEIAPWTGETDIFIYPGFEFRVADGLMTNFHLPRSTLMMLVSAFMGMERVRAIYAHAVAERYRFFSYGDASLLLP

SEQ ID NO: 69496 - protein, 351 aa, unidentified
  source 1..351: note = Oceanicola litoreus
  REGION 1..351: note = tr|A0A1N6ER69|A0A1N6ER69_9RHOB S-adenosylmethionine:tRNA ribosyltransferase-isomerase; OS = Oceanicola litoreus OX=1217970 GN=queA PE=3 SV=1
MKLDDFDFALPEELIAVRPAYPRGASRLLVAGADWIEDRGVADIVDYLRPGDRLVLNNTRVIPARLSGVRRRLSAQGPVEARVEVTLLEPGAGGEWLALARPARKVKPGEVLEFGAGLAAEVLEREGGEVRLRFSVEGADFDAALEQVGAMPLPPYIAARRAADEADREDYQTVFAKRRGAVAAPTASLHFDEALLARIRAMGVGLTEVTLHVGAGTFLPVTVEDVTTHRMHAERGEVSAQAADEINATKAAGGRIIPVGTTALRLIESAAVETGRIAAWDGETDIFIYPGFRFRLTDALMTNFHLPKSTLMMLVSALMGQDRIREVYRHAIEARYRFFSYGDSSLLLPGA

SEQ ID NO: 69497 - protein, 351 aa, Oceanicola sp.
  REGION 1..351: note = tr|A0A5B8BUB4|A0A5B8BUB4_9RHOB S-adenosylmethionine:tRNA ribosyltransferase-isomerase; OS = Oceanicola sp. D3 OX=2587163 GN=queA PE=3 SV=1
MKLDDFDFDLPEELIAVRPAYPRGASRLLVAGADWIDDRGVGDICDYLRPGDRLVLNNTKVIPARLSGVRRRDSAQGMVEARVEVTLLEPGTGGEWLALARPARKVKPGEVVEFGAGLKAEVLSRDGGEVRLRFSAEGEAFDAALEQVGAMPLPPYIAARRVADEADREDYQTVFAKHTGAVAAPTASLHFDAALLARIEAMGVGLTEVTLHVGAGTFLPVTVEDVTTHRMHAERGEVTAQAADEINATKAAGGRIIPVGTTALRLIESAAAGPGRIAPWQGETDIFIYPGFQFALTDALMTNFHLPKSTLMMLVSALMGQERIGEIYRHAIEARYRFFSYGDSSLLLPGE

SEQ ID NO: 69498 - protein, 348 aa, Oceanicola sp.
  REGION 1..348: note = tr|A0A254RB20|A0A254RB20_9RHOB S-adenosylmethionine:tRNA ribosyltransferase-isomerase; OS = Oceanicola sp. 22II-s10i OX=1317116 GN=queA PE=3 SV=1
MKLDDFDFDLPERLIATRPARPRSSARLLVAEGDRITDAVVRDLTDWLRPGDRLVLNDTKVIPARLFGERLRAGEAGETAARIEVTLTEPRADGCWAALLKPLRKVRDGEEIRFSPRLTARLEARDGGQGVLRFNCEGADFDAALAEAGQMPLPPYIAAKRPADAQDREDYQTVWARHAGAVAAPTASLHFDDELLARVRAAGVEMTHVTLHVGAGTFLPVKVEDVTTHRMHAEWGEVTEAAAAAIAATKAAGGRVIPVGTTALRLIESAAAGGAIAPWRGDTDIFIYPGYEFRVTDALMTNFHLPKSTLLMLVSALMGRDRMLRVYDHAVREGYRFFSYGDASLLVP

SEQ ID NO: 69499 - protein, 349 aa, unidentified
  source 1..349: note = Oceanihabitans sediminis
  REGION 1..349: note = tr|A0A368PCD9|A0A368PCD9_9FLAO S-adenosylmethionine:tRNA ribosyltransferase-isomerase; OS = Oceanihabitans sediminis OX=1812012 GN=queA PE=3 SV=1
MKLSHFQFDLPDELLAEFPAENRDESRLMVLNREKQTIEHKMFKDLIEYFDEDDVLILNNTKVFPARLYGNKEKTGARIEVFLLRELNEEQRLWDVLVDPARKIRIGNKLYFGEDETLVAEVIDNTTSRGRTLRFLYDGSYQEFRRKLNELGETPLPKYINREVTPEDEVRYQTIFAKNEGAVAAPTAGLHFSKHLLKRLEIKGVNFAEVTLHVGLGTFNPVEVEDLSKHKMDSEEIKIDATAANIINTAKLNKKRICAVGTTAMRAIESSVSTNGTLNEFEGWTNKFIFPPYDFSIANCMITNFHTPKSTLLMMASAFAGHEFIKKAYDEAIKEKYNFYSYGDAMLII

SEQ ID NO: 69500 - protein, 348 aa, Oceanimonas baumannii
  REGION 1..348: note = tr|A0A235CP94|A0A235CP94_9GAMM S-adenosylmethionine:tRNA ribosyltransferase-isomerase; OS = Oceanimonas baumannii OX=129578 GN=queA PE=3 SV=1
MQVQDFSFELPDELIARHPMAERTASRLLQLDGNTGNLVHGSFGDILDLINPGDLLVFNNTRVIPARLFGRKASGGKLEVLVERMLDDKRVLAHVRASKAPKPGTELILEPDVKATMVARHDALFEIEFDDARTVLEILESVGHMPLPPYIDRPDTDADKERYQTVYNEKPGAVAAPTAGLHFDEPLLARLKEKGADLAFITLHVGAGTFQPVRVDNVLEHKMHAEYIEVPADVVAQIEATRTRGGRVIAVGTTSVRSLESAAQASLAEGKALAPFYGDTNIFIYPGYRFQLVDAMVTNFHLPESTLIMLVSAFAGQDHIMEAYRQAVAERYRFFSYGDAMFITKQQA

SEQ ID NO: 69501 - protein, 348 aa, Oceanimonas doudoroffii
  REGION 1..348: note = tr|A0A233REE4|A0A233REE4_9GAMM S-adenosylmethionine:tRNA ribosyltransferase-isomerase; OS = Oceanimonas doudoroffii OX=84158 GN=queA PE=3 SV=1
MQVQDFSFELPDELIARHPMPERTASRLLQLDGNTGNLVHGRFGDILDLINPGDLLVFNNTRVIPARLFGRKASGGKLEVLVERMLDDKRVLAHVRSSKSPKPGTELILEPDVHATMVARHDALFEIEFNDDRSVLEILEAVGHMPLPPYIDRPDTDADKERYQTVYNEKPGAVAAPTAGLHFDEPLLNAIRAKGAELAFITLHVGAGTFQPVRVDNVLEHKMHAEYIEVPAEVVAQIEATRARGGRVIAVGTTSVRSLESAAQASLAKGEPLAPFYGDTDIFIYPGYRFQLVDAMVTNFHLPESTLIMLVSAFAGQDHIMEAYRQAVAERYRFFSYGDAMFITRQIK

SEQ ID NO: 69502 - protein, 353 aa, Oceanimonas sp.
  REGION 1..353: note = tr|H2FZA4|H2FZA4_OCESG S-adenosylmethionine:tRNA ribosyltransferase-isomerase OS=Oceanimonas sp. (strain GK1) OX=511062 GN=queA PE=3 SV=1
MQVHDFSFELPDELIARHPMPERTASRLLQLDGNTGQLVHGRFGDILDLINPGDLLVFNNTRVIPARLFGRKASGGKLEVLVERVLDDQRVLAHVRSSKAPKPGSALILEPDVKATMVARHDALFEIEFHDERTVLEILESVGHMPLPPYIDRPDTDADKERYQTVYNEKPGAVAAPTAGLHFDEPLLARLKEKGAELAFITLHVGAGTFQPVRVDNVLEHKMHAEYIEVPAEVVAQIEATRAQGGRVIAVGTTSVRSLESAAQASLANGEPLAPFYGDTDIFIYPGYRFQLVDAMVTNFHLPESTLIMLVSAFAGREHIMEAYRAAVAERYRFFSYGDAMFITRQQGLGTGE

SEQ ID NO: 69503 - protein, 244 aa, unidentified
  source 1..244: note = Oceaniovalibus guishaninsula
  REGION 1..244: note = tr|K2HBZ9|K2HBZ9_9RHOB S-adenosylmethionine:tRNA ribosyltransferase-isomerase OS=Oceaniovalibus guishaninsula JLT2003 OX=1231392 GN=OCGS_0708 PE=3 SV=1
MVFSPDLSATVEGRGEGAALLRFNLAGDDFDAALDAAGAMPLPPYIASKRAADAQDRTDYQTIWAARAGAVAAPTASLHFDDALLAAVRARGVDLTHVTLHVGAGTFLPVKVDDVSQHRMHAEWGEVTADAAARIAATRASGGRVIPVGTTALRLIESAAARGAIAPFRGQTDIFIRPGHVFRVVDGLMTNFHLPKSTLMMLVSALMGVDRMRRVYAHAVAREYRFFSYGDASLLLPDADGARG

SEQ ID NO: 69504 - protein, 365 aa, unidentified
  source 1..365: note = Oceaniovalibus sp.
  REGION 1..365: note = tr|A0A5D0S850|A0A5D0S850_9RHOB S-adenosylmethionine:tRNA ribosyltransferase-isomerase; OS = Oceaniovalibus sp. ACAM 378 OX=2599923 GN=queA PE=3 SV=1
MKLSDFDFDLPEALIATRPVRPRSSARMLVAEGGAIADAAMIDLPGWLLPGDLLVLNDTRVIPARLSGQRFRDGAEGRTAARIGVTLLEPRPGGLWSALVKPLKKLRDGEEIRFSDQLSARLEGRDEGTALLAFNVAGASFDAALAEAGEMPLPPYIANRRPADDRDREDYQTLWARHSGAVAAPTASLHFDDTLMAGLAARGVTTTHVTLHVGAGTFLPVKTDDVSQHRMHAEWGEVTVEAADQINATIRAGGRIVPVGTTALRLIESAATGDGVIAPWRGATDIFITPGFRFRLTDALVTNFHLPKSTLMMLVSALVGQDEVRRIYAHAISERYRFFSYGDGSLLIPPRQRRHQMVANDTTVP

SEQ ID NO: 69505 - protein, 353 aa, unidentified
  source 1..353: note = Oceanisphaera arctica
  REGION 1..353: note = tr|A0A2P5TQ31|A0A2P5TQ31_9GAMM S-adenosylmethionine:tRNA ribosyltransferase-isomerase; OS = Oceanisphaera arctica OX=641510 GN=queA PE=3 SV=1
MLVRDFSFELPDELIARHPMPERSASRLLQLNGNGGDITHGQFSQILDLVNPGDLLVFNNTRVIPARLFGRKASGGKLEVLIERVLDDKRVLAHVRASKAPKPGTALILDPDVQATMLARHDALFEIEFHDERPVLEILDAVGHMPLPPYIDRPDTDADKERYQTVYNEKPGAVAAPTAGLHFDQPLLDALTAKGAELAFVTLHVGAGTFQPVRVEQVLEHKMHAEYIEVSPQVVAQIEATRARGGRVIAVGTTSVRSLESAARATMANGEPLAPFYGDTDIFIYPGYRFQLVDAMVTNFHLPESTLIMLVSAFAGYDHIMEAYRQAVAERYRFFSYGDAMFITRQQGLGNRD

SEQ ID NO: 69506 - protein, 348 aa, unidentified
  source 1..348: note = Oceanisphaera avium
  REGION 1..348: note = tr|A0A1Y0CTQ7|A0A1Y0CTQ7_9GAMM S-adenosylmethionine:tRNA ribosyltransferase-isomerase; OS = Oceanisphaera avium OX=1903694 GN=queA PE=3 SV=1
MLVRDFSFELPNELIAHHPMSERTASRLLQLDGNSGAITHGHFSQLLEQVNAGDLLVFNNTRVIPARLHGHKASGGKIEVLVERILDDKRVLAHVRASKAPKPGTALILEPNVQATMLARHDALFEIEFNDSRAVLDILEAVGHMPLPPYIDRPDTEADKERYQTVYNEKPGAVAAPTAGLHFDQALLDALVAKGAELAFVTLHVGAGTFQPVRVEQVLDHKMHAEYIEVPLEVIDKIKATRAQGGRIIAVGTTSVRSLESAAQASLAQGQPLAPFYGDTDIFIYPGYKFQLVDMMITNFHLPESTLMMLVSAFAGYNQIKEAYRQAIEQRYRFFSYGDAMLLSRRDA

SEQ ID NO: 69507 - protein, 348 aa, unidentified
  source 1..348: note = Oceanisphaera profunda
  REGION 1..348: note = tr|A0A1Y0D2Y2|A0A1Y0D2Y2_9GAMM S-adenosylmethionine:tRNA ribosyltransferase-isomerase; OS = Oceanisphaera profunda OX=1416627 GN=queA PE=3 SV=1
MLVRDFSFELPDELIARHPMAERTASRLLQVDGNSGAISHGHFQQLLTQINAGDLLVFNNTRVIPARLYGHKASGGKLEVLVERVLDDKRVLAHVRSSKSPKPGTALILEPNVQATMLARHDALFEIEFNDPRSVLEILEAVGHMPLPPYIDRPDTDADKERYQTVYNEKPGAVAAPTAGLHFDQALLDALVAKGAELAFVTLHVGAGTFQPVRVEQVLDHKMHAEYIEVPAEVVDKINAARARGGRIIAVGTTSVRSLESAAQASLAQGQPLAPFYGDTDIFIYPGYEFQLVDLMVTNFHLPESTLMMLVSAFAGYDHIKEAYRQAIEQRYRFFSYGDAMLLTKREA

SEQ ID NO: 69508 - protein, 348 aa, unidentified
  source 1..348: note = Oceanisphaera psychrotolerans
  REGION 1..348: note = tr|A0A1J4QHG6|A0A1J4QHG6_9GAMM S-adenosylmethionine:tRNA ribosyltransferase-isomerase; OS = Oceanisphaera psychrotolerans OX=1414654 GN=queA PE=3; SV = 1
MLVRDFSFELPDELIARHPMPERSASRLLQLNGNSGDITHGQFGQILNLVNPGDLLVFNNTRVIPARLFGRKASGGKLEVLVERVLDDKRVLAHVRASKAPKPGSALVLEPDVQATMLARHDALFEIEFHDERPVLEILEAVGHMPLPPYIDRPDTDADKERYQTVYNEKPGAVAAPTAGLHFDQPLLDALTAKGAELAFVTLHVGAGTFQPVRVDKVLEHKMHAEYIEVSPEVVAQIAATRARGGRVIAVGTTSVRSLESAARATMANGEPLAPFYGDTDIFIYPGYRFQLVDAMITNFHLPESTLIMLVSAFAGYDHIMEAYRQAVAERYRFFSYGDAMFITRQQG

SEQ ID NO: 69509 - protein, 339 aa, unidentified
  source 1..339: note = Oceanispirochaeta sp.
  REGION 1..339: note = tr|A0A370B0E6|A0A370B0E6_9SPIO S-adenosylmethionine:tRNA ribosyltransferase-isomerase; OS = Oceanispirochaeta sp. M1 OX=2283433 GN=queA PE=3 SV=1
MKIREFSFNLPPEQIAQHPPEERGTAKLMVMDRENGQVSHKNMQDFPDLIEPGTLVIFNNSRVRKARVFAFSEHGGKVEFFFLKSLEENLWLCMVSKAKKQKTGKKFSFPGDLKGVIEEEVSSNHRKVRFSAPVDDDYLDIHGHIPLPPYIKREDSKDDSERYQSVFSKETGSVAAPTASLHFTDEILGRLKERGIETAFITLHVGLGTFEPVRTESILDHEMHEEQFSISDETADKVEKAVREGRPVLAVGTTSVRTLESAWVDGKLQRGENSTDIFIYPGYEFKVVNRMFTNFHTPESTLLVLVSAFAGKDHIDAAYKEAVEKGYMFFSYGDAMLMK

SEQ ID NO: 69510 - protein, 339 aa, unidentified
  source 1..339: note = Oceanispirochaeta sp.
  REGION 1..339: note = tr|A0A5C1QM78|A0A5C1QM78_9SPIO S-adenosylmethionine:tRNA ribosyltransferase-isomerase; OS = Oceanispirochaeta sp. K2 OX=2518645 GN=queA PE=3 SV=1
MKIRDFSFNLPPEQVAQHPPETRGTAKLMVLNRTSGEISHKNMQDFPDLVEEGTLVVFNNSRVRKARVYAQSEFGGRVEFFFLKSLEEDLWLCMVSKAKKQKRGKTFQFPGDLKGTITEEVSNNHRKVRFSSPVDDDYLDQFGHIPLPPYIKRDDSDEDAERYQSVFSKETGSVAAPTASLHFTDEIIEKLHKKGVETTFVTLHVGLGTFEPVRTESILDHKMHEEQFFISEETALKVEAAVREGRPILAVGTTSVRTLESAWGNGQLKRGENSTDIFIYPGYEFQVVNRMFTNFHTPESTLLVLVSAFAGKKTIEKAYEEAVASGYMFYSYGDAMLML

SEQ ID NO: 69511 - protein, 339 aa, Oceanithermus desulfurans
  REGION 1..339: note = tr|A0A511RKM8|A0A511RKM8_9DEIN S-adenosylmethionine:tRNA ribosyltransferase-isomerase; OS = Oceanithermus desulfurans NBRC 100063 OX=1227550; GN = queA PE=3 SV=1
MNEPGRRVEDYDYPLPQERIAQEGVEPRDRSRLMVVERGRGVRAHARFFELPRFLRAGDLLVFNETKVIPARLAGVKEGGARVEALLVREEAPDRWWAMVRPGRRLRPGARVRFGELAAEVAAVDDEGLRLLVFSGAVRPRLERLGATPLPPYLHRPVDPARYQTVYARREGSVAAPTAGLHFTPRLLEDLAAMGVEQARVVLHVGPGTFQPVKGSIEEHRMHAERYEVPPEAAAQVNRALAEGRRVVAVGTTVVRTLESAFAPGEGVRAGAGETRLFIRPPYRFRVVGGLVTNFHLPRSTLLMLVAAFAGYELTMAAYREALTREYRFFSLGDAMLIV

SEQ ID NO: 69512 - protein, 339 aa, Oceanithermus profundus
  REGION 1..339: note = tr|E4U873|E4U873_OCEP5 S-adenosylmethionine:tRNA ribosyltransferase-isomerase OS=Oceanithermus profundus (strain DSM 14977 / NBRC 100410 / VKM B-2274 / 506); OX = 67048 7 GN=queA PE=3 SV=1
MSEPGRRIEDYDYPLPEERIAQEGASPRDHSRLMVVERGRGVRAHARFFELPRFLRAGDLLVFNETKVIPARIFGVKEGGARVEALLVREEAPERWWAMVRPGRRLRPGARVRFGELAAEVAAVDDEGLRLLVFSGPVRPLLERLGRTPLPPYIHRPVDPERYQTVYARREGSVAAPTAGLHFTPRLLEELAAMGVEQARVVLHVGPGTFQPVKGAIEEHRMHAERYEVPAEAAARVNRALAEGRRVVAVGTTVVRTLEAAFAPGEGVRPGAGETRLFIRPPYRFQVVGGLVTNFHLPRSTLLMLVAAFAGYEVTMAAYREALARDYRFFSLGDAMVIV

SEQ ID NO: 69513 - protein, 342 aa, unidentified
  source 1..342: note = Oceanobacillus arenosus
  REGION 1..342: note = tr|A0A3D8PT54|A0A3D8PT54_9BACI S-adenosylmethionine:tRNA ribosyltransferase-isomerase; OS = Oceanobacillus arenosus OX=1229153 GN=queA PE=3 SV=1
MNIEDFDYHLPEELIAQTPLKDRTASRLMVIDRETKEIANKHFPDVMQYLQAGDTLVLNDTRVLPARLYGVKKDTGAKIEVLLLRQEENDTWEVLTKPAKKVKVGTELVFGDGKLTAVCKDFKDHGGRVLEFSYEGIFYEILDQLGEMPLPPYIKEQLPEKERYQTVYAREEGSAAAPTAGLHFTNELLAEIKEMGVNIAFITLHVGLGTFRPVSVDTIEDHEMHSEFYQMTKETAELLNQTKASGGRIISVGTTSTRTLETIARDNQGTFTESSGWTNIFIYPPYEFKAIDGLITNFHLPKSTLIMLVSALVDRETILHAYKEAVNEKYRFFSFGDAMLII

SEQ ID NO: 69514 - protein, 342 aa, unidentified
  source 1..342: note = Oceanobacillus bengalensis
  REGION 1..342: note = tr|A0A494Z5U6|A0A494Z5U6_9BACI S-adenosylmethionine:tRNA ribosyltransferase-isomerase; OS = Oceanobacillus bengalensis OX=1435466 GN=queA PE=3 SV=1
MNIEDFDFHLPEELIAQTPLKDRASSRLMALNRETKEIKHQHFSDIKNHLKEGDCLVLNDTKVLPARLYGVKKDTGAKIEVLLLHQEEKDTWEVLTKPAKKVKVGTELVFGDGLLKATCKDYKEHGGRVLEFSYDGIFYEVLDQLGEMPLPPYIKEQLSEKDRYQTVYAKEEGSAAAPTAGLHFTNELLEEIQEMGVTIAFITLHVGLGTFRPVSVETIEAHKMHSEFYHMSKETAETLNKIKKSGGRIISVGTTSTRTLETIARDYDGKFVETSGWTDIFIYPPYTFKAIDGLITNFHLPKSTLIMLVSSLVDRDTILKAYNEAVKERYRFFSFGDAMLIL

SEQ ID NO: 69515 - protein, 342 aa, unidentified
  source 1..342: note = Oceanobacillus chungangensis
  REGION 1..342: note = tr|A0A3D8Q0V2|A0A3D8Q0V2_9BACI S-adenosylmethionine:tRNA ribosyltransferase-isomerase; OS = Oceanobacillus chungangensis OX=1229152 GN=queA PE=3; SV = 1
MNIEDFDYHLPEELIAQTPLKDRTASRLMVIDKEKKQFAHQHFTDVKQHLRAGDTLVLNDTRVLPARLYGVKKDTGAKIEVLLLRQEENDTWEVLTKPAKKVKVGTELVFGDGKLTAVCKEFKDHGGRMLEFSYEGIFYEVLDQLGEMPLPPYIKEQLPEKERYQTVYAKEEGSAAAPTAGLHFTNDLLAEIKSMGVNIAFITLHVGLGTFRPVSVDTIEDHEMHSEFYQMTNETAKLLNQTKASGGRIISVGTTSTRTLETIARDNQGTFKESSGWTNIFIYPPYQFKAIDGLITNFHLPKSTLIMLVSALVDRETILEAYKEAVNEKYRFFSFGDAMLII

SEQ ID NO: 69516 - protein, 342 aa, unidentified
  source 1..342: note = Oceanobacillus halophilus
  REGION 1..342: note = tr|A0A495AH50|A0A495AH50_9BACI S-adenosylmethionine:tRNA ribosyltransferase-isomerase; OS = Oceanobacillus halophilus OX=930130 GN=queA PE=3 SV=1
MNIEDFDFDLPEELIAQTPLKDRTSSRLLVLDKESKEISHQHFRDIKKYLKPGDCLVLNNTKVLPARLYGVKEDTGAKIEVLLLHQDEKDTWEVLTKPAKKVKEGTKLIFGDGLLKATCTGYKNHGGRILQFSYDGIFYEVLDKLGEMPLPPYIKEQLPEKERYQTVYAKEEGSAAAPTAGLHFTNELLQEIKDMGVTISFITLHVGLGTFRPVSVDSVEEHEMHAEFYQMTKKTADTLNKVKEDGGRIISIGTTSTRTLETIARDHDGQFVESSGWTDIFIYPPYEFKAINGLITNFHLPKSTLIMLVSALVDRETILKAYNEAVKERYRFFSFGDAMLIL

SEQ ID NO: 69517 - protein, 342 aa, Oceanobacillus iheyensis
  REGION 1..342: note = sp|Q8EPQ8|QUEA_OCEIH S-adenosylmethionine:tRNA ribosyltransferase-isomerase OS=Oceanobacillus iheyensis (strain DSM 14371 / CIP 107618 / JCM 11309 / KCTC 3954 / HTE8 31) OX=221109 GN=queA PE=3 SV=1
MQIEDFDFHLPEELIAQTPLKDRTSSRLCVLDKQTSEITHRSFKDITTYLQAGDCLVLNDTKVLPARLYGVKSDTGAKIEVLLLHQQEEDTWEVLVKPAKKVKVGTEIIFGNGKLKATCIDLKDHGGRIMTFSYTGIFYEILDQLGEMPLPPYIKEQLPEQDRYQTVYAKEKGSAAAPTAGLHFTDKLLEDIKAMGVNIVFVTLHVGLGTFRPVSVDSVEDHDMHSEFYSMSESAAKTLNEAKAAGRRIISVGTTSTRTLETIVRDHDGKFVATRGWTDIFIYPPYKFRAIDGLITNFHLPKSTLIMMISALAGKEAILHAYNEAVKEEYRFFSFGDAMLIL

SEQ ID NO: 69518 - protein, 341 aa, Oceanobacillus iheyensis
  REGION 1..341: note = tr|A0A2P1WKY3|A0A2P1WKY3_9BACI S-adenosylmethionine:tRNA ribosyltransferase-isomerase; OS = Oceanobacillus iheyensis OX=182710 GN=queA PE=3 SV=1
MNIEDFDFHLPEELIAQTPLKDRTSSRLLVLDKNKKELDHKKFKDIKDYIKPGDALVLNDTRVLPARLYGVKEDTGANIEVLLLHQENGDTWEVLAKPAKKVKQGSVITFGDGKLQATCVGLKEHGGRVMEFSYSGIFYEVLDELGEMPLPPYIKEKLPEKERYQTVYAKEEGSAAAPTAGLHFTNELLDELKAKGVTVSFITLHVGLGTFRPVSVDNIDDHQMHSEFYHMSQETADTLNQIKEQGGRIISVGTTSTRTLETIARDNGTFVETSGWTDIFIYPPYQFRAVDGLITNFHLPKSTLIMLVSALADKDSILRAYEEAVREKYRFFSFGDAMLII

SEQ ID NO: 69519 - protein, 342 aa, unidentified
  source 1..342: note = Oceanobacillus limi
  REGION 1..342: note = tr|A0A1I0HFB8|A0A1I0HFB8_9BACI S-adenosylmethionine:tRNA ribosyltransferase-isomerase; OS = Oceanobacillus limi OX=930131 GN=queA PE=3 SV=1
MNIEDFDFNLPEELIAQTPLKDRTASRLLVLNKDTKDVAHDSFKNIKQYLQKGDCLVLNDTRVLPARLYGVKEDTGANIELLLLHQQERDTWEVLTKPAKKVKEGTTIVFGDGKLRATCVGLKDHGGRIFEFSYEGIFYEVLDQLGEMPLPPYIKEQLPERERYQTVYAKEEGSAAAPTAGLHFTEELLDEIKEMGVTITFITLHVGLGTFRPVSVDDIDNHEMHAEFYHMSEETAKTLTNVKEAGGRIISVGTTSTRTLETIARDNDGKFVASSGWTDIFIYPPYQFRAIDGLITNFHLPKSTLIMLVSALVDRETVLSAYKVAVQEKYRFFSFGDAMLII

SEQ ID NO: 69520 - protein, 344 aa, Oceanobacillus oncorhynchi
  REGION 1..344: note = tr|A0A0A1MWB5|A0A0A1MWB5_9BACI S-adenosylmethionine:tRNA ribosyltransferase-isomerase; OS = Oceanobacillus oncorhynchi OX=545501 GN=queA PE=3 SV=1
MDMNIEDFDFDLPEELIAQTPLKDRTASRLCVLDKQTGRIQHQHFSDIIDYLQTGDCLVLNDTKVLPARLYGVKEDTGAKLEVLLLHQEEGDSWEVLVKPAKKVKKGTVIDFGDGLLKAVCTGTKEHGGRTVEFSYQGIFYEILDELGEMPLPPYIKEQLSEKDRYQTVYAKEKGSAAAPTAGLHFTDALLQQIREKGVQIIFITLHVGLGTFRPVSVDSVEEHTMHSEFYRMSEEAADTLNQAKVEGRRIISVGTTSTRTLETIARDYDGSFAETSGWTDIFIYPPYQYQAIDGLITNFHLPKSTLIMLVSALAGKDEVLHAYHEAVKERYRFFSFGDAMLII

SEQ ID NO: 69521 - protein, 341 aa, Oceanobacillus picturae
  REGION 1..341: note = tr|W9A8E0|W9A8E0_9BACI S-adenosylmethionine:tRNA ribosyltransferase-isomerase OS=Oceanobacillus picturae; OX = 171693 GN=queA PE=3 SV=1
MNIEDFDFHLPEELIAQTPLKDRTSSRLLVLDKNKKELDHKKFKDIKDYIKPGDALVLNDTRVLPARLYGVKEDTGANIEVLLLHQENGDTWEVLAKPAKKVKQGSVITFGDGKLQATCVGLKEHGGRVMEFSYSGIFYEVLDELGEMPLPPYIKEKLPEKERYQTVYAKEEGSAAAPTAGLHFTNELLDELKAKGVTVSFITLHVGLGTFRPVSVDNIDDHQMHSEFYHMSQETADTLNQIKEQGGRIISVGTTSTRTLETIARDNGTFVETSGWTDIFIYPPYQFRAVDGLITNFHLPKSTLIMLVSALADKDSILHAYKEAVRERYRFFSFGDAMLII

SEQ ID NO: 69522 - protein, 342 aa, Oceanobacillus profundus
  REGION 1..342: note = tr|A0A417YJ67|A0A417YJ67_9BACI S-adenosylmethionine:tRNA ribosyltransferase-isomerase; OS = Oceanobacillus profundus OX=372463 GN=queA PE=3 SV=1
MNIEDFDFDLPESLIAQTPLKDRTASRLLVLNPATKEITHQHFADIKNYFKKGDCLVLNDTRVLPARLYGVKKDTGANIEVLLLHQEAQDTWEVLTKPAKKVKVGTELIFGDGKLKATCTGLKEHGGREMKFSYDGIFYEVLDELGEMPLPPYIKEQLPEKERYQTVYAKEEGSAAAPTAGLHFTTELLEEIKELGVNIAFITLHVGLGTFRPVSVDDIDEHEMHSEFYQMTEETAATLNEIKANGGRIISVGTTSTRTLETIARDNDGKFVASSGWTDIFIYPPYQFKAIDGLITNFHLPKSTLIMLVSALADRETVLHAYREAVREQYRFFSFGDAMLIL

SEQ ID NO: 69523 - protein, 342 aa, Oceanobacillus sojae
  REGION 1..342: note = tr|A0A511ZDI6|A0A511ZDI6_9BACI S-adenosylmethionine:tRNA ribosyltransferase-isomerase; OS = Oceanobacillus sojae OX=582851 GN=queA PE=3 SV=1
MNIEDFDFDLPEELIAQTPLKDRTASRLCVLDKQTGQIQHQHFSDIINYLHAGDCLVLNDTKVLPARLYGVKEDTGAKIEVLLLHQEENDNWEVLVKPAKKVKEGTVIDFGDGLLKAVCTDIKKHGGRTVKFSYDGIFYEILDELGEMPLPPYIKEQLSEKDRYQTVYAKEKGSAAAPTAGLHFTNELLQQIKDKGVEVIFITLHVGLGTFRPVSVDSVEEHTMHSEFYRMSQKASESLNNAKAEGRRIISVGTTSTRTLETIARDNNGAFVETSGWTDIFIYPPYQYQAIDGLITNFHLPKSTLIMLVSALAGKDEVLHAYREAVRERYRFFSFGDAMLII

SEQ ID NO: 69524 - protein, 341 aa, Oceanobacillus sp.
  REGION 1..341: note = tr|A0A1E5K498|A0A1E5K498_9BACI S-adenosylmethionine:tRNA ribosyltransferase-isomerase; OS = Oceanobacillus sp. E9 OX=1742575 GN=queA PE=3 SV=1
MQIEDFDFHLPEELIAQTPLKDRTSSRLCVLDKQTSEITHRHFKDITTYLQAGDCLVLNDTKVLPARLYGVKSDTGAKIEVLLLHQQEEDTWEVLVKPAKKVKIGTEVVFGNGELKATCIDLKDHGGRIMTFSYTGIFYEILDQLGEMPLPPYIKEQLPEQDRYQTVYAKEKGSAAAPTAGLHFTDKLLADIEAMGVNIVFVTLHVGLGTFRPVSVDSIEDHDMHSEFYSMSEVAAEKLNEAKTTGRRIISVGTTSTRTLETVVRDHDKFVATSGWTDIFIYPPYEFRAIDGLITNFHLPKSTLIMMISALAGKEAILHAYNEAVKEKYRFFSFGDAMLIL

SEQ ID NO: 69525 - protein, 342 aa, Oceanobacillus sp.
  REGION 1..342: note = tr|A0A345PHU6|A0A345PHU6_9BACI S-adenosylmethionine:tRNA ribosyltransferase-isomerase; OS = Oceanobacillus sp. 160 OX=2052660 GN=queA PE=3 SV=1
MNIEDFDYHLPEELIAQTPLKDRTASRLMVIDKEKKEFAHKHFSDIKQHLQPGDTLVLNDTRVLPARLYGIKKDTGAKIEVLLLRQEENDTWEVLTKPAKKVKVGTELVFGDGKLTAVCKGFKDHGGRILEFSYEGIFYEVLDQLGEMPLPPYIKEQLSEKERYQTVYAKEEGSAAAPTAGLHFTNDLLAEIKSMGVNIAFITLHVGLGTFRPVSVDTIEDHEMHSEFYQMTKETAELLNQTKATGGRIISVGTTSTRTLETIARDNQGAFNESSGWTNIFIYPPYEFKAIDGLITNFHLPKSTLIMLVSALVDRETILEAYKEAVNEKYRFFSFGDAMLII

SEQ ID NO: 69526 - protein, 348 aa, Oceanobacter sp.
  REGION 1..348: note = tr|A0A2G2JRG8|A0A2G2JRG8_9GAMM S-adenosylmethionine:tRNA ribosyltransferase-isomerase; OS = Oceanobacter sp. OX=2030817 GN=queA PE=3 SV=1
MKTSDFSFELPDELIARYPMPERSSSRLLVFDTEQDQIQDRIFRDIEELLVPGDLLVFNNTRVIPARLFGEKLSGGKLEALVERVIGEHDVLAHVRCSRSPKPGQQIRLGNALVEVVGREDALFHLRFPSDKPVLDVLEEIGHMPLPHYMERDDAEEDRERYQTVYAEKPGAVAAPTAGLHFDEPLLERLKAKGIRFAFVTLHVGAGTFKPVKVDNVNEHVMHSEYIEVSDDVVKAVKDTRAHGNRVVAVGTTSVRSLESASQSGQIESFYGDSQIFIYPGYQFRSVDAIITNFHLPESTLIMLISAFAGRDGTLAAYDHAVTEGYRFYSYGDAMFLPNKISNEASPS

SEQ ID NO: 69527 - protein, 338 aa, unidentified
  source 1..338: note = Oceanococcus atlanticus
  REGION 1..338: note = tr|A0A1Y1SFB5|A0A1Y1SFB5_9GAMM S-adenosylmethionine:tRNA ribosyltransferase-isomerase; OS = Oceanococcus atlanticus OX=1317117 GN=queA PE=3 SV=1
MQRSDFAYTLPPELIAQQPPEQRAGARLLQLDGDQLHDRWVRDLPTLLRPNDLVVFNDTRVIPARLHAHKPTGGAVEIMIERVVDDHHVWAFLRASKTPKPGAIIALEQASIEVLGRDGQLFHLRNAEPGWSDLMQAHGEVPLPPYIQRHADAQDNERYQTVYARHAGAVAAPTAGLHFDQALLDAVSARGAQMDYVTLHVGAGTFQPVRADDLSEHRMHAERLRVSAELVARVAETKAAGGRVVAIGTTVVRALESAAASGQLQPFDGDSRLFITPGYRFRVVDALMTNFHLPESTLLMLVSAFAGYTPVMRAYRHAVEQRYRFFSYGDAMWLERAA

SEQ ID NO: 69528 - protein, 338 aa, unidentified
  source 1..338: note = Oceanococcus sp.
  REGION 1..338: note = tr|A0A520ST53|A0A520ST53_9GAMM S-adenosylmethionine:tRNA ribosyltransferase-isomerase; OS = Oceanococcus sp. OX=1958892 GN=queA PE=3 SV=1
MQRSDFAYTLPPELIAQQPPEQRAGARLLQLDGDQLHDRWVRDLPTLLRPNDLVIFNDTRVIPARLHAHKPTGGAVEIMIERVVDDHHVWAFLRASKTPKPGAIIALEQASIEVLGRDGQLFHLRNAEPGWSDLMQAHGEVPLPPYIQRHADAQDNERYQTVYARHAGAVAAPTAGLHFDQALLDAVSARGAQMDYVTLHVGAGTFQPVRADDLSEHRMHAERLRVSAELVARVAETKAAGGRVVAIGTTVVRALESAAASGQLQPFDGDSQLFITPGYRFRVVDALMTNFHLPESTLLMLVSAFAGYTPVMRAYRHAVEQRYRFFSYGDAMWLERAA

SEQ ID NO: 69529 - protein, 347 aa, unidentified
  source 1..347: note = Oceanospirillaceae bacterium
  REGION 1..347: note = tr|A0A2D5WPT4|A0A2D5WPT4_9GAMM S-adenosylmethionine:tRNA ribosyltransferase-isomerase; OS = Oceanospirillaceae bacterium OX=1899355 GN=queA PE=3; SV = 1
MKTSDFSFELPDHLIARHPAAERSASRLLVFDPQLQQIDDRIFRDIESLIEPGDLLVFNNTRVIPARLFGEKASGGKLEALIERVVSEHEVLAHLRSSRSPKPGQLVSLGGEDAEVVGREGALFHLRFTSDRPVLDILEDVGHMPLPPYMEREDAAEDRERYQTVYAEKPGAVAAPTAGLHFDDGLLDRLSTKGVNFAFVTLHVGAGTFQPVKVDNIHEHHMHSEYIEVPADVVDAVRATRAAGKRVIAVGTTSVRSLESASRSGAIEVFQGDSDIFIFPGYEFRSVDAMITNFHLPESTLIMLVSAFAGREGTLAAYDHAVANEYRFYSYGDAMFMPCRLRQSSGS

SEQ ID NO: 69530 - protein, 349 aa, unidentified
  source 1..349: note = Oceanospirillaceae bacterium
  REGION 1..349: note = tr|A0A2D5PGZ6|A0A2D5PGZ6_9GAMM S-adenosylmethionine:tRNA ribosyltransferase-isomerase; OS = Oceanospirillaceae bacterium OX=1899355 GN=queA PE=3; SV = 1
MKTKDFDFDLPDELIARYPMAERSSSRLLVLDGVTGQTTHLVFRDLLDKAEAGDLLVFNNTRVIPARLFGEKASGGKLEALIERMTGEHTALAHLRSSRSPKPGSRITLGGVEVDVSGRQGALFELTFLDERPLLSILEEVGHMPLPPYMAREDAEEDRERYQTVYAEKPGAVAAPTAGLHFDEPLLTALKEKGVNFAYVTLHVGAGTFQPVKVDTIEEHEMHAEYIEVPQDVVDAVKATRAAGKRVIAVGTTSVRSLESASSDGEIAPFYGESRIFIYPGYRFRSVDAMITNFHLPESTLIMLVSAFAGRDNTLAAYAEAVAGKYRFYSYGDAMFLERPQPLVSEESA

SEQ ID NO: 69531 - protein, 354 aa, unidentified
  source 1..354: note = Oceanospirillales bacterium
  REGION 1..354: note = tr|A0A2A4XLI7|A0A2A4XLI7_9GAMM S-adenosylmethionine:tRNA ribosyltransferase-isomerase; OS = Oceanospirillales bacterium OX=1914300 GN=queA PE=3 SV=1
MNVSDFHFDLPDELIARYPLRERSASRLLCLEGTTGDTAHRLFTDLPDLLQPGDLLVFNNTRVIPARLFGKKETGGQVEVLVERVTGEHDLVAHVRASKALKEGQKVILEDGTALRMTGRSDALFHLESEADEPVLDTLERIGHMPLPPYVDRPDESTDRERYQTVYAKEAGAVAAPTAGLHFDESVLEALKQRGVESTFVTLHVGAGTFQPVRVDRIDDHVMHSEIAHVPEEAVEAVNRARARGGRVVAVGTTSVRSLESASRGGCLKPFRGETDIFIYPGYRFQTVDALVTNFHLPESTLIMLVSAFAGYEHVKHAYRDAIVEKYRFFSYGDAMFITGQKPSLLSLNIGDTP

SEQ ID NO: 69532 - protein, 369 aa, unidentified; identical to SEQ ID NO: 68602
  source 1..369: note = Oceanospirillales bacterium
  REGION 1..369: note = tr|A0A2E5S8F1|A0A2E5S8F1_9GAMM S-adenosylmethionine:tRNA ribosyltransferase-isomerase; OS = Oceanospirillales bacterium OX=1914300 GN=queA PE=3 SV=1

SEQ ID NO: 69533 - protein, 355 aa, Oceanospirillum linum
  REGION 1..355: note = tr|A0A1T1HFU2|A0A1T1HFU2_OCELI S-adenosylmethionine:tRNA ribosyltransferase-isomerase; OS = Oceanospirillum linum OX=966 GN=queA PE=3 SV=1
MLRTDFTFNLPESLIARYPTKERTASRLLQVDGESGVLSHGQFTDILDLVQPGDLMVFNDTRVIPARLFGRKESGGKIEILLERLQEDNRALAHIRSSRSPKAGAKLILQDDSEVEVLGRQDALFEIQFDPQADLLELLEKIGHMPLPPYIDREDELEDRERYQTVYGKNAGAVAAPTAGLHFDEALLQSLADKGVKTAFVTLHVGAGTFQPVKADNIFEHHMHSEFVQVSAAVCQQVKETKARGNRVIAVGTTSVRCLETAAKLSSIPGEIEPVQTDTNIFIYPGYRFQVVDSLLTNFHLPESTLLMLVSALAGYSTMMQAYKEAVEQEYRFFSYGDAMFISQNTQPDLPPSAA

SEQ ID NO: 69534 - protein, 353 aa, Oceanospirillum multiglobuliferum
  REGION 1..353: note = tr|A0A1T4M1U0|A0A1T4M1U0_9GAMM S-adenosylmethionine:tRNA ribosyltransferase-isomerase; OS = Oceanospirillum multiglobuliferum OX=64969 GN=queA PE=3; SV = 1
MLRTDFSFELPDDLIARYPTAERTASRLLCVEGVSGQLSHRHFSDLLALVEPGDLMVFNDTRVIPARLFGKKESGGQIEILIERLLDHNQALAHIRSSRSPKAGSKLILENGTELLVLGRQDALFELQFPESGSVLELLDQVGHMPLPPYISREDELSDRERYQTVYGKNAGAVAAPTAGLHFDDALLAALKEKGVEMAFVTLHVGAGTFQPVKAESIFEHHMHSEMIQVSAEVCEQVKAAKARGNRVIAVGTTSVRCLETAARSGEITPMETDTNIFIYPGYRFNVVDALVTNFHLPESTLLMLVCALGGYRNLMNAYEHAVQLQYRFFSYGDAMFITKNTAPDLPPSAMTE

SEQ ID NO: 69535 - protein, 351 aa, Oceanospirillum sp.
  REGION 1..351: note = tr|A0A2D5GDL1|A0A2D5GDL1_9GAMM S-adenosylmethionine:tRNA ribosyltransferase-isomerase; OS = Oceanospirillum sp. OX=2021254 GN=queA PE=3 SV=1
MLRTDFSFDLPDELIARYPTAERTASRLLCLNGAEGTIQHNGFIDILNLVQPGDLMVFNDTRVIPARLFGQKETGGKIEILLERLQDNNTALAHIRSSRSPKPGAKLLLQDGTAVEVLGRQESLFELQFPLDMNLLDLLDKIGHMPLPPYIEREDELSDRERYQTVYSKNAGAVAAPTAGLHFDEPLLQALKDKGVETAFVTLHVGAGTFQPVKADNIFEHHMHSEYIQVSDEVCQQVKAAKARGNRVIAVGTTSVRCLETASASGEIEPMATDTNIFIYPGYRFNVVDALVTNFHLPESTLMMLVSALGGYRNIMQAYREAVQEKYRFFSYGDAMFITQNPEPDLPPSAE

SEQ ID NO: 69536 - protein, 336 aa, Oceanotoga teriensis
  REGION 1..336: note = tr|A0A316D3E2|A0A316D3E2_9THEM S-adenosylmethionine:tRNA ribosyltransferase-isomerase; OS = Oceanotoga teriensis OX=515440 GN=queA PE=3 SV=1
MYRIEEYDYYLPQEQIAQDPVEPRDSSKLMILDREKKTIEHKIFREIIDYLNPKDLLIVNNTKVIPARIYGKKSTGAKIEILLLEKIGEGNKWKSLVKPGGKIKLGNELIFSNKLKAKVIKHYDDGARLLEFYGENIWDEINKIGETPLPPYIHKKLEDNNRYQTNYAKIEGAVAAPTAGLHFTKELLDKISKKGIDLEEVTLHVGLGTFRPVNEEDIRNHQIHEEYYSISEDVKNKIEETKKNGGRIIAVGTTVVRTLESYALNKKLSGKTNIYIYPPYNFKIVDGLITNFHLPKSSLLMLVSAFNGHQFTMKSYKEAVEKNYRFFSFGDAMFIK

SEQ ID NO: 69537 - protein, 363 aa, Ochrobactrum anthropi
  REGION 1..363: note = sp|A6X0Y9|QUEA_OCHA4 S-adenosylmethionine:tRNA ribosyltransferase-isomerase OS=Ochrobactrum anthropi (strain ATCC 49188 / DSM 6882 / JCM 21032 / NBRC 15819 / NCTC 12 168) OX=439375 GN=queA PE=3 SV=1
MRVDLFDFDLPEESIALRPAEPRDHARLLRVRPGQPFEDRQVFELPDLLQPGDALVFNDTKVIPAQLEGMRERDGNISQVSATLHMRTGPDRWKAFLRPGKRVKEGDRIRFGHSGSSCFLGTLDATVAEKGDAGEALLVFDLSGAMLDEAIASVGHIPLPPYIASKRAEDERDRKDYQTVYAREEGAVAAPTAGLHFTPDLLEKIKAKGVEEHFVTLHVGAGTFLPVKADDTTDHKMHSEIGYVSQRTADALNAVHERGGKIICVGTTSLRLIESAAGEDGIIRPWAGATDIFITPGYKFRAVDLLMTNFHLPRSTLFMLVSAFSGFETMHAAYEHAISNGYRFYSYGDASLLERADKAKDTA

SEQ ID NO: 69538 - protein, 363 aa, Ochrobactrum anthropi
  REGION 1..363: note = tr|A0A011T235|A0A011T235_OCHAN S-adenosylmethionine:tRNA ribosyltransferase-isomerase; OS = Ochrobactrum anthropi OX=529 GN=queA PE=3 SV=1
MRVDLFDFDLPEESIALRPAEPRDHARLLRVRPGQPFEDRQVFELPDLLQPGDALVFNDTKVIPAQLEGMRERDGNISQVSATLHMRTGPDRWKAFLRPGKRIKEGDRIRFGHSGSSCFLGTLDATVAEKGDAGEALLVFDLSGAMLDEAIASVGHIPLPPYIASKRAEDERDRKDYQTVYAREEGAVAAPTAGLHFTPDLLEKIKAKGVEEHFVTLHVGAGTFLPVKADDTTDHKMHSEIGYVSQRTADALNAVHERGGKIICVGTTSLRLIESAAGEDGIIRPWAGATDIFITPGYKFRAVDLLMTNFHLPRSTLFMLVSAFSGFETMHAAYEHAISNGYRFYSYGDGSLLERADKAKDTA

SEQ ID NO: 69539 - protein, 363 aa, Ochrobactrum cytisi
  REGION 1..363: note = tr|A0A1J6HIS1|A0A1J6HIS1_9RHIZ S-adenosylmethionine:tRNA ribosyltransferase-isomerase; OS = Ochrobactrum cytisi OX=407152 GN=queA PE=3 SV=1
MRVDLFDFDLPEESIALRPAEPRDHARLLRVRPGQPFEDRQVFELPDLLQPGDALVFNDTKVIPAQLEGMRERDGNISQVSATLHMRTGPGRWKAFLRPGKRVKEGDRIRFGHSGSSCFLGTLDATVAEKGDAGEALLVFDLSGAMLDEAIASVGHIPLPPYIASKRAEDERDRKDYQTVYAREEGAVAAPTAGLHFTPDLLEKIKAKGVEEHFVTLHVGAGTFLPVKADDTTDHKMHSEIGYVSQRTADALNAVHERGGKIICVGTTSLRLIESAAGEDGIIRPWAGATDIFITPGYKFRAVDLLMTNFHLPRSTLFMLVSAFSGFETMHAAYEHAISNGYRFYSYGDGSLLERADKAKDTA

SEQ ID NO: 69540 - protein, 356 aa, Ochrobactrum gallinifaecis
  REGION 1..356: note = tr|A0A502BNX0|A0A502BNX0_9RHIZ S-adenosylmethionine:tRNA ribosyltransferase-isomerase; OS = Ochrobactrum gallinifaecis OX=215590 GN=queA PE=3 SV=1
MRVDLFDFDLPDESIALRPAEPRDHAKLLRVRPGQPFEDRQVFELPDLLQPGDALVFNDTKVIPAQLEGMRERDGNISQVSATLHMRIGADRWKAFLRPAKRVKEGDRIRFGHSGSSCFMGTLGATVAEKGDAGEVLLVFDLSGAMLDEAIAAVGHIPLPPYIASKRPEDERDRSDYQTVYAREEGAVAAPTAGLHFTPELLTKIRERGIEEHFVTLHVGAGTFLPVKADDTTDHKMHSEIGYVSKETADALNAVHARGGRIICVGTTSLRLIESASGADGIIRPWAGPTDIFITPGYKFRAVDLLMTNFHLPRSTLFMLVSAFSGFEVMHDAYKHAIKTGYRFYSYGDSSLLERA

SEQ ID NO: 69541 - protein, 356 aa, Ochrobactrum grignonense
  REGION 1..356: note = tr|A0A256FMJ7|A0A256FMJ7_9RHIZ S-adenosylmethionine:tRNA ribosyltransferase-isomerase; OS = Ochrobactrum grignonense OX=94627 GN=queA PE=3 SV=1
MRVDLFDFDLPDERIALRPAEPRDHAKLLRVRPGQPFEDRQVFELPDLLQPGDALVFNDTKVIPAQLEGMREREGNISQVSATLHMRTGLDRWKAFLRPAKRVKEGDRIRFGHSGSSCFMGALDATVAEKGDAGEVLLVFDLSGAMLDEAIAAVGHIPLPPYIASKRAEDERDRSDYQTVYAREEGAVAAPTAGLHFTPDLLERIRERGIEEHFVTLHVGAGTFLPVKADDTTDHKMHSEIGYVSQETADALNAVHARGGRVICVGTTSLRLIESAAGEDGIIRPWAGPTDIFITPGYKFRAVDLLMTNFHLPRSTLFMLVSAFSGFDTMQEAYKRAIETGYRFYSYGDASLLERA

SEQ ID NO: 69542 - protein, 356 aa, Ochrobactrum haematophilum
  REGION 1..356: note = tr|A0A397L0N8|A0A397L0N8_9RHIZ S-adenosylmethionine:tRNA ribosyltransferase-isomerase; OS = Ochrobactrum haematophilum OX=419474 GN=queA PE=3 SV=1
MRVDLFDFDLPEERIALRPAEPRDHARLLRVSPGQPFEDRHVYDLPDLLQPGDALVFNDTKVIPAQLEGMRERDGNISQVSATLHMRVGPDRWKAFLRPAKRVKEGDRIRFGHSGSSCFLGTLDATVTEKGDAGEALLVFDLSSAALDEAIAAVGHIPLPPYIASKRAEDDRDRSDYQTVYAREEGAVAAPTAGLHFTPELLEKIKTKGIEEHFVTLHVGAGTFLPVKADDTNDHKMHSEIGHVSQATADALNAVHERGGRVVCVGTTSLRLIESAAGEDGIIRPWSGATDIFITPGYRFRAVDMLMTNFHLPRSTLFMLVSAFSGLDTMRAAYEHAIATGYRFYSYGDGSLLERA

SEQ ID NO: 69543 - protein, 356 aa, Ochrobactrum haematophilum; identical to SEQ ID NO: 64450
  REGION 1..356: note = tr|A0A2P9HNB9|A0A2P9HNB9_9RHIZ S-adenosylmethionine:tRNA ribosyltransferase-isomerase; OS = Ochrobactrum haematophilum OX=419474 GN=queA PE=3 SV=1

SEQ ID NO: 69544 - protein, 364 aa, Ochrobactrum intermedium
  REGION 1..364: note = tr|U4VBC5|U4VBC5_9RHIZ S-adenosylmethionine:tRNA ribosyltransferase-isomerase OS=Ochrobactrum intermedium 229E OX=1337887 GN=queA PE=3 SV=1
MRVDLFDFDLPEESIALRPIEPRDHARLLRVRPGQPFEDRQVFELPDLLHPGDALVFNDTKVIPAQLEGMRERDGNISQVSATLHMRSGADRWKAFLRPAKRVKEGDRIRFGHSGSSCFLGTLDATVAEKGDAGEALLVFDLSGAMLDEAIASVGHIPLPPYIASKRAEDERDRKDYQTVYAREEGAVAAPPTAGLHFTPELLEKIKAKGVEEHFVTLHVGAGTFLPVKADDTADHKMHSEIGHVSQRTADALNAVHERGGRIVCVGTTSLRLIESAAGEDGVIRPWSGATDIFITPGYKFRAVDLLMTNFHLPRSTLFMLVSAFSGLDTMRAAYDHAISNGYRFYSYGDGSLLERADKVKDTA

SEQ ID NO: 69545 - protein, 363 aa, Ochrobactrum intermedium
  REGION 1..363: note = tr|C4WHS6|C4WHS6_9RHIZ S-adenosylmethionine:tRNA ribosyltransferase-isomerase OS=Ochrobactrum intermedium LMG 3301 OX=641118 GN=queA PE=3 SV=1
MRVDLFDFDLPEESIALRPIEPRDHARLLRVRPGQPFEDRQVFELPDLLHPGDALVFNDTKVIPAQLEGMRERDGNISQVSATLHMRSGADRWKAFLRPAKRVKEGDRIRFGHSGSSCFLGTLDATVAEKGDAGEALLVFDLSGAMLDEAIASVGHIPLPPYIASKRAEDERDRKDYQTVYAREEGAVAAPTAGLHFTPELLEKIKAKGVEEHFVTLHVGAGTFLPVKADDTADHKMHSEIGHVSQRTADALNAVHERGGRIVCVGTTSLRLIESAAGEDGVIRPWSGATDIFITPGYKFRAVDLLMTNFHLPRSTLFMLVSAFSGLDTMRAAYDHAISNGYRFYSYGDGSLLERADKVKDTA

SEQ ID NO: 69546 - protein, 363 aa, Ochrobactrum lupini
  REGION 1..363: note = tr|A0A256GXP3|A0A256GXP3_9RHIZ S-adenosylmethionine:tRNA ribosyltransferase-isomerase; OS = Ochrobactrum lupini OX=255457 GN=queA PE=3 SV=1
MRVDLFDFDLPEESIALRPAEPRDHARLLRVRPGQPFEDRQVFELPDLLQPGDALVFNDTKVIPAQLEGMRERDGNISQVSATLHMRTGPDRWKAFLRPGKRVKEGDRIRFGHSGSSCFLGTLDATVAEKGDAGEALLVFDLSGAMLDEAIASVGHIPLPPYIASKRAEDERDRKDYQTVYAREEGAVAAPTAGLHFTPDLLEKIKAKGVEEHFVTLHVGAGTFLPVKADDTTDHKMHSEIGYVSQRTADALNAVHERGGKIICVGTTSLRLIESAAGEDGIIRPWTGATDIFITPGYKFRAVDLLMTNFHLPRSTLFMLVSAFSGFETMHAAYEHAISNGYRFYSYGDGSLLERADKAKDTA

SEQ ID NO: 69547 - protein, 363 aa, Ochrobactrum oryzae
  REGION 1..363: note = tr|A0A2S7IXR3|A0A2S7IXR3_9RHIZ S-adenosylmethionine:tRNA ribosyltransferase-isomerase; OS = Ochrobactrum oryzae OX=335286 GN=queA PE=3 SV=1
MRVDLFDFDLPEESIALRPVEPRDHARLLRVRPGQPFEDRQVFELPDLLQPGDALVFNDTKVIPAQLEGMRERDGNISQVSATLHMRTGPDRWKAFLRPGKRVKEGDRIRFGHSGSSCFLGTLDATVTEKGDAGEALLVFDLSGAILDEAIASVGHIPLPPYIASKRAEDERDRKDYQTVYAREEGAVAAPTAGLHFTPDLLERIKAKGVEEHFVTLHVGAGTFLPVKADDTTDHKMHSEIGYVSQRTANALNAVHERGGRIICVGTTSLRLIESAAGEDGIIRPWAGPTDIFITPGYRFRAVDLLMTNFHLPRSTLFMLVSAFSGFETMRAAYDHAISNGYRFYSYGDGSLLERADKAKDPA

SEQ ID NO: 69548 - protein, 363 aa, Ochrobactrum pecoris
  REGION 1..363: note = tr|A0A5C5CSV4|A0A5C5CSV4_9RHIZ S-adenosylmethionine:tRNA ribosyltransferase-isomerase; OS = Ochrobactrum pecoris OX=867683 GN=queA PE=3 SV=1
MRVDLFDFELPEESIALRPVEPRDHAKLLCVRPGQPFEDRQVFELPDLLQPGDALVFNDTKVIPAQLEGMRERDGNISQISATLHMRTGPDRWKAFLRPGKRVKEGDRIRFGHSGSSCFLGTLDATVAEKGDAGEALLVFDLSGAMLDEAIASVGHIPLPPYIASKRAEDERDRKDYQTVYAREEGAVAAPTAGLHFTPDLLEKIKAKGIEEHFVTLHVGAGTFLPVKADDTTDHKMHSEIGYVSQRTANALNAVHERGGRIICVGTTSLRLIESAAGEDGIVRPWSGATDIFITPGYKFRAVDLLMTNFHLPRSTLFMLVSAFSGFETMHAAYDHAINNGYRFYSYGDGSLLERADKAKDTA

SEQ ID NO: 69549 - protein, 356 aa, Ochrobactrum pseudogrignonense
  REGION 1..356: note = tr|A0A1A9FLG1|A0A1A9FLG1_9RHIZ S-adenosylmethionine:tRNA ribosyltransferase-isomerase; OS = Ochrobactrum pseudogrignonense OX=419475 GN=queA PE=3; SV = 1
MRVDLFDFDLPEESIALRPAEPRDHAKLLRVRPGQPFEDRQVFELPDLLQPGDALVFNDTKVIPAQLEGMRERDGNISQVSATLHMRTGPDRWKAFLRPAKRVKEGDRIRFGHSGSSCFLGTLDATVAEKGDAGEVLLVFDLSGAMLDEAIASVGHIPLPPYIASKRAEDERDRSDYQTVYAREEGAVAAPTAGLHFTPDLLKKIRDRGIEEHFVTLHVGAGTFLPVKADDTTDHKMHSEIGYVSQETADALNAVHARGGRVICVGTTSLRLIESAAGEDGIIRPWAGPTDIFITPGYKFRAVDLLMTNFHLPRSTLFMLVSAFSGFETMQDAYKRAIETGYRFYSYGDSSLLERQ

SEQ ID NO: 69550 - protein, 356 aa, Ochrobactrum pseudogrignonense
  REGION 1..356: note = tr|A0A256GUH5|A0A256GUH5_9RHIZ S-adenosylmethionine:tRNA ribosyltransferase-isomerase; OS = Ochrobactrum pseudogrignonense OX=419475 GN=queA PE=3; SV = 1
MRVDLFDFDLPEESIALRPAEPRDHAKLLRVRPGQPFEDRQVFELPDLLQPGDALVFNDTKVIPAQLEGMRERDGNISQVSATLHMRTGPDRWKAFLRPAKRVKEGDRIRFGHSGSSCFLGTLDATVAEKGDAGEVLLVFDLSGAMLDEAIASVGHIPLPPYIASKRAEDERDRSDYQTVYAREEGAVAAPTAGLHFTPDLLKKIRERGIEEHFVTLHVGAGTFLPVKADDTTDHKMHSEIGYVSQETADALNAVHARGGRVICVGTTSLRLIESAAGEDGIIRPWAGPTDIFITPGYKFRTVDLLMTNFHLPRSTLFMLVSAFSGFETMQDAYKRAIETGYRFYSYGDSSLLERK

SEQ ID NO: 69551 - protein, 356 aa, unidentified
  source 1..356: note = Ochrobactrum quorumnocens
  REGION 1..356: note = tr|A0A248UIY3|A0A248UIY3_9RHIZ S-adenosylmethionine:tRNA ribosyltransferase-isomerase; OS = Ochrobactrum quorumnocens OX=271865 GN=queA PE=3 SV=1
MRVDLFDFDLPEESIALRPAEPRDHAKLLRVRPGQPFEDRQVFELPDLLQPGDALVFNDTKVIPAQLEGMRERDGNISQVSATLHMRTGPDRWKAFLRPAKRVKEGDRIRFGHSGSSCFLGTLDATVAEKGDAGEALLVFDLSGAMLDEAIASVGHIPLPPYIASKRAEDERDRSDYQTVYAREEGAVAAPTAGLHFTPDLLKKIRDRGIEEHFVTLHVGAGTFLPVKADDTTDHKMHSEIGYVSQETSDALNAVHARGGRVICVGTTSLRLIESAAGEDGIIRPWAGPTDIFITPGYKFRAVDLLMTNFHLPRSTLFMLVSAFSGFETMQDAYKHAIETGYRFYSYGDSSLLERK

SEQ ID NO: 69552 - protein, 356 aa, Ochrobactrum rhizosphaerae
  REGION 1..356: note = tr|A0A256FI86|A0A256FI86_9RHIZ S-adenosylmethionine:tRNA ribosyltransferase-isomerase; OS = Ochrobactrum rhizosphaerae OX=571254 GN=queA PE=3 SV=1
MRVDLFDFDLPDERIALRPAEPRDHARLLRVRPGQPFEDRQVFELPDLLQLGDALVFNDTKVIPAQLEGMRERDGNISQVSATLHMRTGPDRWKAFLRPAKRVKEGDRIRFGHSGASCFLGTLDATVAEKGDAGEVLLVFDLASAALDEAIAAVGHIPLPPYIASKRAEDDRDRSDYQTVYAREEGAVAAPTAGLHFTPDLLKTIRDRGIEEHFVTLHVGAGTFLPVKADDTTDHKMHAEIGYVSQETANALNAVHARGGRVICVGTTSLRLIESAADEDGTVQPWSGATDIFITPGYKFRAVDLLMTNFHLPRSTLFMLVSAFSGFDTMQEAYKRAIETDYRFYSYGDASLLERA

SEQ ID NO: 69553 - protein, 356 aa, Ochrobactrum sp.
  REGION 1..356: note = tr|A0A4R7WXY4|A0A4R7WXY4_9RHIZ S-adenosylmethionine:tRNA ribosyltransferase-isomerase; OS = Ochrobactrum sp. LP_5_YM OX=2485134 GN=queA PE=3 SV=1
MRVDLFDFDLPEESIALRPAEPRDHAKLLRVRPGQPFEDRQVFELPDLLQPGDALVFNDTKVIPAQLEGMRERDGNISQVSATLHMRTGPDRWKAFLRPAKRVKEGDRIRFGHSGSSCLLGTLDATVAEKGDAGEVLLVFDLASAALDEAIATVGHIPLPPYIASKRAEDERDRSDYQTVYAREEGAVAAPTAGLHFTPELLAKIRERGIEEHFVTLHVGAGTFLPVKADDTTEHKMHAEIGYVSQETADALNAVHARGGRVICVGTTSLRLIESAADEDGTIRAWSGATDIFITPGYKFRAVDLLMTNFHLPRSTLFMLVSAFSGFDTMQEAYKRAIETGYRFYSYGDGSLLERA

SEQ ID NO: 69554 - protein, 192 aa, Ochrobactrum sp.
  REGION 1..192: note = tr|A0A3D2CZ87|A0A3D2CZ87_9RHIZ S-adenosylmethionine:tRNA ribosyltransferase-isomerase (Fragment) OS=Ochrobactrum sp. OX=42190 GN=DFK19_12575; PE = 3 SV=1
MRVDLFDFDLPEESIALRPVEPRDHARLLRVRPGQPFEDRQVFELPDLLQAGDALVFNDTKVIPAQLEGMRERDGNISQVSATLHMRTGADRWKAFLRPAKRVKEGDGIRFGHSGSSCFLGTLDATVAEKGDAGEALLVFDLSGAMLDEAIASVGHIPLPPYIASKRAEDERDRKDYQTVYAREEGAVAAPT

SEQ ID NO: 69555 - protein, 356 aa, Ochrobactrum thiophenivorans
  REGION 1..356: note = tr|A0A256FWE0|A0A256FWE0_9RHIZ S-adenosylmethionine:tRNA ribosyltransferase-isomerase; OS = Ochrobactrum thiophenivorans OX=571255 GN=queA PE=3 SV=1
MRVDLFDFDLPDERIALRPVEPRDHAKLLRVRPGQPFEDRQVFELPDLLQSGDALVFNDTKVIPAQLEGMRERDGNISQVSATLHMRTGPDRWKAFLRPAKRVKEGDRIRFGHSGSSCFLGTLDATVAEKGDAGEVLLVFDLSGAMLDEAIAAVGHIPLPPYIASKRPEDERDRSDYQTVYAREEGAVAAPTAGLHFTPELLEKIRARGIEEHFVTLHVGAGTFLPVKADDTTDHKMHSEIGYVSKETADALNAVHARGGRVICVGTTSLRLIESAAGEDGIIRTWAGPTDIFITPGYKFRAVDLLMTNFHLPRSTLFMLVSAFSGFDVMHEAYQRAIETGYRFYSYGDSSLLERA

SEQ ID NO: 69556 - protein, 350 aa, unidentified
  source 1..350: note = Unknown
  REGION 1..350: note = tr|A0A2A4Z0P7|A0A2A4Z0P7_9PROT S-adenosylmethionine:tRNA ribosyltransferase-isomerase; OS = OCS116 cluster bacterium OX=2030921 GN=queA PE=3 SV=1
  VARIANT 349: note = Xaa can be any naturally occurring amino acid
MRVDEFDFTLPEDNIALRPVEPRHNSKLLRVKNGKLADFHYYDLPDLLQDGDVLVLNDTKVIPARMQAVRTRGEFKSNISVTLHMKKSQNEWVAFVRPAKRVKVGETLNFVVEGGSLSAEILSKNGGELHLKFDKSAADLDAAIALAGEMPLPPYIASKRDYDDKDVEDYQTIYANEKGAVAAPTAGLHFTDELFEKLRAKNIEIIFLTLHVGAGTFLPMVVDKTEDHIMHAEYGLITKEIASKLTVAKQAGRRIVAVGTTSLRLLESAANDAGEILPFADETDIFITPGYKFKAVDVLLTNFHLPKSTLFMLVSAFTSLEIMQNAYKAAIERGYRFYSYGDACLLEMXK

SEQ ID NO: 69557 - protein, 350 aa, Octadecabacter antarcticus
  REGION 1..350: note = tr|M9R876|M9R876_9RHOB S-adenosylmethionine:tRNA ribosyltransferase-isomerase OS=Octadecabacter antarcticus 307 OX=391626 GN=queA PE=3 SV=1
MKLSDFDFDLPDSLIAVRPARPRSSAKLLVAGGDGTRDLRVTDLVSVLRAGDHLVLNDTKVIPARLVGERMRKSTDGAGLAKIEVTLLEPQADGTWAALIKPLRKVRDGERVVFSDDLSAVLVHRFDGMGYLDFNVTGDDFDAALNAAGAMPLPPYIAAKRPADDLDKEDYQTVWAARSGAVAAPTASLHFEQWLLDDLAAMGVKFSYVTLHVGAGTFLPVKVDDVADHVMHSEWGQVSALSASDIMATKAAGGRVIPVGTTACRLIETAGASGTLAAWEGETDIFITPGFEFQITDGLMTNFHLPKSTLMMLVSALMGSQRIKDIYAHAIANEYRFFSYGDSSILLPKD

SEQ ID NO: 69558 - protein, 350 aa, Octadecabacter arcticus
  REGION 1..350: note = tr|M9RHV2|M9RHV2_9RHOB S-adenosylmethionine:tRNA ribosyltransferase-isomerase OS=Octadecabacter arcticus 238 OX=391616 GN=queA PE=3 SV=1
MKLSDFDFDLPDTLIAVRPVRPRSSAKLLVADGPETHDLQVTDLRSVLQAGDHLVLNDTKVIPARLFGERIRKSPDGAGLAKIEVTLLEPQADGTWAALIKPLRKVRDGERIVFSQDLSAMLVHRYDGMGYLEFNVKDDDFDTALNAVGAMPLPPYIAAKRPADDLDKDDYQTVWARASGAVAAPTASLHFEQWLLDDLIAMGVKISYVTLHVGAGTFVPVKVDDVADHVMHSEWGQVSALAASDIMATKAAGGRVIPVGTTACRLIETAGASGTLVEWEGETDIFITPGFEFQITDGLMTNFHLPKSTLMMLVSALMGTQRIKDIYAHAIANEYRFFSYGDASILLPKG

SEQ ID NO: 69559 - protein, 348 aa, unidentified
  source 1..348: note = Octadecabacter ascidiaceicola
  REGION 1..348: note = tr|A0A238JP19|A0A238JP19_9RHOB S-adenosylmethionine:tRNA ribosyltransferase-isomerase; OS = Octadecabacter ascidiaceicola OX=1655543 GN=queA PE=3; SV = 1
MKLSEFDFDLPERLIAVRPAVPRSSAKMLVAQGARTRDMIVTDLVSVLRSGDHLVLNDTKVIPARLFGERTRDSEHGSGVAKIEVTLLEPQADGTWAALIKPLRKVRDGETIVFSPSLSATVKARDDGMGFLEFNLSGDDFDAALNEAGAMPLPPYIAAKRAADEQDKDDYQTVWAAKTGAVAAPTASLHFEQWLLDDLAAMGVKFSYVTLHVGAGTFLPVKVDDVSEHVMHSEWGQVSAQTAAAVMVTKAAGGRVIPVGTTACRLIETAGRSGVLEAWEGDTDIFITPGFEFQIADGLMTNFHLPKSTLMMLVSALMGQDCIREIYAHAIANDYRFFSYGDASILLP

SEQ ID NO: 69560 - protein, 350 aa, Octadecabacter sp.
  REGION 1..350: note = tr|A0A5B9EQ21|A0A5B9EQ21_9RHOB S-adenosylmethionine:tRNA ribosyltransferase-isomerase; OS = Octadecabacter sp. SW4 OX=2602067 GN=queA PE=3 SV=1
MQLSDFDFDLPDDLIATRPVTPRGDARLLLAQGDDTRDLHVRDLVDVLHAGDRLVLNDTKVIPARLTGERRRESAQGVVQARIEVTLLEPRADGCWAALIKPLRKLKIAETVVFSPDLSASLAAVVDGQGVLRFNLTGDDFDAALAKAGAMPLPPYIAARRAADEADKRDYQTVWARHKGAVAAPTASLHLDRAMLDALAAKGVQFTYVTLHVGAGTFLPVKVDDIADHKMHAEWGHVSAQAAGEINATRAAGGRVIPVGTTALRLIESAATDGGVAPWEGPTDIFITPGFIFRVADGLMTNFHLPKSTLMMLVSALMGPARVRDIYAHAIAQKYRFFSYGDASLLLPKA

SEQ ID NO: 69561 - protein, 102 aa, Octadecabacter sp.
  REGION 1..102: note = tr|A0A3D3ZWC6|A0A3D3ZWC6_9RHOB S-adenosylmethionine:tRNA ribosyltransferase-isomerase (Fragment) OS=Octadecabacter sp. OX=1920174 GN=DIT67_11830; PE = 3 SV=1
MKLSEFDFDLPERLIAVRPAVPRSAAKMLVAEGVKTRDMVVTDLVSVLRAGDHLVLNDTKVIPARLFGERSRQSEHGSGIAKIEVTLLEPQADGTWGALIKP

SEQ ID NO: 69562 - protein, 350 aa, unidentified
  source 1..350: note = Octadecabacter temperatus
  REGION 1..350: note = tr|A0A0K0Y5Q9|A0A0K0Y5Q9_9RHOB S-adenosylmethionine:tRNA ribosyltransferase-isomerase; OS = Octadecabacter temperatus OX=1458307 GN=queA PE=3 SV=1
MKLSEFDFDLPEHLIAVRPAVPRSSAKMLVAEGMQTRDMAVTDLVSVLRAGDHLVLNDTKVIPARLFGERSRVSEHGSGIAKIEVTLLEPQASGTWAALIKPLRKVRDGETIVFSPRLSATLTARDDGMGYLEFNLSGDDFDAALNEAGAMPLPPYIAAKRAADEQDKDDYQTVWAANTGAVAAPTASLHFEQWLLDDLADLGVKFSYVTLHVGAGTFLPVKVDDVSEHVMHSEWGQVSAQTAAEVMETKAAGGRVIPVGTTACRLIETAGRSGVLEAWEGDTDIFITPGFEFQIADGLMTNFHLPKSTLMMLVSALMGQDRIREIYAHAITNDYRFFSYGDASILLPKG

SEQ ID NO: 69563 - protein, 349 aa, Odoribacter laneus
  REGION 1..349: note = tr|R5VFR3|R5VFR3_9BACT S-adenosylmethionine:tRNA ribosyltransferase-isomerase OS=Odoribacter laneus CAG:561; OX = 1263089 GN=queA PE=3 SV=1
MKLSKFKYKLPSDLIALHPTPNRDECRLMVLDKKTGKIEHKIFRDIIDYFEEKDVFVFNDTKVFPARLYGNKEKTGAEIEVFLLRELNKDLRIWDVLVDPARKIRIGNKLYFGEDDSLVAEVIDNTTSRGRTLRFLFDGDYDEFKKILYDLGETPLPKFINRKVESEDAQNYQTIFAKNEGAVAAPTAGLHFSRELMKRMEIRGINFAFLTLHVGLGNFREVDVEDLTKHKMDSEQIIVTPETVKIVNEAKDEKRKVCAVGTTVVRTLESCVTTKGRLTEFEGWTNKFIFPPYDFSVPDAFVSNFHLPYSTLLMMVAAFGGYENVMKAYDVAVKEKYKFGTYGDAMLII

SEQ ID NO: 69564 - protein, 410 aa, Odoribacter laneus
  REGION 1..410: note = tr|R5UR85|R5UR85_9BACT S-adenosylmethionine:tRNA ribosyltransferase-isomerase OS=Odoribacter laneus CAG:561; OX = 1263089 GN=queA PE=3 SV=1
MDTRILDRLKEIRIEDYTYDLPEEKIAKFPLPQRELSKLLIYKQGEITKNTFTAVKEILAPGQTLIFNNTKVIFARIFFQKRTGGHIEIFCLEPAEPADYALNFAARATCVWTCMVGNLRKWREGEIFCRFFHEGREVVLTAQKVTQEGGEVKVRFSWPPHLSFSEVLEACGRIPIPPYLNRDAEDSDKIRYQTVYSREEGSVAAPTAGLHFTKEILETLASRGVRIDELTLHVGAGTFRPVKAEKIGGHDMHTEHVVVSRQLIEDLAKKAGEVIAVGTTSVRTLESLYWMGVKKLEGDPCFYDLSQWEAYTLPSCYSLQQAMGALQEWFDETQEELLKARTTIIIVPGYSYRVIDALFTNFHQPQSTLLLLVAAAVGEDWKRIYAYALRENFRFLSYGDTSLLWINKHK

SEQ ID NO: 69565 - protein, 419 aa, Odoribacter sp.
  REGION 1..419: note = tr|A0A373U9Q0|A0A373U9Q0_9BACT S-adenosylmethionine:tRNA ribosyltransferase-isomerase; OS = Odoribacter sp. AF21-41 OX=2293111 GN=DWX82_17530 PE=3; SV = 1
MTKKIAIENSREMVEKLKEIRIEDYTYDLPDERIAKFPLENREASKLLIYDEGRIDERHFYEVPEILDAGKMLVFNNTKVIYARILFQKVTGAVIEVFCLEPYQPSDYVQSFAAYGKCEWKCMIGNLKKWKEGTIFCHYRFEGKEYQLAATRKLREENDVIVEFTWDAPASFSDVLECCGRIPIPPYLNRESEEDDKIRYQTVYSKNEGSVAAPTAGLHFSIPVLKALREKGITIEELTLHVGAGTFRPVKSETIGGHDMHTEHISVRREVVEHLCTHPENIIAVGTTSVRTLESLYWMGVKRILGDEDFSSLGQWEAYDLPSGYSLKESMTALLGWFDERDAELLKAKTTIIIVPGYSYRVITAMFTNFHQPQSTLLLLVAAAIGEDWHKVYDYALAHDFRFLSYGDSSLLKVRKDKK

SEQ ID NO: 69566 - protein, 408 aa, Odoribacter sp.
  REGION 1..408: note = tr|A0A417WWY1|A0A417WWY1_9BACT S-adenosylmethionine:tRNA ribosyltransferase-isomerase; OS = Odoribacter sp. OF09-27XD OX=2293112 GN=queA PE=3 SV=1
MNTIELTALKNIKIEDYTYDLPEEKIAKFPLADREASRLLIYDRGAVSETFFSQVPALLKSGQTLIFNNTKVIYARLFFQKETGAHIEIFCLEPLVPADYARNFESNYYCEWSCMVGNLKKWRDGAIFCRFKRGQDEVVLKAEKLGQTGGEVHVRFSWNKELSFSEVLEYCGKIPIPPYLNRESEDSDKIRYQTVYSREEGSVAAPTAGLHFTRNILSVLEKQGVHIDELTLHVGAGTFRPVKAERIGGHDMHTEHIVISRKLVDDLSRKQGEVIAVGTTSVRTLESLYWMGVKRLMGEEEFYSLSQWEAYTLPVGYSLQEAMAALVDWFDRSGEELLKARTTIIIVPGYRFQVIDAMFTNFHQPQSTLLLLVGAAVGEDWRKIYAYALSHHFRFLSYGDSSFLKVRK

SEQ ID NO: 69567 - protein, 349 aa, Odoribacter splanchnicus
  REGION 1..349: note = tr|A0A1Y4A2I1|A0A1Y4A2I1_9BACT S-adenosylmethionine:tRNA ribosyltransferase-isomerase; OS = Odoribacter splanchnicus OX=28118 GN=queA PE=3 SV=1
MKLSKFRYKLPPELIAQHPSANRDECRLMVVDRKTGTIEHKVFKDVIDYFDEKDVFVFNDTKVFPARLYGNKEKTGAEIEVFLLRELNRDLRIWDVLVDPARKIRIGNKLYFGEDDSLVAEVIDNTTSRGRTLRFLFDGEYDEFKKLLYGLGETPLPRTITRKVEPEDEERYQTIFARYEGAVAAPTAGLHFSRELMKRMEIKGIDFAYITLHVGLGNFREVDVEDLTKHKMDSEQIIVGGDTVKIVNDAKDERHKICAVGTTVVRTLESCVTTKGRLTEYDGWTNKFIFPPYDFSVPDAFISNFHLPYSTLLMMVAAFGGYDLVMKAYDLAVKEKYRFGTYGDAMLII

SEQ ID NO: 69568 - protein, 408 aa, Odoribacter splanchnicus
  REGION 1..408: note = tr|A0A412TX78|A0A412TX78_9BACT S-adenosylmethionine:tRNA ribosyltransferase-isomerase; OS = Odoribacter splanchnicus OX=28118 GN=queA PE=3 SV=1
MDRELDKLRNIRIEDYTYNLPDERIAKFPLAEREASKLLIYRGGRIEESRFSEVRHLLRAGQMLVFNNTKVIHARLFFRKATGAVIEVFCLEPYLPVDYAQNFAARDSCEWSCMVGNLKKWKEGSIACDFTYGEATYRLTAEKVRQQEGELIIRFSWTGGLSFSEVLEGCGRIPIPPYLNRESEASDEVRYQTVYSKEEGSVAAPTAGLHFTRAILNDLKEKGVHVRELTLHVGAGTFRPVKAETIGDHDMHTEHLVISRELVEQLKEKTGDIVAVGTTSVRTLESLYWMGVKRLAGQEDFFTLGQWEAYTLPQDYSLREAMEALCGWFDTACQELLKARTTIIIVPGYRYRVIDAMFTNFHQPQSTLLLLVGAAVGEDWHKIYDYALTHDFRFLSYGDSSLLEVKKS

SEQ ID NO: 69569 - protein, 188 aa, unidentified
  source 1..188: note = Oenococcus alcoholitolerans
  REGION 1..188: note = tr|A0A0A0LZK7|A0A0A0LZK7_9LACT S-adenosylmethionine:tRNA ribosyltransferase-isomerase (Fragment) OS=Oenococcus alcoholitolerans OX=931074; GN = Q757_07510 PE=3 SV=1
TERYQTVYSKIEGSAAAPTAGLHWTPELLDKVRAKGVKTIELTLHVGLGTFRPVEEEDIDHHKMHSEFYQLSQQAADEINKVRHDGGKIVATGTTTIRTLETIGHKFNGDEFGGDLQADSGWTDIFIKPGFKWTTVDAFITNFHLPKSTLVMLVAAFTGRDNILNAYKHAIAEKYRFFSFGDAMFIHK

SEQ ID NO: 69570 - protein, 359 aa, Oenococcus kitaharae
  REGION 1..359: note = tr|G9WFG3|G9WFG3_9LACT S-adenosylmethionine:tRNA ribosyltransferase-isomerase OS=Oenococcus kitaharae DSM 17330 OX=1045004 GN=queA PE=3 SV=1
MTEEKTPHYTLSDFDYDLPKELIAQTPLKQRDSSRMLVLNADSGAYEDKHFYDILDYLNPGDALVMNNSRVIPARLHGWRPDTKGHVEVLLLRQDHGDVWETLIKPAKKFPIGSTIDFGDENQTVMTGEVVGELEHGGRYVEFHYDGIFMELLDKLGEMPLPPYIKEKLADQERYQTVYSKVEGSAAAPTAGLHWTPELLDKVRAKGVKTIELTLHVGLGTFRPVEEEDIDHHKMHSEFYQLSQRAADEINQVRKQGGKIVATGTTTIRTLETIGHKFNGDQYGQELKADSGWTDIFIKPGFKWTTVDAFITNFHLPKSTLVMLVAAFTGRENILNAYAHAIKEKYRFFSFGDAMFIHR

SEQ ID NO: 69571 - protein, 359 aa, Oenococcus oeni
  REGION 1..359: note = tr|A0A5E9PAM5|A0A5E9PAM5_OENOE S-adenosylmethionine:tRNA ribosyltransferase-isomerase; OS = Oenococcus oeni OX=1247 GN=queA PE=3 SV=1
MTEEKVPHYTLSDFDYDLPHELIAQTPLKQRDTSRLLLLNAKTGAYEDKHFYDIIDYLNPGDALVMNNSRVIPARLHGWRPETKGHVEVLLLRQDHGDVWETLIKPAKKFPVGSVIDFGNENETIMTGKVVGELEHGGRYVEFQYDGIFMELLDKLGEMPLPPYIKEKLKDQERYQTVYSKIEGSAAAPTAGLHWTPELLDKVRAKGIKTIELTLHVGLGTFRPVEEENIDKHKMHSEFYQLSQAAADQINQVRNNGGRIVATGTTTIRTLETIGHKFNGDKYGGNVQADSGWTDIFIKPGFKWTTVDAFITNFHLPKSTLVMLVAAFTGRENILNAYKHAIQEKYRFFSFGDAMFIHK

SEQ ID NO: 69572 - protein, 359 aa, Oenococcus oeni
  REGION 1..359: note = tr|Q04GA0|Q04GA0_OENOB S-adenosylmethionine:tRNA ribosyltransferase-isomerase OS=Oenococcus oeni (strain ATCC BAA-331 / PSU-1) OX=203123 GN=queA PE=3 SV=1
MTEEKVPHYTLSDFDYNLPHELIAQTPLKQRDASRLLLLNAKTGAYEDKHFYDIIDYLNPGDALVMNNSRVIPARLRGWRPETKGHVEVLLLRQDHGDVWETLIKPAKKFPVGSVIDFGNENETIMTGKVVGELEHGGRYVEFQYDGIFMELLDKLGEMPLPPYIKEKLKDQERYQTVYSKIEGSAAAPTAGLHWTPELLDKVRAKGIKTIELTLHVGLGTFRPVEEENIDKHKMHSEFYQLSQAAADQINQVRNNGGRIVATGTTTIRTLETIGHKFNRDKYGGNVQADSGWTDIFIKPGFRWTTVDAFITNFHLPKSTLVMLVAAFTGRENILNAYKHAIQEKYRFFSFGDAMFIHK

SEQ ID NO: 69573 - protein, 359 aa, unidentified
  source 1..359: note = Oenococcus sicerae
  REGION 1..359: note = tr|A0A410N9W1|A0A410N9W1_9LACT S-adenosylmethionine:tRNA ribosyltransferase-isomerase; OS = Oenococcus sicerae OX=2203724 GN=queA PE=3 SV=1
MTEEKTPHYTLSDFDYNLPHELIAQTPLAQRDASRLLVLNAGDGAYEDRHFYNIIDYLNPGDAIVMNNSRVIPARLHGWRPDTLGHVEVLLLRQDHGDIWETLVKPAKKFPIGSTIDFGDEKQTIMTGTVTGELEHGGRYIEFHYDGIFMELLDKLGEMPLPPYIKEKLVDQERYQTVYSKVEGSAAAPTAGLHWTPELLDKVRAKGVKTIELTLHVGLGTFRPVEEEDIDQHKMHSEFYELSQKAADQINEVRHHGGKIVATGTTTIRTLETIGHKFNGDQYGQDVQADSGWTDIFIKPGFKWTTVDAFITNFHLPKSTLVMLVAAFTGRKNILNAYEHAIQEKYRFFSFGDAMFIHK

SEQ ID NO: 69574 - protein, 359 aa, Oenococcus sp.
  REGION 1..359: note = tr|A0A3T0TRQ2|A0A3T0TRQ2_9LACT S-adenosylmethionine:tRNA ribosyltransferase-isomerase; OS = Oenococcus sp. UCMA 16435 OX=2259623 GN=queA PE=3 SV=1
MTEEKVPHYTLSDFDYDLPHELIAQTPLKQRDASRLLLLNARTGAYEDKHFYDIIDYLNPGDALVMNNSRVIPARLHGWRPETKGHVEVLLLRQDHGDVWETLIKPAKKFPVGSVIDFGNENETIMTGKVVGELEHGGRYVEFQYDGIFMELLDKLGEMPLPPYIKEKLKDQERYQTVYSKVEGSAAAPTAGLHWTPELLDKVRAKGIKTIELTLHVGLGTFRPVEEENIDEHKMHSEFYQLSQDAADQINQVRNNGGRIVATGTTTIRTLETIGHKFNGDQYGGNVQADSGWTDIFIKPGFKWTTVDAFITNFHLPKSTLVMLVAAFTGRENILNAYQHAIKEKYRFFSFGDAMFIHK

SEQ ID NO: 69575 - protein, 359 aa, Oenococcus sp.
  REGION 1..359: note = tr|A0A484HHS0|A0A484HHS0_9LACT S-adenosylmethionine:tRNA ribosyltransferase-isomerase; OS = Oenococcus sp. WK4 OX=1806810 GN=queA PE=3 SV=1
MTEEKTPHYTLSDFDYNLPHELIAQTPLAQRDASRLLVLNAGDGAYEDRHFYNIVDYLNPGDAIVMNNSRVIPARLHGWRPDTLGHVEVLLLRQDRGDIWETLVKPAKKFPIGSTIDFGDEKQTIMTGTVTGELEHGGRYIEFHYDGIFMELLDRLGEMPLPPYIKEKLADQERYQTVYSKVEGSAAAPTAGLHWTPELLDKVRAKGVKTIELTLHVGLGTFRPVEEEDIDQHKMHSEFYELSQKAADQINEVRHHGGKIVATGTTTIRTLETIGHKFNGDQYGQDVQADSGWTDIFIKPGFKWTTVDAFITNFHLPKSTLVMLVAAFTGRKNILNAYEHAIQEKYRFFSFGDAMFIHK

SEQ ID NO: 69576 - protein, 370 aa, unidentified
  source 1..370: note = Oharaeibacter diazotrophicus
  REGION 1..370: note = tr|A0A4R6RLN0|A0A4R6RLN0_9RHIZ S-adenosylmethionine:tRNA ribosyltransferase-isomerase; OS = Oharaeibacter diazotrophicus OX=1920512 GN=queA PE=3; SV = 1
MDVSLFDFDLPPESIALRPASPRDSARLLLVPPDGGFVDHVVRDLPDLLGPGDVLVFNDTKVIPAQLAGLRLREGAAPVAISATLHMRVGPDRWKAFVKGARKLAVGDRVAFGAQAGEGGAPACLAGALDATVAERGEDGETTFAFDLSGPDLDTAIATVGHIPLPPYIAARRPEDARDRADYQTVYAREEGAVAAPTAGLHFTPELMARLDARGVERRFVTLHVGAGTFLPVKAEDTADHRMHAEIGHVDAETAAALNAARARGGRVIAVGTTSLRLLESAADADGTIRPFAAATEIFITPGYRFRAVDGLVTNFHLPRSTLFMLVSAFAGLERMRAAYAHAIATGYRFYSYGDGSLLLPGRQGRTPDE

SEQ ID NO: 69577 - protein, 393 aa, Ohtaekwangia koreensis
  REGION 1..393: note = tr|A0A1T5MFH9|A0A1T5MFH9_9BACT S-adenosylmethionine:tRNA ribosyltransferase-isomerase; OS = Ohtaekwangia koreensis OX=688867 GN=queA PE=3 SV=1
MKELNINDFTYDLPADRIALYPLDKRDQSKLLVYRKGKVMHEQFRSLVDFLPASTMLFFNDTKVIPARLHFAKETGASIEVFLLHPVTPSSLLAEAMQAHEKCTWKCTIGNLKRWKDDVLYKLLGDATLEARLVNREDGIVEFRWNQGISFAEIITRSGETPLPPYLKRKPESTDRDRYQTVYAHYEGAVAAPTAGLHFTDEVLQSLRAKGIQTDYLTLHVSAGTFQPVKVQNAVEHPMHTEQVLIRKSNLDNLLKDTFVVPVGTTSMRTLESLYWYGVKLKEDPDAIFTINQHDPYQSYTSLPSRQEAFKYIAAYMDRKKLDILTGETSIYIMPGYTFRVCQGLVTNFHQPGSTLILLVAALVGDHWKNIYQQALENDYRFLSYGDSSLLLP

SEQ ID NO: 69578 - protein, 348 aa, Ohtaekwangia koreensis
  REGION 1..348: note = tr|A0A1T5IQ84|A0A1T5IQ84_9BACT S-adenosylmethionine:tRNA ribosyltransferase-isomerase; OS = Ohtaekwangia koreensis OX=688867 GN=queA PE=3 SV=1
MKLSEFKFELPNNSIALDPAENRDEARLMVVHKDTGKIEHKIFKDVVEYFNDGDVMVGNDTMVFPARLYGRKEKTGAKIEVFLLRELNADMHLWDVLVDPARKIRVGNKLYFGNGDLVAEVIDNTTSRGRTIRFLFDGDSAAFDKVVETLGETPLPKYIKRKVKPEDKDRFQTIFAKNKGAVSAPTAGLHFTRQLLKRLQLKGVDMTFVTLHIGLGTFRPVDVEDLTKHKMDSENFIVGTEAVDIVNKALDNKNRVCAIGTTTMRALESAVSATNRLKAREGWTDKFIFPPYDFKICNAMITNFHMPESTLLMMASAFGGYELIMEAYRVAKKEKYKFLTYGDAMLII

SEQ ID NO: 69579 - protein, 365 aa, unidentified
  source 1..365: note = Okeania hirsuta
  REGION 1..365: note = tr|A0A3N6RPT4|A0A3N6RPT4_9CYAN S-adenosylmethionine:tRNA ribosyltransferase-isomerase; OS = Okeania hirsuta OX=1458930 GN=queA PE=3 SV=1
MTEVDWSIDAYDYELPQELIAQNPIVPRDSSHLMVVDSLTHHNCIFRDLPDLLESGDLLVLNNTRVIPGRLYGHKTTGARVEILLLKPVENDCWLALVKPGKRFSNGTTIEFIPNSSNCNYKLQATVLSTDRETGGRFLQFNLPQGISLINLLDQFGHVPFPPYVTDSQALTEQYQTVYGTILGAVAAPTAGLHFTDELLEKLEQKNIRLAFITLHVGLGTFRPVETEDITKHDMHYEWIEVSPSVVDKINQTKSQGGRIIAVGTTVVRALEGAALANQNNSNEQLSISPFSGYTNIFIYPGYKWQIVEGLITNFHLPRSSLLMLVSAMIGRKRLFSLYQEAIAKKYRFYSFGDAMFILPVARIN

SEQ ID NO: 69580 - protein, 341 aa, unidentified
  source 1..341: note = Olavius algarvensis
  REGION 1..341: note = tr|A0A3P5VL15|A0A3P5VL15_9SPIR S-adenosylmethionine:tRNA ribosyltransferase-isomerase; OS = Olavius algarvensis spirochete endosymbiont OX=260710; GN = queA PE=3 SV=1
MQANLFSFNLPDELIAKVPSGRRGDSRLIVCDRNEDGPPQHTAMIKLPDFLSPGTVMVFNDTKVRKARVYARRSDTEGISEFLFLHQTREGEWNCIVNRMRKKRIGQNWFFPGDILGTITNLRSENLCTIKLNPIPDESWFEKSGHIPLPSYIGRLDNREDEERYQTVYSRNIGSAAAPTAGLHFTQEIMQILRENDIEICWITLQIGLGTFSPVRERDIQNHIMHLESYNIPYETAEKITAAKKDGRKVLAVGTTTVRTLETSWSSNKLASGAGKTDLFIYPGYRFKVVDQLFTNLHTPKSTLLMLVSAFLGRKRLLEAYDIAIEENYRFFSYGDAMLIR

SEQ ID NO: 69581 - protein, 343 aa, unidentified
  source 1..343: note = Oleiagrimonas soli
  REGION 1..343: note = tr|A0A099D0A0|A0A099D0A0_9GAMM S-adenosylmethionine:tRNA ribosyltransferase-isomerase; OS = Oleiagrimonas soli OX=1543381 GN=queA PE=3 SV=1
MKKSDFHFDLPQRLIAQAPLAERSASRMLVLDVPHKRWQDSGVRALPDFLREGDLLVFNDTRVLPARLFGRKETGGAVEILLERVTGAHEARAQMRVSKKPAAGSRILLDDGTPVEVLGREDAFFRLRFDTDEPLEKVLLRVGHMPLPPYIERADSAEDAERYQTVFAREPGAVAAPTAGLHFDDALLEALRARGVDSGYVTLHVGAGTFQPMRAERIEDHHMHREWLNVGAQLIEKIHRTRAAGGRVIAVGTTVVRALESATVEGELRPFAGETQIFIFPGYRITSIDGLLTNFHLPESTLLMLVSALAGREFMLDAYRHAVEAEYRFFSYGDAMLILPQGV

SEQ ID NO: 69582 - protein, 343 aa, unidentified
  source 1..343: note = Oleiagrimonas sp.
  REGION 1..343: note = tr|A0A328T3I0|A0A328T3I0_9GAMM S-adenosylmethionine:tRNA ribosyltransferase-isomerase; OS = Oleiagrimonas sp. MCCC 1A03011 OX=1926883 GN=queA PE=3; SV = 1
MKKSDFHFDLPQHLIAQAPLAERSASRMLVLDVPNTRWQDSSVRALPDFLREGDLLVFNDTRVLPARLFGRKETGGAVEILLERVTGTHEARAQMRVSKKPAPGSRILLDDGTPVEVLGREDAFFRLRFDTEEPLEKVLLRVGHMPLPPYIERDDSAEDAERYQTVFAREPGAVAAPTAGLHFDDALLDALRARGVDSGYVTLHVGAGTFQPMRAERIEDHHMHREWLNVGAELIEKIHRTRAAGGRVIAVGTTVVRALESATVEGELHPFAGETQIFIFPGYRFTSIDGLLTNFHLPESTLLMLVSALAGREFMLDAYRHAVEAEYRFFSYGDAMLILPQGA

SEQ ID NO: 69583 - protein, 347 aa, Oleibacter marinus
  REGION 1..347: note = tr|A0A1N7KNH7|A0A1N7KNH7_9GAMM S-adenosylmethionine:tRNA ribosyltransferase-isomerase; OS = Oleibacter marinus OX=484498 GN=queA PE=3 SV=1
MKTSDFSFELPDHLIARHPAAERSASRLLVFDPQQQQIDDRIFRDIESLIEPGDLLVFNNTRVIPARLFGEKASGGKLEALIERVVSEHDVLAHLRSSRSPKPGQSISLGGENAEVVGREGALFHLRFTSERPVLDILEDVGHMPLPPYMEREDAEEDRERYQTVYAEKPGAVAAPTAGLHFDDGLLERLTAKGVNFAFVTLHVGAGTFQPVKVDNIHEHHMHSEYIEVPENVVEAVKATRAAGKRVIAVGTTSVRSLESASRSGAIETFQGDSDIFIYPGYEFRSVDAMITNFHLPESTLIMLVSAFAGREGTLAAYDHAVANEYRFYSYGDAMFMPCRLYQSSGS

SEQ ID NO: 69584 - protein, 348 aa, Oleibacter sp.
  REGION 1..348: note = tr|A0A2D8AEL4|A0A2D8AEL4_9GAMM S-adenosylmethionine:tRNA ribosyltransferase-isomerase; OS = Oleibacter sp. OX=2024845 GN=queA PE=3 SV=1
MKTKDFDFDLPDELIARYPMAERSSSRLLVLNGETGNTAHHIFRDLLNMVEPGDLMVFNNTRVIPARLFGEKASGGKLEALIERVTGEHTALAHLRSSRSPKPGSMISLGGTEVEVTGRQGALFELKFLDERPLLSILEDVGHMPLPPYMERDDAEEDRERYQTVYAEKPGAVAAPTAGLHFDEPLLAALKEKGVNFAYVTLHVGAGTFQPVKVDSIEEHEMHAEYIEVPPDVVEAVKATRAAGKRVIAVGTTSVRSLESASTSGEIETFYGESRIFIYPGYRFRSVDAMVTNFHLPESTLIMLVSAFAGRDHTLAAYAEAVKEKYRFYSYGDAMFLACPQANAEESV

SEQ ID NO: 69585 - protein, 355 aa, Oleiphilus messinensis; identical to SEQ ID NO: 69533
  REGION 1..355: note = tr|A0A1H5WTM5|A0A1H5WTM5_9GAMM S-adenosylmethionine:tRNA ribosyltransferase-isomerase; OS = Oleiphilus messinensis OX=141451 GN=queA PE=3 SV=1

SEQ ID NO: 69586 - protein, 349 aa, Oleiphilus messinensis
  REGION 1..349: note = tr|A0A1Y0IAV8|A0A1Y0IAV8_9GAMM S-adenosylmethionine:tRNA ribosyltransferase-isomerase; OS = Oleiphilus messinensis OX=141451 GN=queA PE=3 SV=1
MNVSDFDYELPDELIARFPSPERASSRLLCLDKHNGEVVHRQFKDVLALIEPGDLLVFNDTRVIPARLFGRKATGGRIEVLVERLLGDGTALAHIRSSKSPKPGSLLYVDEFENQQEGLSAAPELEMTGRQGELFEIRGLAGKNILDILNQKGHMPLPPYIDRADVESDRERYQTVYSKREGAVAAPTAGLHFDDELLRTLQEKGAEMAYVTLHVGAGTFQPVRVDNIEDHIMHSEWLEVGAEVCAKVNATRARGGRVIAVGTTSVRSLETASAAGAIAPYAGETDIFIYPGYEFKTVDALITNFHLPESTLIMLISALAGRENVLAAYQEAIEHRYRFFSYGDAMFIG

SEQ ID NO: 69587 - protein, 344 aa, Oleispira antarctica
  REGION 1..344: note = tr|R4YTK8|R4YTK8_OLEAN S-adenosylmethionine:tRNA ribosyltransferase-isomerase OS=Oleispira antarctica RB-8; OX = 698738 GN=queA PE=3 SV=1
MKTSDFSFDLPDELIARFPMEERSASRLLCVDGETGSIEHNGFRDLEGLLNPGDLLVFNNTKVIPARLYGQKESGGKLEALVERVLDEHHVIAHVKSSRSPKAGQRIMLGGADVEVIGRKGALFELKFLDPRPVFEILEAEGHMPLPHYMDRPDVEDDKERYQTVYAQHEGAVAAPTAGLHFDDPLLERLKEKGIEFGYVTLHVGAGTFQPVQVDDVNDHTMHSEYVDVDQALCDQVNAARARGNRVIAVGTTSVRSLESASQSGQIQPFNDDTQIFIYPGYEFKSVDALITNFHLPESTLIMLVSAFAGKAHTLNAYDCAIKEKYRFYSYGDSMFIPRPMKKL

SEQ ID NO: 69588 - protein, 345 aa, Oleispira antarctica
  REGION 1..345: note = tr|A0A1Y5HRP5|A0A1Y5HRP5_OLEAN S-adenosylmethionine:tRNA ribosyltransferase-isomerase; OS = Oleispira antarctica OX=188908 GN=queA PE=3 SV=1
MKTSDFSFDLPDELIARYPMEERSASRLLCVDGESGSIEHNGFRDLEGLLNPGDLLVFNNTKVIPARLYGQKESGGKLEALVERVLDEHHVIAHVKSSRSPKAGQRITLGGAEVEVIGRKGALFELKFLDPRPVFEILEAEGHMPLPHYMDRPDVEDDKERYQTVYAQHDGAVAAPTAGLHFDDPLLERLEAKGIEFGYVTLHVGAGTFQPVQVDDVNDHTMHSEYVDVDQKLCDQVNAARARGNRVIAVGTTSVRSLESASQSGQIQPFNDDTQIFIYPGYEFKSVDALITNFHLPESTLIMLVSAFAGKEHTLNAYDVAIKEKYRFYSYGDSMFIPRPIQKFK

SEQ ID NO: 69589 - protein, 346 aa, unidentified
  source 1..346: note = Oleomonas sp.
  REGION 1..346: note = tr|A0A418WBE3|A0A418WBE3_9PROT S-adenosylmethionine:tRNA ribosyltransferase-isomerase; OS = Oleomonas sp. K1W22B-8 OX=2320859 GN=queA PE=3 SV=1
MKVADFDFDLPPDRIAVRPAEPRESARLLRITADGLSDRTIGDLPDLLRAGDLLVVNDTKVIPARLVGRIGEGRVEVNLIHAVDDHTWECLARPGKRFRPGSTVVFGALVAHIIAKAEDGTITLSFDVAGAALMAALDRVGTMPLPPYIARKREPDDQDRTDYQTAFAERTGAVAAPTAGLHLTPTMLGRLDAMGVERVAVTLHVGAGTFLPVKVDDTDDHRMHAEWGEVSAHAAARINAARAAGKRIVALGTTALRLIESAATPAGTVAPFGAWTDIFITPGYRFRTADLLLTNFHLPQSTLFMLVSAFAGTARMKAAYAHAVAQGYRFYSYGDACLIDRVDPGS

SEQ ID NO: 69590 - protein, 360 aa, Oligella ureolytica
  REGION 1..360: note = tr|A0A378XJM3|A0A378XJM3_9BURK S-adenosylmethionine:tRNA ribosyltransferase-isomerase; OS = Oligella ureolytica OX=90244 GN=queA PE=3 SV=1
MMNNSSLPNPLPVADLLLSDFDYQLPDELIAQSPAEQRNKSRLLRIDAQGQCHDHQFTDLLQFLKPHDLLVFNNTKVIKARLFGQKTTGGKVELLIERLLDEQRALAHIRASKSPKLNSEIIFADGAFSAEVVDREDALFELVFSESLLPLLEQYGQTPLPPYITHTPDSDDDERYQTVYAKTPGAVAAPTAGLHFDDGLLEQLNKNNIHTAFVTLHVGAGTFQPVRVDDIRDHVMHAELYDVSADVVEAIKAARAAGGRVIAVGTTSVRALESAAQFGGTIDDMRCPIAHQGDTRLFITPGYQFKVVDALITNFHLPQSTLLMLVAALMGLDTMKKTYEHAIQQKYRFFSYGDSMFIDM

SEQ ID NO: 69591 - protein, 352 aa, Oligella urethralis
  REGION 1..352: note = tr|A0A095ZC13|A0A095ZC13_9BURK S-adenosylmethionine:tRNA ribosyltransferase-isomerase; OS = Oligella urethralis DNF00040 OX=1401065 GN=queA PE=3; SV = 1
MPPLDNTLTLSDFDYELPEDLIAQSPAEQRNKSRLLRVDVQGHCHDHQFTELIDFVKPHDLLVFNNTKVIKARLFGHKSSGGKIEILIERLLDDQRALAHIKASKAPKLDSTLHFADDQFSAQVLGREDALYELVFSKPLLPLLEEFGATPLPPYITHTPDAEDDERYQTVYAKTPGAVAAPTAGLHFDNELLEQLRQKGINTTFVTLHVGAGTFQPVRTTAIKDHIMHAEWYEVGPEVVTAIQSARAAGGRVIAVGTTSVRALESAAQFGGTIEAMRCPLAHQGDTRLFITPGYQFKVVDALITNFHLPQSTLLMLVAALMGLDSMKKTYQHAIQQRYRFFSYGDAMFIDF

SEQ ID NO: 69592 - protein, 359 aa, Oligella urethralis
  REGION 1..359: note = tr|A0A2N6QFN0|A0A2N6QFN0_9BURK S-adenosylmethionine:tRNA ribosyltransferase-isomerase; OS = Oligella urethralis OX=90245 GN=queA PE=3 SV=1
MNNNSLTLPPLDNTLTLSDFDYELPEDLIAQSPAEQRNKSRLLRVDAQGHCHDHQFTELIDFVKPHDLLVFNNTKVIKARLFGHKSSGGKIELLIERLLDDQRALAHIKASKAPKLDSTLHFADDQFSAQVLGREDALYELVFSKPLLPLLEEFGATPLPPYITHTPDAEDDERYQTVYAKTPGAVAAPTAGLHFDNELLEQLRQKGINTTFVTLHVGAGTFQPVRTTAIKDHIMHAEWYEVGPEVVTAIQSARAAGGRVIAVGTTSVRALESAAQFGGTIEAMRCPLAHQGDTRLFITPGYQFKVVDALITNFHLPQSTLLMLVAALMGLDSMKKTYQHAIQQRYRFFSYGDAMFIDF

SEQ ID NO: 69593 - protein, 361 aa, Oligotropha carboxidovorans
  REGION 1..361: note = sp|B6JFC2|QUEA_OLICO S-adenosylmethionine:tRNA ribosyltransferase-isomerase OS=Oligotropha carboxidovorans (strain ATCC 49405 / DSM 1227 / KCTC 32145 / OM5) OX=50483 2 GN=queA PE=3 SV=1
MRTDLFDFDLPPECIALRPAEPRDSARLLLVRPNVGVEDHSVRDLPGLLAPGDQIVVNDTKVIAAQLSGRRIGGTSEPHIDVTLIKRIDGSRWQALVRPARKLSEGDVLRFGNEGRVCLLGNLDASVEAKGEAGEVTLAFAFHGPVLDQAIADLGAPPLPPYIASRRAPDDKDVGDYQTMFAKNEGAVAAPTAGLHFTPALEAALAARGIGIQRLTLHVGAGTFLPVKADDTDDHKMHSEWGTVSEETAKTLNEARAKGGRVVAVGSTSMRLLESAATEDGIIQPFTGETAIFITPGYKFRAVDVMMTNFHLPRSTLFMLVSAFSGLDTMRAAYAHAIAKGYRFYSYGDACLLFRNAGAAS

SEQ ID NO: 69594 - protein, 349 aa, Olivibacter sp.
  REGION 1..349: note = tr|A0A5C0ZM45|A0A5C0ZM45_9SPHI S-adenosylmethionine:tRNA ribosyltransferase-isomerase; OS = Olivibacter sp. LS-1 OX=2592345 GN=queA PE=3 SV=1
MKLSQFKFNLPDSLIAHEPAETRDEARLMVLDRKTGAIEHKIFKDVLNYFEEHDVMILNNTKVFPARLYGNKEKTGATIEVFLLRELNKELRLWDVLVDPARKIRVGNKLYFGDNDLLVAEVVDNTTSRGRTIRFLFDGSDEEFRRNIEILGETPLPKYIKRKPTPEDKFRYQTIFAKNEGAVAAPTAGLHFSRELMKRLELKGVEFAEVTLHVGLGTFRQVEVEDLTKHKMDSEQFIIEQKDADIVNKAIAEKRRVCAVGTTSMRSIESAVSANRTLKAANDWTSKFIFPPYDFSIANSMITNFHTPESTLLMMICAFGGYEHVMNAYEIAVKEKYRFYSYGDAMLII

SEQ ID NO: 69595 - protein, 349 aa, Olleya aquimaris
  REGION 1..349: note = tr|A0A327RG70|A0A327RG70_9FLAO S-adenosylmethionine:tRNA ribosyltransferase-isomerase; OS = Olleya aquimaris OX=639310 GN=queA PE=3 SV=1
MKLSHFNFDLPEELLAEYPAENRDESRLMVLNRKEQTIEHKMFKDIIDYFDEKDVMILNNTKVFPARLFGNKEKTGARIEVFLLRELNQEQRLWDVLVDPARKIRIGNKLYFGEDETLVAEVIDNTTSRGRTLRFLYDGSYQEFRIKLQELGETPLPKYIKREVEPEDEERYQTIYAKNEGAVAAPTAGLHFSKHLLKRLEIKGVDFAEVTLHVGLGTFNPVEVEDLSKHKMDSEELKIEAKAVETINNAQKEKRRICAVGTTAMRAIESSVSSSGTLNEIEGWTNKFIFPPYDFSIANAMITNFHTPKSTLLMMVSAFAGHDFIKKAYEEAVKEKYKFYSYGDAMLII

SEQ ID NO: 69596 - protein, 349 aa, unidentified
  source 1..349: note = Olleya namhaensis
  REGION 1..349: note = tr|A0A1I3L5S1|A0A1I3L5S1_9FLAO S-adenosylmethionine:tRNA ribosyltransferase-isomerase; OS = Olleya namhaensis OX=1144750 GN=queA PE=3 SV=1
MKLSHFHFDLPDELLAEYPAENRDESRLMVLNRKEQTIEHKMFKDLIEYFDEKDVMILNNTKVFPARLFGNKEKTGARIEVFLLRELNKEQRLWDVLVDPARKIRIGNKLYFGDDETLVAEVIDNTTSRGRTLRFLYDGSYEEFRKKLQLLGETPLPKYIKREVEPEDEERYQTIYAKEEGAVAAPTAGLHFSKHLLKRLEIKGVDFAEVTLHVGLGTFNPVEVEDLSKHKMDSEELKIEAPAVEIINNAKKEKRRICAVGTTAMRAIESSVSSSGTLNEIEGWTNKFIFPPYDFSIANAMITNFHTPKSTLMMMVSAFAGHDFMKKAYEEAVKEKYKFYSYGDAMLII

SEQ ID NO: 69597 - protein, 349 aa, Olleya sp.
  REGION 1..349: note = tr|A0A2K8WXT6|A0A2K8WXT6_9FLAO S-adenosylmethionine:tRNA ribosyltransferase-isomerase; OS = Olleya sp. Bg11-27 OX=2058135 GN=queA PE=3 SV=1
MKLSHFHFDLPDELLAEYPAENRDESRLMVLNRKEQTIEHRMFKDIIEYFDEKDVMILNNTKVFPARLFGNKEKTGARIEVFLLRELNKEQRLWDVLVDPARKIRIGNKLYFGDDETLVAEVIDNTTSRGRTLRFLYDGSYEEFRKKLQLLGETPLPKYIKRDVEPEDEERYQTIYAKEEGAVAAPTAGMHFSKHLLKRLEIKGVDFAEVTLHVGLGTFNPVEVEDLSKHKMDSEELKIEAAAVEIINNAKKEKRRICAVGTTAMRAIESSVSSSGTLNEIEGWTNKFIFPPYDFSIANAMITNFHTPKSTLMMMVSAFAGHDFMKKAYDEAVKEKYKFYSYGDAMLII

SEQ ID NO: 69598 - protein, 349 aa, Olleya sp.
  REGION 1..349: note = tr|A0A559REQ5|A0A559REQ5_9FLAO S-adenosylmethionine:tRNA ribosyltransferase-isomerase; OS = Olleya sp. Hel_I_94 OX=1250001 GN=queA PE=3 SV=1
MKLSHFNFELPEELLAEYPAENRDESRLMVLNRKEQTIEHKMFKDLIEYFDEKDVMILNNTKVFPARLFGNKEKTGARIEVFLLRELNQEQRLWDVLVDPARKIRIGNKLYFGDDETLVAEVIDNTTSRGRTLRFLYDGSYQEFRIKLQELGETPLPKYIKREVEPEDEDRYQTIYAKEEGAVAAPTAGLHFSKHLLKRLEIKGVDFAEVTLHVGLGTFNPVEVEDLSKHKMDSEELKIEAKAVEIINNAKKEKRRICAVGTTAMRAIESSVSSSGTLNEVEGWTNKFIFPPYDFSIANAMITNFHTPKSTLLMMVSAFAGHDFMKKAYEEAVKEKYKFYSYGDAMLII

SEQ ID NO: 69599 - protein, 391 aa, Olsenella profusa
  REGION 1..391: note = tr|U2TPM4|U2TPM4_9ACTN S-adenosylmethionine:tRNA ribosyltransferase-isomerase OS=Olsenella profusa F0195; OX = 1125712 GN=queA PE=3 SV=1
MEEPVRTDDFDYPLPDELIAQEPVEPRDSCRLLVLDRKDGSIKHGRFRDVIDYLDPGDLLVANRTRVLPARLMGHKQGTGGVAETLLLKRREDLDALGHVWECLVKPGKRLKRNARIEYHEGGVHAPLSRPVVLIGEVIDYLDDNRGGRLVRFEPAGGLTLDAAIHKAGHVPLPPYITEYEGDPERYQTVYAMHEEHSAAAPTAGLHFTPELIERIGDRGVDWTTVELEVGIDTFRLVDEDDPTQHVMHTERYHVSQEVVDAAHATKAAGHRVIAVGTTSVRSLESAFAADVTTSEPACVAQRFEDAADSARMRGRGDIVERRDATTNLYLMPGSTFHVVDAMITNFHAPRSTLMMLVSAFATREQIMGAYQAAMDERYRFLSFGDAMLIL

SEQ ID NO: 69600 - protein, 388 aa, unidentified
  source 1..388: note = Olsenella scatoligenes
  REGION 1..388: note = tr|A0A100YUF9|A0A100YUF9_9ACTN S-adenosylmethionine:tRNA ribosyltransferase-isomerase; OS = Olsenella scatoligenes OX=1299998 GN=queA PE=3 SV=1
MRTDDFDYPLPDELIAQAPAEPRDSCRLLVLNREDGSLEHRHFTDVIDYLDPGDLLVANKTRVMPARLVGHKRGTGGVAETLLLKRREDLDPMGHVWECLVNPGKRLRQPGIIIEYRAGGLHAPLSAEVVLTGEIIDFLEDNRGGRLVRFEPQGDRTLDAAIHEAGHVPLPPYITKYEGDPEKYQTVYAMHEEHSAAAPTAGLHFTPELIKRIEDKGVGWKTVELEVGIDTFRLVTEDDPTKHVMHTERYHVPQDVVDAVHATKAAGHRVVAVGTTAVRSLESAWDPEAPASTPAVTARRFEDAPDSAAVTGRGDIVERRDATTNLYLMPGSTYHVVDALITNFHVPRSTLMMLVSALATREQIMAAYQAAIDERYRFLSFGDAMLIR

SEQ ID NO: 69601 - protein, 388 aa, Olsenella sp.
  REGION 1..388: note = tr|A0A1Y4DP68|A0A1Y4DP68_9ACTN S-adenosylmethionine:tRNA ribosyltransferase-isomerase; OS = Olsenella sp. An270 OX=1965615 GN=queA PE=3 SV=1
MRTDDFDYPLPDELIAQAPAEPRDSCRLLVLHREDGSVEHRRFTDVIDYLEPGDLLVANRTRVMPARLVGRKRGTGGVCETLLLKRREDVDPLGGVWECLVNPGKRLRQPGIVIEYRAGGLHAPESAPVVLTGEIVDFVEGSKGGRLVRFSPAGEREDGSPRTLDEAIHAAGHVPLPPYITQYEGDPEKYQTVYAMTEEHSAAAPTAGLHFTPELIERIREKGVGWATVELEVGIDTFRLVTEDDPAQHVMHTERYHVSQEVVDAVHATKAAGHRVIAVGTTSVRSLESAWEEGAAPSEPPVSALRFEAAAGTGDIVARENATTNLYLMPGSSFHVVDAMITNFHVPRSTLMMLVSAFATRDQIMDAYAAAIEERYRFLSFGDAMLIE

SEQ ID NO: 69602 - protein, 388 aa, Olsenella sp.
  REGION 1..388: note = tr|A0A1I0ACJ3|A0A1I0ACJ3_9ACTN S-adenosylmethionine:tRNA ribosyltransferase-isomerase; OS = Olsenella sp. KH3B4 OX=1855394 GN=queA PE=3 SV=1
MRTDDFDYPLPDELIAQAPAEPRDSCRLLVLNREDGSLEHRHFTDVIDYLDPGDLLVANKTRVMPARLVGHKRGTGGVAETLLLKRREDLDPLGHVWECLVNPGKRLRQPGTIIEYRAGGLHAPLSAEVVLTGEILDFLEDNRGGRLVRFEPQGGRTLDAAIHEAGHVPLPPYITKYEGDPEKYQTVYAMHEEHSAAAPTAGLHFTPELIERIEDKGVGWKTVELEVGIDTFRLVTEDDPTKHVMHTERYHVPQDVVDAVHATKAAGHRVVAVGTTAVRSLESAWDPKAPAYTPAVTARRFEDAPDSAAVTGRGDIVERRDATTNLYLMPGSTYHVVDALITNFHVPRSTLMMLVSALATREQIMAAYQAAIDEKYRFLSFGDAMLIR

SEQ ID NO: 69603 - protein, 387 aa, Olsenella uli
  REGION 1..387: note = tr|X8HP85|X8HP85_9ACTN S-adenosylmethionine:tRNA ribosyltransferase-isomerase OS=Olsenella uli MSTE5; OX = 1190621 GN=queA PE=3 SV=1
MRTDDFDYPLPDSLIAQVPCEPRDACRLLVLDRKDGSVEHRRFTDLVDYLEPGDLLVANRTRVLPARLMGHKRGTGGVSETLLLARREDVDALGHVWECLVKPGKRLKQGAVVEYREGGIHAPMDWPVVLTGEVIDYVGESRGGRLVRFEPVGGLSLDEAIHRAGHVPLPPYITDYEGDPERYQTVYSMREEHSAAAPTAGLHFTPELIRRIRGRDIDFRTVELEVGIDTFRLVEEDDPTQHAMHTERYHVGRGVVDAVHATKAAGHRVIAVGTTSVRSLESAFDPDVPAWGTPVCARRFEGARDSARLLGRGDIVERVDATTDLYLMPGSTFHVVDAMITNFHVPRSTLMMLVSAFATREQIMGAYQAAMNEGYRFLSFGDAMLIE

SEQ ID NO: 69604 - protein, 387 aa, Olsenella uli
  REGION 1..387: note = tr|E1QZM9|E1QZM9_OLSUV S-adenosylmethionine:tRNA ribosyltransferase-isomerase OS=Olsenella uli (strain ATCC 49627 / DSM 7084 / CIP 109912 / JCM 12494 / NCIMB 702895/ VPI D76D-27C) OX=633147 GN=queA PE=3 SV=1
MRTDDFDYPLPDSLIAQVPCEPRDACRLLVLDRKDGSVEHRRFTDLVDYLEPGDLLVANRTRVLPARLMGHKRGTGGVSETLLLARREDVDALGHVWECLVKPGKRLKQGAVVEYREGGIHAPMDWPVVLTGEVIDYVDESRGGRLVRFEPVGGLSLDEAIHRAGHVPLPPYITDYEGDPERYQTVYSMREEHSAAAPTAGLHFTPELIKRIRGRDIDFRTVELEVGIDTFRLVEEDDPTQHAMHTERYHVGRGVVDAVHATKAAGHRVIAVGTTSVRSLESAFDPDVPAWGTPVCARRFEGARDSARLLGRGDIVERVDATTDLYLMPGSTFHVVDAMITNFHVPRSTLMMLVSAFATREQIMGAYQAAMNEGYRFLSFGDAMLIE

SEQ ID NO: 69605 - protein, 387 aa, Olsenella umbonata
  REGION 1..387: note = tr|A0A1H1KYS5|A0A1H1KYS5_9ACTN S-adenosylmethionine:tRNA ribosyltransferase-isomerase; OS = Olsenella umbonata OX=604330 GN=queA PE=3 SV=1
MRTDDFDYDLPEELIAQEPAEPRDSCRLLVLHRDDGSVEHRHFYDIVDCLEPGDLIVANKTRVMPARLMGHKRGTGGVSETLLLKRREDLDVMGHVWECLVKPGKRLKQGAVIEYREGGIHAPMSWPVVLTGEVVDYVDESRGGRLVRFEPAEGLTLDEAIHKAGHVPLPPYITQYDGDPEKYQTVYAMHEEHSAAAPTAGLHFTPELIRRIEDMGVQWKTVELEVGIDTFRLVEEDDPTKHVMHTERYHVSQDVVDAVHATKAAGHRVIAIGTTSVRSLESAFDANVPAWEPACVARRFEDAPDSARKLGRGDIVERRDATTNLYLMPGSTYHVVDAMVTNFHVPRSTLMMLVSAFATREQIMAAYQAAIAEKYRFFSFGDAMLMV

SEQ ID NO: 69606 - protein, 390 aa, Olsenella umbonata
  REGION 1..390: note = tr|A0A1H9NZQ7|A0A1H9NZQ7_9ACTN S-adenosylmethionine:tRNA ribosyltransferase-isomerase; OS = Olsenella umbonata OX=604330 GN=queA PE=3 SV=1
MSTMRTDDFDYTLPEELIAQAPAEPRDACNMLVLHREDGSVEHKHFFDIIDYLEPDDLLVANKTRVMPARLMGHKKGTGGVAETLLLKRREDIDALGHVWECLVKPGKRLKQGAVIEYRPGGAHAPMSAPVCLTAEVIDYVDDNRGGRLVRFTPADGMELDEAIHEAGRVPLPPYITDYEGDPEKYQTVYAMDEEHSAAAPTAGLHFTPELIERLEEKGIQFKTVELEVGIDTFRLVEEDDPTQHVMHTERYHVNQDVVDAVHATKAAGHRVVAVGTTSVRSLESAFDPEAVAWESPCVARRFEGRDDSADSLGRGDIVERRDAKTSLYLMPGSTFHVVDAMITNFHVPRSTLMMLVSAFATREQIMAAYQAAIEKRYRFFSFGDAMLIV

SEQ ID NO: 69607 - protein, 347 aa, unidentified
  source 1..347: note = Unknown
  REGION 1..347: note = tr|A0A2A5W9T1|A0A2A5W9T1_9GAMM S-adenosylmethionine:tRNA ribosyltransferase-isomerase; OS = OM182 bacterium MED-G28 OX=1986256 GN=queA PE=3 SV=1
MKVSEFSYELPEELIAHYPADARTSSRLLCLNSVSGEMAHKYFTDLLNYLRPNDLLVFNNTKVIPARFFGEKETGGKIEILVERIMLDNCLLAQIKASKSPKIGSKLFFYAKNTDQPEDSLVATVLDLEEGFFKIQFGSEISLSQSLFPHGYMPLPPYIRRQEEALDLKRYQTIYATKEGAVAAPTAGLHFDRSLISNLLGNGINTAFLTLHVGAGTFQPVRVKNLEEHRMHREFIELDASVCNKVEQCREKEGRVIAVGTTSVRCLESAAEDGKLKATQKETAIFIYPGYKFQIVDAMITNFHLPESTLLMLVSAFSSKKVILDAYQEAIRKRYRFFSYGDAMFIY

SEQ ID NO: 69608 - protein, 349 aa, unidentified
  source 1..349: note = Unknown
  REGION 1..349: note = tr|A0A520RPX7|A0A520RPX7_9GAMM S-adenosylmethionine:tRNA ribosyltransferase-isomerase; OS = OM182 bacterium OX=2510334 GN=queA PE=3 SV=1
MQLSDFDYDLPQALIAQKPLPGRTDSRLLAVTQAGLAHRQFVHLRDYLRPNDMLVLNDTKVVPARFFAQKDSGGQAEVLLERVLPGVSEAGPENSEEALCQVRVSKPLRPGQTLRCQGEVITALGRESSFYRLRFPGSVFAFLDRRGELPLPPYIQREAVSEEDVERYQTVFAENPGAVAAPTAGLHFSEEFLAEVQSQGVNVAKITLHVGAGTFQPVRQEDLSQHQMHEEYFHIGSTSRDAIMASKEQGGRIIAVGTTVLRALESGAQDGELRPGEGSTRLFIKPGYRFQVVDALVTNFHLPRSTLMMLVCALGGHERMMAAYRCAVAEGYRFFSYGDAMFIEGDQGV

SEQ ID NO: 69609 - protein, 342 aa, unidentified
  source 1..342: note = Omnitrophica bacterium
  REGION 1..342: note = tr|A0A1G1KNQ6|A0A1G1KNQ6_9BACT S-adenosylmethionine:tRNA ribosyltransferase-isomerase (Fragment) OS=Omnitrophica bacterium RIFCSPLOWO2_01_FULL_45_24 OX=1801828 GN=A3 K16_00410 PE=3; SV = 1
MKLSEFDYILPKELIAQYPVKEREKCRLMVLDRANQTVSHKTFEDIAGYFKKDDCLVLNDTKVIAARLFGKRKTGGKVELFLLEKKNPICEALVRPSSRLKEGEKITLESGDDVEVLDRGEVGRRVKFNRSLDDILKESGHIPLPPYIDRIDGASDKDDYQTVYGVKEGATASPTAGLHFTRELIEEIRDQGAGVQFVTLHTNYGTFAPIKTSEVEAHKMHKEYFELSADTAKFVNETKKNGGKVFAVGTTTTRLLEYCASLSSLTLSEVEGFSRNDGSLKGYTDILIYPGYQFKVVDHLITNFHLPKSTLLLLVSAFAGKEFIFEAYRQAILKRYRFFSYG

SEQ ID NO: 69610 - protein, 395 aa, unidentified
  source 1..395: note = Omnitrophica bacterium
  REGION 1..395: note = tr|A0A1G1KSB6|A0A1G1KSB6_9BACT S-adenosylmethionine:tRNA ribosyltransferase-isomerase; OS = Omnitrophica bacterium RIFCSPLOWO2_12_FULL_44_17; OX = 1801832 GN=queA PE=3 SV= 1
MKLSDFDYELPKELIAQQALSERTEARLLILDRKTQTLEHRIFRDLLDYFRPGDVLVLNDTRVLHARLFAKKKTGGKVEILLLKQVDFSNGTGSEGDTFQGLKKPENRETCPPQNRYRSVWQALIRPSRRVKINEELFFADEPNLVARVLDEGDPETGTRRIEFQCDQNFETVLSRVGRVPLPPYISREDVPIDRELYQTVFAKCPGAVASPTAGLHFDQAMLTALRAKGVQIVFVTLHVGYGTFQPVQDETLKSHRMHEEFYDISEGAAVLINQAKKEGRRVVACGTTVVRTLETVASNSVNPSPSPLPCGERDGVRGHSPIIRAGQGNTKLFIYPPFRFKMVDAMITNFHFPRTTLLMLVGAFCGYELMMKAYQEAIREKYRFYSYGDAMMIF

SEQ ID NO: 69611 - protein, 347 aa, unidentified
  source 1..347: note = Unknown
  REGION 1..347: note = tr|A0A1G1NX75|A0A1G1NX75_9BACT S-adenosylmethionine:tRNA ribosyltransferase-isomerase; OS = Omnitrophica WOR_2 bacterium RIFCSPLOWO2_02_FULL_50_19; OX = 1801865 GN=queA PE =3 SV=1
MRLSEFDYKLPEGLIAQYPAKARDGSRLMVVHRISKKIEHRNFCDIVDYIGPSDCLVVNDTKVIKARLPAKRADTGAKAEITLIEKMSDRLYKCLIDTSTKIKIGTKFIFVDGELTGVIRGESEGIRLIEFSINGTDFGDILEKIGIVPLPPYIKRSPEKGDEERYQTVYAKTPGAVAAPTAGLHFSDGVLKKIKAKGSSVESLTLHVGYGTFKPVSADEVARHKLEPEVFELKEEAAQRLNYIKGKGGKIFAVGTTTCRVLENQARLVKGSKNRVEKGKGWTNLFIHPPYNFKFVDALVTNFHLPKTTLLMLVAAFCSREVMFKAYGEAVKEKYRFYSYGDSMLII

SEQ ID NO: 69612 - protein, 271 aa, unidentified
  source 1..271: note = Unknown
  REGION 1..271: note = tr|A0A1G1PHA1|A0A1G1PHA1_9BACT S-adenosylmethionine:tRNA ribosyltransferase-isomerase (Fragment) OS=Omnitrophica WOR_2 bacterium RIFCSPLOWO2_01_FULL_41_12 OX=1801863GN=A2984_01975 PE=3; SV = 1
TMVLSCRLKAKRLTGGKVELLLLNQNQNDNRTFDALIKPSRIKIGEKIIFDGGKIYGTVSAEKQITFSTASINTIYNLGMMPLPPYIKREPEKLDNICYQTVYAVNPGAIASPTAGLHFTKELMKRIKSKSINLGFLTLHIGYSTFKPVKSEDVTGHRMEKEYFNIPESTQRLIEEAQYKKSRIVAVGTTSLRALESYDSKMKDGYTDLFIYPGYKFKLVDCLLTNFHLPRTTLFILACAFAGNKLIKKAYQEAIDKKYRFYSYGDAMLIL

SEQ ID NO: 69613 - protein, 371 aa, unidentified
  source 1..371: note = Opitutaceae bacterium
  REGION 1..371: note = tr|A0A178ILH4|A0A178ILH4_9BACT S-adenosylmethionine:tRNA ribosyltransferase-isomerase; OS = Opitutaceae bacterium TSB47 OX=1184151 GN=queA PE=3 SV=1
MPLPTELFDYELPPRLIAQTPAARRDASRLMVVDRASRKVVHTVFAELPAWLRAGDILFRNNAAVLPARLHARRPTGGAVECFLLRPDTVSDRGEAWWCLVRPGKRLPPGAVFSGGEGDFSATVLEKREDGTALVRFTTPRDASIIAVANRLGDIPLPPYISREGTEEERERDIERYQTVYADRASQVAVAAPTAGLHFTPELLARLAALGVGTADMTLHVGLGTFKPIGTETVEEHAIHREIYEMPEAAARRLVAPGGGRRIAVGTTSVRTIEDYLAKREREGAGAWQTGAGGGVQCAEAALFIYPPRRFLGVDALITNFHQPRSTLLCLVSAFLTPGSTDGIAWMRELYAEAIAREYRFFSYGDAMLVL

SEQ ID NO: 69614 - protein, 359 aa, unidentified
  source 1..359: note = Opitutaceae bacterium
  REGION 1..359: note = tr|A0A2T6DVU6|A0A2T6DVU6_9BACT S-adenosylmethionine:tRNA ribosyltransferase-isomerase; OS = Opitutaceae bacterium EW11 OX=2161865 GN=queA PE=3 SV=1
MSLSTDLFDFELPARLVAQRPAERRDASRLLVVHRAEHRWEHRVFTDLPEYLRPGDTLFRNNAAVLPARLQAHRPTGGAVECFLLRQDPTAGENAWWCLIKPGRRLPVGSTFSSDDAFSATVIDKTEDGTALVRFAVRPGETVEELAARVGHVPLPPYISREGKPGEREQDLARYQTVYADIQKRVAVAAPTAGLHFTPELLETLASKGIETADVTLHVGLGTFKPITTDVVSRHAIHREHYEMPPETQQKLFSARGRRIAVGTTSVRTIEDFLTGHTTPLAQPYRSDTSIFIYPPYAFRGVDALITNFHQPRSTLLCLVAAFLSPGSTEGVGWLREIYADAISREYRFFSYGDAMLIL

SEQ ID NO: 69615 - protein, 370 aa, unidentified
  source 1..370: note = Opitutae bacterium
  REGION 1..370: note = tr|A0A2A2QRZ5|A0A2A2QRZ5_9BACT S-adenosylmethionine:tRNA ribosyltransferase-isomerase; OS = Opitutae bacterium Tous-C5TDCM OX=1982322 GN=queA PE=3; SV = 1
MFPLVPPLSTDLFDYHLPAHLIAQTPAARRDGSRLMVIDRATRTLSHHTFAELPRFLRAGDTLFRNNASVLPARLHARRPTGGQVECFLLRPKEGHAATTWQCLIKPGKKLAVGATFADVAGTFQAEIVSRETDGSAFVRFTTLNGESVTALANRIGEVPLPPYIERSPAPTFASTTSSLDRDRYQTVYANPERQVAVAAPTAGLHFTPEILAALRAQGVLTADLTLHVGLGTFKPITAKMVEDHAIHRELYEIPVITQRALFPPLPGRRIAVGTTSVRSIEDFLAHNPAARETPQIAEASIYIYPPRTFAGIDALITNFHQPRSTLLCLVSAFLTPGSTDGVDWLHSIYAEAVAREYRFFSYGDAMLIL

SEQ ID NO: 69616 - protein, 352 aa, unidentified
  source 1..352: note = Opitutae bacterium
  REGION 1..352: note = tr|A0A2D8VBF0|A0A2D8VBF0_9BACT S-adenosylmethionine:tRNA ribosyltransferase-isomerase; OS = Opitutae bacterium OX=2026771 GN=queA PE=3 SV=1
MLTSELDFNLPGDRVAQFPTDRRDRSRLLVYRRSEQSVHHHYFHELPDLLPSRLRIFRNDVSVLKARLFGQRKTGGAVECLLLRPTEKLDDTWHCLLKPGGKTARAGRFSLPGEYDATVMKTLPSGEYLVKFDLPKDDDPADLAQRVGALPLPPYVDRPAHEIDDSRYQTVYANPENRTAVAAPTAGLHFTPEILNELKDKGYSIYDLTLSVGLGTFRPIETEKIDDHPMHAEEYSIGPEAKKALKEKDGKTLAVGTTTVRTIEHYLSAIDLTPEKTTRAQTDLFIRPPYSFLGVDHLLTNFHLPGSTLLCLVSAFLSPGKEDGLATLKDIYAQAISQEYRFFSYGDAMLIL

SEQ ID NO: 69617 - protein, 363 aa, unidentified
  source 1..363: note = Opitutales bacterium
  REGION 1..363: note = tr|A0A3R7V5W6|A0A3R7V5W6_9BACT S-adenosylmethionine:tRNA ribosyltransferase-isomerase; OS = Opitutales bacterium TMED207 OX=1986795 GN=queA PE=3; SV = 1
MDLSLFDYTLPKSLIAQEPSEKRSDARLLVYNRKNGMISHAQFKDIGDFLPKNVQFFRNQVSVLKARLFGKRKTGGLVECLLLNPAEDSNTWWCLIKPGKKTLNARYFFDENHYEANVLDTNINGEYKVRFNLFHENNVYDLANKLGKMPLPPYIQREKKDIRDKLDSERYQTVYADDNKPFAAAAPTAGLHFTNELIEKLKAEGHDFLDLSLNVGIGTFRPIQVDAIENHKIHRESFEIPPATIKALQPKGSKLRVAVGTTSVRSLESFYAHLSKNSDTLEQFFDKPYSASTDLYIYPPAKFLGVDAMITNFHLPRSSLLCLVSAFLEPDTTHGVELLKTLYNLAIKNNYRFYSYGDAMLIL

SEQ ID NO: 69618 - protein, 352 aa, unidentified
  source 1..352: note = Opitutales bacterium
  REGION 1..352: note = tr|A0A2E7PWU4|A0A2E7PWU4_9BACT S-adenosylmethionine:tRNA ribosyltransferase-isomerase; OS = Opitutales bacterium OX=2026772 GN=CMI33_06485 PE=3 SV=1
MLTSELQYELPSDRIAQSPCAKRDESRLLVYRRSDHSIAHHLFHELPDLLPPKLSILRNDVSVLKARLPGQRPTGGAVECLLLRPADQPGSTWRCLLKPGAKTAKAGTFGQDGEYSAKVIESLPSGEYLISFDLPKDSDPPALAERIGALPLPPYVRRPADSADEQRYQTVYADESKRSAVAAPTAGLHFTPQVLNRLQSDGHKVFDLTLSVGLGTFRPIETEKVEDHPMHAEEYFLTPETKGILRDGSARRLAIGTTCVRAIEHYLGKEDLRPAESTRAEAKLFIRPPHSFLGVDHLLTNFHLPGSTLLCLVGAFLTPSEKEGISRLKEVYAEAIERDYRFFSYGDAMLIV

SEQ ID NO: 69619 - protein, 362 aa, Opitutus sp.
  REGION 1..362: note = tr|A0A2T6D1W0|A0A2T6D1W0_9BACT S-adenosylmethionine:tRNA ribosyltransferase-isomerase; OS = Opitutus sp. ER46 OX=2161864 GN=queA PE=3 SV=1
MPPLATDLFDYVLPPHLIAQTPAAKRDASRLLVVDRAAHTFAHHHFADLPQFLRAGDTLFRNNAAVLPARLHARRPTGGAVECFLLRPTDDDRTWRCLVKPGRRLPVDATFAHPDGAFTGRIVAREADGAAIVRFTTPGNEPITAVANRVGDVPLPPYISRPDAIAPQQRATDLERYQTVYANTARQVAVAAPTAGLHFTPELLATLAAQGVGTAEMTLHVGLGTFKPISTDTVEEHQIHRELYEVPVATQHALFPPRSGRRVAVGTTSVRTIEDFLARNAAPLERDVVAEAGLFIYPPRAFRGVDALITNFHQPRSTLMCLVASFLAPGNTDGIAWLRELYAEAIAREYRFFSYGDAMLIL

SEQ ID NO: 69620 - protein, 396 aa, Opitutus sp.
  REGION 1..396: note = tr|A0A1H1LAW3|A0A1H1LAW3_9BACT S-adenosylmethionine:tRNA ribosyltransferase-isomerase; OS = Opitutus sp. GAS368 OX=1882749 GN=queA PE=3 SV=1
MLTDLFDYPLPDRLIAQQPAGRRDASRLLVVHRREHRIEHRHFRDLPEYLRTGDCLFRNNAAVIPARLHATRPTGGQVECLLLRPAWSAGDPAREGPSAAGSPRLQGKEPATEWWCLVRPGKKLSVGATFALEGFFTATVREKTDDGLVRVAFTTRESDILAVANRIGEMPLPPYIAGHDNDAARAIDRERYQTVYADRAHQVAAAAPTAGLHFTPELLTRLAAQGITTADLTLHVGLGTFRPIATARVEEHPIHREVYEIPATTQQALLATKGRRIAVGTTSVRTIEDFLVRQPDAARWSGLTSRRSERVGVNALHPDQPYLAEADIFIYPPRDFRGVDALITNFHQPRSTLLCLVSAFLVPGSADGIAWLKEIYAEAVAREYRFFSYGDAMLIL

SEQ ID NO: 69621 - protein, 398 aa, Opitutus terrae
  REGION 1..398: note = tr|B1ZMP2|B1ZMP2_OPITP S-adenosylmethionine:tRNA ribosyltransferase-isomerase OS=Opitutus terrae (strain DSM 11246 / JCM 15787 / PB90-1) OX=452637 GN=queA PE=3 SV=1
MPLALRVPPLPTDLFDYELPPRLIAQTPAERRDRSRLLVIDRATRKLAHHTFAELPKFLRAGDTLFRNNAAVLPARLHARRPTGGEVECFLLQQEPTAGSGTGVPPVIQPAEAIQSSRAGRPCHEIWRCLIKPGRRLAVGATFAHPSKAFTGEILEKHADGTAQVRFTTSDHRPITAVANELGDVPLPPYIERDPHAPDHDRQRQLDLSRYQTVYANAARQVAVAAPTAGLHFTPELLAALTAMGVRTADVTLHVGLGTFQPISTATIEEHRIHRELYEIPASTQRALFPPLTGRRIAVGTTSVRTIEDFLSQHSTPRPEEAAHVAEAGIFIYPPREFCGVDALITNFHQPRSTLLCLVSAFLTPGSTDGIAWIREIYAEAIAREYRFFSYGDAMLIL

SEQ ID NO: 69622 - protein, 342 aa, Orbus hercynius
  REGION 1..342: note = tr|A0A495RAD7|A0A495RAD7_9GAMM S-adenosylmethionine:tRNA ribosyltransferase-isomerase; OS = Orbus hercynius OX=593135 GN=queA PE=3 SV=1
MQLSDFHFDLPNELIARYPAQTRSECRLLSLDGKTGQVTHGIFTDIIAQLQPGDLLVFNNTRVIPARVYGRKQSGGKIEILVERLLDNHRVLAHIKASKSPKVGTELLLGEQEQVNVTMVARHDTLFELQFPDDVLTILNQIGHIPLPPYIDRPDDEQDREVYQTVYNKVPGAVAAPTAGLHFDQPLLDVLKQKGVELAFVTLHVGAGTFQPVRVDVIEEHIMHAEYAQVSQEVVDAVVACKARGNKVVAVGTTSVRALESAAQQTGQIAPFFADTRIFIYPGYQFNVIDALITNFHLPESTLIMLVSAFAGYDNTMHAYQQAVAERYRFFSYGDAMFISKK

SEQ ID NO: 69623 - protein, 341 aa, Orenia marismortui
  REGION 1..341: note = tr|A0A4R8GXW3|A0A4R8GXW3_9FIRM S-adenosylmethionine:tRNA ribosyltransferase-isomerase; OS = Orenia marismortui OX=46469 GN=queA PE=3 SV=1
MKVKDFDFELPEELIAQEPMEPRDESRLMVINKTEDKIEDKIFKEIIDYFEPGDTLVRNNTKVIPARLFGHKEKTGGKVEVLLLNQVKLDQWETLVRANGNVKIGTRIVFGNEELVAEVKEMTDFGGRVVEFEYDGVFEEILDQLGNMPLPPYITKELDDADKYQTVYAKKRGAAAAPTAGLHFTDNLLAQIKDKGVNIVDVTLHVGLGTFRPVKVDTIEEHDMHSEYYEISKEAAQVINETKKRGNKVFSVGTTSTRTLETVADENGKVKASKGWTDIFIYPGYEFKLVDALITNFHLPQSTLVMLVSAFAGKDLTMRAYQQAVEEEYRFYSFGDGMLII

SEQ ID NO: 69624 - protein, 340 aa, unidentified
  source 1..340: note = Orenia metallireducens
  REGION 1..340: note = tr|A0A285G6U0|A0A285G6U0_9FIRM S-adenosylmethionine:tRNA ribosyltransferase-isomerase; OS = Orenia metallireducens OX=1413210 GN=queA PE=3 SV=1
MKVKDFDFELPEELIAQEPMEPRDESRLMVINRAEERIEGKIFKEIVDYFQPGDTLVRNNTKVIPARLFGQKETGAKVEVLLLTQAELGVWEALVRPGRKLKLGTRVIFGNGELVGEIKGRTDFGGRVIKFEYEGTFEAVLDKLGEMPLPPYITKELDKSEKYQTVYAKKRGAAAAPTAGLHFTDELLAKIEAKGVNIVDITLHVGLGTFRPVSVDTIEEHDMHSEYYEVSEEAAQIINETKKQGNRVFSVGTTSTRTLETVATKDGRIKAGKGWTDIFIYPGYEFKAVDALITNFHLPQSTLVMLVSAFAGQELTMKAYEQAVEQNYRFYSFGDGMLIL

SEQ ID NO: 69625 - protein, 341 aa, unidentified
  source 1..341: note = Orenia metallireducens
  REGION 1..341: note = tr|A0A1C0A4X8|A0A1C0A4X8_9FIRM S-adenosylmethionine:tRNA ribosyltransferase-isomerase; OS = Orenia metallireducens OX=1413210 GN=queA PE=3 SV=1
MKVKDFDFELPEELIAQEPMEPRDKSRLMVINRAEEKIEGRIFKEIIDYFQPGDTLVRNNTKVIPARLFGRKEETGGKVEVLLLTQVELGEWEALVRPGRKLKLGTRVVFGNGELVGEIKDRTDFGGRVIKFEYEGTFEAVLDKLGKMPLPPYITKELDKSDKYQTVYAKKRGAAAAPTAGLHFTDELLAKIEAKGVNIVDITLHVGLGTFRPVSVDTIEEHHMHSEYYEVSEEAAKIINEAKERGNRVFSVGTTSTRTLETVATEKGRVEAGKGWTDIFIYPGYQFKAVDALITNFHLPQSTLVMLVSAFAGQELTMKAYEQAVEQKYRFYSFGDGMLIL

SEQ ID NO: 69626 - protein, 341 aa, unidentified
  source 1..341: note = Oribacterium asaccharolyticum
  REGION 1..341: note = tr|G9WVF5|G9WVF5_9FIRM S-adenosylmethionine:tRNA ribosyltransferase-isomerase OS=Oribacterium asaccharolyticum ACB7 OX=796944 GN=queA PE=3 SV=1
MNTKDFYYDLPEELIAQDPLLKRSASRLLVMDRKSGKIEHKHFEDVLSYLREGDCLVLNNTKVIPARLHGVKTETGAHVEVLLLTRLTDKSWECIVRPGKKLRVGAEIIFAENLLSGTVIECKEDGNRVVEFHFEGIFEEILDKLGEMPLPPYITKQLEDKTRYNTVYAKEEGSAAAPTAGLHWTKGLLEKVQEKGIKIAYVTLHVGLGTFRPVKVEDVEKHHMHSELYIIDKETADLINSTKKAGGRIICTGTTSCRTIESNADENGVLHPGSAWTDIFIYPGYRFKVMDGLITNFHLPESTLIMLVSAFSTRENVLHAYQEAVRERYRFFSFGDAMLIN

SEQ ID NO: 69627 - protein, 341 aa, unidentified
  source 1..341: note = Oribacterium parvum
  REGION 1..341: note = tr|G9WK28|G9WK28_9FIRM S-adenosylmethionine:tRNA ribosyltransferase-isomerase OS=Oribacterium parvum ACB1; OX = 796943 GN=queA PE=3 SV=1
MNTKDFYYDLPEELIAQDPLLKRSASRLLVMDRKSGEIEHKHFEDVLSYLREGDCLVLNNTKVIPARLHGVKAGTGAHVEVLLLTRLTDKSWECIVRPGKKLRVGAEIIFAENLLSGTVIECKEDGNRIIEFHFEGIFEEILDKLGEMPLPPYITKQLSDKTRYNTVYAKEEGSAAAPTAGLHWTKELLEKVQEKGVKIAYVTLHVGLGTFRPVKVEDVEKHHMHSELYIIDKETADLINSTKKAGGRIICTGTTSCRTIESNADENGVLHPGSAWTDIFIYPGYRFKVMDGLITNFHLPESTLIMLVSAFSNRENVLHAYEEAVRKRYRFFSFGDAMFLI

SEQ ID NO: 69628 - protein, 207 aa, Oribacterium sinus
  REGION 1..207: note = tr|C2L1C5|C2L1C5_9FIRM S-adenosylmethionine:tRNA ribosyltransferase-isomerase (Fragment) OS=Oribacterium sinus F0268 OX=585501 GN=HMPREF6123_2544 PE=3 SV=1
SGIFEEVLDQLGEMPLPPYITHKLEDRTRYNTVYAKEEGSAAAPTAGLHWTKELLEQCEAKGVEILRITLHVGLGTFRPVKMEEVEKHHMHSEYYSVSQEVAEKIEASKKRGGRVICTGTTSCRALESAARESGKIEAKSGWTDIFIYPGFSFKVMDALITNFHLPESTLLMLVSALSSREKILHAYEEAVKEKYRFFSFGDAMFIH

SEQ ID NO: 69629 - protein, 132 aa, Oribacterium sinus
  REGION 1..132: note = tr|C2L1C6|C2L1C6_9FIRM S-adenosylmethionine:tRNA ribosyltransferase-isomerase (Fragment) OS=Oribacterium sinus F0268 OX=585501 GN=HMPREF6123_2545 PE=3 SV=1
MNTKDFYYDLPEELIAQDPLLNRSSSRLMLLNKETGEIEHKHFYDILDYLHPGDCLVLNETKVIPARLYGVKEDTGAQVEVLLLHRKDKEHWECLVKPGKKLKPGARISFGDGRLKAEIVDILEEGNRLIRF

SEQ ID NO: 69630 - protein, 341 aa, Oribacterium sp.
  REGION 1..341: note = tr|F5T7N3|F5T7N3_9FIRM S-adenosylmethionine:tRNA ribosyltransferase-isomerase OS=Oribacterium sp. oral taxon 108 str. F0425 OX=904296 GN=queA PE=3 SV=1
MNTKDFYYDLPEELIAQDPLLKRSASRLLVMDRKSGEIEHKHFEDVLSYLREGDCLVLNNTKVIPARLHGVKAETGAHVEVLLLTRLTDKNWECIVRPGKKLRVGAEIVFAENLLSGTVIECKEDGNRVIEFHFEGIFEEILDKLGEMPLPPYITKQLEDKTRYNTVYAKEEGSAAAPTAGLHWTKELLEKVQEKGVKIAYVTLHVGLGTFRPVKVEDVEKHHMHSELYIVDKETADLINSTKKAGGRIICTGTTSCRTIESNADENGVLHPRSAWTDIFIYPGYRFKVMDGLITNFHLPESTLIMLVSAFSNRENVLHAYQEAVRERYRFFSFGDAMLIL

SEQ ID NO: 69631 - protein, 346 aa, Oribacterium sp.
  REGION 1..346: note = tr|A0A1S9BS68|A0A1S9BS68_9FIRM S-adenosylmethionine:tRNA ribosyltransferase-isomerase; OS = Oribacterium sp. C9 OX=1943579 GN=queA PE=3 SV=1
METKDFYYDLPEELIAQDPLEKRSDSRLLLVDKTTGNIEHKHFYNIIDYLHKGDCLVINDTKVIPARLHGVKEETGAHIEVLLLQRKSATDWECLVKPGKKMRNGARVSFGEGLLKGEVIDTIDDGNRIIRFEFEGIWEEVLDKLGEMPIPPYIHHQLKERERYNTVYAKNDGSAAAPTAGLHWTKELLQAVKDKGVEIAHVTLHVGLGTFRPVKADKIEEHHMHSEFYIIEQSEADKINKAHAEGGRVICTGTTSCRTIESAALPDGTIPATSGWTSIFIYPGYKFKCMDALITNFHLPESTLVMLVSAFAGREHVLNAYNAAVREKYRFFSFGDACFFADFKND

SEQ ID NO: 69632 - protein, 361 aa, unidentified
  source 1..361: note = Oricola cellulosilytica
  REGION 1..361: note = tr|A0A4R0P8F7|A0A4R0P8F7_9RHIZ S-adenosylmethionine:tRNA ribosyltransferase-isomerase; OS = Oricola cellulosilytica OX=1429082 GN=queA PE=3 SV=1
MRVDSFDFELPDERIAVRPAVPRDSARMLVVKPGEALSDSTVLQIPELLRAGDVLVFNDTKVIPAQLEGVRTRSDGGTARIGATLHLRTAPDRWKAFIRGAKKLKTGDRITFDAREAAEDETLDGVVHAKGEDGEAEIAFNRTGADLDAALAVFGHIPLPPYIASKRDDDDRDREDYQTIYAREQGAVAAPTAGLHFTERLFEALDQAGIIRTFVTLHVGAGTFLPVKADDTKDHRMHAEIGEINTETADMLNKARANGGRVVSVGTTSLRLLESAARADGSVAAWAGPTDIFITPGYRFKAVDILITNFHLPRSTLFMLVAAFSGLETMRGAYQHAIDARYRFYSYGDASMIFPATDERL

SEQ ID NO: 69633 - protein, 359 aa, unidentified
  source 1..359: note = Oricola sp.
  REGION 1..359: note = tr|A0A3M8GXD7|A0A3M8GXD7_9RHIZ S-adenosylmethionine:tRNA ribosyltransferase-isomerase; OS = Oricola sp. OX=1979950 GN=queA PE=3 SV=1
MRVDEFDFDLPEERIALRPAEPRDAARMLVVRDTGLTDAGVMDLPSFLSAGDLMVFNDTRVIPAQLEGTRERDGQIASIGATLHMREGPDRWKAFVRGAKKLRVGDRIRFGETGDACLAGVLDATVAEKAEGGEVTLTFDLAGPDLDAAIALAGHIPLPPYIASKRADDERDRTDYQTVYAREDGAVAAPTAGLHFTDRLFAKLDKAGVNRAFVTLHVGAGTFLPVKAEDTDDHVMHAEIGHVSDETAALINQTRARGGRIVSVGTTSLRLLESAADEDGNVRPFAGATDIFITPGYRFRAVDVLMTNFHLPRSTLMMLVSAFAGMEPMRAAYAHAIETGYRFYSYGDSSLLFRNDGDG

SEQ ID NO: 69634 - protein, 339 aa, unidentified
  source 1..339: note = Ornatilinea apprima
  REGION 1..339: note = tr|A0A0P6Y2K7|A0A0P6Y2K7_9CHLR S-adenosylmethionine:tRNA ribosyltransferase-isomerase; OS = Ornatilinea apprima OX=1134406 GN=queA PE=3 SV=1
MKTSDFDYDLPEEYIAQTPVEPRHASRLLVLHRASGELEHKQFWQIGEYLRPGDLLVINRTRVIPARLYAHKETGGKVELLLLRRVDELRWEALVGGKRMLPGKKVKLEDGLTAVIEAELDGARRMIRFEEAVEGHLERLGHMPLPPYIHERLDDPERYQTVYSQTPGSAAAPTAGLHFTPELIAQLEQQGVAFAGVTLHVGLDTFQPVHEDDPREHQIHTEWCELGEETAAAIRKTKQSGGRVIAVGTTSVRTLESAARHAKADEIVSPFAGPTDLFILPGYTFRAVDVMITNFHLPRSTLLMLVSAFAGRERVLAAYEIAKQHGYRFFSFGDAMLLD

SEQ ID NO: 69635 - protein, 341 aa, unidentified
  source 1..341: note = Ornithinibacillus halophilus
  REGION 1..341: note = tr|A0A1M5DG40|A0A1M5DG40_9BACI S-adenosylmethionine:tRNA ribosyltransferase-isomerase; OS = Ornithinibacillus halophilus OX=930117 GN=queA PE=3 SV=1
MNIEDFDFDLPEELIAQTPLKDRTSSRLLVLNRDKKQVEHRHFKDIKAYLKPGDCLVLNDTRVLPARLYGVKEDTGAKVEVLLLKQEENDTWEVLAKPAKKIKEGTVLLFGDGKLKATCIGTKEHGGRILDFAYEGIFYEVLDELGEMPLPPYIKEQLPERERYQTVYAKEEGSAAAPTAGLHFTTQLLEEIKEMGVTVTFITLHVGLGTFRPVSVDNIDEHEMHAEFYQMSEETAETINRVKESGGRVISVGTTSTRTLETIARDHGRMVASSGWTDIFIYPPYELKAIDGLITNFHLPKSTLIMLVSAFVDRETVLSAYEEAVKEKYRFFSFGDAMLIL

SEQ ID NO: 69636 - protein, 342 aa, Ornithinibacillus sp.
  REGION 1..342: note = tr|A0A3C1I3M4|A0A3C1I3M4_9BACI S-adenosylmethionine:tRNA ribosyltransferase-isomerase; OS = Ornithinibacillus sp. OX=1898027 GN=queA PE=3 SV=1
MNIEDFDFDLPEELIAQTPLKDRSASKLMVLHRDVEEIEHKHFTDIKSFLKKGDCLVLNNTKVLPARLYGIKEDTGAKVEVLLLKQVEGDTWEVLAKPAKRLKEGTKLIFGEGKLTATCTETLEHGGRLLDFAYDGIFYEVLDELGEMPLPPYIKEQLPEKDRYQTVYAKEEGSAAAPTAGLHFTEQLLAEIKEMGVTVAFITLHVGLGTFRPVSVENIDEHKMHSEFYVMTQETAETLTKTKENGGRIISVGTTSTRTLETIARDNNGKLVESSGWTDIFIYPGFEFKAIDGLITNFHLPKSTLIMLVSAFSNREFILKAYNEAVKEKYRFFSFGDAMFII

SEQ ID NO: 69637 - protein, 352 aa, Ornithinicoccus hortensis
  REGION 1..352: note = tr|A0A542YWB8|A0A542YWB8_9MICO S-adenosylmethionine:tRNA ribosyltransferase-isomerase; OS = Ornithinicoccus hortensis OX=82346 GN=FB467_3572 PE=3; SV = 1
MTALSTRPATRFRSPGDMTAPAPPETRGLARDEVRLLVGTREGITHTRFRSLPDHLRAGDLVVVNNSATLAAQVDGDHAGTGPVVVHVATPLDDGSWVVEVRSAPAAAEPVLDLSAGDVLQVHGVTLTLLAPYPHEGSSPSGAGNRLWRVAPEGGLADVLDRHGRPISYGYLDRAYPLSAYQTVFGHLPGSAEMPSAGRPFTDALVTRLVRAGVGVAPITLHTGVSSQEVGEGPQAERFAVPEVTARQVNTVRLTGGRVIAVGTTVARALESAVTSGGRVVGDSGWTDRVITPDDPARVIDGLITGWHDPEASHLLLVESVAGPELTQRAHDAAVAEGYHWHEFGDSALLLP

SEQ ID NO: 69638 - protein, 349 aa, Ornithobacterium rhinotracheale
  REGION 1..349: note = tr|I3ZXE5|I3ZXE5_ORNRL S-adenosylmethionine:tRNA ribosyltransferase-isomerase OS=Ornithobacterium rhinotracheale (strain ATCC 51463 / DSM 15997 / CCUG 23171 / CIP 10 4009 / LMG 9086) OX=867902 GN=queA PE=3 SV=1
MKTSDFDFKLPEKLLADRPSRFRDEAKLMVLHRDTQTIEHREFKDLIEYFDEDDVLIRNNTKVFPARLYGNKEKTGAKIEVFLLRELDPETRLWDVLVDPARKIRIGNKLFFGDDDSLVAEVVDNTTSRGRTLRFLFDGNYEEYRAKLKELGTTPLPKYIKREADKEDEERYQTIYATEEGAVAAPTAGLHFSKHLLKRLEIKGVDFAEITLHVGLGTFSPVQVEDLTKHKMESERVIIPASTADRVNKALEDGKRVCAVGTTSMRAIESAVSANKRLNPYEGWTNKYIHPPYDFSIANCMVTNFHTPKSTLLMMISAFAGHDFVMKAYKEAVKKEYKFYSYGDAMLIL

SEQ ID NO: 69639 - protein, 349 aa, Ornithobacterium rhinotracheale
  REGION 1..349: note = tr|A0A3R5USD0|A0A3R5USD0_9FLAO S-adenosylmethionine:tRNA ribosyltransferase-isomerase; OS = Ornithobacterium rhinotracheale OX=28251 GN=queA PE=3; SV = 1
MKTSDFDFKLPEKLLADRPSRFRDEAKLMVLHRDTQTIEHREFKDLIEYFDEDDVLIRNNTKVFPARLYGNKEKTGAKIEVFLLRELDPETKLWDVLVDPARKIRIGNKLFFGDDESLVAEVVDNTTSRGRTLRFLFDGTYEEYRAKLKELGTTPLPKYIKREADKEDEERYQTIYATEEGAVAAPTAGLHFSKHLLKRLEIKGVDFTEITLHVGLGTFSPVQVEDLTKHKMESERVIIPQATAERVNKALEDKKRVCAIGTTSMRAIESAVSANKRLNPYEGWTNKYIHPPYDFSIANSMVTNFHTPKSTLLMMISAFAGHDFVMKAYKEAVKKEYKFYSYGDAMLIL

SEQ ID NO: 69640 - protein, 360 aa, unidentified
  source 1..360: note = Orrella dioscoreae
  REGION 1..360: note = tr|A0A1C3K456|A0A1C3K456_9BURK S-adenosylmethionine:tRNA ribosyltransferase-isomerase; OS = Orrella dioscoreae OX=1851544 GN=queA PE=3 SV=1
MPPTYTVNDFDYDLPPELIAQTPAPTRGGSRLLHLDPKGDLHDRQFAELGRLLRPDDLLIFNDTRVIPARLTGHKATGGKVEVLVERITEDNRALAHVRASKSPPAGTTLRLADAFDVTVLGREGELFDLRFPSAVLGLLATHGATPLPPYITHAPDAEDVSRYQTVYAREPGAVAAPTAGLHFDEAMLDALAAQGIQRAFVTLHVGAGTFQPVRVQNLDEHIMHAEWYTVPPETVAAIARTRAAGGRVLAIGTTSVRALESAAAQAALAAKAGDDAARAALSRRQLAGPADGDTRLFITPGFSYRIVDALLTNFHLPQSTLLMLVSALAGVDPIRRAYRHAVAERYRFFSYGDAMLIET

SEQ ID NO: 69641 - protein, 358 aa, Oryzihumus leptocrescens
  REGION 1..358: note = tr|A0A542Z847|A0A542Z847_9MICO S-adenosylmethionine:tRNA ribosyltransferase-isomerase; OS = Oryzihumus leptocrescens OX=297536 GN=FB474_4118 PE=3; SV = 1
MSLAAEPELVFSVPEGALATEPPEARGLRRDEVRLLVADGCGLSHARFHDLGRFLRAGDVLVVNTSATLPAALPARRGLVEITVHFAAEPQVGTWLVELRPGPRADGPLRDGREGERLDLPDGGVLRLLAPYPDPLAEQPRIWRARVSLPLPTDEFLVAHGAPIAYAYVPGAWPISAYQTVFARDPGSAEMPSAGRPFSAELVSDLVAAGVLIAPVTLHTGVSSLEPGEGPLPERYAVPEGSAALVNLARARGGRVVAVGTTATRALETVAAPDGTVAAGAGWTDLVLGPDRPARAVDGVVSGWHQPGASHLLLLEAVAGPDVVRRAYAEAVRERYLWHEFGDSALLLSEGACGELGS

SEQ ID NO: 69642 - protein, 390 aa, unidentified
  source 1..390: note = Oryzisolibacter propanilivorax
  REGION 1..390: note = tr|A0A1G9SDS0|A0A1G9SDS0_9BURK S-adenosylmethionine:tRNA ribosyltransferase-isomerase; OS = Oryzisolibacter propanilivorax OX=1527607 GN=queA PE=3; SV = 1
MTCDKDAICDNRAHFFAAPPPLRMPDTHRPFTLSDFDFALPEALIAQHPAPERSASRLLDGRGAQPVDRIFRALPELLAPGDLLVFNDTRVVRARIFGEKASGGKLELLIERVLDGGQVVAHMKVSKKPQPGAVLHLAGGRARGGFDALLLGRWPNADGPLFRLALQPPAGESPWELMERHGHLPLPPYIARQQSGGNDPDATEDAERYQTVFADKPGAVAAPTAALHFDAGVLAALAARGIERASVTLHVGAGTFQPVKTENLAEHRMHSEWYDIPPATLAALERCRQRGGRVVAVGTTTVRTLESWAQSGRATGDTSIFITPGFAFQVVDLLVTNFHLPRSTLMMLVSALSGYEHVMALYRHAVAEGYRFFSYGDAMLLQRQDLLLKK

SEQ ID NO: 69643 - protein, 356 aa, unidentified
  source 1..356: note = Oryzomicrobium terrae
  REGION 1..356: note = tr|A0A5C1EA80|A0A5C1EA80_9RHOO S-adenosylmethionine:tRNA ribosyltransferase-isomerase; OS = Oryzomicrobium terrae OX=1735038 GN=queA PE=3 SV=1
MSLTVDDFDFPLPPELIAQHPAAQRTASRLLHVDGGALSDRQFTDLPSLLAPGDLLVFNDTRVIKARFFGAKESGGAVEVLVERIVEPHRALAQVRASKSPKPGTRLLLENSFGVTVTGREGEFFVLELPGAASGSGPDFWQLTEAHGRLPLPPYISHGAEAEDESRYQTVYARAPGAVAAPTAGLHFDEPLLERLKEMGVEQAFLTLHVGAGTFQPVRVTNIADHHMHSERFEIPEATAAAIAATRARGGRVVAVGTTSLRALESAALQGGREDGTVPAGGAETDIFITPGYQFRVVDRLVTNFHLPKSTLLMLVAALAGFDTIRAAYAHAVEQRYRFFSYGDAMLLERAAPPQA

SEQ ID NO: 69644 - protein, 391 aa, Oscillatoria acuminata
  REGION 1..391: note = tr|K9TSA5|K9TSA5_9CYAN S-adenosylmethionine:tRNA ribosyltransferase-isomerase OS=Oscillatoria acuminata PCC 6304 OX=56110 GN=queA PE=3 SV=1
MFPNQPDFETVASSVNAINSLTHSQPEGDRTLSAYDYDLPEERIAQNPVTPRDNSRLLVVDSPTSHQHRRFRDLPELLEPGDLLVLNNTRVMPARLYGYKSTGTPVEVLLLEEQEENQWLGLVKPGRRLKPGALIQFPVPDTPEGEPESQSTLQAKVLATDEATGGRILQFEATPGFSVRELLESYGQVPLPPYITQSVASPDQYQTVYAEQSGSAAAPTAGLHFTEELLDRLEAKGINRAFVTLHVGVGTFRPVEVEDVTRHQMHQEWVQVPKETVEKIRETKARGGRVIAVGTTGVRSLEGAAVSGELQPFCGKTDLFIYPGYQWRVVDGLITNFHLPRSSLLMLVSALIGRDRLLGLYREAIAQEYRFYSFGDAMIILPSAKTEISAS

SEQ ID NO: 69645 - protein, 379 aa, unidentified
  source 1..379: note = Oscillatoria nigroviridis
  REGION 1..379: note = tr|K9VGU0|K9VGU0_9CYAN S-adenosylmethionine:tRNA ribosyltransferase-isomerase OS=Oscillatoria nigro-viridis PCC 7112 OX=179408 GN=queA PE=3 SV=1
MTEMDWSLDGYDYELPPSRIAQNPVVPRDSSRLLAVDSPSSHQHRIFRNLPDLLQPGDLLVLNNTRVLPARLYGHKPNGPAVEILLMEERQHNCWLALVKPGKRLKLGSKIEFDPIAPACEDSTTAPCCCLPDAAMPHRRRLTATVIERDDATGGRLLEFDIPKDENLAKFLDEYGHVPLPPYIENSQASAEQYQTVYAERLGAVAAPTAGLHFTEELFCRLEQRGIEKTFVTLHVGVGTFRPVEVADVTAHKMHGEWVEVPPATVEKIRETQARGGRIVAVGTTAVRALEGAAAASGDFSLQPFCGPTNLFIYPGYRWRVVEGMITNFHLPRSTLMMMVSAMIGRPRLLDLYREAIEHQYRFYSFGDAMLILPTATKD

SEQ ID NO: 69646 - protein, 370 aa, unidentified
  source 1..370: note = Oscillatoriales cyanobacterium
  REGION 1..370: note = tr|A0A1C0VRR7|A0A1C0VRR7_9CYAN S-adenosylmethionine:tRNA ribosyltransferase-isomerase; OS = Oscillatoriales cyanobacterium USR001 OX=1880991; GN = queA PE=3 SV=1
MIEINLSLDLKLEAYNYELPPERIAQNPVIPRDSSRLLVVDSPTTHRHCIFRELPDFLQPGDLLVLNNTRVLPARLRGHKPNGSRVEVLLMEEKEDNCWLALVKPGKRLKPGAQIEFEPLETGVSSNSQGLSATVLAREEGTGGRYLQFEVPDGMSLIQLLPVYGHVPLPPYIRNSQSLGEQYQTVYAEKLGAIAAPTAGLHFTDELFKRLQEKGIEKAFVTLHVGVGTFRPVEVEDVTAHQMHREWVEVSAETVAKIRQTQAKGGRIIAVGTTAVRSLEGVAAWAQKQNLPSIEAFCGYVDLFIYPSYEWRVVEGLITNFHLPCSSLLMLVSAMIGRRRLFDLYEDAIAQQYRFYSFGDAMLILPEGNI

SEQ ID NO: 69647 - protein, 381 aa, unidentified
  source 1..381: note = Oscillatoriales cyanobacterium
  REGION 1..381: note = tr|A0A1J5GLR7|A0A1J5GLR7_9CYAN S-adenosylmethionine:tRNA ribosyltransferase-isomerase; OS = Oscillatoriales cyanobacterium CG2_30_40_61 OX=1805291; GN = queA PE=3 SV=1
MRKMDQLDYQLESYNYELPEARIAQNPVVPRDHSRLLVVDSPDSHRHCRFKDLPDFLRPGDLLVLNNTRVLPARLYGRKSSGATVEVLLLEEKQHNCWLALVKPGKKFKPGSVIEFELNPLSKNNFNCQTLRATVLETDEETGGRVLKFEIPPGKSLIPFLEAFGNIPFPPYVTETEALPEQYQTIYAERSGAVAAPTAGLHFTEELFQRLQLKGIDQTFLTLHVGVGTFRPVEVDNIIDHQMHGEWIEVPAATLEKIEKTKASGGRVIAVGTTSARALEGAAIALSNTTETHQESTVTGYCGKTDIFIYPGYKWQIIDGLITNFHLPKSSLLMLVSALIGRERLLNLYQHILEEPANEFGQQYRFYSFGDAMLILPESVL

SEQ ID NO: 69648 - protein, 341 aa, Oscillibacter sp.
  REGION 1..341: note = tr|A0A352RKQ5|A0A352RKQ5_9FIRM S-adenosylmethionine:tRNA ribosyltransferase-isomerase; OS = Oscillibacter sp. OX=1945593 GN=queA PE=3 SV=1
MKTKDFDYYLPEELIAQTPLEKRDESRLMCLDKETGELSHHHFYELPDFLNPGDCLILNNSRVLPARLLGQRLPGGGACEVLLLIDRGDKTWECIVRPGKHLRKGAKMQFGNGELKAEVVDVLPDGNRMVKFDFEGIFLEVLEHLGKMPLPPYIKEELQDQERYQTVYSKVNGSAAAPTAGLHFTPELLEKIQAKGVNIGYVTLHVGLGTFRPVKEDDIEQHDMHSEYCVIPPETATLINETKARGGRVICVGTTSCRTLESWAQEDGHMEPSAGWTSIYIYPGYRFKVMDALVTNFHLPQSTLIMLVSALAGREHVLHAYEEAVKERYRFFSFGDAMFVS

SEQ ID NO: 69649 - protein, 341 aa, Oscillibacter sp.
  REGION 1..341: note = tr|A0A316TAJ9|A0A316TAJ9_9FIRM S-adenosylmethionine:tRNA ribosyltransferase-isomerase; OS = Oscillibacter sp. OX=1945593 GN=queA PE=3 SV=1
MKTSDFNYELPPELIAQTPIQRRDASRLLVLDKNTGAWQHRHFYDLPEYLRPGDCLILNNSRVLPARLLGHRLPGGGACEVLLLIDRGQKTWECLVRPGKRMRTGAKLSFGHGELTAEVVEELPGGNRLVRFDYEGIFLEVLEKLGKMPLPPYIKEELQDQERYQTVYSKVNGSAAAPTAGLHFTQELLERVTAMGVKIGYVTLHVGLGTFRPVKEDEIEGHEMHSEYCIIPQETADLINETRKNGGRVICVGTTSCRTIESWAAEDGTMTASAGWTDIFIYPGYRFKVMDALITNFHLPESTLIMLVSALAGREHILAAYREAVREKYRFFSFGDAMFIQ

SEQ ID NO: 69650 - protein, 341 aa, Oscillibacter valericigenes
  REGION 1..341: note = tr|G4KPA8|G4KPA8_OSCVS S-adenosylmethionine:tRNA ribosyltransferase-isomerase OS=Oscillibacter valericigenes (strain DSM 18026 / NBRC 101213 / Sjm18-20); OX = 693746 GN =queA PE=3 SV=1
MKTSDFYYDLPKELIAQTPIEKRDASRLMTLDKTTGAWEHHHFYELPDFLTEKDCLILNDSRVLPARLLGRRLPGGGACEVLLLVDKGEGVWECLVRPGKKMRPGAQVSFGDGELTGEIIDEVEDGNRLVKFHYEGIFLEVLERLGKMPLPPYIKEELQDQERYQTVYSRELGSAAAPTAGLHFTRELLEKIAAKGVGIGYVTLHVGLGTFRPVKEEEITDHEMHSEYCIISQEVADLINRTKAGGGRVVCVGTTSCRTVESWAGEDGTMKAKSGWTGIYIYPGYKFKVTDALITNFHLPESTLIMLVSALAGREHILAAYGEAVKERYRFFSFGDAMFIH

SEQ ID NO: 69651 - protein, 345 aa, unidentified
  source 1..345: note = Osedax symbiont
  REGION 1..345: note = tr|S6I154|S6I154_9GAMM S-adenosylmethionine:tRNA ribosyltransferase-isomerase OS=Osedax symbiont Rs2; OX = 1330035 GN=queA PE=3 SV=1
MQVSDFSFKLPDELIASFPLQQRSASRLLCLDGNSGALEHRQFTDLLDLLEPGDLLVFNNTRVIPARLFGQKESGGKVELLIERVTGDKTALAHVRSSRSPKPGAKLFFEGDIQSTVEGRQGNLFELSFQIEGSLIAALEQHGHMPLPPYMNREDQLEDRERYQTVYNEKPGAVAAPTAGLHFDEQLLQKIKDKGVESAFVTLHVGAGTFQPVKVESVTEHVMHAEYIEVSEQVCQQVKATKARGGRVIAVGTTSVRCLESAAAGGEIAPCSGDTSIFIYPGYKYLVVDRLVTNFHLPESTLLMLVSAFAGFDNTINAYQQAVANKYRFFSYGDAMFITPTTVNK

SEQ ID NO: 69652 - protein, 341 aa, unidentified
  source 1..341: note = Osedax symbiont
  REGION 1..341: note = tr|S6HIL1|S6HIL1_9GAMM S-adenosylmethionine:tRNA ribosyltransferase-isomerase OS=Osedax symbiont Rs1; OX = 1330036 GN=queA PE=3 SV=1
MQVSDFSFDLPEELIASFPLEKRSASRLLCLDGKSGELQHRQFSDLVDLLQPGDLLVFNDTRVIPARLFGKKETGGKVELLIERVTAERAALAHVKSSRSPKVGTVLFFEGGIQATVVGRKGNLFELTFQIEGSLINALELHGHMPLPPYMNRADQLEDRERYQTVYNHKPGAVAAPTAGLHFDLELIEEIKAKGVDTAFVTLHVGAGTFQPVKVETVTEHVMHAEYIEVSEEVCRQVKQTKANGGRVIAVGTTSVRCLESAAAGGEISAMCGDTSIFIYPGYEYRVVDRLVTNFHLPESTLLMLVSAFAGFEHTIHAYQQAVVEKYRFFSYGDAMFITPR

SEQ ID NO: 69653 - protein, 68 aa, unidentified
  source 1..68: note = Osedax symbiont
  REGION 1..68: note = tr|A0A1Y5HU70|A0A1Y5HU70_9BACT S-adenosylmethionine:tRNA ribosyltransferase-isomerase (Fragment) OS='Osedax' symbiont bacterium Rs2_46_30_T18; OX = 1856298 GN=A9R01_016 05 PE=3 SV=1
FIYPGYKYLVVDRLVTNFHLPESTLLMLVSAFAGFDNTINAYNQAVANKYRFFSYGDAMFITPTTVNK

SEQ ID NO: 69654 - protein, 362 aa, unidentified
  source 1..362: note = Otariodibacter oris
  REGION 1..362: note = tr|A0A420XIB5|A0A420XIB5_9PAST S-adenosylmethionine:tRNA ribosyltransferase-isomerase; OS = Otariodibacter oris OX=1032623 GN=queA PE=3 SV=1
MLVTDFHFDLPDELIARYPTKERSASRLLYLNGETGEYQDQKFTDLLSHINEGDLLIFNNTRVIPARLYGKKASGGKLEVLIERVLDEKRCLAHIRSSKAPKIDSEIILGEDKLGEGNGLKAIMIARHDALFELQFEADKPLFDLLQNAGHIPLPPYIDRPDEETDQERYQTVYSKVLGAVAAPTAGLHFDNVMLEKLKQKGVDTAFVTLHVGAGTFQPVRVETIEDHKMHSEYAEVSPEVVEKIKATKAKGKRVICVGTTSVRSIESAAQAAEKEGKDIIVPFYSDTSIFLYPGKKFNIVDALVTNFHLPESTLIMLVSAFAGYRHCMNAYQHAVEEKYRFFSYGDAMFITKNPNALNDRP

SEQ ID NO: 69655 - protein, 355 aa, unidentified
  source 1..355: note = Ottowia oryzae
  REGION 1..355: note = tr|A0A2S0MD49|A0A2S0MD49_9BURK S-adenosylmethionine:tRNA ribosyltransferase-isomerase; OS = Ottowia oryzae OX=2109914 GN=queA PE=3 SV=1
MTHFTTSDFDFALPPELIAQHPAAERSASRLLHGSGPQPVDRVFRDLPALLNTGDLLVFNDTQVVNARLFGEKPSGGKLELLVERVLADGTVAAHMKVSKKPLPGARLRMAGGFEAELLGRWPNADGPLFHLRFSGDAYELMALHGHVPLPPYIERAQAGDAATGDTPARREDQARYQTVFAKHPGAVAAPTAALHFDEALLAALDARGVQRAAVTLHVGAGTFQPVKTEAIDQHVMHFERYRVPPETQAAIAACRARGGRVVAVGTTSVRTLESWAASGQAEGDTNIFITPGFRFQVVDALITNFHLPRSTLMMLVSALAGHAHIMALYRHAIAQRYRFFSYGDAMWLERAAQA

SEQ ID NO: 69656 - protein, 342 aa, Ottowia sp.
  REGION 1..342: note = tr|A0A5C7W4C2|A0A5C7W4C2_9BURK S-adenosylmethionine:tRNA ribosyltransferase-isomerase; OS = Ottowia sp. OX=1898956 GN=queA PE=3 SV=1
MRTFTTSDFDFALPPELIAQHPAPERSGSRLLDGSGAAPVDRTFRDLPTLLREGDLLVFNDTQVVKARLFGEKPSGGKLELLIERVLPDGTVAAHMKVSKKPRAGTVLRMAGGFEAELLGRWPEPQGPLFHLRLSGDAYALMAAYGHVPLPPYVTHADTAEDESRYQTVFAKNPGAVAAPTAALHFDDALLAAIDARGARRACVTLHVGAGTFQPVKTESLADHVMHRERYHVPPETVQAIADCRARGGRVVAVGTTSVRTLESWAASGEPSGDTGIFITPGFGFKVVDALITNFHLPRSTLMMLVSAFAGYERVMALYAHAVQQRYRFFSYGDAMWLLRSV

SEQ ID NO: 69657 - protein, 354 aa, Ottowia sp.
  REGION 1..354: note = tr|A0A5C8J5G7|A0A5C8J5G7_9BURK S-adenosylmethionine:tRNA ribosyltransferase-isomerase; OS = Ottowia sp. GY511 OX=2603274 GN=queA PE=3 SV=1
MRTFTTSDFDFALPPELIAQHPAAERSASRLLDGSGPTPVDRVFRELPTLMRAGDLLVFNDTQVVKARLFGEKATGGKLELLIERVLPDGTVAAHMKVSKKPPVGALLHMDGGATAELLGRWPDAQGPLFHLRLSQDAYQLMAAHGHMPLPPYIERNQAHADPDAAEDAERYQTVFAKNPGAVAAPTAALHFDEAVLAALDARGVQRAAVTLHVGAGTFQPVKSDHIADHVMHRERYHVPPATQQAIADCRARGGRVVAVGTTSVRTLESWAQRGEPSGDTGIFITPGYDWQVVDALITNFHLPRSTLMMLVSAFSGYDHIMALYRHAIAERYRFFSYGDAMWLVRQSAPSPTA

SEQ ID NO: 69658 - protein, 405 aa, Owenweeksia hongkongensis
  REGION 1..405: note = tr|G8R6N5|G8R6N5_OWEHD S-adenosylmethionine:tRNA ribosyltransferase-isomerase OS=Owenweeksia hongkongensis (strain DSM 17368 / CIP 108786 / JCM 12287 / NRRL B-23963/ UST20020801) OX=926562 GN=Oweho_0156 PE=3 SV=1
MEQDVKNIRIEEYNYPLPDERIAKYPVSPRDTSKLLIYEDGNIREDQYKHLLKYLPRDSFLLFNQTRVVQARLKFPKNETTTIEVFCLEPAERMDIQQAMQAKSPLRYKCLVGGARKWKTGKLSIELEDGTALYAEKIDRDNGSFIIEFSWDSDCHFADILEKAGKTPLPPYLNRDAEDADKSTYQTLFAKQNGSVAAPTAGLHFTEALLQELKDCGVEEAFITLHVGAGTFRPVSTETVAEHDMHYEEFFIDKKLMDSLLDNLDRPIIPVGTTSLRALESIYWLGVKILKSGIPDDSYVITQWEPYSGEKLPSPLEALQAVAYEMSIKNLEILTAKTQLIIAPGYEHQICSGLLTNFHQPKSTLLLLVSSFVGPKWKDIYNYALDHDFRFLSYGDGCLILKPKK

SEQ ID NO: 69659 - protein, 351 aa, Owenweeksia hongkongensis
  REGION 1..351: note = tr|G8R2F4|G8R2F4_OWEHD S-adenosylmethionine:tRNA ribosyltransferase-isomerase OS=Owenweeksia hongkongensis (strain DSM 17368 / CIP 108786 / JCM 12287 / NRRL B-23963/ UST20020801) OX=926562 GN=queA PE=3 SV=1
MKMKLSHFTYDLPKELIADRPTPHRDDSRLMVVNRKAGTIEHKMFNEVLDYFDDGDIMVLNNTKVFPARMYGNKEKTGARIEVFLLRELNGESRLWDVLVDPARKIRIGNKLYFGEDDSLVAEVIDNTTSRGRTLRFLYDGSYEEFRAKLAELGETPLPKYIGREPDEEDVDRYQTIFAKHEGAVAAPVAGLHFSKQLMKRMEIKGVDFAELTLHVGLGTFRPVEVEDLSKHKMDSEQFWIYDETARKVNKSIDAKKKVCAVGTTAMRAMESSVSTDGHLNQFDGWTNKFIFPPYEFEVANCMITNFHPPQSTLMMMTAAFGGYDLIMKAYKEAIKEKYRFLSYGDAMLII

SEQ ID NO: 69660 - protein, 349 aa, Owenweeksia sp.
  REGION 1..349: note = tr|A0A1Z8LFB4|A0A1Z8LFB4_9FLAO S-adenosylmethionine:tRNA ribosyltransferase-isomerase; OS = Owenweeksia sp. TMED14 OX=1986609 GN=queA PE=3 SV=1
MKLSHFAYKLPENQIAQYPTDYRDDSRLMIVHRESGKIEHKEFKNLVDYFDPGDLMVMNNTKVFPARMWGNKEKTGALIEVFLLRELNAESRLWDVLVDPARKIRIGNKLYFGDDDSLVAEVIDNTTSRGRTLRFLFDGSYEEFRNKLKEMGETPLPNYIKRPLEPEDSERYQSIFAKVEGAVAAPVASLHYSKHLLKRMEIKGVETAEITMHVGLGTFRLVEVEDLSKHKMESEQFWLYPETAKAINAAKARKNRVCAVGTSVIRSMESSMITDNRVKPTEAWTSKFLFPPYKFSIADSLITNFHGPQSTMLMLTSAFLGHELTMEVYKTAVKEKYRFLCYGDSLLMI

SEQ ID NO: 69661 - protein, 396 aa, Owenweeksia sp.
  REGION 1..396: note = tr|A0A1Z8L991|A0A1Z8L991_9FLAO S-adenosylmethionine:tRNA ribosyltransferase-isomerase; OS = Owenweeksia sp. TMED14 OX=1986609 GN=CBB74_05400 PE=3; SV = 1
MNFEKINVDQFNYSLPVEKIAQFPQENRDEGNLLIFWDEKIHHALIKELPNWITKLSHPNLILNDTKVIPARLIFSRGENVKPIEIFYMDPVNGSIEDAMQSKKSLKAWCKVRNSKKWKHNLILKRENLTAIKLTQNGNKFQILFSWNSEDNWSEILQKNGETPLPPYMKRPSNKNDNERYQTVFSKVEGSVAAPTAGLHLTSKMLNKIQKNSKINYVQLHIGAGTFQPISENTISKHEMHSEEVHFSIETIESLKENKDILAVGTTSARAIESLYWLSIELFNGNQEISDIYQWAPYKNYDKFLSRDESLIFLTNYMRRNKKKSLHFNTSIIIIPGYKFKFIDLILTNFHQPKSTLLLLIAAAIGNDWRKVYDYALENNYRFLSYGDACLLKIKK

SEQ ID NO: 69662 - protein, 343 aa, Oxalobacter formigenes
  REGION 1..343: note = tr|C3X620|C3X620_OXAFO S-adenosylmethionine:tRNA ribosyltransferase-isomerase OS=Oxalobacter formigenes HOxBLS OX=556268 GN=queA PE=3 SV=1
MYSLSDFDFELPEELIAQFPLEKRSASRLLIARDEKLADSRFDHLIDYLDRDDLLVFNNTKVLKARFFGAKKTGGKIEILIERILDNRTALAKIRASKSPKENSLLLIDDELEVSVKGREGEFYVLHFPSDLFSILDHHGHLPLPPYIARTADAYDEKRYQTVFAKEPGAVAAPTAGLHFDEELMGKLEEKGIRSAYLTLHVGAGTFQPVRSENLDEHKMHTEWYTIPQETVYAVKTARENKRKVVAVGTTSLRALESASQTGQLVAGSNETSLFITPGYRFNTVDWLVTNFHLPKSTLLMLVSAFAGYELIRKAYAHAISQQYRFFSYGDAMLLQCRTGNSA

SEQ ID NO: 69663 - protein, 348 aa, Oxalobacter formigenes
  REGION 1..348: note = tr|C3XC99|C3XC99_OXAFO S-adenosylmethionine:tRNA ribosyltransferase-isomerase OS=Oxalobacter formigenes OXCC13 OX=556269 GN=queA PE=3 SV=1
MACFGMYTLSDFDFDLPEELIAQFPLPERSASRLLLVDEKKIADSRFYHLIDHLSEGDLLVFNNTKVLKARFFGSKASGGKIEILIERILDNRNALAKIRASKSPKAGSIIRIDDEIDVSVTGRDGEFFILQFPSDIFKILEEHGHLPLPPYIERAADSFDEKRYQTVFARELGAVAAPTAGLHFDDELMEKLRQKGISFAYLTLHVGAGTFQPVRSENLSEHQMHTEWYTIPEETVEAVKTAQQGKHKVVGVGTTSLRALESASQTGKLKAGSNETSLFITPGYQFQTVDHLITNFHLPKSTLLMLVSAFAGYNLIKKAYAHAIAEKYRFFSYGDAMLLKCISHKNG

SEQ ID NO: 69664 - protein, 360 aa, Oxalobacter sp.
  REGION 1..360: note = tr|A0A3A6P072|A0A3A6P072_9BURK S-adenosylmethionine:tRNA ribosyltransferase-isomerase; OS = Oxalobacter sp. OX=2093374 GN=queA PE=3 SV=1
MYSLSDFDFDLPSELIAQAPLPDRCASRLLHVDGQRLIDRQFADLLDLVQPSDLLVFNDTRVIKARLFGAKATGGKIEVLIERLLDERTALAQVRASKSPHPHSTLRLSNAFDVTVGERAGEFFTLHFPSDALALIDQYGHMPLPPYIDRAANAADDARYQTVYAKHLGAVAAPTAGLHFDDALLQRLRDKGVEFATVTLHVGAGTFQPVRTENLTEHAMHSEWYTVPQATVDAVREAQASGRAVIAVGTTSLRALESASQSGILQAGSGDTALFITPGYAFRTVTRLITNFHLPKSTLLMLVSAFAGFDTIRRAYAHAIEQRYRFFSYGDAMLLSLQSTPPSPHPSPARGEGVNHYAQI

SEQ ID NO: 69665 - protein, 295 aa, unidentified
  source 1..295: note = Oxalobacteraceae bacterium
  REGION 1..295: note = tr|A0A4Q3HZD8|A0A4Q3HZD8_9BURK S-adenosylmethionine:tRNA ribosyltransferase-isomerase (Fragment) OS=Oxalobacteraceae bacterium OX=1871070; GN = queA PE=3 SV=1
NTRVIPARVFGQKASGGKLEILVERVLDSHRVLAHVRSSKSPKPGSMILIDGGGEAEMVARHDALFELRFNEEVLPLLDKVGHMPLPPYIDRPDDTADRERYQTVYAEKAGAVAAPTAGLHFDKALLAQIEAMGVQTAFVTLHVGAGTFQPVRVEKLEDHHMHKEWLEVSQDVVDAVQACKARGGRVVAVGTTSVRSLESAARDGVLKPFSGDTDIFIFPGRPFHVVDALVTNFHLPESTLLMLVSAFAGYPEAMAAYAAAVANEYRFFSYGDAMFITRNPAPRGPSEAAPGDQA

SEQ ID NO: 69666 - protein, 338 aa, unidentified
  source 1..338: note = Oxalobacteraceae bacterium
  REGION 1..338: note = tr|A0A3D6AEB1|A0A3D6AEB1_9BURK S-adenosylmethionine:tRNA ribosyltransferase-isomerase; OS = Oxalobacteraceae bacterium OX=1871070 GN=queA PE=3 SV=1
MYSLSDFDFDLPPELIAQTPLASRSASRLLEVDGRKLVDRQFAEIVDLLSPGDLLVFNDTRVLKARFFGVKQSGGKVEVLIERILDNRTAHAQVRASKSPQPGSTIRLADAFEVTVGERAGEFYTLSFPSDVFELVEAHGRLPLPPYIEHAADEFDEERYQTVYAKQPGAVAAPTAGLHFDQDLLARLREKGVRMAFVTLHVGAGTFQPVRSENLAEHQMHSEWYTVPQETVEAVRAAQAAGRNVVAVGTTSMRALESASQSGNLQAGSADTRLFITPGYRFNTVTRLVTNFHLPKSTLLMLVSAFAGYDEIRAAYAHAIAQKYRFFSYGDAMLLSRR

SEQ ID NO: 69667 - protein, 341 aa, Oxobacter pfennigii
  REGION 1..341: note = tr|A0A0P8W8J4|A0A0P8W8J4_9CLOT S-adenosylmethionine:tRNA ribosyltransferase-isomerase; OS = Oxobacter pfennigii OX=36849 GN=queA PE=3 SV=1
MILDDFDFFLPEELIAQEPLEKRDTSRLMVLDKNTGEIEHRVFKDIITYLKKGDCIVLNNTRVIPARLFGSKEGSGGKIEVLLLKRLEKDVWEVLVKPGKKAKSGANIIFGNGQLKGKVIDTTDEGGRIIRFEYEGIFEEVLDKLGEMPLPHYIKKQLKDKERYQTVYSKYEGSAAAPTAGLHFTKELLKEIEDSGVGIAYVTLHVGLGTFRPVKTEVIEEHHMHSEFYTIDDVNAEIINNAKKNKGRIISVGTTSTRTLETAADNEGRISAKSGWTDIFIYPGYKFKLVDCLITNFHLPKSTLIMLVSALAGRENVLNAYKTAVNEKYRFFSFGDAMFIR

SEQ ID NO: 69668 - protein, 353 aa, unidentified
  source 1..353: note = Pacificibacter marinus
  REGION 1..353: note = tr|A0A1Y5RL12|A0A1Y5RL12_9RHOB S-adenosylmethionine:tRNA ribosyltransferase-isomerase; OS = Pacificibacter marinus OX=658057 GN=queA PE=3 SV=1
MKLSDFDFDLPQTLIATRPAKPRSSARLLVATPTQITDGHVTDLVDWFRAGDRLVLNDTKVLPARLTGLRGRDTAQGYQEARVEVTLLEPQSTAGQWRALVKPLKKVKEGEDVRFSDDLSARLERKEDGAAFLTFNLSGDDFDTALNAAGAMPLPPYIEALRKADAQDKEDYQTVWAKTLGAVAAPTASLHFDAPLLEALKAKGVEITYVTLHVGAGTFLPVKVDNVDDHKMHAEWGEVSAQAATEIAQTKAAGGRVIPVGTTALRLIESAARPTGAIASFLGETDIFIRPGFEFHVTDALMTNFHLPKSTLMMLVSAVLGQERIRQIYDHAIDNGYRFFSYGDSSLLLPNEI

SEQ ID NO: 69669 - protein, 353 aa, Pacificibacter maritimus
  REGION 1..353: note = tr|A0A3N4UUG7|A0A3N4UUG7_9RHOB S-adenosylmethionine:tRNA ribosyltransferase-isomerase; OS = Pacificibacter maritimus OX=762213 GN=queA PE=3 SV=1
MQLSDFDFDLPNDLIATRPAKPRSSARLLVATPTRLVDGHVGDLLDWFQAGDRLVLNDTKVLPARLSGLRGRDTAQGYQEAKVEVTLLDPQATQGQWRALVKPLKKVKEGEVVTFSDRLRATLDSKQDGTALLTFNLTGDDFDHALNEAGAMPLPPYIEALRKADAQDKEDYQTVWAKNLGAVAAPTASLHFDEKLLADLRAKGVEFTYVTLHVGAGTFLPVKVDNVDDHKMHAEWGEVSADAATEIAATKAAGGRVIPVGTTALRLIETAARETGQIAPFVSDTDIFIRPGFTFHVADALMTNFHLPKSTLMMLVSAVLGQDRIKQVYDHAIAQKYRFFSYGDASLLLPKER

SEQ ID NO: 69670 - protein, 340 aa, unidentified
  source 1..340: note = Pacificimonas flava
  REGION 1..340: note = tr|A0A219B261|A0A219B261_9SPHN S-adenosylmethionine:tRNA ribosyltransferase-isomerase; OS = Pacificimonas flava OX=1234595 GN=queA PE=3 SV=1
MRVSDFDFDLPEELIALRPAVPRDSARLLHATPDALADRTVIDLPDLLQPGDALVFNDTRVIPAQLTGRRGDATIGITLHKREDAVTWLAFLKNARRARLGDRIEISPTLAALVEEKSEKGVRLRFEADGPLEAEIAAAGTMPLPPYIASKRRIDERDGEDYQTMFARREGAVAAPTASLHFTPRLLEAIAARGVLTETLTLHVGAGTFLPVKAEDTEEHSMHAEWGELGADAAARLNEVRARGGRIVAAGTTSLRLLESAAGDDGLLSPFAGDTDIFITPGYRFRAVGGLMTNFHLPRSTLFMLVSALMGLERMHGVYDHAIKERYRFYSYGDSSLLMP

SEQ ID NO: 69671 - protein, 342 aa, unidentified
  source 1..342: note = Pacificimonas flava
  REGION 1..342: note = tr|M2SBE8|M2SBE8_9SPHN S-adenosylmethionine:tRNA ribosyltransferase-isomerase OS=Pacificimonas flava; OX = 1234595 GN=queA PE=3 SV=1
MRVSDFDFHLPDERIALRPASPRDAARLLHVQAGRMADRVVRDLPQLLQPGDVLVFNDTRVIPAQLSGRRGDARVGVTLHKREGQTDWLAFVKNAKRLRVGDTVTFSDALSAEVAEKRPDGSVAFRFQSDGPVEAAIAAAGTMPLPPYIAAKRDIDERDADDYQTMFAARDGAVAAPTAALHFTPELMAALAERGIASETLTLHVGAGTFLPVKADDTEEHRMHSEWGEIAPDAAERLNAARRAGGRLIAVGTTSLRLLESAAGADGMVRPFSGDTDIFITPGYRFRAVDGLMTNFHLPRSTLFMLVSALMGLDIMQAAYAHAIESGYRFYSYGDSSLLLPG

SEQ ID NO: 69672 - protein, 354 aa, Paenalcaligenes hominis
  REGION 1..354: note = tr|A0A1U9K1P8|A0A1U9K1P8_9BURK S-adenosylmethionine:tRNA ribosyltransferase-isomerase; OS = Paenalcaligenes hominis OX=643674 GN=queA PE=3 SV=1
MSDSASLPLSLFDYHLPDELIAQHPAQTRTGSRLMHLDAQGQCHDHSFTELPHFLRAGDLLVFNNTQVIKARLHGQKESGGKVEVLIERIVNEHAALAHIRASKAPKPGTRLIFSEGDLVLTVTGRDDALFEVEFDQPALDALERFGALPLPPYITHNAEQTDEDRYQTVYAQHPGAVAAPTAGLHFDQPLLQHLQDQGVQIAFVTLHVGAGTFQPVRVEQITDHQMHAERYTVPAATLAAIAQTRAAGNRVIAVGTTSVRALESAAQPEKTQGILLSNGDIQGDTRIFITPGYQFHCIDALITNFHLPQSTLLMLVSALAGIEPIRAAYHHAVQMHYRFFSYGDAMFIEKSNS

SEQ ID NO: 69673 - protein, 344 aa, unidentified
  source 1..344: note = Paenibacillaceae bacterium
  REGION 1..344: note = tr|A0A2A6DZM6|A0A2A6DZM6_9BACL S-adenosylmethionine:tRNA ribosyltransferase-isomerase; OS = Paenibacillaceae bacterium JTherm OX=1906605 GN=queA; PE = 3 SV=1
MNVDEFDYELPEELIAQEPLADRAGSRLLVLRKKSGEIAHERFRDLGKFLRPGDALILNDTRVIPARLYGRKTATGARVELLLLRPLGGDRWETLARPAKRLKAGTTVEFAEGDARMTAVVEREEDDGRRIVRFEYEGSFESLLERIGRVPLPPYIRKPLVDRDRYQTVYARRAGSAAAPTAGLHFTEEMLETLRSAGIRVGYVTLHVGLGTFRPVTATRVEDHRMHAEVYEVPAATAELVNTTRRDGGRVVAVGTTVVRTLESAAKPDGTVAAQSGETDLFIYPGYRFRAVDALITNFHLPKSTLLMLVCAFAGRNAVLEAYRQAVELRYRFFSFGDAMLIID

SEQ ID NO: 69674 - protein, 384 aa, unidentified
  source 1..384: note = Paenibacillaceae bacterium
  REGION 1..384: note = tr|A0A1Y3QBS3|A0A1Y3QBS3_9BACL S-adenosylmethionine:tRNA ribosyltransferase-isomerase; OS = Paenibacillaceae bacterium ZCTH02-B3 OX=1861638 GN=queA; PE = 3 SV=1
MRTSDFDFELPERLIAQTPPAERGASRLLVLHRGTGAVEHRMFRDLAEYLRPGDTLVLNDTRVMPARLLGRKADTGAKAELLLLVRLEGDRWEVLAKPARKIRRGARLLFGAAEGRKAEEAAACGTGVDGTQAGGAEDGGAAAGPVRAEPDGRPLLAAVVEEEREAGLRVVRFEYEGVFQELLDRAGQVPLPPYIRGKLADPERYQTVYARHAGSAAAPTAGLHFTEEFLEELQGRGIRLCRITLHVGLGTFRPVTAERVEDHRMHAEWYSVGEEAARLLNETHARGGRIVAVGTTSVRTLETVARRFPEGAVEPCSGWTDIFIYPGHAFRLVDALLTNFHLPRSTLIMLVSAFAGREAVLAAYREAVRLEYRFFSFGDAMLIL

SEQ ID NO: 69675 - protein, 348 aa, Paenibacillus agaridevorans
  REGION 1..348: note = tr|A0A2R5EUJ8|A0A2R5EUJ8_9BACL S-adenosylmethionine:tRNA ribosyltransferase-isomerase; OS = Paenibacillus agaridevorans OX=171404 GN=queA PE=3 SV=1
MNADWFDFELPEALIAQTPLQERTASRLLMLGKSTGEIRHGSFTDLAERLGPGDVLVLNNTRVLPARLVGAKMDTGAKAELLLLKQLGEDRWETLAKPAKRLKVGTVIGFGDNGGGEPLLLAEVASEGEMGARVVQFRYSGIFQELLDKLGDMPLPPYIKERLEERERYQTVYSKHQGSAAAPTAGLHFTESFLEQLQAKGVELAYVTLHVGLGTFRPMTAERVEDHEMHSEYYELDDENAAIIRTAKLQGRRIVAVGTTSARTLETVAGRFPVGELEACSGWTSIFIYPGYEFKLVDALLTNFHLPKSTLVMLVSALAGRDHIMRAYCEAVEREYRFFSFGDAMFIE

SEQ ID NO: 69676 - protein, 348 aa, Paenibacillus algorifonticola
  REGION 1..348: note = tr|A0A1I2AYU9|A0A1I2AYU9_9BACL S-adenosylmethionine:tRNA ribosyltransferase-isomerase; OS = Paenibacillus algorifonticola OX=684063 GN=queA PE=3; SV = 1
MNVEMFDFELPEHLIAQTPLLQRTSSRLLTLDRSNGAVNHESFTDLAQHLHAGDVLVLNDTRVLPARLIGAKADTGAKIELLLLKQLEGDRWEALAKPAKRMKIGAEVWFGDDGSGQPLLRAFVEEEGDMGGRTIRFAYSGIFQELLERLGEMPLPPYIRERLEEQERYQTVYAKHDGSAAAPTAGLHFTADFLKQLADKGVRIAYVTLHVGLGTFRPMSVDVVEEHVMHSEYYELSEETAALLGQAKAEGARIVAVGTTSARTLETVAARFEKETIQACSGWTDIFIFPGYSFKLVNALLTNFHLPKSTLVMLVSALAGRDAVMGAYAEAIREEYRFFSFGDAMFIY

SEQ ID NO: 69677 - protein, 348 aa, Paenibacillus alvei
  REGION 1..348: note = tr|S9U0X6|S9U0X6_PAEAL S-adenosylmethionine:tRNA ribosyltransferase-isomerase OS=Paenibacillus alvei TS-15; OX = 1117108 GN=queA PE=3 SV=1
MNVDLYDFHLPEHLIAQTPLAVRTASRLLTLNRQTGEVEHHAFPEIIHYLQPGDLLVLNDTRVIPARLFGVKEDTGAKVEVLLLKQEENDCWEALVKPGKKVKLGTVVVFGDKLKAEVLEEREMGARLLRFTYEGIFNEILDELGQMPLPPYIKEQLDDRERYQTVYAKHEGSAAAPTAGLHFTKELLAEVENKGARIAYVTLHVGLGTFRPMSSDTIEEHVMHSEYYEVSAETARTINETKEQGGRIVAVGTTSARTLETVAGRFVGKAIEPCSGWTDIFIYPGYEFKLVNSLLTNFHLPKSTLVMLVSALAGREHIMAAYQEAIEQEYRFFSFGDAMFIYDNAPET

SEQ ID NO: 69678 - protein, 348 aa, Paenibacillus alvei
  REGION 1..348: note = tr|K5A8N6|K5A8N6_PAEA2 S-adenosylmethionine:tRNA ribosyltransferase-isomerase OS=Paenibacillus alvei (strain ATCC 6344 / DSM 29 / NBRC 3343 / NCIMB 9371 / NCTC 6352)OX=1206781 GN=queA PE=3 SV=1
MNVDLFDFHLPEHLIAQTPLTDRTASRLLTLDRHTGKVEHHNFPEILSYLQPGDLLVLNDTRVIPARLFGVKEDTGAKVEVLLLKQEEDDCWEALVKPGKRVKVGMTVLFGDKLKAEVLEEREMGARLLRFTYEGIFNEILDELGQMPLPPYIKEQLNDRERYQTVYAKHEGSAAAPTAGLHFTKELLAEVEKKGVHVAYITLHVGLGTFRPMSSNTIEEHVMHSEYYEMSADTATIINETKQQDGRIVAVGTTSARTLETVAGRFDGKPIEPCSGWTDIFIYPGYEFKLVNSLLTNFHLPKSTLVMLVSALAGRDHIMAAYQEAIDQEYRFFSFGDAMFIYDHAQET

SEQ ID NO: 69679 - protein, 342 aa, Paenibacillus amylolyticus
  REGION 1..342: note = tr|A0A1R1DT38|A0A1R1DT38_PAEAM S-adenosylmethionine:tRNA ribosyltransferase-isomerase; OS = Paenibacillus amylolyticus OX=1451 GN=queA PE=3 SV=1
MNVNLYDFELPEQLIAQTPLLDRTASRLLTLNKDSGEINHQTFPDIIDFLNPGDTLILNDTRVLPARLFGTKEDTGAKAEVLLLKNVEGDKWEALVKPGKKLKAGSVIVFGDELKAIIEEEGEMGARTLTFTYDGIFQEILDRLGEMPLPPYIKETLDDRERYQTVYAKHEGSAAAPTAGLHFTDELLDQIRAKGVNVAFITLHVGLGTFRPMSVDVVEDHVMHEEYYSLSQETADLINQTKTNGHRVFAVGTTSCRTLETVGSKFENGILQASSGWTSIFIYPGYSFKVIDGMLTNFHLPKSTLVMLVSALAGREHIMQAYEEAIQEKYRFFSFGDAMLIY

SEQ ID NO: 69680 - protein, 342 aa, Paenibacillus amylolyticus
  REGION 1..342: note = tr|A0A1R1BJP3|A0A1R1BJP3_PAEAM S-adenosylmethionine:tRNA ribosyltransferase-isomerase; OS = Paenibacillus amylolyticus OX=1451 GN=queA PE=3 SV=1
MNVNLYDFELPEQLIAQTPLLDRTASRLLTLNKDSGEINHQTFPDIIDFLNSGDTLILNDTRVLPARLFGTKEDTGAKAEVLLLKNVEGDKWEALVKPGKKLKAGSVIVFGDELKAIIEEEGEMGARTLTFTYDGIFQEILDRLGEMPLPPYIKETLDDRERYQTVYAKHEGSAAAPTAGLHFTDELLNQIRAKGVNVAFITLHVGLGTFRPMSVDVVEDHVMHEEYYSLSQETADLINQTKENGHRVFAVGTTSCRTLETVGSKFENGILQASSGWTSIFIYPGYSFKVIDGMLTNFHLPKSTLVMLVSALAGREHIMQAYEEAIQEQYRFFSFGDAMLIY

SEQ ID NO: 69681 - protein, 342 aa, Paenibacillus anaericanus
  REGION 1..342: note = tr|A0A433Y4Q6|A0A433Y4Q6_9BACL S-adenosylmethionine:tRNA ribosyltransferase-isomerase; OS = Paenibacillus anaericanus OX=170367 GN=queA PE=3 SV=1
MNVDLYDFHLPEELIAQTPLVERSASRLLTLNKEDGSIKHHVFTDILDYLRPGDTLVLNDTRVIPARLFGIKEDTGAKAEVLLLKDVGNDRWEALVKPGKKLKNGAVIIFGDELKATIEAESDMGGRILKFSYEGIFNEILDRLGQMPLPPYIKEKLDDRERYQTVYSKVEGSAAAPTAGLHFTEELLSQVAEKGVDIAFVTLHVGLGTFRPMSVDRVEDHVMHDEYYILSQETADKLNETRARGGRVIAVGTTSARTLETVAQQCGTGPIVPSSGWTGIFIYPGYSFGLVNVMLTNFHLPKSTLVMLVSALAGREHIMKAYHEAIEQQYRFFSFGDAMLIY

SEQ ID NO: 69682 - protein, 342 aa, Paenibacillus antarcticus
  REGION 1..342: note = tr|A0A168JJG9|A0A168JJG9_9BACL S-adenosylmethionine:tRNA ribosyltransferase-isomerase; OS = Paenibacillus antarcticus OX=253703 GN=queA PE=3 SV=1
MDVELYNFELPDELIAQTPLLERSSSRLLTLNKEDGKTEHHTFKDITEYLKSGDTLVLNDTRVIPARLFGVKEDTGAKAEVLLLKNLGEDRWEALVKPGKKLKQGNIIVFSDELKAVIESESDMGGRVLKFTYNGVFQEILDLLGQMPLPPYIKDKLDDRERYQTVYARHEGSAAAPTAGLHFTEELLDDIRAKGVSVAFITLHVGLGTFRPMSVERVEDHVMHEEYYSLSQETADLLNDTRQAGGRIIAVGTTTCRTLETVGQQCAGGPLKESSGWTSIFMFPGYEFTVVNALITNFHLPKSTLVMLVSALAGREHILEAYKQAVNERYRFFSFGDAMFIY

SEQ ID NO: 69683 - protein, 349 aa, unidentified
  source 1..349: note = Paenibacillus aquistagni
  REGION 1..349: note = tr|A0A1X7I1X9|A0A1X7I1X9_9BACL S-adenosylmethionine:tRNA ribosyltransferase-isomerase; OS = Paenibacillus aquistagni OX=1852522 GN=queA PE=3 SV=1
MDVNQFDFYLPEQLIAQTPLADRTASRLLTLDRATGKVEHHQFTDIMNYLHPGDLIVLNDTRVIPARLYGIKADTGAKVEVLLLKQEEGDVWEALVKPARKLKVGTVVTFSEELRAVVTEEQDMGGRLLRFEYEGIFQEILDRLGEMPLPPYIKEQLQDRERYQTVYAKHEGSAAAPTAGLHFTEELLLAIQDKGVQIAPITLHVGLGTFRPMSVDNVEDHVMHAEYFEISQESASLIAKTKAEGGRIIAIGTTSARTLESAAQQFGGSAIEACSGWTDIFIYPGYPFKLVDALVTNFHLPKSTLVMLVSALAGREHIMKAYEAAVQEQYRFFSFGDAMFIYDSRFNSK

SEQ ID NO: 69684 - protein, 348 aa, unidentified
  source 1..348: note = Paenibacillus baekrokdamisoli
  REGION 1..348: note = tr|A0A3G9IK50|A0A3G9IK50_9BACL S-adenosylmethionine:tRNA ribosyltransferase-isomerase; OS = Paenibacillus baekrokdamisoli OX=1712516 GN=queA PE=3; SV = 1
MNVDDFDFELPESLIAQTPLADRTSSRLLTLDRQSGQAGHHTFTELASMLQSGDTLVLNDTRVMPARLVGAKADTGARAELLLLKQLSGDRWETLAKPGKRLKIGAEIAFGDDGTGKPLLIATVVSEGDMGGREVEFRYTGIFQELLDRLGDMPLPPYIKERLDDRERYQTVYAKHEGSAAAPTAGLHFTQAFLEQLILKGIQVAYVTLHVGLGTFRPMSVDLIEEHKMHSEYYELSEQTAEILRATRERGGRIVAVGTTSARTLETAASRFPVGQIQACTGWTDIFIYPGYEFKLVDALLTNFHLPKSTLVMLVSALAGRSAVMNAYQEAINQEYRFFSFGDAMFIY

SEQ ID NO: 69685 - protein, 342 aa, Paenibacillus barcinonensis
  REGION 1..342: note = tr|A0A2V4VRZ1|A0A2V4VRZ1_PAEBA S-adenosylmethionine:tRNA ribosyltransferase-isomerase; OS = Paenibacillus barcinonensis OX=198119 GN=queA PE=3 SV=1
MNVDLYNFELPEELIAQTPLLDRTASRLLTLNKETGDVAHHHFPHIINVLEPGDTLILNDTRVLPARLFGVKEDTGAKAEVLLLKNVEGDKWEALVKPGKKLRDGAVIVFSDELKAVINEVGEMGARTLTFEYNGIFQEILDRLGEMPLPPYIKETLDDRERYQTVYAKHEGSAAAPTAGLHFTDELLDQIRAKGVNIGFITLHVGLGTFRPMSVDVVEDHVMHEEYYSLSQETADLINQTKENGNKVYAVGTTSCRTLETVGSKFEDGMLQESSGWTSIFIYPGYSFKVIDGMLTNFHLPKSTLVMLVSALAGRENIMHAYAEAIKERYRFFSFGDAMLIY

SEQ ID NO: 69686 - protein, 342 aa, Paenibacillus barengoltzii
  REGION 1..342: note = tr|R9LIR2|R9LIR2_9BACL S-adenosylmethionine:tRNA ribosyltransferase-isomerase OS=Paenibacillus barengoltzii G22 OX=1235795 GN=queA PE=3 SV=1
MNVDLYDFELPEELIAQTPLADRTASRLLTLNKQTGEIRHHKFSEILDYLQPGDTLVLNDTRVIPARLFGTKEGTGAKAEVLLLKNLGEDRWEALVKPGKKLKTGAVIVFGDELRATVESEGDMGERVLRFAYEGIFNEILDRLGQMPLPPYIKEKLDDRERYQTVYSKHEGSAAAPTAGLHFTEELLEQVRAKGVTIAFVTLHVGLGTFRPMSVDRVEDHVMHEEYYVLPQETADILNETKARGGRVIAVGTTSARTLETVAKQCEGGPIVKSSGWTGIFIYPGYQFGLVDALLTNFHLPKSTLVMLVSALAGRERILKAYQEAIDLKYRFFSFGDAMFIY

SEQ ID NO: 69687 - protein, 347 aa, unidentified
  source 1..347: note = Paenibacillus beijingensis
  REGION 1..347: note = tr|A0A0D5NLD6|A0A0D5NLD6_9BACL S-adenosylmethionine:tRNA ribosyltransferase-isomerase; OS = Paenibacillus beijingensis OX=1126833 GN=queA PE=3 SV=1
MKAEDFDFELPESLIAQTPLAERTASRLLTLDKDSGEIGHHVFTDLADYVQPGDTLVLNDTRVLPARLIGTKSDTGAKVELLLLKQLEGDRWETLVKPAKRVKIGASIRFGKDESGAPLLEAAVEEEGDMGARVIRFRYEGIFQELLDKLGEMPLPPYIKERLEDRERYQTVYSKHEGSAAAPTAGLHFTKPFLQQLENKGVSIAYVTLHVGLGTFRPMSAENVEEHVMHSEYYEIDEHNAALIRQTKQRGGRIVAVGTTSARTLETAAAKFPEGLQACSGWTDIFIYPGYTFKLVDALLTNFHLPKSTLVMLVSALAGRERIMAAYKEAVERQYRFFSFGDAMFIY

SEQ ID NO: 69688 - protein, 342 aa, Paenibacillus borealis
  REGION 1..342: note = tr|A0A089MVH5|A0A089MVH5_9BACL S-adenosylmethionine:tRNA ribosyltransferase-isomerase; OS = Paenibacillus borealis OX=160799 GN=queA PE=3 SV=1
MNVDNYDFNLPEELIAQTPLADRSSSRLLLVNKENGQLEHGHFTDILQQFRPGDTLVLNDTRVIPARLFGVKEDTGAKAEVLLLKNLGEDRWEALVKPGKKLKTGAVIIFSEELRAVIEDEADMGGRTLRFIYQGIFQEILDRLGSMPLPPYIKETLSDRERYQTVYARHEGSAAAPTAGLHFTKELLEQIAAIGVNIAYITLHVGLGTFRPMSVETVEEHVMHAEYYELSQETADMLNAARARGGRIIAVGTTSCRTLETAGRQAAGEPLKASSGWTDIFIYPGYEFTVVNALITNFHLPKSTLVMLVSALAGREHILAAYEEAIKQQYRFFSFGDAMFIY

SEQ ID NO: 69689 - protein, 342 aa, Paenibacillus borealis
  REGION 1..342: note = tr|A0A1R0YN14|A0A1R0YN14_9BACL S-adenosylmethionine:tRNA ribosyltransferase-isomerase; OS = Paenibacillus borealis OX=160799 GN=queA PE=3 SV=1
MNVDDYDFHLPEELIAQTPLSDRSASRLLLVNKENGELAHRHFTDILEQFQPGDTLVLNDTRVIPARLFGIKEDTGAKAEVLLLKNLGEDRWEALVKPGKKLKTGAVIIFSDELRAVIEDEADMGGRTLRFMYEGIFQEILDRLGTMPLPPYIKETLDDRERYQTVYARHEGSAAAPTAGLHFTKELLERIAAKGVNIAYITLHVGLGTFRPMSVEKVEEHVMHAEYFELSRQTAELLNDARAKGGRIIAVGTTSCRTLETVGNKFQGGQIEECSGWTDIFIYPGYAFTVVNALITNFHLPKSTLVMLVSALAGREQILAAYEEAIAQQYRFFSFGDAMFIY

SEQ ID NO: 69690 - protein, 342 aa, unidentified
  source 1..342: note = Paenibacillus bovis
  REGION 1..342: note = tr|A0A172ZK70|A0A172ZK70_9BACL S-adenosylmethionine:tRNA ribosyltransferase-isomerase; OS = Paenibacillus bovis OX=1616788 GN=queA PE=3 SV=1
MKVDMYDFNLPEHLIAQVPLKERTASRLLTLNKTTGEIQHEHFADIINYFHEGDTLILNDTRVIPARLFGTKKDTGAKAEILLLTQLEGDRWEALVKPGKKIKAGAVIHFSDELEAVIEEEGDMGMRVLSFRYEGIFQEILDRLGEMPLPPYIKETLDDRERYQTVYAKNEGSAAAPTAGLHFTTELLDQIRAKGVQIGFVTLHVGLGTFRPMSAETIEEHVMHEEYYSLPAETAALLNETKARGGRVIAVGTTSARTLETVARDFQDRPLEAASGWTQIFIYPGHTFGLVDAMITNFHLPKSTLVMLVSALAGREHIMAAYHEAIEREYRFFSFGDAMFIY

SEQ ID NO: 69691 - protein, 348 aa, unidentified
  source 1..348: note = Paenibacillus catalpae
  REGION 1..348: note = tr|A0A1I1YZV2|A0A1I1YZV2_9BACL S-adenosylmethionine:tRNA ribosyltransferase-isomerase; OS = Paenibacillus catalpae OX=1045775 GN=queA PE=3 SV=1
MNVDLFDFELPEHLIAQTPLADRTASRLLALNKETGDIAHRTFTDLADYLQTGDVLVLNNTRVIPARLTGIKPDTGAKIELLLLKQLEGDRWEALAKPAKRMKVGAELWFGDNGSGEPLLRAVVEDEGDMGSRTIRFHYEGIFQELLDRLGEMPLPPYIKERLEERERYQTVYAKHEGSAAAPTAGLHFTKEFLQQLVDKGVKLAYVTLHVGLGTFRPMSVDKVEEHEMHSEYYELDEQNASIINEAKSSGARIIAVGTTSSRTLETVAARFEGGPIEACSGWTDIFIFPGYSFKLVDALLTNFHLPKSTLVMLVSALAGREAIMKAYGEAVREEYRFFSFGDAMFIY

SEQ ID NO: 69692 - protein, 348 aa, Paenibacillus cellulosilyticus
  REGION 1..348: note = tr|A0A2V2YGN4|A0A2V2YGN4_9BACL S-adenosylmethionine:tRNA ribosyltransferase-isomerase; OS = Paenibacillus cellulosilyticus OX=375489 GN=queA PE=3; SV = 1
MNVDLFDFELPEELIAQTPLLERTGSRLLTLNKQTGAVGHGTFLDIEQMLGEGDLLILNDTRVLPARLMGIKQDTGAKVELLLLKALGDNRWETLAKPAKRMKVGTVLAFGSVADGSPLLTAVVEEEGEHGGRVVRFEYEGIFNELLDRLGEMPLPPYIKEKLEDRERYQTVYAKHEGSAAAPTAGLHFTQDLLERLKDKGVRIGYITLHVGLGTFRPMSVDAVEDHVMHSEYYELSEETAQQLNETKARGGRIVAVGTTSARTLESVAQRFEGKELQACSGWTDIFIFPGYSFKLVDALLTNFHLPKSTLVMLVSAIAGREHIMEAYRQAVEQRYRFFSFGDAMFIY

SEQ ID NO: 69693 - protein, 373 aa, Paenibacillus chitinolyticus
  REGION 1..373: note = tr|A0A410X1Y4|A0A410X1Y4_9BACL S-adenosylmethionine:tRNA ribosyltransferase-isomerase; OS = Paenibacillus chitinolyticus OX=79263 GN=queA PE=3 SV=1
MDVQDFDYDLPEELIAQTPLLERTQSRLMTLDKQSGAVGHHTFEQLADYLKAGDLLVMNDTRVIPARLFGVKADTGAKVELLLLKPLGEDRWEALARPGKRIKTGTELLFGVQPETAADGTPVVPKQAPLSAVVEAEGEMGARTVRFRYEGIFNEILDKLGEMPLPPYIKEQLPEKERYQTVYARHAGSAAAPTAGLHFTGDFLDKLKSRGVRLAFVTLHVGLGTFRPVSADKVEEHEMHAEYYELPQETADLINETTAAGGRIVAVGTTSTRTLETAARQSRAASEAQGGSVHTDSGKPYIRACSGWTSIFIYPGVEFQLVDAMLTNFHLPKSTLLMLISAMAGRESILNAYREAVERKYRFFSFGDAMFIY

SEQ ID NO: 69694 - protein, 373 aa, Paenibacillus contaminans
  REGION 1..373: note = tr|A0A329MPU6|A0A329MPU6_9BACL S-adenosylmethionine:tRNA ribosyltransferase-isomerase; OS = Paenibacillus contaminans OX=450362 GN=queA PE=3 SV=1
MDVELFDFELPERLIAQTPLADRLQSRLLTLDKSTGAIGHRQFSDLIQYLQAGDVLVLNDTRVIPARLFGVKSDTGSKAEILLLKALGDDRWEALVKPGKRLKKGATVSFGIRGNETIGGAGASSSASEASVNEEPLLKAFIEEEGEMGIRVLRFTYKGIFNEILDRLGQMPLPPYIKEQLPADEKERYQTVYARNEGSAAAPTAGLHFTEPYLREIAAKGVEIAYVTLHVGLGTFRPVAVERVEEHTMHEEYFHVPQETADAVNRAKSAGRRVIAIGTTSARTLETAARISEADGLRPGTLKPCDGWTGIFIYPGVKLLAVDALLTNFHLPKSTLLMLISAIAGRESVLKAYREAVEQEYRFFSFGDAMFIY

SEQ ID NO: 69695 - protein, 342 aa, unidentified
  source 1..342: note = Paenibacillus crassostreae
  REGION 1..342: note = tr|A0A167CH55|A0A167CH55_9BACL S-adenosylmethionine:tRNA ribosyltransferase-isomerase; OS = Paenibacillus crassostreae OX=1763538 GN=queA PE=3 SV=1
MDVELYNFDLPEELIAQTPLLDRSSSRLLTLSKEKGTIEHHSFKEITGYLKSGDTLVLNDTRVIPARLFGVKEETGAKAEILLLKNLGQDRWEVLVKPGKKLKQGNVITFSDELKAVIESEGEMGARVLAFSYQGIFHEILDRLGQMPLPPYIKDKLEDRERYQTVYARHEGSAAAPTAGLHFTDELLEEIRAKGVSVAFITLHVGLGTFRPMSVEKVEDHVMHEEYYSLSQETADLLNKTHQNGGRIIAVGTTSARTLETVGQKCAGGPLKESSGWTSIFMYPGYQFKVVDALITNFHLPKSTLVMLVSALAGREHILEAYQEAVKEKYRFFSFGDAMFIY

SEQ ID NO: 69696 - protein, 348 aa, Paenibacillus curdlanolyticus
  REGION 1..348: note = tr|E0IDX4|E0IDX4_9BACL S-adenosylmethionine:tRNA ribosyltransferase-isomerase OS=Paenibacillus curdlanolyticus YK9 OX=717606 GN=queA PE=3 SV=1
MNVDLFDFELPEELIAQTPLVERTGSRLLTLNKRTGETQHGTFLDIEQYVQPGDLLVLNDTRVIPARLFGIKRDTGAKVELLLLKAIGDNRWEALAKPAKRLRIGTELAFGMDEAGEPLLRAVIEEEGEHGSRIVRFEYEGIFQELLDRLGEMPLPPYIKEKLDDRERYQTVYARHEGSAAAPTAGLHFTTELLEQLQRKGVGIAYVTLHVGLGTFRPMSVDTVEEHVMHSEYFELSETTAQQIVETKSRGGRIIAVGTTSARTLESAASMFTDGQVQACSGWTDIFIFPGYSFKLVDALLTNFHLPKSTLVMLVSALAGRDAIMQAYREAVALQYRFFSFGDAMLIY

SEQ ID NO: 69697 - protein, 348 aa, unidentified
  source 1..348: note = Paenibacillus darwinianus
  REGION 1..348: note = tr|A0A015LWS9|A0A015LWS9_9BACL S-adenosylmethionine:tRNA ribosyltransferase-isomerase; OS = Paenibacillus darwinianus OX=1380763 GN=queA PE=3 SV=1
MNVNDFDFELPEELIAQTPLAERTASRLLALDKRSGEVAHRTFTDLKQYLRPGDTLVLNDTRVLPARLHGIKPDTGARIELLLLKQLEGDRWETLAKPAKRLRPGVELWFGDDGQGGPLLRATVESEGETGGRVVVFRYEGIFHELLDRLGEMPLPPYIRETLADRERYQTVYARHEGSAAAPTAGLHFTAAFLEELRTQGVNTAFITLHVGLGTFRPMSAERVEDHVMHAEYYQLDEANAALIRETRERGGRIVAVGTTSARTLETVAGRFGAGGVRACSGWTDIFIYPGYRFGLVDALLTNFHLPKSTLVMLVSALAGRATTLRAYAEAVERQYRFFSFGDAMFIY

SEQ ID NO: 69698 - protein, 345 aa, Paenibacillus dendritiformis
  REGION 1..345: note = tr|A0A4R5Z077|A0A4R5Z077_9BACL S-adenosylmethionine:tRNA ribosyltransferase-isomerase; OS = Paenibacillus dendritiformis OX=130049 GN=queA PE=3 SV=1
MDVNLFDFHLPEHLIAQTPLLDRTASRLLALNRRTGEVEHRTFPDIIEYLKPGDLLVLNDTRVIPARLYGVKPDTGGHVEVLLLKQEQDDMWEVLVKPAKRLKQGASVRFGDELTGTVIEEREMGARLIRFEYAGIFNEILDRLGQMPLPPYIKEQLNDRERYQTVYAKHEGSAAAPTAGLHFTNSILDQIRAAGVRIAMITLHVGLGTFRPMSADVVEEHVMHAEYYEMSEEAAALINETRSSGGRIIAVGTTSCRTLETVAGRYGAEPVAACSGWTDIFIYPGYEFRLVDSLLTNFHLPKSTLVMLVSAFAGREHIMAAYREAIEQEYRFFSFGDAMFIFTDD

SEQ ID NO: 69699 - protein, 345 aa, Paenibacillus dendritiformis
  REGION 1..345: note = tr|H3SNZ6|H3SNZ6_9BACL S-adenosylmethionine:tRNA ribosyltransferase-isomerase OS=Paenibacillus dendritiformis C454 OX=1131935 GN=queA PE=3 SV=1
MDVNLFDFHLPEHLIAQTPLADRTASRLLALNRRTGEVEHRTFPDIIEYLKPGDLLVLNDTRVIPARLHGVKPDTGGHVEVLLLKQEQDDMWEVLVKPAKRLKQGASVRFGDELTGTVIEEREMGARLIRFEYAGIFNEILDRLGQMPLPPYIKEQLNDRERYQTVYAKHEGSAAAPTAGLHFTNSILEQIRAKGVRIAMITLHVGLGTFRPMSADVVEEHVMHAEYYEMSEEAAALINETRGSGGRIIAVGTTSCRTLETVAGRYGADPVAACSGWTDIFIYPGYEFRLVDSLLTNFHLPKSTLVMLVSAFAGREHIMAAYREAIEQEYRFFSFGDAMFIFKDD

SEQ ID NO: 69700 - protein, 342 aa, unidentified
  source 1..342: note = Paenibacillus donghaensis
  REGION 1..342: note = tr|A0A2Z2KST2|A0A2Z2KST2_9BACL S-adenosylmethionine:tRNA ribosyltransferase-isomerase; OS = Paenibacillus donghaensis OX=414771 GN=queA PE=3 SV=1
MDVELYDFHLPEELIAQTPLSDRSSSKLLLVNKETGQTDHRHFSDIVDYLQPGDTLVLNDTRVIPARLFGTKEDTGAKAEVLLLKNLGEDRWEALVKPGKKLKTGAVIIFGDELRAVVEGESDMGGRTLKFSYEGIFNEILDRLGNMPLPPYIKEALDDRERYQTVYARHEGSAAAPTAGLHFTEELLGQLQDKGVNIAYITLHVGLGTFRPMSVDKVEEHVMHSEYFMLSRETAELLNAAKARGSRIVAVGTTSCRTLETVGRQYAGGPLQECSGWTDIFIYPGYRFNVVDALITNFHLPKSTLVMLVSALAGREAILAAYAEAIEEQYRFFSFGDAMFIY

SEQ ID NO: 69701 - protein, 342 aa, Paenibacillus durus
  REGION 1..342: note = tr|A0A089HTI5|A0A089HTI5_PAEDU S-adenosylmethionine:tRNA ribosyltransferase-isomerase; OS = Paenibacillus durus OX=44251 GN=queA PE=3 SV=1
MNVDLYNFHLPEELIAQTPLPDRSASRLLTLDKRSGRTVHRHFTDIIDELQPGDTLVLNDTRVIPARLFGIKEDTGAKAEVLLLKSLGEDRWDALVKPGKKLKTGAVISFGEELRAVIEEESDMGGRTLRFMYQGIFQEILDRLGTMPLPPYIKEKLDDRERYQTVYARHEGSAAAPTAGLHFTEDLLKQIQDKGVHIAYITLHVGLGTFRPMSVDTVEEHVMHSEYFMLPQETADMLNEARVKGSRIVAVGTTSCRTLETVGGMFGDGPLEACSGWTDIFIYPGYEFKLVNALITNFHLPKSTLVMLVSALAGREHILAAYQEAIQQKYRFFSFGDAMFIY

SEQ ID NO: 69702 - protein, 342 aa, Paenibacillus durus
  REGION 1..342: note = tr|A0A0F7FB58|A0A0F7FB58_PAEDU S-adenosylmethionine:tRNA ribosyltransferase-isomerase; OS = Paenibacillus durus ATCC 35681 OX=1333534 GN=queA PE=3; SV = 1
MNVDLYDFHLPEELIAQTPLPDRSASRLLTLDKRSGRTEHRHFTDIIDELQPGDTLVLNDTRVIPARLFGIKEDTGAKAEVLLLKNLSEDRWDALVKPGKKLKTGAVISFGEELRAVIEEESDMGGRTLRFMYQGIFQEILDRLGTMPLPPYIKEKLDDRERYQTVYARHEGSAAAPTAGLHFTEDLLKHIQDKGVRLAYITLHVGLGTFRPMSVDTVEEHVMHSEYFMLPQETADLLNEAKSKGSRIVAVGTTSCRTLETAGGMFGDGPLEACSGWTDIFIYPGYEFKLVNALITNFHLPKSTLVMLVSALAGREHILAAYQEAIRQKYRFFSFGDAMFIY

SEQ ID NO: 69703 - protein, 353 aa, Paenibacillus elgii
  REGION 1..353: note = tr|A0A2T6FZT5|A0A2T6FZT5_9BACL S-adenosylmethionine:tRNA ribosyltransferase-isomerase; OS = Paenibacillus elgii OX=189691 GN=queA PE=3 SV=1
MQVDLFDYHLPESLIAQTPLPDRTASRLLTLDKQTGEIGHHTFEQLERYLEAGDVLVLNDTRVIPARLFGVKADTGAKAEVLLLKQLEGDRWEALVRPAKRLKTGTVLHFGGGAPTEAGGATEPPLLVATVESEGEMGSRVLRFSYEGIFNELLDRLGHMPLPPYIKEQLPERERYQTVYAKHEGSAAAPTAGLHFTQEYLNRLEQKGIQLAYVTLHVGLGTFRPVGVESVEQHEMHEEYYEVSAETAELVNAAKRKGGRVVAVGTTSARTLETAAGEDGMLQAGSGWTGIFIYPGYRFRIVDALLTNFHLPKSTLLMLISALAGRENVLAAYREAVEREYRFFSFGDAMFIH

SEQ ID NO: 69704 - protein, 353 aa, Paenibacillus elgii
  REGION 1..353: note = tr|A0A163ZG56|A0A163ZG56_9BACL S-adenosylmethionine:tRNA ribosyltransferase-isomerase; OS = Paenibacillus elgii OX=189691 GN=queA PE=3 SV=1
MQVDLFDYHLPESLIAQTPLPDRTASRLLTLDKQTGEIGHHTFEQLEQYLEAGDVLVLNDTRVIPARLFGVKADTGAKAEVLLLKQLEGDRWEALVRPAKRLKTGTVLHFGGGAPTEAGGDTEPPLLVATVESEGEMGSRVLRFSYEGIFNELLDRLGHMPLPPYIKEQLPERERYQTVYAKHEGSAAAPTAGLHFTQEYLNWLEQKGIQLAYVTLHVGLGTFRPVGVESVEQHEMHEEYYEVSAETAELVNAAKRKGGRVVAVGTTSARTLETAAGEDGMLQAGSGWTGIFIYPGYRFRIVDALLTNFHLPKSTLLMLISALAGRENVLAAYREAVEREYRFFSFGDAMFIH

SEQ ID NO: 69705 - protein, 342 aa, unidentified
  source 1..342: note = Paenibacillus etheri
  REGION 1..342: note = tr|A0A0W1B3U8|A0A0W1B3U8_9BACL S-adenosylmethionine:tRNA ribosyltransferase-isomerase; OS = Paenibacillus etheri OX=1306852 GN=queA PE=3 SV=1
MNVDAYDFHLPEELIAQAPLSDRSSSRLLLVNKEDGELAHRHFTDIINYFRPGDTLVLNDTRVIPARLFGVKEDTGAKAEVLLLKNLGEDRWEALVKPGKKLKTGAVIIFSDELRAVIEDEADMGGRTLRFIYQGIFQEILDRLGTMPLPPYIKETLDDRERYQTVYAKHEGSAAAPTAGLHFTKELLEQIEAKGVNIAYITLHVGLGTFRPMSVEKVEEHVMHSEFFVMSQETADTINATKEQGGRIIAVGTTSCRTLETVGRQCDGGPLVECSGWTDIFIYPGYKFSVVNALITNFHLPKSTLVMLVSALAGREHILAAYEEAIEQKYRFFSFGDAMFIY

SEQ ID NO: 69706 - protein, 343 aa, unidentified
  source 1..343: note = Paenibacillus faecis
  REGION 1..343: note = tr|A0A5D0CS41|A0A5D0CS41_9BACL S-adenosylmethionine:tRNA ribosyltransferase-isomerase; OS = Paenibacillus faecis OX=862114 GN=queA PE=3 SV=1
MNVDLYDFELLEELIAQTPLAERTASRLLALNKRDGSIRHHSAFSEILEYLQPGDTLVLNDTRVIPARLFGVKEDTGAKAEVLLLKNLGEDRWEALVKPGKKLRTGAVIRFGEELQATIEQEGEMGGRVLRFSYQGIFNEILDRLGQMPLPPYIKEKLDDRERYQTVYSKHEGSAAAPTAGLHFTEELLDEIRNKGVDIAFVTLHVGLGTFRPMSVDRVEEHVMHEEYYVLPQETADLLNATKARGGRIIAVGTTSARTLETVAQKCGGGPVVESSGWTGIFIYPGYSFGLVDALITNFHLPKSTLVMLVSALAGRETILRAYREAVEHRYRFFSFGDAMFIY

SEQ ID NO: 69707 - protein, 361 aa, unidentified
  source 1..361: note = Paenibacillus ferrarius
  REGION 1..361: note = tr|A0A1V4HAY1|A0A1V4HAY1_9BACL S-adenosylmethionine:tRNA ribosyltransferase-isomerase; OS = Paenibacillus ferrarius OX=1469647 GN=queA PE=3 SV=1
MDVQSFDFELPENLIAQTPLLNRTASRLLALNKQTGETTHQTFEQLIDYIEAGDLLVMNDTRVIPARLFGAKKDTGAKVELLLLKPLGDDRWEALVKPGKRMKLGAVAVFGLNMDSANPEEPLLTAEVVEEGEMGARVLQFSYTGIFNEILDRLGEMPLPPYIKEQLSERERYQTVYAKHEGSSAAPTAGLHFTEAYLDKLQAKGVRIAFVTLHVGLGTFRPVSVDTIEEHQMHSEYYVLSPETAALINETKANGRRVIAVGTTSARTLETAAGLSREQAGSAGTEPLHIEASQGWTSIFIYPGYQFGVVDALLTNFHLPKSTLLMLISALAGQSHVLKAYEEAVREQYRFFSFGDAMFIY

SEQ ID NO: 69708 - protein, 355 aa, Paenibacillus ginsengarvi
  REGION 1..355: note = tr|A0A3B0CII6|A0A3B0CII6_9BACL S-adenosylmethionine:tRNA ribosyltransferase-isomerase; OS = Paenibacillus ginsengarvi OX=400777 GN=D7M11_08785 PE=3; SV = 1
MEAASYTFELPVDRNAGAPPERRGVRRDRVRLLVQSRAGGELRHSSFHRLADHLRPGDCLVLNESRTIPASLKARRFAGDTYIDTVEVRLAKQISDGVWEALLLETEAANSSLLSLPSPAKLYAGETLRFASTLTATVERRAGSAFATLHFNMAGPDLFGAFYELGEPIRYEYTERPWQLDYYQTVYGTVPGSVEMPSAGRAFSWELLFGLRLRGVRIAYVQLHTGLSYLYGFRLDPAQNAESYAVSLEAAEAINRSKSDGGRIIAVGTTVVRCLEAAAGPDGVQAGAGQTSLYINESYPLRVTDGLISGFHEPEASHLHMLSAFIGLEELGRAYDEAIRAGYLWHEFGDVHLML

SEQ ID NO: 69709 - protein, 349 aa, Paenibacillus ginsengarvi
  REGION 1..349: note = tr|A0A3B0CCI1|A0A3B0CCI1_9BACL S-adenosylmethionine:tRNA ribosyltransferase-isomerase; OS = Paenibacillus ginsengarvi OX=400777 GN=queA PE=3 SV=1
MDVNEFDFDLPERLIAQTPLLNRTTSRLLTLDKTSGATGHHTFGQLIDFLQAGDTLVLNDTRVIPARLFGVKADTGAQVELLLLKQLDGDRWEALARPAKRLKQGAVIRFGGAEADGGPDLQAVVEDEGEMGARVVRFEYEGIFQEILDRLGSMPLPPYIKEKLDDRERYQTVYARHPGSAAAPTAGLHFTPDYLDAIARKGVRIVTLTLHVGLGTFRPVAVSRVEEHTMHEEFYSVPAETAAALNAAKAEGRRIIAVGTTSARTLETVAGRFEVREIEACDGWSGIFIYPGYTFKLVDAMVTNFHLPKSTLVMLVSALAGSEQIRNAYQEAIKREYRFFSFGDAMFIY

SEQ ID NO: 69710 - protein, 342 aa, Paenibacillus glacialis
  REGION 1..342: note = tr|A0A168DGV6|A0A168DGV6_9BACL S-adenosylmethionine:tRNA ribosyltransferase-isomerase; OS = Paenibacillus glacialis OX=494026 GN=queA PE=3 SV=1
MDVELYNFDLPEELIAQTPLLERSSSRLLTLNKEDGKTEHHTFKDITQYLKSGDTLVLNDTRVIPARLFGVKEDTGAKAEVLLLKNLGEDRWEALVKPGKKLKQGNIIVFSDELKAVIESESDMGGRVLKFTYNGVFQEILDRLGQMPLPPYIKDKLDDRERYQTVYARHEGSAAAPTAGLHFTEELLDAIRAKGVSVAFITLHVGLGTFRPMSVDRVEDHVMHEEYYSLSKETADLLNDTRRNGGRIIAVGTTTCRTLETVGRQCAGGSLKESNGWTSIFMFPGYEFTVVDALITNFHLPKSTLVMLVSALAGREHILEAYKQAVKEKYRFFSFGDAMFIY

SEQ ID NO: 69711 - protein, 343 aa, Paenibacillus glucanolyticus
  REGION 1..343: note = tr|A0A163KT45|A0A163KT45_9BACL S-adenosylmethionine:tRNA ribosyltransferase-isomerase; OS = Paenibacillus glucanolyticus OX=59843 GN=queA PE=3 SV=1
MNVDLYDFELPEQLIAQTPLLDRSSSRLLTLNKESGQINHQTFADIIDSLNAGDTLVLNDTKVIPARLFGEKEDTGAKAEVLLLKSMGQDRWEALVKPGKKLKKGNVISFGDGKLKAVIEEEGEMGARTLSFSYKGIFQEILDELGQMPLPPYIKEKLDDRDRYQTVYAKHEGSAAAPTAGLHFTEALLEQIRAKGVDIAFITLHVGLGTFRPMSVDVVEDHVMHEEYYSLSQETADLLNETKRRGGRVIAVGTTSCRTLETVGSQMNGEPLRESSGWTSIFIYPGYSFTVVDALITNFHLPKSTLVMLVSALAGREHIMKAYKEAVEDKYRFFSFGDAMFIY

SEQ ID NO: 69712 - protein, 342 aa, Paenibacillus graminis
  REGION 1..342: note = tr|A0A089MBE2|A0A089MBE2_9BACL S-adenosylmethionine:tRNA ribosyltransferase-isomerase; OS = Paenibacillus graminis OX=189425 GN=queA PE=3 SV=1
MNVDDYDFHLPEELIAQTPLSDRSASRLLLVNKENGQLEHRHFTDILEQFQPGDTLVLNDTRVIPARLFGVKEDTGAKAEVLLLKNLGEDRWEALVKPGKKLKTGAVIIFSEELRAIIEDEADMGGRTLRFIYTGIFQEILDRLGSMPLPPYIKETLDDRERYQTVYAKHEGSAAAPTAGLHFTRELLEQIKAKGVTIAYITLHVGLGTFRPMSVEKVEEHVMHAEYFVLSQETADVLNAARARGGRIIAVGTTSCRTLETVGRQAEGGPIQECSGWTDIFIYPGYKFTVVNALITNFHLPKSTLVMLVSALAGRENILAAYEAAIQQQYRFFSFGDAMFIY

SEQ ID NO: 69713 - protein, 352 aa, unidentified
  source 1..352: note = Paenibacillus hemerocallicola
  REGION 1..352: note = tr|A0A5C4TEW4|A0A5C4TEW4_9BACL S-adenosylmethionine:tRNA ribosyltransferase-isomerase; OS = Paenibacillus hemerocallicola OX=1172614 GN=queA PE=3; SV = 1
MDVNAFDFELPESLIAQTPLTDRTSSRLLTLDKSSGAIGHHTFGQLIDYLQAGDTLVLNDTRVIPARLFGVKADTGAQAELLLLKELGDDRWETLARPAKRLKKGTVIRFGGSGPQDSASDTLLEAVVEEEGEMGARIVRFRYSGIFREILDRLGSMPLPPYIKERLEDRERYQTVYARHPGSAAAPTAGLHFTPEYLETIARIGVNIVTVTLHVGLGTFRPVSVDRIEEHKMHEEFYSVPAETAAALNAAKAEGRRVVAVGTTSARTLETVAGRFGDKPIEACDGWSAIFMYPGYRFKIVDAMLTNFHLPKSTLVMLVSALAGTDRIRRAYQEAIEREYRFFSFGDAMFIY

SEQ ID NO: 69714 - protein, 353 aa, unidentified
  source 1..353: note = Paenibacillus hemerocallicola
  REGION 1..353: note = tr|A0A5C4TD84|A0A5C4TD84_9BACL S-adenosylmethionine:tRNA ribosyltransferase-isomerase; OS = Paenibacillus hemerocallicola OX=1172614 GN=FE784_07410; PE = 3 SV=1
METVSTFAFELPDNRNAGSPPERRGLRRDRVRLMVQNRSDGTVSHSSFHRLADYLRPEDCLVFNESRTIPASLKAQRFIGNAGIESLEVRLARRVGESAWDALLLRTNGETGAASAVEPTDGETLRFSPSLHAETARRSSSPFVTLSFNRGGHELFGEFYALGEPVRYEYAEKPWELDYYQTVYGTVPGSVEMPSAGRAFTWEMLFGLRLKNIRLAFVQLHTGLSYLYGSRLDPAHNAESYAVSPEAADTINRAKRNGGRIIAVGTTVVRCLESAAAGNGLVRPGEDDTRLYIDESFPLRVADGLISGLHEPEASHLHMLSAFAGIGALRLAYAEAIRENYLWHEFGDTHLIL

SEQ ID NO: 69715 - protein, 347 aa, unidentified
  source 1..347: note = Paenibacillus herberti
  REGION 1..347: note = tr|A0A229NZR0|A0A229NZR0_9BACL S-adenosylmethionine:tRNA ribosyltransferase-isomerase; OS = Paenibacillus herberti OX=1619309 GN=queA PE=3 SV=1
MNVEQYDFNLPDKLIAQTPLADRTASRLLTLDKATGEIRDHAFRDLKQYLQAGDTLVVNDTRVIPARLLGLKEDTGAKAELLLLKQLHGDTWETLAKPAKKLKVGAVIVFGSGEDGEPLLRAVVEDEGEMGGRTIRFQYDGIFQELLDRLGEMPLPPYIKERLDDRERYQTVYSRQSGSAAAPTAGLHFTEEFLQELQEMGVEVAPLTLHVGLGTFRPISADTIEEHVMHSEYYELSEATAAKLQQTRERGGRIVAVGTTSARTLETVANRFPDGLQACSGWTDIFIYPGYQFRAVDALLTNFHLPKSTLVMLVSALAGRDAVLNAYKHAVREEYRFFSFGDAMFIY

SEQ ID NO: 69716 - protein, 343 aa, unidentified
  source 1..343: note = Paenibacillus ihbetae
  REGION 1..343: note = tr|A0A1B2DXE3|A0A1B2DXE3_9BACL S-adenosylmethionine:tRNA ribosyltransferase-isomerase; OS = Paenibacillus ihbetae OX=1870820 GN=queA PE=3 SV=1
MNVDLYDFELPERLIAQTPLKERSASRLLALNKEDGGMSHGTFADIVGFLNPGDTLVLNDTKVIPARLFGEKEGTGAKAEVLLLKNLGEDRWEALVKPGKKLRQGSTISFGNGKLKAVIEEEGDMGARTLRFTYKGIFQEILDELGQMPLPPYIKEKLDDRDRYQTVYARNEGSAAAPTAGLHFTEALLDEIKAKGVNIAFITLHVGLGTFRPMSVERVEDHVMHEEYYSLSKETAELLNETKRRGGRVIAVGTTSCRTLETVGQAHKGGPLSESSGWTSIFIYPGYSFTVVDALITNFHLPKSTLVMLVSALAGREHILEAYREAVRQEYRFFSFGDAMFIY

SEQ ID NO: 69717 - protein, 342 aa, Paenibacillus illinoisensis
  REGION 1..342: note = tr|A0A2W0C1D5|A0A2W0C1D5_9BACL S-adenosylmethionine:tRNA ribosyltransferase-isomerase; OS = Paenibacillus illinoisensis OX=59845 GN=queA PE=3 SV=1
MNVNLYDFELPEQLIAQTPLVDRTASRLLTLNKENGEVNHRSFPDIINFLEPGDTLVLNDTRVLPARLFGTKEDTGAKAEVLLLKNVEGDRWEALVKPGKRLKAGSVIVFGDELKAVIDEEGEMGARTLTFSYNGIFQEILDRLGEMPLPPYIKETLDDRERYQTVYAKHEGSAAAPTAGLHFTDELLDQIRAKGVNVTFITLHVGLGTFRPMSVDVVEDHEMHEEYYSMSQETADLINETKKRGNRVFAVGTTSCRTLETVGSKFEDGELQESSGWTKIFIYPGYTFKVIDGMLTNFHLPKSTLVMLVSALAGREHIMHAYEQAIQEKYRFFSFGDAMLIY

SEQ ID NO: 69718 - protein, 342 aa, Paenibacillus jilunlii
  REGION 1..342: note = tr|A0A1G9V4V9|A0A1G9V4V9_9BACL S-adenosylmethionine:tRNA ribosyltransferase-isomerase; OS = Paenibacillus jilunlii OX=682956 GN=queA PE=3 SV=1
MNVDDYDFHLPEELIAQTPLSDRSASRLLLVNKENGQLEHRHFTDILEQFQPGDTLVLNDTRVIPARLFGVKEDTGAKAEVLLLKSLGEDRWEALVKPGKKLKTGAVIIFSEELRAVIEDEADMGGRTLRFIYTGIFQEILDRLGSMPLPPYIKETLDDRERYQTVYAKHEGSAAAPTAGLHFTRELLEQIKAKGVTIAYITLHVGLGTFRPMSVEKVEEHVMHAEYYVLSRETADVLNAARARGGRIIAVGTTSCRTLETVGRQAEGGPIQECSGWTDIFIYPGYEFTVVNALITNFHLPKSTLVMLVSALAGRENILAAYEAAIQQHYRFFSFGDAMFIY

SEQ ID NO: 69719 - protein, 342 aa, Paenibacillus kribbensis
  REGION 1..342: note = tr|A0A222WKG6|A0A222WKG6_9BACL S-adenosylmethionine:tRNA ribosyltransferase-isomerase; OS = Paenibacillus kribbensis OX=172713 GN=queA PE=3 SV=1
MNVNDYDFELPEALIAQTPLLERSASRLLTLNKNNGEVEHHTFSDIVQYLSPGDTLVLNDTRVIPARLFGIKEDTGAKAEVLLLKQLEGDRWEALVKPGKKLKKGAVIVFGDELKAVIEEEGDMGGRVLSFSYEGIFQEILDRLGQMPLPPYIKEQLDDRERYQTVYARHEGSAAAPTAGLHFTEQLLDQIREKGVSIAFVTLHVGLGTFRPMSVDTIEEHVMHEEYYSLSQETADILNATKARGGRVVAVGTTSCRTLETVGNTFADGVLQASSGWTQIFIYPGYEFRVVDAMITNFHLPKSTLVMLVSALAGRENIMHAYQEAIDREYRFFSFGDAMFIY

SEQ ID NO: 69720 - protein, 343 aa, Paenibacillus lactis
  REGION 1..343: note = tr|G4HPV6|G4HPV6_9BACL S-adenosylmethionine:tRNA ribosyltransferase-isomerase OS=Paenibacillus lactis 154; OX = 743719 GN=queA PE=3 SV=1
MNVDLYDFELPERLIAQTPLKERSASRLLALNKEDGAMSHGTFADIVGFLNPGDTLVLNDTKVIPARLFGEKEETGAKAEVLLLKNLGEDRWEALVKPGKKLRRGSTISFGNGKLKAVIEEEGEMGARTLRFTYKGIFQEILDELGQMPLPPYIKEKLDDRDRYQTVYARNEGSAAAPTAGLHFTEALLDEIKAKGVNIAFITLHVGLGTFRPMSVERVEDHVMHEEYYSLSKETAELLNETKRRGGRVIAVGTTSCRTLETVGQAHKGGPLSESSGWTSIFIYPGYSFTVVDALITNFHLPKSTLVMLVSALAGREHILEAYREAVRQEYRFFSFGDAMFIY

SEQ ID NO: 69721 - protein, 364 aa, Paenibacillus larvae
  REGION 1..364: note = tr|V9W8U3|V9W8U3_9BACL S-adenosylmethionine:tRNA ribosyltransferase-isomerase OS=Paenibacillus larvae subsp. larvae DSM 25430 OX=697284 GN=queA PE=3 SV=1
MDVESFDFELPEELIAQTPLSDRTQSRLMTLNKETGEIGHHTFKDLADYLKAGDLLVLNDTRVIPARLFGLKKDTGAKVELLLLKDLGDNRWEALVRPGKKIKTGAELVFGTQAEADEPVLSAIVEEEGEMGARIVRFSYRGIFNEILDRLGEMPLPPYIKEQLNDRERYQTVFAKHAGSAAAPTAGLHFTEEFLEGLRGQGVRIAFITLHVGLGTFRPVSVDRVEDHNIHAEYYILSEETARLVNETRAQGGRVIAVGTTSARTLETAAGLSHSQGYIDGEGRTLLHACSGWTSIFIYPGYEFRAVDGLLTNFHLPKSTLLMLVSALASRKYILHAYAEAVKNRYRFFSFGDAMFIYSNQSRK

SEQ ID NO: 69722 - protein, 364 aa, Paenibacillus larvae
  REGION 1..364: note = tr|A0A1U9YJ90|A0A1U9YJ90_9BACL S-adenosylmethionine:tRNA ribosyltransferase-isomerase; OS = Paenibacillus larvae subsp. pulvifaciens OX=1477; GN = queA PE=3 SV=1
MDVESFDFELPEELIAQTPLSDRTQSRLMTLNKETGEIGHHTFKDLADYLKAGDLLVLNDTRVIPARLFGLKKDTGAKVELLLLKDLGDNRWEALVRPGKKIKTGAELVFGTQAEADEPVLSAIVEEEGEMGARIVRFSYRGIFNEILDRLGEMPLPPYIKEQLNDRERYQTVFAKHAGSAAAPTAGLHFTEEFLEGLRGQGVRIAFITLHVGLGTFRPVSVDRVEDHNIHAEYYILSEETARLVNETRAQGGRVIAVGTTSARTLETAAGLSHSQGYIDGEGRTLLHACSGWTSIFIYPGYEFRAVDGLLTNFHLPKSTLLMLVSALASRKYILHAYAEAVKNRYRFFSFGDAMFIYSSQSRK

SEQ ID NO: 69723 - protein, 343 aa, Paenibacillus lautus
  REGION 1..343: note = tr|A0A385TRN9|A0A385TRN9_PAELA S-adenosylmethionine:tRNA ribosyltransferase-isomerase; OS = Paenibacillus lautus OX=1401 GN=queA PE=3 SV=1
MNVDLYDFELPEHLIAQTPLLDRSSSRLLTLNKESGQISHRTFADIIDSLNPGDTLVLNDTKVIPARLFGEKEDTGAKAEVLLLKNMGEDRWEALVKPGKKLKKGNVISFGDGKLKAVIEEEGEMGARILSFSYKGIFQEILDELGQMPLPPYIKEKLDDRDRYQTVYAKHEGSAAAPTAGLHFTEALLEQIRAKGVDIAFITLHVGLGTFRPMSVDQVEDHVMHEEYYSLSQETADLLNETKRRGGRVIAVGTTSCRTLETVGSQLKGEPLRESSGWTSIFIYPGYSFTVVDALITNFHLPKSTLVMLVSALAGREHIMNAYKEAVDKEYRFFSFGDAMFIY

SEQ ID NO: 69724 - protein, 343 aa, Paenibacillus lautus
  REGION 1..343: note = tr|A0A1R1B7E1|A0A1R1B7E1_PAELA S-adenosylmethionine:tRNA ribosyltransferase-isomerase; OS = Paenibacillus lautus OX=1401 GN=queA PE=3 SV=1
MNVDLYDFELPEHLIAQTPLLDRSSSRLLTLDKENGYISHQTFADIIDSLNPGDTLVLNDTKVIPARLFGAKEDTGAKAEVLLLKNMGQDRWEALVKPGKKLKKGNVISFGDGKLKAIIEEEGEMGARILSFSYKGIFQEILDELGQMPLPPYIKEKLDDRDRYQTVYAKHEGSAAAPTAGLHFTEALLEQIQAKGVDIAFITLHVGLGTFRPMSVEQVEDHVMHEEYYSLSQETAELLNETKRRGGRVIAVGTTSCRTLETVGSALEGEPLRESSGWTSIFIYPGYAFTVVDALITNFHLPKSTLVMLVSALAGREHIMKAYKEAVEKEYRFFSFGDAMFIY

SEQ ID NO: 69725 - protein, 342 aa, unidentified
  source 1..342: note = Paenibacillus lentus
  REGION 1..342: note = tr|A0A3S8RUR5|A0A3S8RUR5_9BACL S-adenosylmethionine:tRNA ribosyltransferase-isomerase; OS = Paenibacillus lentus OX=1338368 GN=queA PE=3 SV=1
MNVDLYDFDLPEELIAQTPLADRTASRLLTLNKSTGEVQHHMFPAILDYLQPGDTLVLNDTRVIPARLFGVKQDTGAKAEVLLLKDLGANRWEALVKPGKKLKTGAVITFGDELTATIESEGDMGERVLSFSYEGIFNEILDRLGQMPLPPYIKEKLDDRERYQTVYSKHEGSAAAPTAGLHFTKELLEQVRSKGVDIAFVTLHVGLGTFRPMSVEKVEEHVMHEEYYILSEETAKLLNETRQRGGRIIAVGTTSSRTLETVAGKCGDSPITAMSGWTDIFIYPGYTFKLVDALLTNFHLPKSTLVMLVSALAGREQLLNAYREAVEQKYRFFSFGDAMFIY

SEQ ID NO: 69726 - protein, 342 aa, Paenibacillus macerans
  REGION 1..342: note = tr|A0A090ZIR8|A0A090ZIR8_PAEMA S-adenosylmethionine:tRNA ribosyltransferase-isomerase; OS = Paenibacillus macerans OX=44252 GN=queA PE=3 SV=1
MNVDMYDFELPEELIAQTPLPERSASRLLTLNKETGEIRHHVFPDILDYLHPGDTLVLNDTRVIPARLFGVKQDTGAKAEVLLLKNLGEDRWEALVKPGKKLKTGAVIVFGDELRATVESEADMGERVLRFSYKGIFNEILDRLGQMPLPPYIKEKLDDRERYQTVYSKHEGSAAAPTAGLHFTEELLEQVRAKGVNIAFVTLHVGLGTFRPMAVERVEDHVMHEEYYVLPQETADIINQTKAKGGRVIAVGTTSARTLETVAQACKGGPIVRSSGWTGIFIYPGYEFGLVDAMLTNFHLPKSTLVMLVSALAGRDHIMAAYKEAIAMKYRFFSFGDAMFIY

SEQ ID NO: 69727 - protein, 342 aa, Paenibacillus macquariensis
  REGION 1..342: note = tr|A0A1N6YJD5|A0A1N6YJD5_9BACL S-adenosylmethionine:tRNA ribosyltransferase-isomerase; OS = Paenibacillus macquariensis OX=948756 GN=queA PE=3 SV=1
MDVELYNFDLPEELIAQTPLLERSSSRLLTLNKEDGKTEHHTFKDITEYLKSGDTLVLNDTRVIPARLFGVKEDTGAKAEVLLLKNLGDDRWEALVKPGKKLKQGNIIVFSDELKAVIESESDMGGRVLKFTYNGVFQEILDRLGQMPLPPYIKDKLDDRERYQTVYARHEGSAAAPTAGLHFTEELLDDIRAKGVSVAFITLHVGLGTFRPMSVERVEDHVMHEEYYSLSQETADLLNDTRRAGGRIIAVGTTTCRTLETVGQQCAGGPLKESSGWTSIFMFPGYEFTVVNALITNFHLPKSTLVMLVSALAGREHILEAYKEAVKEQYRFFSFGDAMFIY

SEQ ID NO: 69728 - protein, 342 aa, Paenibacillus macquariensis; identical to SEQ ID NO: 69727
  REGION 1..342: note = tr|A0A168BFE7|A0A168BFE7_PAEMC S-adenosylmethionine:tRNA ribosyltransferase-isomerase; OS = Paenibacillus macquariensis OX=1468 GN=queA PE=3 SV=1

SEQ ID NO: 69729 - protein, 348 aa, unidentified
  source 1..348: note = Paenibacillus montanisoli
  REGION 1..348: note = tr|A0A328U4W3|A0A328U4W3_9BACL S-adenosylmethionine:tRNA ribosyltransferase-isomerase; OS = Paenibacillus montanisoli OX=2081970 GN=queA PE=3 SV=1
MNVAEFDFDLPEHLIAQTPLSDRTSSRLLTLNRATGEVEHHTFTKLSELLQPGDTLILNDTRVMPARLMGIKSDTGAKVELLLLKQLSGDRWETLAKPGKRLRAGAQLSFGDDGTGEPLLRATIIAEGEQGAREIEFHYEGIFNELLDKLGEMPLPPYIKERLNDRERYQTVYAKHEGSAAAPTAGLHFTKPFLEQLQAKGVHIGYITLHVGLGTFRPMSVDTVEEHKMHAEYYELSEETAAMLQAAKDRGGRIVAVGTTSARTLETVAARFAYERLQACSGWTDIFIFPGYEFKLVNALLTNFHLPKSTLVMLVSALAGRSAIMKAYREAIEREYRFFSFGDAMFIY

SEQ ID NO: 69730 - protein, 352 aa, Paenibacillus mucilaginosus
  REGION 1..352: note = tr|F8FMX5|F8FMX5_PAEMK S-adenosylmethionine:tRNA ribosyltransferase-isomerase OS=Paenibacillus mucilaginosus (strain KNP414) OX=1036673 GN=queA PE=3 SV=1
MQVDLFDYHLPEELIAQTPLADRTASRLLTLSKTSGETAHHTFEDLEQYLQAGDVLVLNNTRVIPARLFGVKADTGAKAEILLLKQLEGDRWEALVKPGKRLREGAVIHFGVETGADGASQGEPLLKATVEETGAQGARVLRFEYEGIFNELLDRLGHMPLPPYIKEQLPERERYQTVYAKHEGSAAAPTAGLHFTEAFLHRLEQKGIQLAYVTLHVGLGTFRPVSAETVDEHDMHEEYYEVPQETAELVTAAKREGRRVVAVGTTSARTLETAAAEDGSLQACSGSTGIFIYPGYRFKAVDALLTNFHLPKSTLMMLISALAGRENVLAAYREAVERKYRFFSFGDAMFIY

SEQ ID NO: 69731 - protein, 352 aa, Paenibacillus mucilaginosus; identical to SEQ ID NO: 69730
  REGION 1..352: note = tr|H6NQF3|H6NQF3_9BACL S-adenosylmethionine:tRNA ribosyltransferase-isomerase OS=Paenibacillus mucilaginosus 3016 OX=1116391 GN=queA PE=3 SV=1

SEQ ID NO: 69732 - protein, 348 aa, Paenibacillus nanensis
  REGION 1..348: note = tr|A0A3A1UW62|A0A3A1UW62_9BACL S-adenosylmethionine:tRNA ribosyltransferase-isomerase; OS = Paenibacillus nanensis OX=393251 GN=queA PE=3 SV=1
MNVDWFDFHLPEELIAQTPLKERTASRLLMLDKTSGEISHGVFTDLEGKLREGDVLVLNNTRVIPARLMGMKKETGAKAELLLLKQLGENQWETLAKPAKKLKVGSVIVFGDDGTGNPLMEAEVLSEGEMGSRTIRFRYEGIFQELLDKLGEMPLPPYIKERLEERERYQTVYSKHEGSAAAPTAGLHFTEEFLHRLEQKGVKLAYVTLHVGLGTFRPMSVDTVEEHEMHSEYYELDEQNAELLNEAKRSGRRIVAVGTTSARTLETLANRFKDAPIESCSGWTSIFIYPGYQFQLVNALLTNFHLPKSTLVMLVSALAGRDTIMKAYREAIERRYRFFSFGDAMFIY

SEQ ID NO: 69733 - protein, 349 aa, Paenibacillus naphthalenovorans
  REGION 1..349: note = tr|A0A0U2UAH8|A0A0U2UAH8_9BACL S-adenosylmethionine:tRNA ribosyltransferase-isomerase; OS = Paenibacillus naphthalenovorans OX=162209 GN=queA PE=3; SV = 1
MQVDLFDYDLPESLIAQTPLADRTASRLLTLDKRTGRIGHHRFEQLEQYLQAGDVLVLNDTRVIPARLFGVKADTGAKAEVLLLKPLEGDRWEALVRPAKRLKVGARLHFGGETGEQDSAPLLTATVESEGDMGSRVLQFSYKGIFNEILDRLGHMPLPPYIKEQLPEKERYQTVYAKHRGSAAAPTAGLHFTEEYLHRLEQKGIQLAYVTLHVGLGTFRPVSVENVEEHEMHKEYYEVSEKTAEVVNAARQKGGRVVAVGTTSARTLESAAREDGTLVSGKGWTGIFIYPGYPFRIVDALLTNFHLPKSTLLMLISALAGRERVLAAYKEAVEREYRFFSFGDAMFIY

SEQ ID NO: 69734 - protein, 342 aa, unidentified
  source 1..342: note = Paenibacillus nuruki
  REGION 1..342: note = tr|A0A1E3KYU6|A0A1E3KYU6_9BACL S-adenosylmethionine:tRNA ribosyltransferase-isomerase; OS = Paenibacillus nuruki OX=1886670 GN=queA PE=3 SV=1
MKVDVYDFELPEHLIAQVPLQDRTASRLLTLNKQTGEVRHQHFGEILDYLHEGDTLILNDTRVIPARLFGIKRDTGAKAEVLLLTQLEGDRWEALVKPGKKLKKGAVIDFGGELEAVIEEESDMGMRVLSFRYEGIFQEILDRLGEMPLPPYIKEKLDDRERYQTVYAKHEGSAAAPTAGLHFTTELLEQIAAKGVQVGFVTLHVGLGTFRPMSVETIEEHVMHEEFYSLSAETAQLLNETKARGGRIIAVGTTSARTLETVAREAKGSLIEASSGWTQIFIYPGHEFGLVDAMVTNFHLPKSTLVMLVSALAGRDHIMNAYQQAVAEEYRFFSFGDAMFIY

SEQ ID NO: 69735 - protein, 342 aa, Paenibacillus odorifer
  REGION 1..342: note = tr|A0A1R0XGR4|A0A1R0XGR4_9BACL S-adenosylmethionine:tRNA ribosyltransferase-isomerase; OS = Paenibacillus odorifer OX=189426 GN=queA PE=3 SV=1
MNVDAYDFHLPEELIAQTPLADRSASRLLLVNKEDGELAHRHFTDIIDYFNPGDTLVLNDTRVIPARLFGVKEDTGAKAEVLLLKNLGDDRWEALVKPGKKLKTGAVIIFSDELRAVIEDEADMGGRTLRFIYQGIFQEILDRLGTMPLPPYIKETLDDRERYQTVYARHEGSAAAPTAGLHFTQELLKQIEAKGVNIAYITLHVGLGTFRPMSVEKVEEHVMHSEYFVMSQETADTINATKARGGRIIAVGTTSCRTLETVGRQCEGGPLVECSGWTDIFIYPGYTFSVVNALITNFHLPKSTLVMLVSALAGREHILAAYEEAIEQKYRFFSFGDAMFIY

SEQ ID NO: 69736 - protein, 342 aa, Paenibacillus odorifer
  REGION 1..342: note = tr|A0A1R0YW10|A0A1R0YW10_9BACL S-adenosylmethionine:tRNA ribosyltransferase-isomerase; OS = Paenibacillus odorifer OX=189426 GN=queA PE=3 SV=1
MNVDAYDFHLPEELIAQTPLADRSASRLLLVNKEDGELAHRHFTDIIDYFNPGDTLVLNDTRVIPARLFGVKEDTGAKAEVLLLKNLGDDRWEALVKPGKKLKTGAVIIFSDELRAVIEDEADMGGRTLRFIYQGIFQEILDRLGTMPLPPYIKETLDDRERYQTVYARHEGSAAAPTAGLHFTQQLLKQIEAKGVKIAYITLHVGLGTFRPMSVEKVEEHVMHSEYFVMSQETADTINATKARGGRIIAVGTTSCRTLETVGRQCEGGPLVECSGWTDIFIYPGYKFSVVNALITNFHLPKSTLVMLVSALAGREHILAAYEEAIEQKYRFFSFGDAMFIY

SEQ ID NO: 69737 - protein, 348 aa, unidentified
  source 1..348: note = Paenibacillus oryzae
  REGION 1..348: note = tr|A0A1A5YJM0|A0A1A5YJM0_9BACL S-adenosylmethionine:tRNA ribosyltransferase-isomerase; OS = Paenibacillus oryzae OX=1844972 GN=queA PE=3 SV=1
MNVDWFDFELPEELIAQTPLADRTSSRLLSLNRASGKISHGGFTDLAELLQEGDVLVLNNTRVIPARLMGVKSDTGAKVELLLLKRLEGDTWEALAKPAKRLKTGTVIHFGDDGSGKPLMKAEIIAEGDMGSRHILFRYEGIFQELLDRLGEMPLPPYIKETLAERERYQTVYSRHEGSAAAPTAGLHFTEAFLDNLQKRGIQLAYVTLHVGLGTFRPMSAETVEEHEMHAEYYELDEENAAILEVARREGRRIVAVGTTSARTLETVASRFPDTPLEACSGWTSIFIYPGYTFKLVNALVTNFHLPKSTLVMLVSALAGRDAVMKAYSEAIQRQYRFFSFGDAMFIY

SEQ ID NO: 69738 - protein, 358 aa, unidentified
  source 1..358: note = Paenibacillus oryzisoli
  REGION 1..358: note = tr|A0A198A927|A0A198A927_9BACL S-adenosylmethionine:tRNA ribosyltransferase-isomerase; OS = Paenibacillus oryzisoli OX=1850517 GN=queA PE=3 SV=1
MEVQAFDFELPESLIAQTPLLERTASRLLTLNKETGETAHRTFEDLIAYVEAGDLLVMNDTRVIPARLFGMKKDTGAKVEILLLKPLGEDRWEALVKPGKRMQLGAVAVFGSSNEGGEPLLTAEVVEVGDMGARILQFRYKGIFNEILDQLGEMPLPPYIKEQLSERERYQTVYAKHEGSSAAPTAGLHFTAEYLERLKDRGVRLAFVTLHVGLGTFRPVSVDKIEDHQMHAEFYILSEETAALINETKSAGKRVIAVGTTSARTLETAAGLSREQSGYQEGQPLRIQPSQGWTSIFIYPGYSFGVVDVLLTNFHLPKSTLLMLISALAGKANIMRAYEEAVKEEYRFFSFGDAMLIY

SEQ ID NO: 69739 - protein, 342 aa, Paenibacillus pabuli
  REGION 1..342: note = tr|A0A327QM22|A0A327QM22_9BACL S-adenosylmethionine:tRNA ribosyltransferase-isomerase; OS = Paenibacillus pabuli OX=1472 GN=queA PE=3 SV=1
MNVNLYDFELPEQLIAQTPLLDRTASRLLTLNKESGEVNHHTFPDIIDFLQPGDTLVLNDTRVLPARLFGTKEDTGAKAEVLLLKNVEGDRWEALVKPGKKLKAGSVIVFSDELRAVIDEEGEMGARLLTFSYDGIFQEILDRLGEMPLPPYIRETLDDRERYQTVYAKHEGSAAAPTAGLHFTEELLNRIRDKGVNVAFITLHVGLGTFRPMSVDNVEEHVMHEEYYSLSQETADLINETKKRGNRIFAVGTTSCRTLETVGSKFEDGQLQESSGWTKIFIYPGYTFKVIDGMLTNFHLPKSTLVMLVSALAGREQIMHAYEEAIKEQYRFFSFGDAMLIY

SEQ ID NO: 69740 - protein, 348 aa, unidentified
  source 1..348: note = Paenibacillus paeoniae
  REGION 1..348: note = tr|A0A371PIB2|A0A371PIB2_9BACL S-adenosylmethionine:tRNA ribosyltransferase-isomerase; OS = Paenibacillus paeoniae OX=2292705 GN=queA PE=3 SV=1
MNVDWFDFDLPEELIAQTPLQDRTASRLLMLSKESGSTQHGIFTDLEEKLQEGDVLVLNNTRVIPARLLGVKKDTGAKAEILLLKQLGDDQWEALVKPGKRLKAGAVIVFGDDGSGAPLMEAEVLSEGDMGGRIIQFRYEGIFQELLDRLGEMPLPPYIKERLDERERYQTVYSRHDGSAAAPTAGLHFTESFLRKLEDKGVKLVYVTLHVGLGTFRPMSVDTVEEHEMHAEYYELDEANAALLNEAKVNGRRIVAVGTTSARTLETLAGRFGEGEIQACSGWTSIFIYPGYTFKLVNALLTNFHLPKSTLVMLVSALSGRDAIMKAYGEAIEHKYRFFSFGDAMFIY

SEQ ID NO: 69741 - protein, 347 aa, Paenibacillus pasadenensis
  REGION 1..347: note = tr|A0A2N5N9A6|A0A2N5N9A6_9BACL S-adenosylmethionine:tRNA ribosyltransferase-isomerase; OS = Paenibacillus pasadenensis OX=217090 GN=queA PE=3 SV=1
MNVEDYDFHLPEHLIAQTPLAERTASRLLTLDKKTGELGHHAFRDLKDYLRPGDTLVVNDTRVIPARLLGVKEDTGAKAELLLLKQLHGDTWETLAKPGKKLRTGAVVAFGEGENGQPLLRAVVEAEGEMGGRTVRFLYEGIFPELLDRLGEMPLPPYIKERLDDRERYQTVYSRQAGSAAAPTAGLHFSQSFLEELQQAGVEVAPLTLHVGLGTFRPISADTIEEHVMHSEYYELSEETAARLRRTRERGGRIVAVGTTSARTLETVAARFPDGLQACSGWTDIFIYPGYEFKAVDALLTNFHLPKSTLVMLVSALAGRENVLAAYEAAVREQYRFFSFGDAMFIY

SEQ ID NO: 69742 - protein, 359 aa, Paenibacillus pectinilyticus
  REGION 1..359: note = tr|A0A1C1A339|A0A1C1A339_9BACL S-adenosylmethionine:tRNA ribosyltransferase-isomerase; OS = Paenibacillus pectinilyticus OX=512399 GN=queA PE=3 SV=1
MEVQAFDFDLPESLIAQTPLLDRTASRLLTLNKETGQTAHRTFEDLITYLEAGDLLVMNDTRVIPARLFGMKKDTGAKVELLLLKPLGEDRWEALVKPGKRMQLGAVAVFGTSMDEGDEPLLTAEVVEVGEMGARVLQFRYTGIFNEILDRLGEMPLPPYIKEQLSERERYQTVYAKHEGSSAAPTAGLHFTEAYLDKLQAKGIRLAFVTLHVGLGTFRPVSVDKIEDHQMHAEFYILSEETAAMINETKAAGKRVIAVGTTSARTLETAAGLAREQQSPEEGMPLIIQPSQGWTSIFIYPGYTFGVVDVLLTNFHLPKSTLLMLISALAGKANVMKAYEEAVKEEYRFFSFGDAMLIY

SEQ ID NO: 69743 - protein, 342 aa, Paenibacillus peoriae
  REGION 1..342: note = tr|A0A0K2FCE9|A0A0K2FCE9_9BACL S-adenosylmethionine:tRNA ribosyltransferase-isomerase; OS = Paenibacillus peoriae OX=59893 GN=queA PE=3 SV=1
MNVNDYDFELPETLIAQTPLLDRSASRLLTLNKNNGEVGHHTFSDIVQYLQPGDTLVLNDTRVIPARLFGIKEDTGAKAEVLLLKQLQGDRWEALVKPGKKLKKGAVIVFGDELKAVIEEEGDMGGRVLSFSYDGIFQEILDRLGQMPLPPYIKEQLDDRERYQTVYARHEGSAAAPTAGLHFTEELLDQIKKKGVTVAFITLHVGLGTFRPMSVDTIEEHVMHEEYYSLSQETADVLNETKARGGRVVAVGTTSCRTLETVGNKFLDGVLEASSGWTQIFIYPGYEFRVVDAMITNFHLPKSTLVMLVSALAGRENIMHAYQEAIDRQYRFFSFGDAMFIY

SEQ ID NO: 69744 - protein, 342 aa, Paenibacillus peoriae
  REGION 1..342: note = tr|A0A2S6NY62|A0A2S6NY62_9BACL S-adenosylmethionine:tRNA ribosyltransferase-isomerase; OS = Paenibacillus peoriae OX=59893 GN=queA PE=3 SV=1
MNVNDYDFELPETLIAQTPLLDRSASRLLTLNKNNGEVGHHTFSDIVQYLQPGDTLVLNDTRVIPARLFGIKEDTGAKAEVLLLKQLQGDRWEALVKPGKKLKKGAVIVFGDELKAVIEEEGDMGGRVLSFSYDGIFQEILDRLGQMPLPPYIKEQLDDRERYQTVYARHEGSAAAPTAGLHFTEELLDQIKKKGVTVAFITLHVGLGTFRPMSVDTIEEHVMHEEYYSLSQETADVLNETKARGGRVVAVGTTSCRTLETVGNKFLDGVLEASSGWTQIFIYPGYEFRVVDAMITNFHLPKSTLVMLVSALAGRENIMHGYQKAIDRQYRFFSFGDAMFIY

SEQ ID NO: 69745 - protein, 195 aa, Paenibacillus pini
  REGION 1..195: note = tr|W7YQ89|W7YQ89_9BACL S-adenosylmethionine:tRNA ribosyltransferase-isomerase OS=Paenibacillus pini JCM 16418 OX=1236976 GN=JCM16418_725 PE=3 SV=1
MNVELYDFELPEELIAQTPLQDRTSSRLLTLNKESGAMAHHTFKDIVNELHAGDTLVLNDTRVIPARLFGLKEDTGAKAEVLLLKNLGEDRWEALVKPGKKLKVGSVIHFGDELKAVIEEESDMGGRVLSFTYEGIFQEILDRLGQMPLPPYIKEKLMIKNVTRRYILVMKALLRHRQQVYISRKNCSMKFVPKA

SEQ ID NO: 69746 - protein, 130 aa, Paenibacillus pini
  REGION 1..130: note = tr|W7YE38|W7YE38_9BACL S-adenosylmethionine:tRNA ribosyltransferase-isomerase OS=Paenibacillus pini JCM 16418 OX=1236976 GN=JCM16418_726 PE=3 SV=1
MSVDRVEDHVMHAEYYSISQETVEVLNNARDKGGRIIAVGTTSCRTLETVGNRFPEGPLEACNGWTDIFMYPGYSFKVVNALITNFHLPKSTLVMLVSALAGREHILEAYQEAIDMEYRFFSFGDAMFIY

SEQ ID NO: 69747 - protein, 348 aa, unidentified
  source 1..348: note = Paenibacillus pinisoli
  REGION 1..348: note = tr|A0A3A6PSZ3|A0A3A6PSZ3_9BACL S-adenosylmethionine:tRNA ribosyltransferase-isomerase; OS = Paenibacillus pinisoli OX=1276110 GN=queA PE=3 SV=1
MNVEWFDFDLPEELIAQTPLQDRTASRLLMLSKESGNTEHGGFTDLEAKLQAGDVLVLNNTRVIPARLLGIKKDTGAKAELLLLKQLGDDRWEALAKPGKKLKAGAVIVFGDDGNGTPLMEAEVLSEGDMGARIIQFRYEGIFQELLDRLGEMPLPPYIKERLDERERYQTVYSRHEGSAAAPTAGLHFTEDFLRKLEDKGVRLVYVTLHVGLGTFRPMSVDTVEEHEMHSEYYELDETNAELLNEARSNGRRIVAVGTTSARTLETLAGRFGDGALQACSGWTSIFIYPGYSFKLVNALLTNFHLPKSTLVMLVSALAGRDAIMKAYGEAIERRYRFFSFGDAMFIY

SEQ ID NO: 69748 - protein, 342 aa, Paenibacillus polymyxa; identical to SEQ ID NO: 69743
  REGION 1..342: note = tr|A0A509FXM3|A0A509FXM3_PAEPO S-adenosylmethionine:tRNA ribosyltransferase-isomerase; OS = Paenibacillus polymyxa OX=1406 GN=queA PE=3 SV=1

SEQ ID NO: 69749 - protein, 342 aa, Paenibacillus polymyxa
  REGION 1..342: note = tr|A0A1D7MFB7|A0A1D7MFB7_PAEPO S-adenosylmethionine:tRNA ribosyltransferase-isomerase; OS = Paenibacillus polymyxa OX=1406 GN=queA PE=3 SV=1
MNVNDYDFELPETLIAQTPLLDRSASRLLTLNKNNGKVGHHTFSDIVQYLQPGDTLVLNDTRVIPARLFGIKEDTGAKAEVLLLKQLQGDRWEALVKPGKKLKKGAVIVFGDELKAVIEEEGDMGGRVLSFSYDGIFQEILDRLGQMPLPPYIKEQLDDRERYQTVYARHEGSAAAPTAGLHFTEELLDQIKKKGVTVAFITLHVGLGTFRPMSVDTIEEHVMHEEYYSLSQETADVLNATKARGGRIVAVGTTSCRTLETVGNTFADGVLQASSGWTQIFIYPGYEFRVVDAMITNFHLPKSTLVMLVSALAGRENIMHAYQEAIDRQYRFFSFGDAMFIY

SEQ ID NO: 69750 - protein, 342 aa, unidentified
  source 1..342: note = Paenibacillus polysaccharolyticus
  REGION 1..342: note = tr|A0A1G5BV34|A0A1G5BV34_9BACL S-adenosylmethionine:tRNA ribosyltransferase-isomerase; OS = Paenibacillus polysaccharolyticus OX=582692 GN=queA; PE = 3 SV=1
MNVNLYDFELPEELIAQTPLLDRTASRLLTLNKETGEVAHHHFPHIIDVLQPGDTLILNDTRVLPARLFGTKADTGAKAEVLLLKNVEGDKWEALVKPGKKLRAGSVIVFSDELKAVINEVGEMGARTLTFEYNGIFQEILDRLGEMPLPPYIKETLDDRERYQTVYAKHEGSAAAPTAGLHFTDELLDQIRAKGVNIGFITLHVGLGTFRPMSVDMVEDHVMHEEYYSLSQETAELINQTKERGNKVFAVGTTSCRTLETVGSKFEDGVLQESSGWTSIFIYPGYSFKVIDGMLTNFHLPKSTLVMLVSALAGREHIMHAYEEAIKEKYRFFSFGDAMLIY

SEQ ID NO: 69751 - protein, 345 aa, Paenibacillus popilliae
  REGION 1..345: note = tr|M9LLE2|M9LLE2_PAEPP S-adenosylmethionine:tRNA ribosyltransferase-isomerase OS=Paenibacillus popilliae ATCC 14706 OX=1212764 GN=queA PE=3 SV=1
MDVHLFDFDLPERLIAQTPLPDRTASRLLALNRRTGEVEHRTFPDMIEYLKPGDLLVLNDTRVIPARLYGVKPDTGGNVEVLLLKQEQDDIWEALVKPAKRLKKGATVRFGDELTGTVIEEREMGGRLIRFEYAGIFHEILDRLGQMPLPPYIKELLQDRERYQTVYAKHEGSAAAPTAGLHFTDSILEQIRAKEVGIARITLHVGLGTFRPMSADVIEEHVMHAEYYEMSEETAALINETRSLGGRIVAVGTTSCRTLETVAGRYGSEPVAACSGWTDIFIYPGYEFRLVDSLLTNFHLPKSTLVMLVSAFAGREHMMAAYREAIEQEYRFFSFGDAMLIFTDD

SEQ ID NO: 69752 - protein, 348 aa, Paenibacillus prosopidis
  REGION 1..348: note = tr|A0A368VLL1|A0A368VLL1_9BACL S-adenosylmethionine:tRNA ribosyltransferase-isomerase; OS = Paenibacillus prosopidis OX=630520 GN=queA PE=3 SV=1
MNVDWFDFELPERLIAQTPLPDRTASRLLALNKHTGEITHNTFTDLEQLVQAGDVLVLNNTRVIPARLTGMKSDTGAKIELLLLKQLGDDRWEALGKPAKRLKAGTALSFGDDGNGNPLLRAVIEQEGEMGGRTIRFEYEGIFQELLDRLGEMPLPPYIKERLEERERYQTVYSRHAGSAAAPTAGLHFTDEFLQRLQAKGVKLAYVTLHVGLGTFRPMSVELVEEHEMHAEYYELDEHNAQILNEAKQSGARIIAVGTTSSRTLETVAARFEDQPIQACNGWTSIFIFPGYKFKLVNALLTNFHLPKSTLVMLVSALAGRDAVMRAYEEAIAKEYRFFSFGDAMFIY

SEQ ID NO: 69753 - protein, 342 aa, Paenibacillus rhizosphaerae
  REGION 1..342: note = tr|A0A1R1DXA9|A0A1R1DXA9_9BACL S-adenosylmethionine:tRNA ribosyltransferase-isomerase; OS = Paenibacillus rhizosphaerae OX=297318 GN=queA PE=3 SV=1
MNVDLYDFELPEELIAQTPLPERTASRLLTLNKQDGSIAHRTFKDIADELQPGDTLVLNDTRVIPARLFGVKEETGAKAEVLLLKNLQGDTWEALVKPGKKLKKGSVIRFGDELQAVIEDEGEMGERKLTFTYQGIFQEILDRLGQMPLPPYIKEKLDDKERYQTVYSKHEGSAAAPTAGLHFTEELLDQIRAKGVTVAFITLHVGLGTFRPMSVERVEDHVMHAEYYSVNQETADILNEARARGGRIVAVGTTSCRTLETIGTRFEGGLLEACSGWTDIFIYPGYTFKVVNALITNFHLPKSTLVMLVSALAGREHILNAYAEAVKERYRFFSFGDAMFIY

SEQ ID NO: 69754 - protein, 352 aa, Paenibacillus rigui
  REGION 1..352: note = tr|A0A229UTT1|A0A229UTT1_9BACL S-adenosylmethionine:tRNA ribosyltransferase-isomerase; OS = Paenibacillus rigui OX=554312 GN=queA PE=3 SV=1
MQVEWFDYELPERLIAQTPLKDRTASRLLTLNKETGAIRHQTFESLIDYLEAGDVLVLNDTRVLPARLFGVKADTGAKAEVLLLKQLEGDRWEALVRPGKRLKAGSVIAFGAEEQGEGSKPLLTATVEEEREMGSRVLRFSYEGIFNELLDRLGHMPLPPYIKEQLPERERYQTVYAKHEGSAAAPTAGLHFTKSFLHRLEQKGIQLAYITLHVGLGTFRPVAVDHVESHTMHEEYYEVSAEAADRINAAKAGGHRVVAVGTTSARTLETAIRVSTQPGQLTACSGWTDIFIYPGVELKIVDALLTNFHLPKSTLLMLISALAGRERIMAAYKEAVEQEYRFFSFGDAMFIY

SEQ ID NO: 69755 - protein, 342 aa, Paenibacillus riograndensis
  REGION 1..342: note = tr|A0A0E3WIV8|A0A0E3WIV8_9BACL S-adenosylmethionine:tRNA ribosyltransferase-isomerase; OS = Paenibacillus riograndensis SBR5 OX=1073571 GN=queA; PE = 3 SV=1
MNVDDYDFHLPEELIAQTPLSDRSASRLLLVNKENGQLEHRHFTDILEQFRPGDTLVLNDTRVIPARLFGVKEDTGAKAEVLLLKSLGEDRWEALVKPGKKLKTGAVIIFSEELKAVIEDEADMGGRTLRFIYTGIFQEILDRLGSMPLPPYIKETLDDRERYQTVYAKHEGSAAAPTAGLHFTRELLEQIKAKGVTIAYITLHVGLGTFRPMSVEKVEEHVMHAEYFVLSQETADMLNAARARGGRIIAVGTTSCRTLETAGRQAGGGPIQECSGWTDIFIYPGYTFTVVNALITNFHLPKSTLVMLVSALAGRENILAAYEAAIQQRYRFFSFGDAMFIY

SEQ ID NO: 69756 - protein, 342 aa, Paenibacillus riograndensis
  REGION 1..342: note = tr|A0A132U052|A0A132U052_9BACL S-adenosylmethionine:tRNA ribosyltransferase-isomerase; OS = Paenibacillus riograndensis OX=483937 GN=queA PE=3 SV=1
MNVDDYDFHLPEELIAQTPLSDRSASRLLLVNKENGQLEHRHFTDILEQFRPGDTLVLNDTRVIPARLFGVKEDTGAKAEVLLLKSLGADRWEALVKPGKKLKSGAVIIFSEELRAVIEDESDMGGRTLRFIYTGIFQEILDRLGSMPLPPYIKETLDDRERYQTVYAKHEGSAAAPTAGLHFTRELLEQIKAKGVTIAYITLHVGLGTFRPMSVEKVEEHVMHAEYFVLSQETADMLNAARARGGRIIAVGTTSCRTLETAGRQAGGGPIQECSGWTDIFIYPGYTFTVVNALITNFHLPKSTLVMLVSALAGRENILAAYEAAIQQRYRFFSFGDAMFIY

SEQ ID NO: 69757 - protein, 342 aa, Paenibacillus sabinae
  REGION 1..342: note = tr|X5A2D6|X5A2D6_9BACL S-adenosylmethionine:tRNA ribosyltransferase-isomerase OS=Paenibacillus sabinae T27; OX = 1268072 GN=queA PE=3 SV=1
MHVDLYDFHLPEELIAQTPLSDRSASRLLTLDMRSGKTEHRHFTDILEELRPGDTLVLNDTRVIPARLFGIKEDTGAKAEVLLLKSLDEDRWEALVKPGKKLKTGAVISFGEELRAVIEEESDMGGRTLRFMYNGIFQEILDRLGTMPLPPYIKEKLDDRERYQTVYARNEGSAAAPTAGLHFTEELLDKIKAKGVNLAYITLHVGLGTFRPMSVETVEEHVMHAEFFMLSQETADILNEAREKGSRIVAVGTTSCRTLETVGGMFKGEPLEACSGWTDIFIYPGYEFKLVDALITNFHLPKSTLVMLVSALAGRENILAAYQEAIEQKYRFFSFGDAMFIY

SEQ ID NO: 69758 - protein, 342 aa, unidentified
  source 1..342: note = Paenibacillus selenitireducens
  REGION 1..342: note = tr|A0A1T2XKH5|A0A1T2XKH5_9BACL S-adenosylmethionine:tRNA ribosyltransferase-isomerase; OS = Paenibacillus selenitireducens OX=1324314 GN=queA PE=3; SV = 1
MNVDLYDFHLPEHLIAQTPLLNRTGSRLLTLEKATGNVEHHVFTDLINYLQPGDTLVLNDTRVIPARIMGSKPDTGAKMEVLLLKNVGEDRWEGLVKPAKRAKVGTVIQFSEELSATVESEGDMGARVLRFSYEGIFNEILDRLGQMPLPPYIKEQLDDQERYQTVYAKHEGSAAAPTAGLHFTSEFLELIQAKGVDIAYITLHVGLGTFRPMSVDRVEDHVMHEEYYSISEETASQLQAARDRGGRIVAVGTTSARTLETVGTRFGDEPIQACSGWTSIFIFPGYTFKLVNALLTNFHLPKSTLVMLVSALAGREHILNAYQEAIEQEYRFFSFGDAMFIY

SEQ ID NO: 69759 - protein, 342 aa, unidentified
  source 1..342: note = Paenibacillus silvae
  REGION 1..342: note = tr|A0A2W6NNY3|A0A2W6NNY3_9BACL S-adenosylmethionine:tRNA ribosyltransferase-isomerase; OS = Paenibacillus silvae OX=1325358 GN=queA PE=3 SV=1
MNVDLYDFELPEELIAQTPLLDRTASRLLTLNKETGEVAHHHFPHILNVLEPGDTLILNDTRVLPARLFGTKEDTGAKAEVLLLKNVEGDKWEALVKPGKKLRDGAVIVFSDELKAVINEVGEMGARTLTFEYNGIFQEILDRLGEMPLPPYIKETLDDRERYQTVYAKHEGSAAAPTAGLHFTDELLDQIRAKGVNIGFITLHVGLGTFRPMSVDVVEDHVMHEEYYSLSQETADLINRTKERGNKVFAVGTTSCRTLETVGSKFEDGVLQESSGWTSIFIYPGYSFKVIDGMLTNFHLPKSTLVMLVSALAGRENIMHAYAEAIKERYRFFSFGDAMLIY

SEQ ID NO: 69760 - protein, 343 aa, unidentified
  source 1..343: note = Paenibacillus solani
  REGION 1..343: note = tr|A0A0M1P152|A0A0M1P152_9BACL S-adenosylmethionine:tRNA ribosyltransferase-isomerase; OS = Paenibacillus solani OX=1705565 GN=queA PE=3 SV=1
MNVDLYDFELPEQLIAQTPLLDRSSSRLLTLNKENGHLRHQTFADIIDCLNPGDTLVLNDTKVIPARLFGEKEDTGAKAEVLLLKSMGQDRWEALVKPGKKLKKGNVISFGDGKLKAVIEEEGEMGARTLSFSYKGIFQEILDELGQMPLPPYIKEKLDDRDRYQTVYAKHEGSAAAPTAGLHFTETLLEQIRAKGVDIAFITLHVGLGTFRPMSVDQVEDHVMHEEYYSISQETAELLNETKRRGGRVIAVGTTSCRTLETVGSERNGEPLCESSGWTSIFIYPGYKFTVVDALITNFHLPKSTLVMLVSALAGREHIMKAYAEAVEKEYRFFSFGDAMFIY

SEQ ID NO: 69761 - protein, 342 aa, Paenibacillus sophorae
  REGION 1..342: note = tr|A0A1H8RER7|A0A1H8RER7_9BACL S-adenosylmethionine:tRNA ribosyltransferase-isomerase; OS = Paenibacillus sophorae OX=1333845 GN=queA PE=3 SV=1
MNVDLYNFHLPEELIAQTPLPDRSASRLLTLDKRSGRTQHRHFTDIIDELQPGDTLVLNDTRVIPARLFGIKEDTGAKAEVLLLKSLGEDRWDALVKPGKKLKTGAVISFGEELRAVIEEESDMGGRTLRFMYEGIFQEILDRLGTMPLPPYIKEKLDDRERYQTVYARHEGSAAAPTAGLHFTEDLLKHIQDKGVRLAYITLHVGLGTFRPMSVDTVEEHVMHSEYFMLPQETADMLNEAKSKGSRIVAVGTTSCRTLETVGGMFGDGPLEACSGWTDIFIYPGYEFKLVNALITNFHLPKSTLVMLVSALAGREHILAAYQEAIQRKYRFFSFGDAMFIY

SEQ ID NO: 69762 - protein, 342 aa, Paenibacillus sp.
  REGION 1..342: note = tr|A0A1Q5XTH4|A0A1Q5XTH4_9BACL S-adenosylmethionine:tRNA ribosyltransferase-isomerase; OS = Paenibacillus sp. P46E OX=1349436 GN=queA PE=3 SV=1
MNVDDYDFHLPEELIAQTPLSDRSASRLLLVNKQNGQLEHRHFTDILDQFQPGDTLVLNDTRVIPARLFGVKEDTGAKAEVLLLKSLGEERWEALVKPGKKLKTGAVIIFSDELRAVIEDEADMGGRTLHFIYTGIFQEILDRLGSMPLPPYIKETLDDRERYQTVYAKHEGSAAAPTAGLHFTRELLEQIKAKGVTIAYITLHVGLGTFRPMSVEKVEEHVMHAEYFVLSKETADVLNAAKARGGRIIAVGTTSCRTLETVGRQSQGGPIEECSGWTDIFIYPGYKFTVVNALITNFHLPKSTLVMLVSALAGRENILTAYEAAIGQQYRFFSFGDAMFIY

SEQ ID NO: 69763 - protein, 342 aa, Paenibacillus sp.
  REGION 1..342: note = tr|A0A1I6RC39|A0A1I6RC39_9BACL S-adenosylmethionine:tRNA ribosyltransferase-isomerase; OS = Paenibacillus sp. 453mf OX=1761874 GN=queA PE=3 SV=1
MNVDLYDFELPESLIAQTPLKERSASRLLTLNKETGAMGHHTFTDIIDYLNPGDTLILNDTRVIPARLFGVKEDTGAKAEVLLLHNLGEDRWETLVKPGKKLKKGAVIRFGEELSATIEEESDMGGRVIRFSYDGIFQEILDRLGQMPLPPYIKEKLEDKERYQTVYAKHEGSAAAPTAGLHFTEELLERIQAKGISIGFITLHVGLGTFRPMSVDVVEEHVMHAEYYSLNQETADLINETKNRGGRVIAVGTTSCRTLETVGTQLEGKELTASSGWTDIFMYPGYEFKVVDALITNFHLPKSTLVMLVSALAGLENIMTAYKEAVNQEYRFFSFGDSMFIY

SEQ ID NO: 69764 - protein, 342 aa, unidentified
  source 1..342: note = Paenibacillus spiritus
  REGION 1..342: note = tr|A0A5J5GHV2|A0A5J5GHV2_9BACL tRNA preQ1(34) S-adenosylmethionine ribosyltransferase-isomerase QueA; OS = Paenibacillus spiritus OX=2496557 GN=queA PE=4 SV=1
MKVDLYDFDLPESLIAQTPLKERSASRLLMLDKSTGKTEHGVFTDIVDRLQPGDTLVLNDTRVIPARLFGVKEDTGAKAEVLLLQNLGEDRWEALVKPGKKLKTGSVIVFGDELSAVVEEEGEMGGRTIRFRYSGIFQEILDRLGTMPLPPYIKEKLDDRERYQTVYARHEGSAAAPTAGLHFTEELLKQIEAKGVTLAYITLHVGLGTFRPMSAETVEEHVMHAEYYSLSPETAEVLNQARAEGRRIVAVGTTSCRTLETVGTRFGKNPLEACSGWTDIFIYPGYEFKLVDALITNFHLPKSTLVMLVSALAGRESVLSAYREAVEMKYRFFSFGDAMFIY

SEQ ID NO: 69765 - protein, 342 aa, Paenibacillus stellifer
  REGION 1..342: note = tr|A0A089N8J6|A0A089N8J6_9BACL S-adenosylmethionine:tRNA ribosyltransferase-isomerase; OS = Paenibacillus stellifer OX=169760 GN=queA PE=3 SV=1
MNVDLYDFDLPEELIAQTPLPDRSASRLLTLDKSSGVTEHRHFTDILTELKPGDTLVLNDTRVIPARLFGVKEDTGAKAEVLLLKNLGEDRWEALVKPGKKLKTGAVISFGEELQAVVEEESDMGGRTLRFMYQGIFQEILDRLGTMPLPPYIKEKLDDRERYQTVYAKNEGSAAAPTAGLHFTKELLKQIQDKGVRIAYITLHVGLGTFRPMSVETVEEHVMHAEFFMLSQETADMLNKARTEGGRIVAVGTTSCRTLETVGGMFGDGPLEACSGWTDIFIYPGYSFKLVDALITNFHLPKSTLVMLVSALAGREHILNAYKEAIRESYRFFSFGDAMFIY

SEQ ID NO: 69766 - protein, 348 aa, unidentified
  source 1..348: note = Paenibacillus swuensis
  REGION 1..348: note = tr|A0A172TJK4|A0A172TJK4_9BACL S-adenosylmethionine:tRNA ribosyltransferase-isomerase; OS = Paenibacillus swuensis OX=1178515 GN=queA PE=3 SV=1
MNVEQFDFDLPEELIAQTPLLQRTESRLLALNKRTGAIEHGTFTQLLNYLQSGDTLVLNDTRVLPARLLGVKADTGAKAEVLLLKNTEGDTWEALVKPGKRVKKGTVLHFGADSEAPLLLAEVTEEGEMGARTLRFEYQGIFHELLDQLGQMPLPPYIKEQLEDQERYQTVYAKHRGSAAAPTAGLHFTEAFLNEIRSRGVTIASVTLHVGLGTFRPVSAERVEEHEMHHEYYEVSQETAEVLNDTRVRGGRVVAVGTTSARTLETVARRYGDSAVQACSGWTNIFMYPGYEFQLVDALLTNFHLPKSTLVMLVSALAGRELTMKAYEAAIQERYRFFSFGDAMFIYE

SEQ ID NO: 69767 - protein, 342 aa, Paenibacillus taichungensis; identical to SEQ ID NO: 69739
  REGION 1..342: note = tr|A0A2V3RMN1|A0A2V3RMN1_9BACL S-adenosylmethionine:tRNA ribosyltransferase-isomerase; OS = Paenibacillus taichungensis OX=484184 GN=queA PE=3 SV=1

SEQ ID NO: 69768 - protein, 342 aa, Paenibacillus taichungensis
  REGION 1..342: note = tr|A0A329QRD2|A0A329QRD2_9BACL S-adenosylmethionine:tRNA ribosyltransferase-isomerase; OS = Paenibacillus taichungensis OX=484184 GN=queA PE=3 SV=1
MNVNLYDFELPEKLIAQTPLLDRTASRLLTLNKDSGEVNHHTFPDIIEFLQPGDTLVLNDTRVLPARLFGTKEDTGAKAEVLLLKNVEGDRWEALVKPGKKLKAGSVIVFSDELKAVIDEEGEMGARLLTFSYDGIFQEILDRLGEMPLPPYIRETLDDRERYQTVYAKHEGSAAAPTAGLHFTEELLNRIRDKGVNVAFITLHVGLGTFRPMSVDNVEEHVMHEEYYSLSQETADLINETKKRGNRIFAVGTTSCRTLETVGSKFEDGQLQESSGWTKIFIYPGYTFKVIDGMLTNFHLPKSTLVMLVSALAGREQIMHAYEEAIKEQYRFFSFGDAMLIY

SEQ ID NO: 69769 - protein, 348 aa, unidentified
  source 1..348: note = Paenibacillus taihuensis
  REGION 1..348: note = tr|A0A3D9QXE6|A0A3D9QXE6_9BACL S-adenosylmethionine:tRNA ribosyltransferase-isomerase; OS = Paenibacillus taihuensis OX=1156355 GN=queA PE=3 SV=1
MNVNDFDFELPEQLIAQTPLADRTASRLLTLSRATGEAGHHTFPYLAEMLQAGDTLILNDTRVMPARLMGVKSDTGAKVELLLLKQLEGDRWETLAKPGKRLKVGAQLSFGDDGNGEPLLRATVVAEGEMGGREIEFHYEGIFNELLDRLGEMPLPPYIKERLDDRERYQTVYAKHEGSAAAPTAGLHFTKEFLAQLQAKGVQIGYITLHVGLGTFRPMSVDTVEEHTMHSEYYELSEETAAMLRDAKARGGRIVAVGTTSCRTLETVASRFTYEDIRACSGWTDIFIFPGYEFKLVNALLTNFHLPKSTLVMLVSALAGRSAVMNAYKEAIEQEYRFFSFGDAMFIY

SEQ ID NO: 69770 - protein, 342 aa, Paenibacillus terrae
  REGION 1..342: note = tr|G7VTC6|G7VTC6_PAETH S-adenosylmethionine:tRNA ribosyltransferase-isomerase OS=Paenibacillus terrae (strain HPL-003) OX=985665 GN=queA PE=3 SV=1
MNVNDYDFELPETLIAQTPLLDRSASRLLTLSKGSGEVGHHTFSDIVQYLQPGDTLVLNDTRVIPARLFGIKEDTGAKAEVLLLKQLEGDRWEALVKPGKKLKKGAVIVFGDELKAVIEEEGDMGGRVLSFSYEGIFQEILDRLGQMPLPPYIKEQLDDRERYQTVYARHEGSAAAPTAGLHFTEELLDRIREKGVSIAFVTLHVGLGTFRPMSVDTIEEHVMHEEYYSLSQETADVLNETKARGGRVVAVGTTSCRTLETVGNTFGDGLLQASSGWTQIFIYPGYEFRVVDAMITNFHLPKSTLVMLVSALAGRENIMHAYQEAIDREYRFFSFGDAMFIY

SEQ ID NO: 69771 - protein, 342 aa, Paenibacillus terrae
  REGION 1..342: note = tr|A0A4U2PNZ0|A0A4U2PNZ0_9BACL S-adenosylmethionine:tRNA ribosyltransferase-isomerase; OS = Paenibacillus terrae OX=159743 GN=queA PE=3 SV=1
MNVNDYDFELPETLIAQTPLLDRSSSRLLTLSKGSGEVGHHTFSDIVQYLQPGDTLVLNDTRVIPARLFGIKEDTGAKAEVLLLKQLEGDRWEALVKPGKKLKKGAVIVFGDELKAVIEEEGDMGGRVLSFSYEGIFQEILDRLGLMPLPPYIKEQLDDRERYQTVYARHEGSAAAPTAGLHFTEELLDRIREKGVSIAFVTLHVGLGTFRPMSVDTIEEHVMHEEYYSLSQETADVLNETKARGGRVVAVGTTSCRTLETVGNTFGDGLLQASSGWTQIFIYPGYEFRVVDAMITNFHLPKSTLVMLVSALAGKENIMHAYQEAIDREYRFFSFGDAMFIY

SEQ ID NO: 69772 - protein, 342 aa, unidentified
  source 1..342: note = Paenibacillus thermophilus
  REGION 1..342: note = tr|A0A388MT95|A0A388MT95_9BACL S-adenosylmethionine:tRNA ribosyltransferase-isomerase; OS = Paenibacillus thermophilus OX=1181891 GN=queA PE=3 SV=1
MNVDMYDFELPEELIAQTPLPERSASRLLTLNKETGEIRHHVFPDILDYLHPGDTLVLNDTRVIPARLFGVKQDTGAKAEVLLLKNLGEDRWEALVKPGKKLKTGAVIVFGDELRATVESEADMGERVLRFSYKGIFNEILDRLGQMPLPPYIKEKLDDRERYQTVYSKHEGSAAAPTAGLHFTEELLEQVRAKGVNIAFVTLHVGLGTFRPMSVERVEDHVMHEEYYVLPQETADIINQTKAKGGRVIAVGTTSTRTLETVAQACKGGPIVRSSGWTGIFIYPGYEFGLVDAMLTNFHLPKSTLVMLVSALAGRDHIMAAYKEAIAMKYRFFSFGDAMFIY

SEQ ID NO: 69773 - protein, 345 aa, Paenibacillus thiaminolyticus
  REGION 1..345: note = tr|A0A378X8S6|A0A378X8S6_PANTH S-adenosylmethionine:tRNA ribosyltransferase-isomerase; OS = Paenibacillus thiaminolyticus OX=49283 GN=queA PE=3 SV=1
MDVNLFDFHLPERLIAQTPLPDRTASRLLALNRRTGEVEHRTFPDIIEYLKPGDLLVLNDTRVIPARLFGVKPDTGGHVEVLLLKQEQDDIWEVLAKPAKRLKKGATVRFGDELTGTVIEEREMGARLLRFEYAGIFNEILDRLGEMPLPPYIKEQLNDRERYQTVYAQHEGSAAAPTAGLHFTNKILEQIRARGVRIAMITLHVGLGTFRPMSADVVEEHVMHAEYYEMSEQTAALINETRSSGGRIIAVGTTSCRTLETVAGRYGAEPVAACSGWTDIFIYPGYEFRLVDSLLTNFHLPKSTLVMLVSAFAGRDHIMAAYREAIEQDYRFFSFGDAMFIFADD

SEQ ID NO: 69774 - protein, 345 aa, Paenibacillus thiaminolyticus
  REGION 1..345: note = tr|A0A515LZ03|A0A515LZ03_PANTH S-adenosylmethionine:tRNA ribosyltransferase-isomerase; OS = Paenibacillus thiaminolyticus OX=49283 GN=queA PE=3 SV=1
MDVNLFDFHLPERLIAQTPLPDRTASRLLALNRRTGEVEHRTFPDIIEYLKPGDLLVLNDTRVIPARLFGVKPDTGGHVEVLLLKQEQDDIWEVLVKPAKRLKKGATVRFGDELTGTVIEEREMGARLLRFEYAGIFNEILDRLGEMPLPPYIKEQLNDRERYQTVYAQHEGSAAAPTAGLHFTNNILEQIRAKGVRIAMITLHVGLGTFRPMSADVVEEHVMHAEYYEMSEQTAALINETRNSGGRIIAVGTTSCRTLETVAGRYGAEPVAACSGWTDIFIYPGYEFRLVDSLLTNFHLPKSTLVMLVSAFAGRDHIMAAYREAIEQDYRFFSFGDAMFIFADD

SEQ ID NO: 69775 - protein, 353 aa, Paenibacillus tianmuensis
  REGION 1..353: note = tr|A0A1G4QPG2|A0A1G4QPG2_9BACL S-adenosylmethionine:tRNA ribosyltransferase-isomerase; OS = Paenibacillus tianmuensis OX=624147 GN=queA PE=3 SV=1
MQVDFFDYHLPESLIAQTPLPDRTASRLLTLEKRTGEIGHHKFEQLERYLEAGDVLVLNDTRVIPARLFGVKADTGAKAEVLLLKPLEGDRWEALVRPAKRLKTGTVLHFGGGAPSEADRGAEPPLLVATVESEGDMGSRVLRFSYEGIFNELLDRLGHMPLPPYIKEQLPERERYQTVYAKHQGSAAAPTAGLHFTQDYLNRLEQKGIQLAYVTLHVGLGTFRPVGAETVEQHEMHEEYYEVSAETANLVNAVKRKGGRVVAVGTTSARTLETAAGEDGTLQAGSGWTGIFIYPGYRFRIVGALLTNFHLPKSTLLMLISALAGRENVLAAYREAVEREYRFFSFGDAMFIH

SEQ ID NO: 69776 - protein, 342 aa, unidentified
  source 1..342: note = Paenibacillus typhae
  REGION 1..342: note = tr|A0A1G8IC91|A0A1G8IC91_9BACL S-adenosylmethionine:tRNA ribosyltransferase-isomerase; OS = Paenibacillus typhae OX=1174501 GN=queA PE=3 SV=1
MNVEDYDFHLPEELIAQTPLLDRSASRLLMVDKENGQIQHRHFTDILEQFQPGDTLVLNDTRVIPARLFGVKEDTGAKAEVLLLKSLGEDRWEALVKPGKKLKNGAVIVFSDELKAVIEEEADMGGRTLRFIYKGIFQEILDRLGSMPLPPYIKETLDDRERYQTVYARHEGSAAAPTAGLHFTKELLEQIAAKGVNIAYITLHVGLGTFRPMSVDKVEEHVMHAEYYMLSQETADLLNEARSRGGRIIAVGTTSCRTLETVGRQAAGGPLTACSGWTDIFIYPGYQFTVVNALITNFHLPKSTLVMLVSALAGREHILAAYEEAIKEHYRFFSFGDAMFIY

SEQ ID NO: 69777 - protein, 353 aa, unidentified
  source 1..353: note = Paenibacillus tyrfis
  REGION 1..353: note = tr|A0A081NWV3|A0A081NWV3_9BACL S-adenosylmethionine:tRNA ribosyltransferase-isomerase; OS = Paenibacillus tyrfis OX=1501230 GN=queA PE=3 SV=1
MQVDLFDYHLPESLIAQTPLPDRTASRLLTLDKRTGEIGHHTFEQLERYLEAGDVLVLNDTRVIPARLFGVKADTGAKAEVLLLKQLEGDCWEALVRPAKRLKTGTVLHFGGGAPSEAGGDAEPPLLVATVESEGDMGSRALRFSYEGIFNELLDRLGHMPLPPYIKEQLPERERYQTVYAKHQGSAAAPTAGLHFTQDYLNRLEQKGIQLAYVTLHVGLGTFRPVGVETVEQHEMHEEYYEVSAETAELVNAVKRKGGRVVAVGTTSARTLETAAGEDGMLQAGSGWTGIFIYPGYRFRIVDALLTNFHLPKSTLLMLISALAGRENVLAAYREAVEREYRFFSFGDAMFIH

SEQ ID NO: 69778 - protein, 343 aa, Paenibacillus uliginis
  REGION 1..343: note = tr|A0A1X7HLV2|A0A1X7HLV2_9BACL S-adenosylmethionine:tRNA ribosyltransferase-isomerase; OS = Paenibacillus uliginis N3/975 OX=1313296 GN=queA PE=3; SV = 1
MNVDLYDFELPEHLIAQTPLLDRSSSRLLTVSKEDGALSHQVFGDIVNYLRPGDTLVLNDTKVIPARLFGAKEDTGAKAEVLLLKALGEDRWEALVKPGKRLKKGSVITFGEGKLRAIIDEEGELGARVLSFSYDGIFQEILDSLGQMPLPPYIKEKLDDRDRYQTVYAKHEGSAAAPTAGLHFTEELLDCIRKQGVDIAFITLHVGLGTFRPMSVDQVEDHVMHEEYYVLSQETADLLNETKSRGGRVIAVGTTSCRTLETVGNQCQGGLLRESSGWTSIFIYPGYEFKVVDALITNFHLPKSTLVMLVSALAGRDHILEAYKEAVEREYRFFSFGDAMFIY

SEQ ID NO: 69779 - protein, 343 aa, unidentified; identical to SEQ ID NO: 69711
  source 1..343: note = Paenibacillus vortex
  REGION 1..343: note = tr|A0A2R9SX21|A0A2R9SX21_9BACL S-adenosylmethionine:tRNA ribosyltransferase-isomerase; OS = Paenibacillus vortex V453 OX=715225 GN=queA PE=3 SV=1

SEQ ID NO: 69780 - protein, 357 aa, unidentified
  source 1..357: note = Paenibacillus whitsoniae
  REGION 1..357: note = tr|A0A3S0A2W4|A0A3S0A2W4_9BACL S-adenosylmethionine:tRNA ribosyltransferase-isomerase; OS = Paenibacillus whitsoniae OX=2496558 GN=queA PE=3 SV=1
MDVQAFDFELPEALIAQTPLQNRTASRLLTLNKATGETAHRSFENLIDYLEAGDLLVMNDTRVIPARLFGTKKETGAKVELLLLKQLGEDRWEALVKPGKRMQLGAVAEFGKDDAGQPLLTAEVVEVGDMGARVLQFSYTGIFNEILDRLGEMPLPPYIKEQLPEKERYQTVYAKHEGSAAAPTAGLHFTQEYLDRIQAKGVRLAFVTLHVGLGTFRPVSVDKIEDHQMHAEYYILSQETADLINETKRSGKRIIAVGTTSCRTLETAAGISREQGGGKNGEPLAIQPSQGWTSIFIYPGYDFGIVDALLTNFHLPKSTLLMLISALAGQDYIMRAYEEAVREQYRFFSFGDAMLIY

SEQ ID NO: 69781 - protein, 342 aa, Paenibacillus wynnii
  REGION 1..342: note = tr|A0A098M8A4|A0A098M8A4_9BACL S-adenosylmethionine:tRNA ribosyltransferase-isomerase; OS = Paenibacillus wynnii OX=268407 GN=queA PE=3 SV=1
MNVDAYDFYLPEELIAQTPLPDRSSSRLLTVNRQNGDMSHRHFTDIVDELQAGDTLVLNDTRVIPARLFGIKEDTGAKAEVLLLKDLGDDRWEALVKPGKKLKTGAVIVFGEELRAVVEEEEDMGGRTLRFIYKGIFQEILDRLGTMPLPPYIKETLDDRERYQTVYARHEGSAAAPTAGLHFTKELMEQLTAKGVNITYITLHVGLGTFRPMSVERVEEHVMHAEYFSFSQETADILNAAMNRGSRIIAVGTTSCRTLETVGNLCEGGPLKECNGWTDIFIYPGYSFKVVNALITNFHLPKSTLVMLVSALAGRDHILDAYKEAIAEKYRFFSFGDAMFIY

SEQ ID NO: 69782 - protein, 352 aa, unidentified
  source 1..352: note = Paenibacillus xerothermodurans
  REGION 1..352: note = tr|A0A2W1N3X1|A0A2W1N3X1_9BACL S-adenosylmethionine:tRNA ribosyltransferase-isomerase; OS = Paenibacillus xerothermodurans OX=1977292 GN=queA PE=3; SV = 1
MQVDEFDYELPESLIAQTPLKDRTASRLLTLNKTDGTVKHQSFSELIDYLQAGDVLVLNDTRVLPARLFGVKPDTGAKAEVLLLKQLEGDRWEALVRPGKRMKTGAVIVFGGTGDTGAETPLLTATVEEEGELGGRVLRFEYNGIFQELLDRLGHMPLPPYIKEQLPERERYQTVYAKHEGSAAAPTAGLHFTKEYLEEIERKGIRLAYVTLHVGLGTFRPVSVDEVESHHMHEEYYEVGEEAAKLINDAKAGGHRVVAVGTTSARTLETAARESEVPGTIQPCSGWTGIFIYPGYSFLIVDALLTNFHLPKSTLLMLISALAGKDRVLAAYREAVERKYRFFSFGDAMFIY

SEQ ID NO: 69783 - protein, 342 aa, Paenibacillus xylanexedens
  REGION 1..342: note = tr|A0A3N6BZP7|A0A3N6BZP7_9BACL S-adenosylmethionine:tRNA ribosyltransferase-isomerase; OS = Paenibacillus xylanexedens OX=528191 GN=queA PE=3 SV=1
MNVNLYDFELPEQLIAQTPLLDRTASRLLTLNKDSGEINHQTFPDIIDFLNPGDTLILNDTRVLPARLFGTKEDTGAKAEVLLLKNVEGDKWEALVKPGKKLKAGSVIVFGDELKAIIEEEGEMGARTLTFTYDGIFQEILDRLGEMPLPPYIKETLDDRERYQTVYAKHEGSAAAPTAGLHFTDELLDQIRAKGVNVAFITLHVGLGTFRPMSVDVVEDHVMHEEYYSLSQETADLINQTKENGHRVFAVGTTSCRTLETVGSKFENGILQASSGWTSIFIYPGYSFKVIDGMLTNFHLPKSTLVMLVSALAGREHIMQAYEEAIQEKYRFFSFGDAMLIY

SEQ ID NO: 69784 - protein, 342 aa, Paenibacillus xylanexedens
  REGION 1..342: note = tr|A0A1L5LVF1|A0A1L5LVF1_9BACL S-adenosylmethionine:tRNA ribosyltransferase-isomerase; OS = Paenibacillus xylanexedens OX=528191 GN=queA PE=3 SV=1
MNVNLYDFELPEQLIAQTPLLDRTASRLLTLNKDSGEINHQTFPDIIDFLNPGDTLILNDTRVLPARLFGTKEDTGAKAEVLLLKNVEGDKWEALVKPGKKLKAGSVIVFGDELKAIIEEEGEMGARTLTFTYDGIFQEILDRLGEMPLPPYIKETLDDRERYQTVYAKHEGSAAAPTAGLHFTDDLLDQIRAKGVNVAFITLHVGLGTFRPMSVDVVEDHVMHEEYYSLSQETADLINQTKENGHRVFAVGTTSCRTLETVGSKFENGILQASSGWTSIFIYPGYSFKVIDGMLTNFHLPKSTLVMLVSALAGREHIMQAYEEAIQEKYRFFSFGDAMLIY

SEQ ID NO: 69785 - protein, 342 aa, unidentified
  source 1..342: note = Paenibacillus yonginensis
  REGION 1..342: note = tr|A0A1B1N220|A0A1B1N220_9BACL S-adenosylmethionine:tRNA ribosyltransferase-isomerase; OS = Paenibacillus yonginensis OX=1462996 GN=queA PE=3 SV=1
MDVELYDFELPEHLIAQTPLLDRTASRLLTLNKETGHIEHHQFSHILEELKPGDTLVLNDTRVLPARLFGTKEDTGAKAEVLLLKNLSGDKWETLVKPGKKLKKGSVIVFGDELKAVVEEEGEMGGRVLNFQYSGIFNEILDRLGQMPLPPYIKEKLEDKERYQTVYARHEGSAAAPTAGLHFTQELLDQIKAKGVTIAFVTLHVGLGTFRPMSVDRVEDHVMHEEYYILPQETADILNETKARGGRVVAVGTTSARTLETVAGKCEDGKIVKSSGWTGIFIYPGYQFRLVDCLITNFHLPKSTLVMLVSALAGRERILKAYQEAIEREYRFFSFGDAMLIY

SEQ ID NO: 69786 - protein, 338 aa, unidentified
  source 1..338: note = Paeniclostridium sordellii
  REGION 1..338: note = tr|T0E6Z9|T0E6Z9_PAESO S-adenosylmethionine:tRNA ribosyltransferase-isomerase OS=Paeniclostridium sordellii ATCC 9714 OX=1292036 GN=queA PE=3 SV=1
MKTSDFYFDLPEELIAQTPLEDRSNSRLMVLDKETGDIEHKIFKNIIDYLNPGDCLVLNNTRVIPARLIGEKVDTGGKIEFLLLKRTDKDIWQALVKPGKRAKVGTKFSFGNGKLIGEVVGLAEEGSRLVKFYYEGIFEEVLDELGNMPLPPYITERLQERERYQTVYSKHNGSAAAPTAGLHFTEELLEKIKAKGVDIAFVTLHVGLGTFRPVKVDDVLDHEMHSEYYMVEKEAADKINKAKKNGNKVICVGTTSCRTVESASNENGEISEISGWTNIFIYPGYKFKVVDRLITNFHLPESTLIMLVSALSSKDAVLNAYCKAVEENIDSLVLGMLC

SEQ ID NO: 69787 - protein, 341 aa, unidentified
  source 1..341: note = Paeniclostridium sordellii
  REGION 1..341: note = tr|A0A0C7PVU7|A0A0C7PVU7_PAESO S-adenosylmethionine:tRNA ribosyltransferase-isomerase; OS = Paeniclostridium sordellii OX=1505 GN=queA PE=3 SV=1
MKTSDFYFDLPEELIAQTPLEDRSNSRLMVLDKETGDIEHKIFKNIIDYLNPGDCLVLNNTRVIPARLIGEKVDTGGKIEFLLLKRTDKDIWQALVKPGKRAKVGTKFSFGNGKLIGEVVGLAEEGSRLVKFYYEGIFEEVLDELGNMPLPPYITERLQERERYQTVYSKHNGSAAAPTAGLHFTEELLEKIKAKGVDIAFVTLHVGLGTFRPVKVDDVLDHEMHSEYYMVEKEAADKINKAKKNGNKVICVGTTSCRTVESASNENGEISETSGWTNIFIYPGYKFKVVDRLITNFHLPESTLIMLVSALSSKDAVLNAYCKAVEEKYRFFSFGDAMLIK

SEQ ID NO: 69788 - protein, 350 aa, unidentified
  source 1..350: note = Paenimaribius caenipelagi
  REGION 1..350: note = tr|A0A547Q9K7|A0A547Q9K7_9RHOB S-adenosylmethionine:tRNA ribosyltransferase-isomerase; OS = Paenimaribius caenipelagi OX=2489174 GN=queA PE=3 SV=1
MRLSDFDFDLPDDLIATRPARPRSSARMLVSEGGRLTDASVIDLPRWLQPGDRLVLNDTKVIPARLSGLRHREGGSGARIEATLLEPRADGTWQALIKPLKRVRDGEEIVFSHQLSARLEGRGDGAAFLRFNLVGDDFDAALAEAGAMPLPPYIAAKRPADTQDKEDYQTVWARAPGAVAAPTASLHFDDALLAALAQRGVAFTHVTLHVGAGTFLPVKVDDISEHKMHAEWGEVTEAAAAEIMATRAAGGRIIPVGTTALRLIESAATSPGAIKAWRGDTDIFITPGFRFQLADGLMTNFHLPKSTLMMLVSALMGVEEIRALYAHAIESRYRFFSYGDASLLLPAGSR

SEQ ID NO: 69789 - protein, 355 aa, unidentified
  source 1..355: note = Paenirhodobacter enshiensis
  REGION 1..355: note = tr|A0A086Y0K4|A0A086Y0K4_9RHOB S-adenosylmethionine:tRNA ribosyltransferase-isomerase; OS = Paenirhodobacter enshiensis OX=1105367 GN=queA PE=3 SV=1
MKLEDFDFHLPEGLIATRPARPRTAARLLLAEGDRITDRHVYDLVDIFQPGDRLILNNTKVIPARLTGTRTRATGQGEVSAKIEVTLLEPGADGSWSALAKPLRKLKPGETVVFSDTLSAEVTEIAEAQLRLKFNLTGPDFDAALNAAGAMPLPPYIAALRAPDEADKTDYQTVFARHSGAVAAPTASLHFTRELLEAIHAKGVEFTEVTLHVGAGTFLPVKVDDVEKHHMHSEWGEVTEQAAAEMNATRAAGGRIIPVGTTALRLIESAAAEDGTMRPFRGTTDIFIYPGYRFRMTDALMTNFHLPKSTLVMLVSALMGTERIRRIYAHAVETGYRFFSYGDSSLLIPGPRARD

SEQ ID NO: 69790 - protein, 352 aa, unidentified
  source 1..352: note = Paenisporosarcina antarctica
  REGION 1..352: note = tr|A0A4P6ZZ28|A0A4P6ZZ28_9BACL S-adenosylmethionine:tRNA ribosyltransferase-isomerase; OS = Paenisporosarcina antarctica OX=417367 GN=queA PE=3 SV=1
MQVKDFDFQLPEELIAQTPLADRTSSKLLVLDKDSGEISHHTFKDIVNEFQAGDCLVLNDTRVLPARLLGVKEETGANIEILLLKQTEEDVWETLVKPAKRVKIGTMVSFGEGLLRAQCVGEADHGGRLFKFTYEGIFYEILDQLGEMPLPPYIREKLDDQDRYQTVFAKERGSAAAPTAGLHFTDVLLDEIRSNGVEVVFLTLHVGLGTFRPMSVESIDDHEMHSEFYRLSKETVETINRVKESGGRIISVGTTSTRTLETVANKFNGQLKEDSGWTSIFIFPGYEFLCIDGLITNFHLPKSTLVMLVSALTSRDKILHAYEQAVEHQYRFFSFGDAMFIRPSANQKGVRA

SEQ ID NO: 69791 - protein, 346 aa, Paenisporosarcina quisquiliarum
  REGION 1..346: note = tr|A0A1H7YWA5|A0A1H7YWA5_9BACL S-adenosylmethionine:tRNA ribosyltransferase-isomerase; OS = Paenisporosarcina quisquiliarum OX=365346 GN=queA PE=3; SV = 1
MRVEDFDFELPEELIAQTPLLDRTSSKLLIADFEKQSYTHTHFKEILNELNEGDCLVLNDTKVMPARLMGMKEETGANVEVLLLTQIEGDHWETLVKPAKRVKIGTEITFGEGLLKAVCTGIKDHGGRIFRFEYKGVFFEVLDQLGEMPLPPYIHEKLENKDRYQTVYAKEQGSAAAPTAGLHFTDALLDEIRLKGVKIAFVTLHVGLGTFRPVSVDSIDDHEMHSEFYRITQETADVINKVKAIGGKVVAVGTTSTRTLETVATKYDGQLQADSGWTSIFIYPGYEFKCIDGMITNFHLPKSTLVMLVSALTSRDFILGAYKEAVDLKYRFFSFGDAMFIKGRNY

SEQ ID NO: 69792 - protein, 352 aa, Paenisporosarcina sp.
  REGION 1..352: note = tr|A0A2T6KBM0|A0A2T6KBM0_9BACL S-adenosylmethionine:tRNA ribosyltransferase-isomerase; OS = Paenisporosarcina sp. OV554 OX=2135694 GN=queA PE=3 SV=1
MQVEDFDFHLPEELIAQTPLADRTSSKLLVLDKDSGEVSHHTFKDILHEFQAGDCLVLNDTRVLPARLMGIKEETGANIEILLLKQTEEDVWETLVKPSKRVKIGTVVSFGEGLLRAQCVGEANHGGRLFKFTYEGIFYEILDQLGDMPLPPYIREKLDDKDRYQTVFAKERGSAAAPTAGLHFTDELLDDIKSMGVEVVFITLHVGLGTFRPVSVDSIDDHEMHSEFYRLSKETADTINRVKAAGGRVISVGTTSTRTLETVANKFNGQLQEDSDWTSIFIFPGYEFKCIDGLITNFHLPKSTLVMLVSALTSRDKILHAYEQAITHNYRFFSFGDAMFIRPSANQKGVRA

SEQ ID NO: 69793 - protein, 352 aa, Paenisporosarcina sp.
  REGION 1..352: note = tr|S2XWG1|S2XWG1_9BACL S-adenosylmethionine:tRNA ribosyltransferase-isomerase OS=Paenisporosarcina sp. HGH0030 OX=1078085 GN=queA PE=3 SV=1
MQVEDFDFYLPEELIAQTPLADRTSSKLLVLDKDSGEVTHHTFKHIVDEFQAGDCLVLNDTRVLPARLMGVKEETGANIELLLLKQTEEDVWESLVKPAKRVKIGTVVSFGEGLLRAECVGEANHGGRLFKFTYDGIFYEILDQLGDMPLPPYIREKLDDKDRYQTVFAKERGSAAAPTAGLHFTDDLLNEIRAKGVEVVFITLHVGLGTFRPVSVDSIDDHEMHSEFYRLSQETADTINRVKTSGGRIISVGTTSTRTLETVANKFNGQLQEDNGWTSIFIFPGYEFKCIDGLITNFHLPKSTLVMLVSALTSRDKILNAYKQAVNHQYRFFSFGDAMFIRPSANQKGVRA

SEQ ID NO: 69794 - protein, 363 aa, unidentified
  source 1..363: note = Pajaroellobacter abortibovis
  REGION 1..363: note = tr|A0A1L6MWB5|A0A1L6MWB5_9DELT S-adenosylmethionine:tRNA ribosyltransferase-isomerase; OS = Pajaroellobacter abortibovis OX=1882918 GN=queA PE=3; SV = 1
MHVSDFHYDLSEDLIAQTPLPEREKGRLLYIPPARGPFVHSVIRDLTRFIPQGSLVITNDTRVIPARLHGRKKQTGGAVEILLLHPTEKNDFALRGPQEEKWQAIGKASNPIQAGTHVEISPDLLIIVERKEAGGVLEIKIQSQGKMTVTQAIQAYGKTPLPPYIKRPLHPNDPIDYQTIFAKSEGAVAAPTAGLHFTPALVQQLHAHGCTLMSLSLHIGLGTFQPVTADDFNQHPMHAERLHIPLDTITSLLRAKQEKNPIVAIGTTVVRALESAASTILGEKCTSPIEQETRLLIQPGYRFRMADMLFTNFHLPRSTLLALVCAFGGKERVLAAYREAVTQRYRFYSYGDAMLLSRSASSW

SEQ ID NO: 69795 - protein, 351 aa, unidentified
  source 1..351: note = Palleronia abyssalis
  REGION 1..351: note = tr|A0A2R8BUA2|A0A2R8BUA2_9RHOB S-adenosylmethionine:tRNA ribosyltransferase-isomerase; OS = Palleronia abyssalis OX=1501240 GN=queA PE=3 SV=1
MRLSDFDFDLPDDLIAVRPARPRSSARMLVAQGARITDAHAYDLPDWLRPGDRLVLNDTKVIPARLTGRRVRDGGEGAKIEVTLLEPRAEGTWTALLKPLKKVRDGEVVWFSEGFSATVEGRDSGQATLRFNLDGDDFDAALAAAGAMPLPPYIAAKRAADVADREDYQTVWARHQGAVAAPTASLHFDEALLQALADRGVGFTHVTLHVGAGTFLPVKVDDIRDHKMHAEWGEVSQQAAAEIMETKRRGGRVIPVGTTALRLIETAATDHGVIAPWHGNTDIFITPGFSFRIADALMTNFHLPKSTLMMLVSAFLGVDEIRAVYDHAIAQCYRFVSYGDASLLIPEDRPA

SEQ ID NO: 69796 - protein, 361 aa, Palleronia marisminoris
  REGION 1..361: note = tr|A0A1Y5RHF3|A0A1Y5RHF3_9RHOB S-adenosylmethionine:tRNA ribosyltransferase-isomerase; OS = Palleronia marisminoris OX=315423 GN=queA PE=3 SV=1
MRLSDFDFDLPDDLIATRPARPRSSARLLVAEGCRITDAVVSDLPDWLRPGDRLVLNDTKVIPARLSGTRHRDGNAARVEATLLEPKADGTWGALLKPLKKVHDGEEILFSDALSAVVEGRGDGQARLRFNLAGEDFDAALADAGAMPLPPYIAAKRAADAQDREDYQTVWAKHQGAVAAPTASLHFDDALLDALRDRGVAFTHVTLHVGAGTFLPVKVDDIADHKMHAEWGEVGAEAAAEIMETIRAGGRIIPVGTTALRLIETAATAPREIAAWTGETDIFITPGFRFRVADALMTNFHLPKSTLMMLVSAFLGTDEIRRVYGHAIAERYRFFSYGDASLLLPGSEDGDRMRNADTNDA

SEQ ID NO: 69797 - protein, 405 aa, unidentified
  source 1..405: note = Paludibacter jiangxiensis
  REGION 1..405: note = tr|A0A161L7R0|A0A161L7R0_9BACT S-adenosylmethionine:tRNA ribosyltransferase-isomerase; OS = Paludibacter jiangxiensis OX=681398 GN=queA PE=3 SV=1
MTRRPQQIDIDEYNYLLPDERIAKFPLAERDASKLLIYNKGNISESRFRNLVDYLPEKTLLVRNNTRVVQARVLFFKETGARIEVFCLEPHSPSDYAVAFQQREQCEWTCMIGNLKKWKEGALTRRFEVDGTSVTLTAERIDSSGLSHTVKFSWDSPSLTFADILEDVGELPIPPYLNRETEESDKETYQTVYAKIEGSVAAPTAGLHFTDAVLEDLEKHAIRSTEVTLHVGAGTFQPVKSKSIGDHTMHSEMISVTKDTLEELLRNLGSIVAVGTTSVRTLESLYFLGRQLILSPDTFQFQVKQWEPYNSTALYPSTEEALSALIDYMNAHKLQKLNAATQIIIAPGYKFRLISGMITNFHQPKSTLLLLISAFVGADWKKIYNYAFDNEFRFLSYGDSSLLLP

SEQ ID NO: 69798 - protein, 349 aa, unidentified
  source 1..349: note = Paludibacter jiangxiensis
  REGION 1..349: note = tr|A0A170YJ41|A0A170YJ41_9BACT S-adenosylmethionine:tRNA ribosyltransferase-isomerase; OS = Paludibacter jiangxiensis OX=681398 GN=queA PE=3 SV=1
MKLSQFKYKLPDELIALYPTKHRDESRLLVLHRKTGEIEHRTFNDILEYYNDQDVFVFNDTRVFPARLYGTKDNSEAKIEVFLLRELNHDLRMWDVLVDPARKIRVGNKLYFGENNLLVAEVIDNTTSRGRTVRFLYDGSYEEFRKTLYELGETPLPRFIKRDVEPEDETRYQTIFAKNEGAVVAPTAGLHFSRELLKRLEILGIDFAYVTLHAGLCNYREIDVEDLTKHKVDSEQMLVNQDAVGIINHAKDTNRKVCAVGTTVMRALETCACTNGTIKPYDGWTSKFIFPPYDFGVADSMIANFHLPYSPLLMLTCAFGGYDQVMGAYQKAVQEGYRFGIYGDAMLII

SEQ ID NO: 69799 - protein, 349 aa, Paludibacter propionicigenes
  REGION 1..349: note = tr|E4T3U4|E4T3U4_PALPW S-adenosylmethionine:tRNA ribosyltransferase-isomerase OS=Paludibacter propionicigenes (strain DSM 17365 / JCM 13257 / WB4); OX = 694427 GN=queAPE=3 SV=1
MKLSKFKFKLPDELIAQYPSKHRDESRLMVVHRKTGEIEHRAFKDVLEYFNENDLFIFNDTKVFPARLYGNKEKTGAQIEVFLLRELNHEMRLWDVLVEPARKIRIGNKLYFGEDDSIVAEVIDNTTSRGRTLRFLFDGTHDEFKKGLYSLGETPLPRNITREVEPEDADRFQTIFAKNEGAVSAPAAGMHFSRELLKRMEIKGIDSAYVTSHMSLGNFREIDVEDLTKHKMDSEQMSVSVETVKKVNEAQLANRNICAVGVTVMRALETVVGTEGKIKPYDGWTNKFIFPPYDFTVANSMITNFHLPYSTLIMLTAAFGDYDLIMKAYEIAVKEEYRFGVYGDAMLII

SEQ ID NO: 69800 - protein, 410 aa, Paludibacter propionicigenes
  REGION 1..410: note = tr|E4T4Q2|E4T4Q2_PALPW S-adenosylmethionine:tRNA ribosyltransferase-isomerase OS=Paludibacter propionicigenes (strain DSM 17365 / JCM 13257 / WB4); OX = 694427 GN=queAPE=3 SV=1
MNKTTQNAPIYIDEYDYSLPDERIAKYPLAQRDSSKLLLYKNGNIGESQFSKIADFLPENALLVYNNTRVIQARLIFHKNTGARIEVFCLEPLNPADYAQSLGATSECVWKCMVGNLKKWKEGLLSKTIAFDGKTCTFEAELLHTEGNTHSIHFRWDNADIHFADILEKAGELPIPPYLHRKTEESDLTSYQTVYSKIKGSVAAPTAGLHFTPEVFESLKPKLIETEELTLHVGAGTFQPVKTRDIAEHHMHTEIISVKRSTIVHLQQKLGNIIAVGTTSVRTLESLYFIGAMLQQDAVSEIAEKGFHVPQWAPYEGKMEISTYDALQNILDYLDKNKLTTLHADTQIMIKPGYEFHLIDGMVTNFHQPKSTLLLLVSAFVNGNWREIYHYALSNNFRFLSYGDSSLLMK

SEQ ID NO: 69801 - protein, 265 aa, Paludibacter sp.
  REGION 1..265: note = tr|A0A2G6QXN1|A0A2G6QXN1_9BACT S-adenosylmethionine:tRNA ribosyltransferase-isomerase (Fragment) OS=Paludibacter sp. OX=1898105 GN=CR965_01670; PE = 3 SV=1
RELNPETHLWDVLVEPARKIRIGNKLYFGESENIVAEVIDNTTNRGRTLRFLYDGDHETFKRELYELGETPLPLSITRPVEPEDEANFQTIFAKNEGAIAAPAAGLHFSRELFKRMEIKGVESTFLTSHMNLGNFRGIDVEDLTKHKMDSEQIFINPETTETINKAKDDGVNVCAIGASVMRALETVVGTEGKIKSFEGWTNKFIFPEYEFGVAHSMVSNFNFPCSIFYMMASAFGGYKYVKKAYSIAVEEKYRFGVYGDALLIV

SEQ ID NO: 69802 - protein, 420 aa, Paludibacter sp.
  REGION 1..420: note = tr|A0A1M3MDZ8|A0A1M3MDZ8_9BACT S-adenosylmethionine:tRNA ribosyltransferase-isomerase; OS = Paludibacter sp. 47-17 OX=1895899 GN=queA PE=3 SV=1
MSIGEYDYPLPDARIAKYPLQQRDASKLLIFSQGAVREDIFRNAAEYLPPGSLLVYNNTRVIRARMVFRKATGARIEVFCLEPAEPADYALSLGATGRCSWNCMIGNLKKWKGDDLWRELEIDGRRVQLKATRMEQAGNPPAAVQDESRNISSHRILFEWDNNNLCFADLLEQSGELPIPPYLNRPTEERDHESYQTVYSKIKGSVAAPTAGLHFTPEVLNDLRSKNIATEELTLHVGAGTFQPVKTDDVADHEMHAEVISVRRSTVERLLQHPGNIIAVGTTSVRTLESLYYLGVQLHEQGSGTARQEEKSTPNLLRVGQWDPYLRNPTLSTDDALRAILKHLDRNQLSSLQAQTQIMIRPGFRFRIIKGMFTNFHQPKSTLLLLVSAFTGAHWKTIYDYALANDFRFLSYGDSSLLLS

SEQ ID NO: 69803 - protein, 341 aa, unidentified
  source 1..341: note = Paludibacterium purpuratum
  REGION 1..341: note = tr|A0A4R7AZ48|A0A4R7AZ48_9NEIS S-adenosylmethionine:tRNA ribosyltransferase-isomerase; OS = Paludibacterium purpuratum OX=1144873 GN=queA PE=3 SV=1
MHISEFDYFLPERLIAQHPPTERGASRMLHVDGGALDDLMFADFFDQVQSGDVMVFNDTRVIKARLFGEKASGGQVEALIERVLDDHVALAHVRASKSPKPGTQLTFAGRWQAEMVERVGDLFKLRFLADTPLFDILAESGKLPLPPYIDRGADGEDDERYQTVYAREQGAVAAPTAGLHFTEEMLARLADKGVKLCRVTLHVGAGTFQPVRVDDIHEHKMHSEIYEIPETTRVEIAAARAAGRQVLAVGTTSLRALESAAQSGQLVAGRGETDIFITPGYRFRVVDRLLTNFHLPKSTLLMLVSAFAGMDTIRAAYLHAVAHEYRFFSYGDAMLLEKQRI

SEQ ID NO: 69804 - protein, 343 aa, unidentified
  source 1..343: note = Paludifilum halophilum
  REGION 1..343: note = tr|A0A235BCB8|A0A235BCB8_9BACL S-adenosylmethionine:tRNA ribosyltransferase-isomerase; OS = Paludifilum halophilum OX=1642702 GN=queA PE=3 SV=1
MDVSLFQFDLPEELIAQHPAPERSGSRLMVVDRAEEMIAHRRFTDLPEYLRPGDVLVLNDTRVRPSRLIGRKEETGARIEILLLNPLGKDRWETLVKPAKRIKKGTVVDFGEGKLKAVAEEESEVAGGRIFRLEYDVDDLESLLNELGEMPLPPYIREKLEEPERYQTVYSRRLGSAAAPTAGLHFTPELLKQVEQEGVEVASLTLHVGLGTFRPVTAERVEEHRMHAEYYELGGESAQKIRRAKREGRRVIAVGTTSVRTLETVHRRFGEIRPCNGWTDIFIYPGYTYRAVDAILTNFHLPQSTLLMMVSAFATRELILRAYRKAVEERYRFFSFGDAMLIL

SEQ ID NO: 69805 - protein, 138 aa, unidentified
  source 1..138: note = Paludisphaera borealis
  REGION 1..138: note = tr|A0A1U7CYU4|A0A1U7CYU4_9BACT S-adenosylmethionine:tRNA ribosyltransferase-isomerase; OS = Paludisphaera borealis OX=1387353 GN=queA PE=3 SV=1
MHVGVGTFRPIEAETLDAHVMHAEWAEIDAETAAILRDQRARGGRIVAVGTTSARTLETASASGTIQPFQGRTNLFIRPGHGFHAVDVLLTNFHLPRSSLLVLVSSLAGLDLMRRAYAEAVRERYRFFSYGDAMLIIS

SEQ ID NO: 69806 - protein, 341 aa, Panacagrimonas perspica
  REGION 1..341: note = tr|A0A4R7PBH9|A0A4R7PBH9_9GAMM S-adenosylmethionine:tRNA ribosyltransferase-isomerase; OS = Panacagrimonas perspica OX=381431 GN=queA PE=3 SV=1
MKTSDFHYELPPELIAQLPAAERSASRLLHVGSELRDLRMTQLPDLLRAGDLLVFNDTRVLKARLQGRKDTGGRVEILVERVLGEREMRAQLGVSKTPKPGAFLHVDGEAGRLEVLGRDESFFHLRLEGDGTLHELLERAGRLPLPPYIRHDPDADDAERYQTVFAREPGAVAAPTAGLHFDTPLLAALEHRGVRTATLTLHVGAGTFQPVRVDDLSEHRMHAERYRIGQDLATRIADTRAVGGRIVAVGTTSVRALESAAEADGSLRVGEGETRIFITPGYRFRAVDALVTNFHLPESTLLMLVSAFGGIERMRAAYRHAVEQRYRFFSYGDAMLIEPSA

SEQ ID NO: 69807 - protein, 410 aa, unidentified
  source 1..410: note = Panacibacter ginsenosidivorans
  REGION 1..410: note = tr|A0A5B8V6N6|A0A5B8V6N6_9BACT S-adenosylmethionine:tRNA ribosyltransferase-isomerase; OS = Panacibacter ginsenosidivorans OX=1813871; GN = FRZ67_06015 PE=3 SV=1
MHPKRLFIKDFLYKLPEERIAKYPLPQRDESKLLVYKDQSITEDTYYNLEKYIPGNSLLIFNNTKVVEARLLFQKSTGSIIEIFCLEPADIYADITTAMLQKGKVLWKCLIGGAKKWKDEPVIKIIKNDLKEFKFTAKKIEKFTDYFLIAFSWDDDSLSFAEVLHAAGSVPLPPYLNRTAEETDKERYQTIYAKYNGSVAAPTAGLHFTERLFQKLDQKNIQRDFVTLHVGAGTFKPVKAAIMEEHEMHTEFIDVRAALIENILQHIDKTVIAVGTTSLRTIESLYWLGVKTILNPTIYLESLQVYQWDAYDVDAENISAKDALQALLQWMKQHNLSSLITKTQIIIAPGYALKIAKALITNFHQPQSTLLLLVAAIIGDDWRRVYNYALENNFRFLSYGDGCLLYPVAV

SEQ ID NO: 69808 - protein, 349 aa, unidentified
  source 1..349: note = Panacibacter ginsenosidivorans
  REGION 1..349: note = tr|A0A5B8V7F1|A0A5B8V7F1_9BACT S-adenosylmethionine:tRNA ribosyltransferase-isomerase; OS = Panacibacter ginsenosidivorans OX=1813871 GN=queA PE=3; SV = 1
MKLSQFRFDLPLNLIAQNPTKRREDSRMMVVHRKTGNIENKHFKDILEYFDDKDVFVVNNTKVFPARMYGRKEKTGARIEVFLLRELNKPNRLWDVIVDPARKIRVGNKLYFGENDELVAEVIDNTTSRGRTIRFLWDNDDESFKKMLEFLGETPLPKYIKRKPDEEDRERYQTVYAKHEGAVAAPTAGLHFSQELIKRCEIKGIRFAEVTLHTGLGTFRPIEVEDLSKHKMDAEYYKIDEEACRIVNKAKETGHRICSIGTTTMRAMETSFTAQKLLKPSEGWTNIFIHPPYQFNVADSLVTNLHLPKTSLLIMVCAFAGYDLAMEAYKKAIKDKYRFFSYGDAMIVL

SEQ ID NO: 69809 - protein, 349 aa, unidentified
  source 1..349: note = Panacibacter sp.
  REGION 1..349: note = tr|A0A4U3KT71|A0A4U3KT71_9BACT S-adenosylmethionine:tRNA ribosyltransferase-isomerase; OS = Panacibacter sp. 17mud1-8 OX=2575867 GN=queA PE=3 SV=1
MKLSQFKFDLPLNLIAQHPTKRREDSRMMVIDRKTGNIENKHFRDILDYYDDKDVFVVNNTKVFPARMYGRKEKTGAKIEVFLLRELNKPNRLWDVIVDPARKIRVGNKLYFGDNDELVAEVIDNTTSRGRTIRFLWDNDEASFKQMLEFLGETPLPKYIKRKPDEEDKERFQTVYAKHEGAVAAPTAGLHFSRELIKRCEIKGIRFAELTLHTGLGTFRPIEVEDLSKHKMDAEYYRIDEEACKIVNKAKETGHRICSIGTTTMRAMETSFTAQQLLKPSEGWTNIFIHPPYKFNIADSLVTNIHLPKTSLLIMVCAFAGYDLTMEAYKKAIKDKYRFFSYGDAMLII

SEQ ID NO: 69810 - protein, 405 aa, unidentified
  source 1..405: note = Panacibacter sp.
  REGION 1..405: note = tr|A0A4U3KSH9|A0A4U3KSH9_9BACT S-adenosylmethionine:tRNA ribosyltransferase-isomerase; OS = Panacibacter sp. 17mud1-8 OX=2575867 GN=FC093_20560; PE = 3 SV=1
MLPQEILIKEYTYHLPEERIAIHPLPERDRSKLLVYKSGKIDEHTYAQLADCLPADSLLVFNNTKVMAVRLHFTKHTGSTIELFCLEPADDYPDITTAMLQKGKVLWKCLVGGAKKWKEERLSCSKENMILTAKKVKQEKDYFIIEFEWNDTTLSFADVLQLLGTIPLPPYLNRVAEQEDEERYQTIYAKYNGSVAAPTAGLHFTENLFEKLQARGIQKDFVTLHVGAGTFKPVKTESIAEHDMHAEFIEVSTAFIEHLIQYLPKTIVAVGTTSLRTIESLYWMGVKVIGNENILAENISVMQWEAYHLPQDITPADALQSLLNWMKKMQIEKLITKTKILIAPGYQLRIAKALITNFHQPQSTLLLLIAAIVGDDWKRIYAYALANDFRFLSYGDGSLLWKREE

SEQ ID NO: 69811 - protein, 360 aa, Pandoraea apista
  REGION 1..360: note = tr|A0A0G4JGN8|A0A0G4JGN8_9BURK S-adenosylmethionine:tRNA ribosyltransferase-isomerase; OS = Pandoraea apista OX=93218 GN=queA PE=3 SV=1
MYTLSDFDFDLPPELIAQTALAERTASRLLEVDGSVTPPHLYDRHFADLPGLLAPGDLLVFNDTRVIKARLFGQKASGGKIEVLVERVIDNRTALAQIRASKSPAPGTVLRLADAFDVTVGERVEPFYTLHFPEDCYTLLETYGRLPLPPYIEHDADAADETRYQTVYARNPGAVAAPTAGLHFDNALFARLDALGVQRAALTLHVGAGTFQPVRVENIGEHKMHSEWYEITPSLVDAVAATRARGGRVIAVGTTSMRALESAAQAALAAGGAPGTLRAGSAETDIFITPGYRFQLVDRLVTNFHLPKSTLLMLVSAFSGVETIRAAYRHAIEQRYRFFSYGDAMILSREELRDTPRAAA

SEQ ID NO: 69812 - protein, 360 aa, Pandoraea faecigallinarum
  REGION 1..360: note = tr|A0A0H3WXB1|A0A0H3WXB1_9BURK S-adenosylmethionine:tRNA ribosyltransferase-isomerase; OS = Pandoraea faecigallinarum OX=656179 GN=queA PE=3 SV=1
MYTLSDFDFDLPPELIAQTALAERTASRLLEVDGSVTPPHLYDRHFADLPGLLAPGDLLVFNDTRVIKARLFGQKASCGKIEVLVERVVGTRTVLAQIRASKSPAPGTVLRLADAFEVTVGERVEPFYTLHFPADCYTLLETYGRLPLPPYIEHDADAADETRYQTVYARNPGAVAAPTAGLHFDDGLFARLDALGVERAALTLHVGAGTFQPVRVDNIGEHKMHSEWYEITPALVDAIAATRARGGRVIAVGTTSMRALESGAQAALANGGAPGALRAGSAETDIFITPGYRFQIVDRLITNFHLPKSTLLMLVSAFSGMETIRAAYRHAIEQRYRFFSYGDAMILSRVEIRHPPKAAA

SEQ ID NO: 69813 - protein, 360 aa, unidentified
  source 1..360: note = Pandoraea fibrosis
  REGION 1..360: note = tr|A0A0B3TGC6|A0A0B3TGC6_9BURK S-adenosylmethionine:tRNA ribosyltransferase-isomerase; OS = Pandoraea fibrosis OX=1891094 GN=queA PE=3 SV=1
MYTLSDFDFDLPPELIAQTALAERTASRLLEVDGSVTPPHLYDRHFADLPGLLAPGDLLVFNDTRVIKARLFGQKASGGKIEVLVERVIDNRTALAQIRASKSPAPGTVLRLADAFEVTVGERVEPFYTLHFPEDCYTLLETYGRLPLPPYIEHDADAADETRYQTVYARNPGAVAAPTAGLHFDDALFARLDALGVQRAALTLHVGAGTFQPVRVENIGEHKMHSEWYEITPSLVDAVAATRARGGRVIAVGTTSMRALESAAQATLAAGGAPGTLRAGSAETDIFITPGYRFQLVERLVTNFHLPKSTLLMLVSAFSGVETIRAAYRHAIEQRYRFFSYGDAMILSRETLRDAPQAAA

SEQ ID NO: 69814 - protein, 360 aa, unidentified
  source 1..360: note = Pandoraea fibrosis
  REGION 1..360: note = tr|A0A5E4WWJ2|A0A5E4WWJ2_9BURK S-adenosylmethionine:tRNA ribosyltransferase-isomerase; OS = Pandoraea fibrosis OX=1891094 GN=queA PE=3 SV=1
MYTLSDFDFDLPPELIAQTALAERTASRLLEVDGSVTPPHLYDRHFADLPGLLAPGDLLVFNDTRVIKARLFGQKASGGKIEVLVERVIDNRTALAQIRASKSPAPGTVLRLADAFEVTVGERVEPFYTLHFPEDCYTLLETYGRLPLPPYIEHDADAADETRYQTVYARNPGAVAAPTAGLHFDDALFARLDALGVQRAALTLHVGAGTFQPVRVENIGEHKMHSEWYEITPSLVDAVAATRARGGRVIAVGTTSMRALESAAQATLAAGGAPGTLRAGSAETDIFITPGYRFQLVERLVTNFHLPKSTLLMLVSAFSGVETIRAAYRHAIEQRYRFFSYGDAMILSRETLRDTPKAAA

SEQ ID NO: 69815 - protein, 360 aa, Pandoraea norimbergensis
  REGION 1..360: note = tr|A0A0U2IZ70|A0A0U2IZ70_9BURK S-adenosylmethionine:tRNA ribosyltransferase-isomerase; OS = Pandoraea norimbergensis OX=93219 GN=queA PE=3 SV=1
MYTLSDFDFDLPPELIAQTALAERSASRLLEVDGSVTPPHLYDRRFADLPGLLAPGDLLVFNDTRVIKARLFGQKASGGKIEVLVERVIDSTTVLAQIRASKSPGPGTVLRLADAFEVTVGARVDQFYTLHFPSDCYPLLETYGRLPLPPYIAHEADAGDETRYQTVYARNPGAVAAPTAGLHFDDALFERLDALGVQRATLTLHVGAGTFQPVRVENLGEHKMHSEWYEITPELVEAIAATRARGGRVIAVGTTSMRALESAAQATLAAGGEAGTLRAGSTETDIFITPGYRFQLVDRMITNFHLPKSTLLMLVSAFSGMETIRAAYRHAIEQRYRFFSYGDAMILSRVEMHEAPRAAA

SEQ ID NO: 69816 - protein, 360 aa, Pandoraea oxalativorans
  REGION 1..360: note = tr|A0A0E3U6L1|A0A0E3U6L1_9BURK S-adenosylmethionine:tRNA ribosyltransferase-isomerase; OS = Pandoraea oxalativorans OX=573737 GN=queA PE=3 SV=1
MYTLSDFDFDLPPELIAQTALTERSASRLLEVDGSVTPPHLYDRSFVDLPGLLAPGDLLVFNDTRVIKARLFGQKASGGKIEVLVERVIDNRTVLAQIRASKSPAPGTTLRLADAFDVMVGERVEPFYTLHFPEDCYTLLETYGRLPLPPYIEHDADAADETRYQTVYARNPGAVAAPTAGLHFDDALFARLDALGVQRATLTLHVGAGTFQPVRVDNIGEHKMHSEWYEITPALVDAIAATRARGGRVIAVGTTSMRALESGAQATLAAGGAPGTLRAGSAETDIFITPGYRFQLVDRLVTNFHLPKSTLLMLVSAFSGMETIRAAYRHAIEQRYRFFSYGDAMILSRVEIRDTPKAAA

SEQ ID NO: 69817 - protein, 360 aa, Pandoraea pnomenusa
  REGION 1..360: note = tr|A0A5E5AL34|A0A5E5AL34_9BURK S-adenosylmethionine:tRNA ribosyltransferase-isomerase; OS = Pandoraea pnomenusa OX=93220 GN=queA PE=3 SV=1
MYTLSDFDFDLPPELIAQTALAERTASRLLEVDGSVTPPHLYDRRFADLPGLLAPGDLLVFNDTRVIKARLFGQKASGGKIEVLVERVIDSRTALAQIRASKRPGPGTVLRLADAFDVTVGERVEPFYTLHFPDDCYTLLETYGRLPLPPYIEHDADAADETRYQTVYARNPGAVAAPTAGLHFDDSLFARLDALGVQRATLTLHVGAGTFQPVRVENIDEHKMHAEWYEITPELVQAIAATRARGGRVIAVGTTSMRALESAAQAALVVGDAPGTLRAGSAETDIFITPGYRFQVVDRLITNFHLPKSTLLMLVSAFSGMETIRAAYRHAIEQRYRFFSYGDAMILSRVEMHDAPLAAA

SEQ ID NO: 69818 - protein, 360 aa, Pandoraea pnomenusa
  REGION 1..360: note = tr|A0A514AU69|A0A514AU69_9BURK S-adenosylmethionine:tRNA ribosyltransferase-isomerase; OS = Pandoraea pnomenusa OX=93220 GN=queA PE=3 SV=1
MYTLSDFDFDLPPELIAQTALAERTASRLLEVDGSVTPPHLYDRRFADLPGLLAPGDLLVFNDTRVIKARLFGQKASGGKIEVLVERVIDSRTALAQIRASKRPGPGTVLRLADAFDVTVGERVEPFYTLHFPDDCYTLLETYGRLPLPPYIEHDADAADETRYQTVYARNPGAVAAPTAGLHFDDSLFARLDALGVQRATLTLHVGAGTFQPVRVENIDEHKMHAEWYEITPELVQAIAATRARGGRVIAVGTTSMRALESAAQAALVAGDAPGTLRAGSAETDIFITPGYRFQVVDRLITNFHLPKSTLLMLVSAFSGMETIRAAYRHAIEQRYRFFSYGDAMILSRVEMHDAPLAAA

SEQ ID NO: 69819 - protein, 360 aa, Pandoraea pulmonicola
  REGION 1..360: note = tr|A0A378Z2P6|A0A378Z2P6_9BURK S-adenosylmethionine:tRNA ribosyltransferase-isomerase; OS = Pandoraea pulmonicola OX=93221 GN=queA PE=3 SV=1
MYTLSDFDFDLPPELIAQTALAERTASRLLEVDGRVTPPHLYDRHFADLPGLLAPGDLLVFNDTRVIKARLFGQKASGGKIEVLIERVIDNRTALAQIRASKSPAPGTVLRLADAFEVTVGERVEPFYTLHFPDDCYTLLETYGRLPLPPYITHDADAGDETRYQTVYARHPGAVAAPTAGLHFDDALFARLDALGVERATLTLHVGAGTFQPVRVENIGEHKMHAEWYEITPSLVNAIAAARARGGRVIAVGTTSMRALESGAQAALAAGAAPGSLRAGSAETDIFITPGYRFQLVDRLITNFHLPKSTLLMLVSAFSGMETIRAAYRHAIEQRYRFFSYGDAMILSREAVRHATKTAA

SEQ ID NO: 69820 - protein, 360 aa, Pandoraea sp.
  REGION 1..360: note = tr|A0A1Q4CIJ1|A0A1Q4CIJ1_9BURK S-adenosylmethionine:tRNA ribosyltransferase-isomerase; OS = Pandoraea sp. 64-18 OX=1895806 GN=queA PE=3 SV=1
MYTLSDFDFDLPPELIAQTALTERTASRLLEVDGSVTPPHLYDRRFADLPSLLAPGDLLVFNDTRVIKARLFGQKASGGKIEVLVERVIDNRTVLAQIRASKSPTPGTVLHLADAFDVTVGERVEPFYTLHFPDDCYTLLETYGRLPLPPYIAHDADAADETRYQTVYARNPGAVAAPTAGLHFDDSLFAHLDALGVHRATLTLHVGAGTFQPVRVENIGEHKMHSEWYEITPSLVDAIAATRARGGRVVAVGTTSMRALESAAQATLAAGGAPGTLRAGSAETDIFITPGYHFQLVDRLITNFHLPKSTLLMLVSAFSGMETIRAAYRHAIEQRYRFFSYGDAMILSRVAPHDAPKAAA

SEQ ID NO: 69821 - protein, 361 aa, Pandoraea sp.
  REGION 1..361: note = tr|A0A522ERC3|A0A522ERC3_9BURK S-adenosylmethionine:tRNA ribosyltransferase-isomerase; OS = Pandoraea sp. OX=1883445 GN=queA PE=3 SV=1
MYTLSDFDFDLPGELIAQSALPQRSASRLLEVDACSDTPAPVLHDRNFSALPECLMPGDLLVFNDTKVLKARFFGQKASGGKVEVLIERVLDERTALAQIRASKSPGAGSTLRLADAFDVTVGERVEPFFTLHFPQDCYTLIEAHGRLPLPPYITHDATDYDETRYQTVFARHPGAVAAPTAALHFDDALLDQLDQRGIRRATLTLHVGAGTFQPVRVENIAEHRMHTEWYRLTQELLDAVAATRAAGGRVIAVGTTSMRALESAAQAALAAGQPPGTLQPGSAETDIFITPGYRFQVVDRLITNFHLPKSTLLMLVSAFSGIETIRAAYRHAIEQRYRFFSYGDAMLLTRQQSAAADSLQ

SEQ ID NO: 69822 - protein, 360 aa, Pandoraea sputorum
  REGION 1..360: note = tr|A0A5E5AUU7|A0A5E5AUU7_9BURK S-adenosylmethionine:tRNA ribosyltransferase-isomerase; OS = Pandoraea sputorum OX=93222 GN=queA PE=3 SV=1
MYTLSDFDFDLPPELIAQTALTERTASRLLEVDGSVTPPHLYDRRFADLPGLLAPGDLLVFNDTRVIKARLFGQKASGGKIEVLVERVIDNRTVLAQIRASKSPAPGTVLHLADAFDVTVGERVEPFYTLHFPEDCYTLLETYGRLPLPPYIEHDADAADETRYQTVYARNPGAVAAPTAGLHFDDALFARLDALGVQRATLTLHVGAGTFQPVRVDNIGEHKMHSEWYEITPALVDAIAATRARGGRVIAVGTTSMRALESGAQATLAAGGAPGTLRAGSAETDIFITPGYRFQLVDRLVTNFHLPKSTLLMLVSAFSGMETIRAAYRHAIEQRYRFFSYGDAMILSRVEIQDTPKAAA

SEQ ID NO: 69823 - protein, 357 aa, Pandoraea sputorum
  REGION 1..357: note = tr|A0A5E5BJR9|A0A5E5BJR9_9BURK S-adenosylmethionine:tRNA ribosyltransferase-isomerase; OS = Pandoraea sputorum OX=93222 GN=PSP31121_05588 PE=3 SV=1
MKTKLFDFDVTSRLMPDTPLPLRGKSRDDGRLVVLDRAADHIAHTHFPAILDYLHAGDLLVFNDSYVMPNALIFRAGQQQFPIIVHGSEPGGVYVIHVQSASCLPPGGLLTWVLNPALSAQLLSQQADGLWRARVSSAELLLGALEQYGSRQEETDNDGICTAPELWQRTPEHFRSVRAKTPGSLDIPSAGLHFSLDLLDRIRRKGVEIADITLHVGVSETFAVRHISADQVENHKVKAEYYNVGPEAAAQIGRAWREKRRIIAVGTTVMRTLESLEFDPRHGAVRAQSGWTDLYIYPGFNFRFVGALLTNLHQPRSSHIVLTSAFAGTDLTLRSYNEILNIGSYEFDMYGDSMLIV

SEQ ID NO: 69824 - protein, 355 aa, unidentified
  source 1..355: note = Pandoraea terrae
  REGION 1..355: note = tr|A0A5E4ZCW1|A0A5E4ZCW1_9BURK S-adenosylmethionine:tRNA ribosyltransferase-isomerase; OS = Pandoraea terrae OX=1537710 GN=queA PE=3 SV=1
MYTLSDFDFELPPELIAQTALADRTASRLLEVDGSTAPPCLTDRQFADLPACLAPGDLLVFNDTKVIKARLFGVKASGGKIEVLIERVLDNRTALAQIRASKSPPSGTTLRLADAFDVTVGERVEPFYTLHFPSDCYDLFETYGRLPLPPYITHDADAGDERRYQTVYARNPGAVAAPTAGLHFDDALFARLDAMGVGRATLTLHVGAGTFQPVRVDNIAEHKMHSEWYEITPALIDAVAAARAAGGRVIAVGTTSMRALESAAQAALAAGATPGTLHAGSRETDIFITPGYRFQIVDRLVTNFHLPKSTLLMLVSAFSGVDTIRAAYRHAIDAQYRFFSYGDAMLLSRVEPAAA

SEQ ID NO: 69825 - protein, 361 aa, Pandoraea thiooxydans
  REGION 1..361: note = tr|A0A0G3EVI7|A0A0G3EVI7_9BURK S-adenosylmethionine:tRNA ribosyltransferase-isomerase; OS = Pandoraea thiooxydans OX=445709 GN=queA PE=3 SV=1
MYTLSDFDFDLPGELIAQSALPQRSASRLLEVDACSDTPAPVLHDRTFSALPECLTPGDLLVFNDTKVLKARFFGQKASGGKVEVLIERVLDERTALAQIRASKSPGPGSTLRLADAFDVTVGERVEPFFTLHFPQDCYALIEAHGRLPLPPYITHEATDYDETRYQTVFARHPGAVAAPTAALHFDDALLDQLDQRGIRRATLTLHVGAGTFQPVRVENIAEHQMHTEWYRLSPELLEAVTATRAAGGRVIAVGTTSMRALESAARAALAAGLPPGTLQPGSAETDIFITPGYRFQVVDRLITNFHLPKSTLMMLVSAFSGIETIRAAYRHAIEQRYRFFSYGDAMLLTRQQSAAADSLQ

SEQ ID NO: 69826 - protein, 360 aa, Pandoraea vervacti
  REGION 1..360: note = tr|A0A0C5KAH7|A0A0C5KAH7_9BURK S-adenosylmethionine:tRNA ribosyltransferase-isomerase; OS = Pandoraea vervacti OX=656178 GN=queA PE=3 SV=1
MYTLSDFDFDLPPELIAQTALAQRTASRLLEVDGSVTPPHLYDRHFADLPGLLAPGDLLVFNDTRVIKARLFGQKASGGKIEVLVERVIDARTALAQIRASKSPAPGTVLRLADAFEVTVGERVEPFYTLHFPDDCYTLLEKYGRLPLPPYIEHDADAADETRYQTVYARNPGAVAAPTAGLHFDNDLFARLDTLEVQRATLTLHVGAGTFQPVRVDNIGEHKMHSEWYEITPALVDAIAATRARGGRVIAVGTTSMRALESGAQAVLAAGGAPGTLRAGSAETDIFITPGYRFQVVDRLITNFHLPKSTLLMLVSAFSGMETIRAAYRHAIEQRYRFFSYGDAMILSRVEMQDTPKAAA

SEQ ID NO: 69827 - protein, 372 aa, unidentified
  source 1..372: note = Pannonibacter indicus
  REGION 1..372: note = tr|A0A0K6HXX8|A0A0K6HXX8_9RHOB S-adenosylmethionine:tRNA ribosyltransferase-isomerase; OS = Pannonibacter indicus OX=466044 GN=queA PE=3 SV=1
MRVDDFDFDLPPERIALRPARPRDAARMLLVRPQGGPVLEDRGVLDLPALLQPGDALVFNNTKVIPAQLEGTRQRGDAIATIGATLHLRAGADRWWAFVRPAKKLVPGDRVRFGSQSEGMACMAGVLDAAVAEKKDTGEVLLVFDLSGPDLDAAIHATGHIPLPPYIAAKRGEDAQDREDYQTIYAEKEGAVAAPTAGLHFTPRLFEMLDARGIERHTVTLHVGAGTFLPVKADDTDEHEMHAEWGEISGETAAALKAVRARGNKVVAVGTTSLRILESAAQGSGGLAAFRGETRIFITPGYRFRAIDALMTNFHLPRSTLFMLVSALSGLETMRAAYAHAIAGGYRFYSYGDSSLLFPAAGSIAAQDEIDR

SEQ ID NO: 69828 - protein, 372 aa, Pannonibacter phragmitetus
  REGION 1..372: note = tr|A0A0U3PMU2|A0A0U3PMU2_9RHOB S-adenosylmethionine:tRNA ribosyltransferase-isomerase; OS = Pannonibacter phragmitetus OX=121719 GN=queA PE=3 SV=1
MRVDDFDFDLPPERIALRPARPRDMARMLLVRPQGGPVLEDRGVLDLPALLQPGDALVFNNTKVIPAQLEGTRQRGEAIATIGATLHLRAGADRWWAFVRPAKKLVPGDRVRFGSQSEGMACMAGVLDATVAEKKDTGEVLFVFDLSGPDLDAAIHATGHIPLPPYIAAKRGEDAQDREDYQTIYAEKEGAVAAPTAGLHFTPRLFEMLDARGIERHTVTLHVGAGTFLPVKADDTDAHEMHAEWGEISGETAAALKTVRARGNKVVAVGTTSLRILESAAQGPGGLAAFRGETRIFITPGYRFRAIDALMTNFHLPRSTLFMLVSALSGLDTMRAAYAHAIADDYRFYSYGDSSLLFPAAGSIAAQDEIDR

SEQ ID NO: 69829 - protein, 400 aa, Pannonibacter phragmitetus
  REGION 1..400: note = tr|A0A378ZVB9|A0A378ZVB9_9RHOB S-adenosylmethionine:tRNA ribosyltransferase-isomerase; OS = Pannonibacter phragmitetus OX=121719 GN=queA PE=3 SV=1
MLRGRGGSDLPRPIACALAPTPLLKNRPMRVDDFDFDLPPERIALRPARPRDAARMLLVRPQGGPVLEDRGVLDLPALLQPGDALVFNNTKVIPAQLEGTRQRGEAIATIGATLHLRAGAGRWWAFVRPAKKLVPGDRVRFGAASEGVACMASVLDATVAEKKDTGEVLFVFDLSGPDLDAAIHATGHIPLPPYIAAKRGEDAQDREDYQTIYAEKEGAVAAPTAGLHFTPRLFEMLDARGIERHTVTLHVGAGTFLPVKADDTDEHEMHAEWGEISGETAAALKAVRARGNKVVAVGTTSLRILESAAQGPGGLAAFRGETRIFITPGYRFRAIDALMTNFHLPRSTLFMLVSALSGLETMRAAYAHAIADGYRFYSYGDSSLLFPAAGSIAAHDETDR

SEQ ID NO: 69830 - protein, 356 aa, unidentified
  source 1..356: note = Pantoea alhagi
  REGION 1..356: note = tr|A0A1W6B1D0|A0A1W6B1D0_9GAMM S-adenosylmethionine:tRNA ribosyltransferase-isomerase; OS = Pantoea alhagi OX=1891675 GN=queA PE=3 SV=1
MRVADFSFELPESLIAHYPQPQRSGCRLLSLNGPDGALSHGVFTDVLDKLNPGDLLVFNNTRVIPARVYGRKASGGKIEMLVERMLDDKRVLAHVRASKAPKPGAELLFGDDESVRATMIARHDALFEIQFDDERDVLDILNAIGHMPLPPYIDRPDEEADRELYQTVYSQKPGAVAAPTAGLHFDEPLLAALREKGVEMAFVTLHVGAGTFQPVRVDSIEDHIMHSEYAEVPQEVVDAVLACKARGNRVVAVGTTSVRSLESAAQAAQDALIAPFFDDTQIFIYPGYRYQIIDALITNFHLPESTLIMLVSAFAGYRHTMNAYREAVAEQYRFFSYGDAMFITRNPQAPEEKVGG

SEQ ID NO: 69831 - protein, 356 aa, Pantoea allii
  REGION 1..356: note = tr|A0A2V2BHV6|A0A2V2BHV6_9GAMM S-adenosylmethionine:tRNA ribosyltransferase-isomerase; OS = Pantoea allii OX=574096 GN=queA PE=3 SV=1
MRVADFAFELPESLIAHYPQAQRSGCRLLSLDGTSGALSHGVFTDVLDKLQPGDLLVFNNTRVIPARVFGRKASGGKIEMLVERMLDDKRVLAHVRASKAPKPGAALLLGDDESVNATMVARHDALFEIAFEDDRAVLDILNSVGHMPLPPYIDRPDEEADRELYQTVYSARPGAVAAPTAGLHFDEPLIQALKDKGVEMAFVTLHVGAGTFQPVRVETIEEHHMHAEYAEVPQEVVDAVLACKARGNKVVAVGTTSVRSLESAAKASQDALIAPFFDDTQIFIYPGYEYQVIDALITNFHLPESTLIMLVSAFAGYQHTMAAYRAAVAEEYRFFSYGDAMFISKNPQAPREKVGA

SEQ ID NO: 69832 - protein, 356 aa, Pantoea allii
  REGION 1..356: note = tr|A0A4S3BKK6|A0A4S3BKK6_9GAMM S-adenosylmethionine:tRNA ribosyltransferase-isomerase; OS = Pantoea allii OX=574096 GN=queA PE=3 SV=1
MRVADFAFELPESLIAHYPQAQRSGCRLLSLDGPSGAVSHGVFTDVLDKLNPGDLLVFNNTRVIPARVFGRKASGGKIEMLVERMLDDKRVLAHVRASKAPKPGAELLLGEDESVKATMVARHDALFEIVFDDERAVLDILNSVGHMPLPPYIDRPDEEADRELYQTVYSARPGAVAAPTAGLHFDEPLLQALKEKGIEMAFVTLHVGAGTFQPVRVETIEEHHMHAEYAEVPQEVVDAVLACKARGNKVVAVGTTSVRSLESAAKASHDALIAPFFDDTQIFIYPGYEYQVIDALITNFHLPESTLIMLVSAFAGYQHTMAAYRAAVAEQYRFFSYGDAMFISKNPQAPLEKVGD

SEQ ID NO: 69833 - protein, 356 aa, unidentified
  source 1..356: note = Pantoea ananas
  REGION 1..356: note = tr|A0A2S8A0B6|A0A2S8A0B6_PANAN S-adenosylmethionine:tRNA ribosyltransferase-isomerase; OS = Pantoea ananas OX=553 GN=queA PE=3 SV=1
MRVADFAFELPESLIAHYPQAQRSGCRLLSLDGPSGALSHGVFTDVLDKLNPGDLLVFNNTRVIPARVFGRKASGGKIEMLVERMLDDKRVLAHVRASKAPKPGAELLLGEDESVKATMVARHDALFEIVFDDERAVLDILNSVGHMPLPPYIDRPDEEADRELYQTVYSARPGAVAAPTAGLHFDEPLLQALKEKGVEMAFVTLHVGAGTFQPVRVETIEEHHMHAEYAEVPQEVVDAVLACKARGNKVVAVGTTSVRSLESAAKASQDALIAPFFDDTQIFIYPGYEYQVIDALITNFHLPESTLIMLVSAFAGYQHTMAAYHAAVAEQYRFFSYGDAMFISKNPQAPLEKVGD

SEQ ID NO: 69834 - protein, 356 aa, unidentified
  source 1..356: note = Pantoea ananas
  REGION 1..356: note = tr|A0A2V2Y9A4|A0A2V2Y9A4_PANAN S-adenosylmethionine:tRNA ribosyltransferase-isomerase; OS = Pantoea ananas OX=553 GN=queA PE=3 SV=1
MRVADFAFELPESLIAHYPQAQRSGCRLLSLDGPSGALAHGVFTDVLDKLQPGDLLVFNNTRVIPARVFGRKASGGKIEMLVERMLDDKRVLAHVRASKAPKPGAELLLGDDESVKATMVARHDALFEIAFEDDRAVLDILNSVGHMPLPPYIDRPDEEADRELYQTVYSARPGAVAAPTAGLHFDEPLIQALKDKGVEMAFVTLHVGAGTFQPVRVETIEEHHMHAEYAEVPQEVVDAVLACKARGNKVVAVGTTSVRSLESAAKASQDALIAPFFDDTQIFIYPGYEYQVIDALITNFHLPESTLIMLVSAFAGYQHTMAAYRAAVAEEYRFFSYGDAMFISKNPQAPLEKVGA

SEQ ID NO: 69835 - protein, 356 aa, Pantoea ananatis; identical to SEQ ID NO: 69834
  REGION 1..356: note = tr|A0A0H3KXJ1|A0A0H3KXJ1_PANAA S-adenosylmethionine:tRNA ribosyltransferase-isomerase; OS = Pantoea ananatis (strain AJ13355) OX=932677 GN=queA; PE = 3 SV=1

SEQ ID NO: 69836 - protein, 367 aa, Pantoea ananatis
  REGION 1..367: note = tr|D4GL83|D4GL83_PANAM S-adenosylmethionine:tRNA ribosyltransferase-isomerase OS=Pantoea ananatis (strain LMG 20103) OX=706191 GN=queA PE=3 SV=1
MPPVFLSKKSFMRVADFAFELPESLIAHYPQAQRSGCRLLSLDGPSGALAHGVFTDVLDKLQPGDLLVFNNTRVIPARVFGRKASGGKIEMLVERMLDDKRVLAHVRASKAPKPGAELLLGDDESVKATMVARHDALFEIAFEDDRAVLDILNSVGHMPLPPYIDRPDEEADRELYQTVYSARPGAVAAPTAGLHFDEPLIQALKDKGVEMAFVTLHVGAGTFQPVRVETIEEHHMHAEYAEVPQEVVDAVLACKARGNKVVAVGTTSVRSLESAAKASQDALIAPFFDDTQIFIYPGYEYQVIDALITNFHLPESTLIMLVSAFAGYQHTMAAYRAAVAEEYRFFSYGDAMFISKNPQAPLEKVGA

SEQ ID NO: 69837 - protein, 356 aa, Pantoea anthophila
  REGION 1..356: note = tr|A0A506P6P1|A0A506P6P1_9GAMM S-adenosylmethionine:tRNA ribosyltransferase-isomerase; OS = Pantoea anthophila OX=470931 GN=queA PE=3 SV=1
MRVADFAFELPESLIAHYPQAQRSGCRLLSLDGPSGALTHGVFTDVLDKLNPGDLLVFNNTRVIPARVFGRKASGGKIEMLVERMLDDKRVLAHVRASKAPKPGAALLLGEDESVKATMVARHDALFEIEFDDERAVLDILNSVGHMPLPPYIDRPDEEADRELYQTVYSARPGAVAAPTAGLHFDEPLLQALKEKGIEMAFVTLHVGAGTFQPVRVETIEEHHMHAEYAEVPQEVVDAVLACKARGNKVVAVGTTSVRSLESAAKASQDALIAPFFDDTQIFIYPGYEYQVIDALITNFHLPESTLIMLVSAFAGYQHTMAAYRAAVAEQYRFFSYGDAMFISKNPQAPLEKVGD

SEQ ID NO: 69838 - protein, 357 aa, unidentified
  source 1..357: note = Pantoea coffeiphila
  REGION 1..357: note = tr|A0A2S9IID9|A0A2S9IID9_9GAMM S-adenosylmethionine:tRNA ribosyltransferase-isomerase; OS = Pantoea coffeiphila OX=1465635 GN=queA PE=3 SV=1
MRVADFSFELPESLIAHYPQAQRSGCRLLSLNGEDGALTHGVFTDLLDKLNPGDLLVFNNTRVIPARIFGRKASGGKIEVLIERMLDDKRVLAHVRSSKSPKPGSALLLGEDESVQATMTARHDTLFEIEFNDPRAVLDILNDIGHMPLPPYIDRPDEEVDRELYQTVYSQKPGAVAAPTAGLHFDEPLLAALREKGIETAFVTLHVGAGTFQPVRVDSIEDHIMHAEYAEVPQDVVDAVLACKARGNRVIAVGTTSVRSLESAAQAAGDALIAPFFGDTKIFIYPGYHYQVIDALVTNFHLPESTLIMLVSAFAGYKNTMHAYQQAVAQEYRFFSYGDAMFITRNSQACHEIPGQG

SEQ ID NO: 69839 - protein, 356 aa, Pantoea conspicua
  REGION 1..356: note = tr|A0A1X1BYG5|A0A1X1BYG5_9GAMM S-adenosylmethionine:tRNA ribosyltransferase-isomerase; OS = Pantoea conspicua OX=472705 GN=queA PE=3 SV=1
MRVADFAFELPESLIAHYPQAQRSGCRLLSLDGPSGALTHGVFTDVLDKLNPGDLLVFNNTRVIPARVFGRKASGGKIEMLVERMLDDKRVLAHVRASKAPKPGAALLLGEDESVKATMVARHDALFEIVFDDERAVLDILNSVGHMPLPPYIVRPDEEADRELYQTVYSARPGAVAAPTAGLHFDEPLLQALKEKGVEMAFVTLHVGAGTFQPVRVDNIEEHHMHAEYAEVPQEVVDAVLACKARGNKVVAVGTTSVRSLESAAKASQDALIAPFFDDTQIFIYPGYHYQVIDALITNFHLPESTLIMLVSAFAGYQHTMAAYRAAVAEQYRFFSYGDAMFISKNPQAPMEKVGD

SEQ ID NO: 69840 - protein, 356 aa, Pantoea cypripedii
  REGION 1..356: note = tr|A0A1X1ES26|A0A1X1ES26_PANCY S-adenosylmethionine:tRNA ribosyltransferase-isomerase; OS = Pantoea cypripedii OX=55209 GN=queA PE=3 SV=1
MRVADFAFELPESLIAHYPQAQRSGCRLLSLDGPSGALSHGVFTDVLDKLNPGDLLVFNNTRVIPARVFGRKASGGKIEMLVERMLDDKRVLAHVRASKAPKPGTELLLGDDESVKATMVARHDALFEIVFEDDRAVLDILNSVGHMPLPPYIDRPDEDADRELYQTVYSARPGAVAAPTAGLHFDEPLLEALKAKGVEMAFVTLHVGAGTFQPVRVETIEDHTMHAEYAEVPQDVVDAVLACKARGNKVVAVGTTSVRSLESAAQASKDALIAPFFDDTQIFIYPGYQYQVIDALITNFHLPESTLIMLVSAFAGYQHTMAAYHAAVAEQYRFFSYGDAMFITRNMNAPDESVGI

SEQ ID NO: 69841 - protein, 356 aa, Pantoea deleyi
  REGION 1..356: note = tr|A0A506Q3E7|A0A506Q3E7_9GAMM S-adenosylmethionine:tRNA ribosyltransferase-isomerase; OS = Pantoea deleyi OX=470932 GN=queA PE=3 SV=1
MRVADFAFELPESLIAHYPQAQRSGCRLLSLEGPSGNLSHGVFTDVLDKLNPGDLLVFNNTRVIPARVFGRKASGGKIEMLVERMLDDKRVLAHVRASKAPKPGAELLLGEDESVKATMVARHDALFEIAFDDDRAVLDILSSVGHMPLPPYIDRPDEEADRELYQTVYSARPGAVAAPTAGLHFDEPLLQALKEKGVEMAFVTLHVGAGTFQPVRVETIEEHHMHAEYAEVPQEVVDAVLACKARGNRVVAVGTTSVRSLESAAKASQDALIAPFFDDTQIFIYPGYEYQVIDALITNFHLPESTLIMLVSAFAGYQHTMAAYRAAVAEQYRFFSYGDAMFISKNPQAPLEKVGD

SEQ ID NO: 69842 - protein, 356 aa, Pantoea dispersa
  REGION 1..356: note = tr|A0A518XAF6|A0A518XAF6_9GAMM S-adenosylmethionine:tRNA ribosyltransferase-isomerase; OS = Pantoea dispersa OX=59814 GN=queA PE=3 SV=1
MRVADFAFELPESLIAHYPQAQRSGCRLLSLDGPSGALSHGVFTDVLDKLNPGDLLVFNNTRVIPARVYGRKASGGKIEMLVERMLDDKRVLAHVRASKAPKPGTELLLGDDESVRATMVARHDALFEIAFADDRAVLDILNSVGHMPLPPYIDRPDEEADRELYQTVYSARPGAVAAPTAGLHFDEPLLAALKAKGIEMAFVTLHVGAGTFQPVRVENINDHIMHSEYAEVPQDVVDAVLACKARGNKVVAVGTTSVRSLESAAQACQDGLIAPFFDDTQIFIYPGYHYQVIDALITNFHLPESTLIMLVSAFAGYKHTMAAYQSAVAEQYRFFSYGDAMYITRNPQAPDETVGA

SEQ ID NO: 69843 - protein, 356 aa, Pantoea dispersa
  REGION 1..356: note = tr|A0A437T8G3|A0A437T8G3_9GAMM S-adenosylmethionine:tRNA ribosyltransferase-isomerase; OS = Pantoea dispersa OX=59814 GN=queA PE=3 SV=1
MRVADFAFELPESLIAHYPQAQRSGCRLLSLDGPSGALNHGVFTDVLDKLNPGDLLVFNNTRVIPARVYGRKASGGKIEMLVERMLDDKRVLAHVRASKAPKPGAELLLGDDESVKATMLARHDALFEIEFADDRAVLDILNSVGHMPLPPYIDRPDEEADRELYQTVYSARPGAVAAPTAGLHFDEPLLAALKAKGVEMAFVTLHVGAGTFQPVRVENINDHIMHSEYAEVPQDVVDAVLACKARGNKVVAVGTTSVRSLESAAQACQDGLIAPFFDDTQIFIYPGYHYQVIDALITNFHLPESTLIMLVSAFAGYQHTMAAYQSAVAEQYRFFSYGDAMYITRNPQAPDEIVGG

SEQ ID NO: 69844 - protein, 356 aa, Pantoea eucalypti; identical to SEQ ID NO: 69833
  REGION 1..356: note = tr|A0A506PSN3|A0A506PSN3_9GAMM S-adenosylmethionine:tRNA ribosyltransferase-isomerase; OS = Pantoea eucalypti OX=470933 GN=queA PE=3 SV=1

SEQ ID NO: 69845 - protein, 356 aa, unidentified
  source 1..356: note = Pantoea latae
  REGION 1..356: note = tr|A0A1V9DI44|A0A1V9DI44_9GAMM S-adenosylmethionine:tRNA ribosyltransferase-isomerase; OS = Pantoea latae OX=1964541 GN=queA PE=3 SV=1
MRVADFTFELPESLIAHYPQAQRSGCRLLSLDGPSGQLTHGVFTDVLEKLNPGDLLVFNNTRVIPARVFGRKASGGKIEMLVERMLDDKRVLAHVRASKAPKPGAQLLLGDDESVKATMVARHDTLFEIAFEDDRAVLDILNSVGHMPLPPYIDRPDEEADRELYQTVYSARPGAVAAPTAGLHFDEPLLAALRDKGVEMAFVTLHVGAGTFQPVRVDSIEEHVMHSEYAEVPQEVVDAVLACKARGNKVVAVGTTSVRSLESAAQASKEALIAPFFDDTQIFIYPGYQYQVIDALITNFHLPESTLIMLVSAFAGYQHTMAAYQAAVAEAYRFFSYGDAMFITKNPQAPTEKVGG

SEQ ID NO: 69846 - protein, 356 aa, unidentified
  source 1..356: note = Pantoea rodasii
  REGION 1..356: note = tr|A0A0B1R796|A0A0B1R796_9GAMM S-adenosylmethionine:tRNA ribosyltransferase-isomerase; OS = Pantoea rodasii OX=1076549 GN=queA PE=3 SV=1
MRVADFAFELPESLIAHYPQAQRSGCRLLALDGPSGALSHEVFTDVLDKLNPGDLLVFNNTRVIPARVYGRKASGGKIEMLVERMLDDKRVLAHVRASKAPKPGAELLLGDDESVTATMVARHDALFEIEFADDRAVLDILNSVGHMPLPPYIDRPDEEADRELYQTVYSARPGAVAAPTAGLHFDEPLLDALRAKGIEMAFVTLHVGAGTFQPVRVENINDHIMHSEYAEVPQDVVDAVLACKARGNKVVAVGTTSVRSLESAAKASQDALIAPFFDDTQIFIYPGYHYQVIDALITNFHLPESTLIMLVSAFAGYKNTMAAYQSAVAEQYRFFSYGDAMYITRNPQAPDEMVGA

SEQ ID NO: 69847 - protein, 356 aa, unidentified
  source 1..356: note = Pantoea rodasii
  REGION 1..356: note = tr|A0A2M9WAG2|A0A2M9WAG2_9GAMM S-adenosylmethionine:tRNA ribosyltransferase-isomerase; OS = Pantoea rodasii OX=1076549 GN=queA PE=3 SV=1
MRVADFAFELPESLIAHYPQAQRSGCRLLALDGPSGALGHEVFTDVLDKLNPGDLLVFNNTRVIPARVYGRKASGGKIEMLVERMLDDKRVLAHVRASKAPKPGAELLLGDDESVKATMVARHDTLFEIEFADDRAVLDILNSVGHMPLPPYIDRPDEEADRELYQTVYSARPGAVAAPTAGLHFDEPLLDALRAKGIEMAFVTLHVGAGTFQPVRVENINDHIMHSEYAEVPQDVVDAVLACKARGNKVVAVGTTSVRSLESAAKAAQDALIAPFFDDTQIFIYPGYHYQVIDALITNFHLPESTLIMLVSAFAGYKNTMAAYQSAVAEQYRFFSYGDAMYITRNPQAPDEVVGA

SEQ ID NO: 69848 - protein, 356 aa, unidentified
  source 1..356: note = Pantoea rwandensis
  REGION 1..356: note = tr|A0A1X1CU39|A0A1X1CU39_9GAMM S-adenosylmethionine:tRNA ribosyltransferase-isomerase; OS = Pantoea rwandensis OX=1076550 GN=queA PE=3 SV=1
MRVADFAFELPESLIAHYPQAQRSGCRLLALDGPSGALSHEVFTDVLDKLNPGDLLVFNNTRVIPARVYGRKASGGKIEMLVERMLDDKRVLAHVRASKAPKPGAELLLGDDESVKATMVARHDTLFEIEFADDRAVLDILNSVGHMPLPPYIDRPDEEADRELYQTVYSARPGAVAAPTAGLHFDEPLLEALRAKGIEMAFVTLHVGAGTFQPVRVENINDHIMHSEYAEVPQDVVDAVLACKARGNKVVAVGTTSVRSLESAAKASQDALIAPFFDDTQIFIYPGYHYQVIDALITNFHLPESTLIMLVSAFAGYKNTMAAYQSAVAEQYRFFSYGDAMYITRNPQAPDEIVGA

SEQ ID NO: 69849 - protein, 356 aa, unidentified
  source 1..356: note = Pantoea sesami
  REGION 1..356: note = tr|A0A1M5LTA9|A0A1M5LTA9_9GAMM S-adenosylmethionine:tRNA ribosyltransferase-isomerase; OS = Pantoea sesami OX=1881110 GN=queA PE=3 SV=1
MRVADFSFELPESLIAHYPMPERSSCRLLSLDGPTGELTHGTFTDLLDKLNPGDLLVFNNTRVIPARLFGRKASGGKIEVLVERMLDDKRILAHIRASKAPKPGAELLLGDDESIKATMTARHDALFEVAFDDERTVLDILNAIGHMPLPPYIERPDEEADRELYQTVYSQKPGAVAAPTAGLHFDEPLLEKLRAKGVEMAFVTLHVGAGTFQPVRVDSIEDHIMHSEYAEVPQDVVDAVLAAKARGSRVVAVGTTSVRSLESAAQAAKSDLIEPFFGDTQIFIYPGYQYKVIDALVTNFHLPESTLIMLVSAFAGYQHTMAAYKSAVEQKYRFFSYGDAMFITYNPLALNERVGE

SEQ ID NO: 69850 - protein, 356 aa, Pantoea sp.
  REGION 1..356: note = tr|J2V573|J2V573_9GAMM S-adenosylmethionine:tRNA ribosyltransferase-isomerase OS=Pantoea sp. YR343; OX = 1144341 GN=queA PE=3 SV=1
MRVADFTFELPESLIAHYPQAQRSGCRLLSLDGPSGALSHGVFTDVMDKLNPGDLLVFNNTRVIPARVFGRKASGGKIEMLVERMLDDKRVLAHVRASKAPKPGAELLLGDDESVKATMVARHDTLFEIAFEDDRAVLDILNSVGHMPLPPYIDRPDEDADRELYQTVYGVRPGAVAAPTAGLHFDEPLLEALKVKGVEMAFVTLHVGAGTFQPVRVETIEDHIMHAEYAEVPQDVVDAVLACKARGNKVVAVGTTSVRSLESAAKASQDALIAPFFDDTQIFIYPGYHYQVIDALITNFHLPESTLIMLVSAFAGYQHTMAAYHSAVAEQYRFFSYGDAMYITRNPQAPDETVGA

SEQ ID NO: 69851 - protein, 356 aa, Pantoea sp.
  REGION 1..356: note = tr|A0A443I951|A0A443I951_9GAMM S-adenosylmethionine:tRNA ribosyltransferase-isomerase; OS = Pantoea sp. LMG 27579 OX=1490476 GN=queA PE=3 SV=1
MRVADFSFVLPESLIAHYPQPQRSGCRLLSLDGPSGALTHGIFTDLLDKLNPGDLLVFNNTRVIPARIFGRKASGGKIEVLVERMLDDKRVLAHVRSSKSPKPGAELLLGEDENVRATMVARHDTLFEIVFDDTRAVLDILNAIGHMPLPPYIDRPDEDADRELYQTVYSQRPGAVAAPTAGLHFDEPLLAALREKGIEMAFVTLHVGAGTFQPVRVDSIEDHIMHAEYAEVPQDVVDAVLACKSRGNRVIAVGTTSVRSLESAAQAAKEALIAPFFDDTKIFIYPGYRYQVIDALVTNFHLPESTLIMLVSAFAGYRHTMYAYQQAVAEQYRFFSYGDAMFISHNPQALVEVVGN

SEQ ID NO: 69852 - protein, 356 aa, Pantoea stewartii
  REGION 1..356: note = tr|H3R877|H3R877_PANSE S-adenosylmethionine:tRNA ribosyltransferase-isomerase OS=Pantoea stewartii subsp. stewartii DC283 OX=660596 GN=queA PE=3 SV=1
MRVADFAFDLPESLIAHYPQAQRSGCRLLSLDGPTGALTHGVFTDVLDKLQPGDLLVFNNTRVIPARVFGRKASGGKIEMLVERMLDDKRVLAHVRASKAPKPGAALLLGDDESVKATMVARHDALFEIAFDDDRDVLDILNRVGHMPLPPYIDRPDEEADRELYQTVYSARPGAVAAPTAGLHFDEPLLQALKDKGVEMAFVTLHVGAGTFQPVRVETIEDHHMHAEYAEVPQDVVDAVLACKARGNKVVAVGTTSVRSLESAAKASQDALIAPFFDDTQIFIYPGYEYQVIDALITNFHLPESTLIMLVSAFAGYQHTMAAYRAAVAEEYRFFSYGDAMFISKNPQAPLEKVGA

SEQ ID NO: 69853 - protein, 432 aa, Pantoea vagans
  REGION 1..432: note = tr|E1SF64|E1SF64_PANVC S-adenosylmethionine:tRNA ribosyltransferase-isomerase OS=Pantoea vagans (strain C9-1) OX=712898 GN=queA PE=3 SV=1
MPSATGADQCWCGLPRTKSAIRLPSKELSASLARWRCARKFMPHYRLNCLCAASCSELVGFPLNCAACFCLRKNISMRVADFAFELPESLIAHYPQAQRSGCRLLSLDGPSGALSHGVFTDVLDKLNPGDLLVFNNTRVIPARVFGRKASGGKIEMLVERMLDDKRVLAHVRASKAPKPGAELLLGEDESVKATMVARHDALFEIAFDDERAVLDILNSVGHMPLPPYIDRPDEEADRELYQTVYSARPGAVAAPTAGLHFDEPLLQALKEKGIEMAFVTLHVGAGTFQPVRVETIEEHHMHAEYAEVPQEVVDAVLACKARGNKVVAVGTTSVRSLESAAKASQDALIAPFFDDTQIFIYPGYEYQVIDALITNFHLPESTLIMLVSAFAGYQHTMAAYHAAVAEQYRFFSYGDAMFISKNPQAPLEKVGD

SEQ ID NO: 69854 - protein, 356 aa, Pantoea vagans
  REGION 1..356: note = tr|A0A501SFL7|A0A501SFL7_9GAMM S-adenosylmethionine:tRNA ribosyltransferase-isomerase; OS = Pantoea vagans OX=470934 GN=queA PE=3 SV=1
MRVADFAFELPESLIAHYPQAQRSGCRLLSLDGPSGALSHGVFTDVLDKLNPGDLLVFNNTRVIPARVFGRKASGGKIEMLVERMLDDKRVLAHVRASKAPKPGAELLLGEDESVKATMVARHDALFEIVFDDERAVLDILNSVGHMPLPPYIDRPDEEADRELYQTVYSARPGAVAAPTAGLHFDEPLLQALKEKGVEMAFVTLHVGAGTFQPVRVETIEEHHMHEEYAEVPQEVVDAVLACKARGNKVVAVGTTSVRSLESAAKASQDALIAPFFDDTQIFIYPGYEYQVIDALITNFHLPESTLIMLVSAFAGYQHTMAAYHAAVAEQYRFFSYGDAMFISKNPQAPLEKVGD

SEQ ID NO: 69855 - protein, 356 aa, unidentified
  source 1..356: note = Pantoea wallisii
  REGION 1..356: note = tr|A0A1X1DCA1|A0A1X1DCA1_9GAMM S-adenosylmethionine:tRNA ribosyltransferase-isomerase; OS = Pantoea wallisii OX=1076551 GN=queA PE=3 SV=1
MRVADFAFELPESLIAHYPQAQRSGCRLLSLDGPSGALNHGVFTDVLDKLNPGDLLVFNNTRVIPARVYGRKASGGKIEMLVERMLDDKRVLAHVRASKAPKPGAELLLGDDESVKATMVARHDALFEIAFADDRAVLDILNSVGHMPLPPYIDRPDEEADRELYQTVYSARPGAVAAPTAGLHFDEPLLAALREKGVEMAFVTLHVGAGTFQPVRVENINDHIMHSEYAEVPQDVVDAVLACKARGNKVVAVGTTSVRSLESAAKACQDALLAPFFDDTQIFIYPGYHYQVIDALITNFHLPESTLIMLVSAFAGYKNTMAAYQSAVAEQYRFFSYGDAMYITRNPQAPDETVGS

SEQ ID NO: 69856 - protein, 341 aa, Papillibacter cinnamivorans
  REGION 1..341: note = tr|A0A1W2CGZ6|A0A1W2CGZ6_9FIRM S-adenosylmethionine:tRNA ribosyltransferase-isomerase; OS = Papillibacter cinnamivorans DSM 12816 OX=1122930; GN = queA PE=3 SV=1
MKTSDFHFDLPPELIAQTPIANRDRSRLMTLDRETGETGHLFFYELPGLLRSGDCLVLNDSRVLPARLLGHREPGGGAVELVLLTDKGEGLWECLSRPGRKTRRGTELSFGDGMLRARVEEELPEGNRLVRFFHEGIFLEVLERLGTMPLPPYIRAELKDPERYQTVYSRQLGSAAAPTAGLHFTKELLGRLEARGIGLAYITLHVGLGTFRPVKVEDATKHHMHSEYCQIPAETARKVNETRARGGRILCVGTTSCRTLESFAAEDGSLSESSGWTDIFIYPGYRFKATDGLITNFHLPESTLIMLVSAFAGREHTLEAYRRAVEARYRFFSFGDAMLIL

SEQ ID NO: 69857 - protein, 406 aa, unidentified
  source 1..406: note = Parabacteroides acidifaciens
  REGION 1..406: note = tr|A0A3D8HD08|A0A3D8HD08_9BACT S-adenosylmethionine:tRNA ribosyltransferase-isomerase; OS = Parabacteroides acidifaciens OX=2290935 GN=queA PE=3; SV = 1
MTTKTQQIRIEDFDYPLPDERIAKFPLPKRDESKLLLYKEGKVGESIFKHITDYLPEGSLMVFNNTRVIQARLLFQKETGAKIEIFCLEPVEPHDYALVFQQTERCRWTCLVGNLKKWKEGLLTKMVQLDGETVTLKAEKLQTCGDSHLIEFSWDHPTCTFADLLDAAGVLPIPPYLNRETEKSDLQTYQTVYSKIKGSVAAPTAGLHFTPEVLVDIDAHGIGREELTLHVGAGTFKPVKSETIEGHEMHTEFISVRRSSIERIKQNLGKIIAVGTTSVRTLESLYYMGVTLASNPEATADELIVKQWMPYEETNNRLTADEALQNILDYLDRHQADKLVTATRIIIAPGYEFKIVRGIVTNFHQPKSTLLLLISAFVKGDWRNIYDYALAHDFRFLSYGDSSLLL

SEQ ID NO: 69858 - protein, 349 aa, unidentified
  source 1..349: note = Parabacteroides acidifaciens
  REGION 1..349: note = tr|A0A3D8HBW4|A0A3D8HBW4_9BACT S-adenosylmethionine:tRNA ribosyltransferase-isomerase; OS = Parabacteroides acidifaciens OX=2290935 GN=queA PE=3; SV = 1
MKLSKFKFNLPQELIALHPAKNRDESRLMVVNRKTGEIEHKVFKDLLDYFGKKDVFIFNNTKVFPARLYGNKEKTGARIEVFLLRELNEDLRLWDVLVDPARKIRIGNKLYFGEDDSMVAEVIDNTTSRGRTLRFLYDGNHDEFKKALYALGETPLPKYIDRPVEPEDEERYQNIFATEEGAVVAPAAGLHFSRELMKRLEIKDCQFTYLTLHSGLGNFREIDVEDLTKHKMDSEQMVVNADVVEVVNTAKDNGRQICAVGTSVMRAIETAVSTDGHLKEFEGWTNKFIFPPYDFSVASSMITNFHMPLSTLLMMTASFGGYEQIMDAYEVALKEKYSFGAYGDAMLIL

SEQ ID NO: 69859 - protein, 349 aa, unidentified
  source 1..349: note = Parabacteroides chartae
  REGION 1..349: note = tr|A0A1T5E0W5|A0A1T5E0W5_9BACT S-adenosylmethionine:tRNA ribosyltransferase-isomerase; OS = Parabacteroides chartae OX=1037355 GN=queA PE=3 SV=1
MKLSKFKFNLPSELIALQPAKNRDESRLMVVHRKTGEIEHRVFKDILEYFGPKDVFIFNNTKVFPARLYGNKEKTGARIEVFLLRELNEELRLWDVLVDPARKIRIGNKLYFGEDDSMVAEVIDNTTSRGRTLRFLFDGNHDEFKKALYALGETPLPKYIEREVEEDDEQRYQNIYASEEGAVVAPAAGLHFSRELMKRLEIKDCRFAFLTVHSGLGNFREIDVEDLTKHKMDSEQMVVNAEVVKTVNEAKDSNNQICAVGTSVMRAIETAVSTDGHLKEFEGWTNKFIFPPYDFSVATSMVTNFHMPLSTLLMMTASFGGYDLIMDAYDVALKEKYRFGAYGDAMLII

SEQ ID NO: 69860 - protein, 405 aa, unidentified
  source 1..405: note = Parabacteroides chartae
  REGION 1..405: note = tr|A0A1T5D547|A0A1T5D547_9BACT S-adenosylmethionine:tRNA ribosyltransferase-isomerase; OS = Parabacteroides chartae OX=1037355 GN=queA PE=3 SV=1
MTAKTEQIRIEEFNYPLPDERIAKFPLTKRDESKLLVYRNGKIDEAVFKQLSDYLPQGSMLVYNNTRVIQARMLFQKETGAQIEVFCLEPVIPHDYALVFQQTESCSWLCLVGNLKKWKEGALHKTIRMDDKEVVLSAERIKTTGDSHLVRFSWNNPQVTFAELLDAAGILPIPPYLHRETRESDLQTYQTVYSKIKGSVAAPTAGLHFTPEVLAGLDAKGFTREEVTLHVGAGTFKPVKSEVIGDHEMHTEFISVRRSAIENIRTNLGRIIAVGTTSVRTLESLYYMGRTLVNNPDATSEELVVTQWTPYHDTEEVTAHEALTALLDYLDRNQTDTLLSATQIMIAPGYEFKIVKGIITNFHQPKSTLLLLISAFVNGNWKSIYNYALDNDFRFLSYGDSSLLL

SEQ ID NO: 69861 - protein, 349 aa, unidentified
  source 1..349: note = Parabacteroides chinchillae
  REGION 1..349: note = tr|A0A1H5XBJ8|A0A1H5XBJ8_9BACT S-adenosylmethionine:tRNA ribosyltransferase-isomerase; OS = Parabacteroides chinchillae OX=871327 GN=queA PE=3 SV=1
MKLSKFKFNLPSEQIALHPTNNRDESRMMVVNRKTGEIEHHVFKDILNYFGEKDVFIFNNTKVFPARLYGNKEKTGARIEVFLLRELNEELRLWDVLVDPARKIRIGNKLYFGEDDSMVAEVIDNTTSRGRTLRFLYDGNHDEFKKALYALGETPLPKYIDRPVEADDEDRYQNIFATEEGAVVAPAAALHFSRELMKRLEIKDCRFAFLTLHSGLGNFREIDVEDLTKHKMDSEQMVVDTDVVNIVNTAKDDGHQICAVGTSVMRAVETAVSTDGHLKEFEGWTNKFIFPPYDFSVATSMVTNLHMPLSTLLMMTASFGGYDLIMDAYEVALKEGYRFGAYGDAMLIL

SEQ ID NO: 69862 - protein, 407 aa, unidentified
  source 1..407: note = Parabacteroides chinchillae
  REGION 1..407: note = tr|A0A1H5TCR4|A0A1H5TCR4_9BACT S-adenosylmethionine:tRNA ribosyltransferase-isomerase; OS = Parabacteroides chinchillae OX=871327; GN = SAMN05444001_10369 PE=3 SV=1
MATKTQQIRIEDYNYSLPDERIAKFPLPQRDESKLLLYRNGKISESIFKHITEYLPAGSLMVFNNTRVIQARLLFKKETGAQIEVFCLEPIEPHDYALVFQQTERCSWTCLVGNLKKWKEGLLSKTILINDTPVTLNAEKKHTCGDSHHIEFTWDNPSYTFADLLDAAGILPIPPYLHRETEKSDLQTYQTVYSKIKGSVAAPTAGLHFTPEVLADIDAHNIGREEVTLHVGAGTFKPVKSDTIEGHEMHTEFISVRRSSIERVKSNLGKIIAVGTTSVRTLESLYYIGVALANNPDASSDDLVVRQWMPYKEGNNRLTPTEALQNILDYLDSHHTDKLVTATQIIIAPGYEFKIVRGIVTNFHQPKSTLLLLISAFVQGNWKAIYDYALTHEFRFLSYGDSSLLIR

SEQ ID NO: 69863 - protein, 349 aa, Parabacteroides distasonis
  REGION 1..349: note = sp|A6LEL6|QUEA_PARD8 S-adenosylmethionine:tRNA ribosyltransferase-isomerase OS=Parabacteroides distasonis (strain ATCC 8503 / DSM 20701 / CIP 104284 / JCM 5825 / NCT C 11152) OX=435591 GN=queA PE=3 SV=1
MKLSKFKFNLPSELIALHPAKNRDESRLMVVHRDTGEIEHREFKDILDYYGKGDVFIFNNTKVFPARLYGNKEKTGARIEVFLLRELNEDLRLWDVLVDPARKIRIGNKLYFGEDDSMVAEVIDNTTSRGRTLRFLYDGNHDEFKKALYALGETPLPKYIEREVEPEDEDRYQNIFAAEEGAVVAPAAGLHFSRELMKRLEIKDCQFAFLTLHSGLGNFREIDVEDLTKHKMDSEQMVVNADVVDIVNKGKDEGHKVCAVGTSVMRAIETAVSTDGHLKEFEGWTNKFIFPPYDFSVATSMVTNFHMPLSTLLMMTASFGGYELIMDAYDIALKEKYRFGAYGDAMLIL

SEQ ID NO: 69864 - protein, 404 aa, Parabacteroides distasonis
  REGION 1..404: note = tr|A0A1Y4IEB4|A0A1Y4IEB4_9BACT S-adenosylmethionine:tRNA ribosyltransferase-isomerase; OS = Parabacteroides distasonis OX=823 GN=queA PE=3 SV=1
MKTQEIRIEDYNYSLPDERIAKFPLPKRDESKLLLYRNGEISESIFKHITDYLPQNTLMVFNNTRVIQARLLFQKETGARIEIFCLEPIEPHDYALIFQETRRCSWTCLVGNLKKWKEGTLSKTIFIKDEPVVLTADKKKSHGDTHLIEFIWDNEAYTFADILDAAGVLPIPPYLHRETEKSDLQTYQTVYSKIKGSVAAPTAGLHFTPEVLADIDARGIGREEVTLHVGAGTFKPVKSDTIEGHEMHTEFISVRRSSIERIKSNLGNIIAVGTTSVRTLESLYYMGVILDNNPEATSEDLVVKQWMPYDTNNNRLTAERSLQNILDYLDKHDADTLVTATQIIIAPGYEFKIVKGIVTNFHQPKSTLLLLISAFVKGNWKSIYEYALEHDFRFLSYGDSSLLL

SEQ ID NO: 69865 - protein, 405 aa, Parabacteroides goldsteinii
  REGION 1..405: note = tr|S0GR46|S0GR46_9BACT S-adenosylmethionine:tRNA ribosyltransferase-isomerase OS=Parabacteroides goldsteinii dnLKV18 OX=1235789 GN=C803_02874 PE=3 SV=1
MVTKTQQISIEDYNYSLPDERIAKFPLPKRDESKLLLYRDGKVSESVFKHITDYLPEGSLMVFNNTRVIQARLLFQRATGAQIEVFCLDPAAPHDYELIFQQTEACNWICLIGNAKKWKEPVLSREITVAGQTVRLSAEKVQSYGETHQVRFSWDGGFSFAEVLDAAGELPIPPYLHRKTEESDLKTYQTVYSKIKGSVAAPTAGLHFTPEVLADLDAKGFGREELTLHVGAGTFKPVKSETIEGHEMHTEYISVRRSTIERVMQNFGKIIAVGTTSVRTLESLYYIGVTLATHPDATSEELVVRQWMPYEDANNRLTPTEALQNILDYLDKHQLNTLITATQIIIAPGYEFKVVKGIVTNFHQPKSTLLLLISAFVKGDWKNIYDYALGHDFRFLSYGDSSLLL

SEQ ID NO: 69866 - protein, 349 aa, Parabacteroides goldsteinii
  REGION 1..349: note = tr|A0A0J6CM36|A0A0J6CM36_9BACT S-adenosylmethionine:tRNA ribosyltransferase-isomerase; OS = Parabacteroides goldsteinii OX=328812 GN=queA PE=3 SV=1
MKLSKFKFNLPQELIALHPAKNRDESRLMVVHRNTGEIEHKVFKDLLEYFGEKDVFIFNNTKVFPARLYGNKEKTGARIEVFLLRELNEDLRLWDVLVDPARKIRIGNKLYFGEDDSMVAEVIDNTTSRGRTLRFLYDGNHDEFKKALYALGETPLPKYIDRPVEADDEDRYQNIFATEEGAVVAPAAGLHFSRELMKRLEIKDCRFAFLTVHSGLGNFREIDVEDLTKHKMDSEQMIVNGDVVSIVNEGKDDGRQICAVGTSVMRAIETAVSTDGHLKEFEGWTNKFIFPPYDFSVATSMITNFHMPLSTLLMMTASFGGYDLIMDAYEVALKEGYRFGAYGDAMLII

SEQ ID NO: 69867 - protein, 349 aa, Parabacteroides gordonii
  REGION 1..349: note = tr|A0A0F5JN62|A0A0F5JN62_9BACT S-adenosylmethionine:tRNA ribosyltransferase-isomerase; OS = Parabacteroides gordonii MS-1 = DSM 23371 OX=1203610; GN = queA PE=3 SV=1
MKLSKFKFNLPEDLIALHPAKNRDESRMMVVNRNTGEIEHKVFKDLLDYFGEKDVFIFNNTKVFPARLYGNKEKTGARIEVFLLRELNEDLRLWDVLVDPARKIRIGNKLYFGEDDSMVAEVIDNTTSRGRTLRFLYDGNHDEFKKALYALGETPLPKYIDRPVEPDDEDRYQNIFATEEGAVVAPAAGLHFSRELMKRLEIKDCRFAFLTVHSGLGNFREIDVEDLTKHKMDSEQMIVNGDVVDIVNKGKDDGRQICAVGTSVMRAIETAVSTDGHLKEFEGWTNKFIFPPYDFSVATSMITNFHMPLSTLLMMTASFGGYDLIMDAYEVALKEKYRFGAYGDAMLIL

SEQ ID NO: 69868 - protein, 405 aa, Parabacteroides gordonii
  REGION 1..405: note = tr|A0A0F5JC77|A0A0F5JC77_9BACT S-adenosylmethionine:tRNA ribosyltransferase-isomerase; OS = Parabacteroides gordonii MS-1 = DSM 23371 OX=1203610; GN = queA PE=3 SV=1
MVTKTQQISIEDYNYSLPDERIAKFPLPKRDESKLLLYRNGEVSESIFKQITEYLPEGSLMIFNNTRVIQARLLFQRATGAQIEVFCLDPSEPHDYELIFQETATCCWICLIGNAKKWKEPCLFREIEIDGQKVTLRAEKVQSYGETHQIRFSWDGGFSFAEVLDAAGELPIPPYLHRKTEESDLKTYQTVYSKIKGSVAAPTAGLHFTPEVLAELEAKGFGREELTLHVGAGTFKPVKSETIEGHEMHTEFISVRRSTIERVKQNLGKIIAVGTTSVRTLESLYYIGVALASNPEATSNELVVKQWMPYNEENNRLTPADALQNILDYLDKHQLKTLVTATQIIIAPGYEFKIVKGIVTNFHQPKSTLLLLISAFVKGDWKNIYDYALGHDFRFLSYGDSSLLL

SEQ ID NO: 69869 - protein, 406 aa, Parabacteroides johnsonii
  REGION 1..406: note = tr|K5ZM79|K5ZM79_9BACT S-adenosylmethionine:tRNA ribosyltransferase-isomerase OS=Parabacteroides johnsonii CL02T12C29 OX=999419 GN=queA PE=3 SV=1
MTTQTQQIRIEDFDYPLPDERIAKFPLSKRDESKLLLYKEGKVSESIFKHITNYLPDGSLMVFNNTRVIQARLLFQKETGAKIEIFCLEPVEPHDYALVFQQTECCRWTCLVGNLKKWKEGFLKKEVQFGGETVILKAEKLQTCGDSHLIEFTWDHPTCTFADLLDAAGVLPIPPYLNRETEKSDLQTYQTVYSKIKGSVAAPTAGLHFTPEVLAAIDARGIGREELTLHVGAGTFKPVKSETIEGHEMHTEFISVRRSSIERIKNNLGKIIAVGTTSVRTLESLYYMGVTLASNPDATAEELIVKQWMPYDEMNNKLTAGEALQNILDYLDRHQADKLVTATRIIIAPGYEFKIVRGIVTNFHQPKSTLLLLISAFVKGDWKNIYDYALGHEFRFLSYGDSSLLL

SEQ ID NO: 69870 - protein, 349 aa, Parabacteroides johnsonii
  REGION 1..349: note = tr|K6A206|K6A206_9BACT S-adenosylmethionine:tRNA ribosyltransferase-isomerase OS=Parabacteroides johnsonii CL02T12C29 OX=999419 GN=queA PE=3 SV=1
MKLSKFKFNLPQELIALHPAKNRDESRLMVVNRKTGEIEHKVFKDLLSYFGEKDVFIFNNTKVFPARLYGNKEKTGARIEVFLLRELNEDLRLWDVLVDPARKIRIGNKLYFGEDDSMVAEVIDNTTSRGRTLRFLYDGNHDEFKKALYALGETPLPKYIDRPVEPDDEDRYQNIFATEEGAVVAPAAGLHFSRELMKRLEIKDCQFAYLTLHSGLGNFREIDVEDLTKHKMDSEQMVVNGDVVNIVNTAKDNGRQICAVGTSVMRAIETAVSTDGHLKEFEGWTNKFIFPPYDFSVASSMITNFHMPLSTLLMMTASFGGYDLIMDAYEVALKEKYSFGAYGDAMLIL

SEQ ID NO: 69871 - protein, 406 aa, Parabacteroides merdae
  REGION 1..406: note = tr|A0A415P8U6|A0A415P8U6_9BACT S-adenosylmethionine:tRNA ribosyltransferase-isomerase; OS = Parabacteroides merdae OX=46503 GN=queA PE=3 SV=1
MTIKTQQIRIEDFDYPLPDERIAKFPLPKRDESKLLLYKEGKVSESIFKHITDYLPEGSLMVFNNTRVIQARLLFQKETGAKIEIFCLEPVEPYDYALVFQQTECCRWTCLVGNLKKWKEGLLKKEVQLDGETVILKAEKLQTCGDSYLIEFTWDHPTCTFADLLDAAGVLPIPPYLNRETEKSDLQTYQTVYSKIKGSVAAPTAGLHFTPEVLAAIDAQGIGREELTLHVGAGTFKPVKSETIEGHEMHTEFISVRRSSIERIKNNLGKIIAVGTTSVRTLESLYYMGVTLASNPDATADELIVKQWMPYEETNNRLTADEALQNILDYLDRHQADKLVTATRIIIAPGYEFKIVRGIVTNFHQPKSTLLLLISAFVKGDWKNIYDYALRHDFRFLSYGDSSLLL

SEQ ID NO: 69872 - protein, 406 aa, Parabacteroides merdae
  REGION 1..406: note = tr|A0A3R5W5V1|A0A3R5W5V1_9BACT S-adenosylmethionine:tRNA ribosyltransferase-isomerase; OS = Parabacteroides merdae OX=46503 GN=queA PE=3 SV=1
MTTKTQQIRIEDFDYPLPDERIAKFPLPKRDESKLLLYKEGKVSESIFKHITDYLPEGSLMVFNNTRVIQARLLFQKETGAKIEIFCLEPVEPHDYALVFQQTECCRWTCLVGNLKKWKEGLLKKEVQLDGETVILKAEKLQTCGDSYLIEFTWDHPTCTFADLLDAAGVLPIPPYLNRETEKSDLQTYQTVYSKIKGSVAAPTAGLHFTPEVLAAIDALGIGREELTLHVGAGTFKPVKSETIEGHEMHTEFISVRRSSIERIKNNLGKIIAVGTTSVRTLESLYYMGVTLASNPDATADELIVKQWMPYEETNNRLTADEALQNILDYLDRHQADKLVTATRIIIAPGYEFKIVRGIVTNFHQPKSTLLLLISAFVKGNWKNIYDYALRHDFRFLSYGDSSLLL

SEQ ID NO: 69873 - protein, 404 aa, Parabacteroides sp.
  REGION 1..404: note = tr|A0A3E4PHJ5|A0A3E4PHJ5_9BACT S-adenosylmethionine:tRNA ribosyltransferase-isomerase; OS = Parabacteroides sp. 20_3 OX=469591 GN=queA PE=3 SV=1
MKTQEIRIEDYNYSLPDERIAKFPLPKRDESKLLLYRNGEISESIFKHISDYLPQNTLMVFNNTRVIQARLLFQKETGARIEIFCLEPIEPHDYALIFQETRRCSWTCLVGNLKKWKEGTLSKTIFIKDQPVVLTADKKKSHGDTHLIEFTWDNETYTFADILDAAGVLPIPPYLHRETEKSDLQTYQTVYSKIKGSVAAPTAGLHFTPEVLADIDARGIGREEVTLHVGAGTFKPVKSDTIEGHEMHTEFISVRRSSIERIKSNLGNIIAVGTTSVRTLESLYYMGVILDNNPEATSEDLVVKQWMPYDMNNNRLTTERSLQNILDYLDKHDADTLVTATQIIIAPGYEFKIVKGIVTNFHQPKSTLLLLISAFVKGNWKSIYEYALEHDFRFLSYGDSSLLL

SEQ ID NO: 69874 - protein, 349 aa, Parabacteroides sp.; identical to SEQ ID NO: 69863
  REGION 1..349: note = tr|C7XBF9|C7XBF9_9BACT S-adenosylmethionine:tRNA ribosyltransferase-isomerase OS=Parabacteroides sp. D13; OX = 563193 GN=queA PE=3 SV=1

SEQ ID NO: 69875 - protein, 352 aa, unidentified
  source 1..352: note = Paraburkholderia aromaticivorans
  REGION 1..352: note = tr|A0A248VFI1|A0A248VFI1_9BURK S-adenosylmethionine:tRNA ribosyltransferase-isomerase; OS = Paraburkholderia aromaticivorans OX=2026199 GN=queA; PE = 3 SV=1
MLTLSDFDFDLPPQLIAQVALPERSASRLLEVANPAEAASPAHLIDRRFAELPDCIAPGDLLVFNDTKVLKARFLGQKASGGKIEVLVERLTGERTALAQIRASKSPQPGTTIRLADAFDVMVGERVEPFYTLHFPGDCLTLIEQFGRLPLPPYIEHDPDATDETRYQTVFAQNPGAVAAPTAGLHFDEALLARLDAQGVERATLTLHVGAGTFQPVRVENLAEHKMHSEWYHLPQSLADRIAATRARGNRVIAVGTTSMRALEAAARDAEAAGRPLAAASTETDIFITPGYKFRVVDRLVTNFHLPKSTLLMLVSAFAGVETIREAYRHAIEQRYRFFSYGDAMLLTRRDV

SEQ ID NO: 69876 - protein, 352 aa, unidentified
  source 1..352: note = Paraburkholderia aspalathi
  REGION 1..352: note = tr|A0A1I7EML1|A0A1I7EML1_9BURK S-adenosylmethionine:tRNA ribosyltransferase-isomerase; OS = Paraburkholderia aspalathi OX=1324617 GN=queA PE=3 SV=1
MFTLSDFDFDLPPELIAQVALPERSASRLLEVAHTADATDAAHLIDRRFAELPECIAPGDLLVFNDTKVLKARFLGQKASGGKIEVLVERLTGERTALAQIRASKSPQPGTTIRLADAFDVTVGERVEPFYTLHFPDDCLTLIEQFGRLPLPPYIEHDPDATDETRYQTVFAQNPGAVAAPTAGLHFDDALLARLDARGVERATLTLHVGAGTFQPVRVENLAEHKMHSEWYHLPQSLADKIAATRARGNRVIAVGTTSMRALEAAARDAEAAGRPLGAASTETDIFITPGYKFRVVDRLVTNFHLPKSTLLMLVSAFAGVETIREAYRHAIEQRYRFFSYGDAMLLTRRDA

SEQ ID NO: 69877 - protein, 353 aa, unidentified
  source 1..353: note = Paraburkholderia azotifigens
  REGION 1..353: note = tr|A0A5C6VTL8|A0A5C6VTL8_9BURK S-adenosylmethionine:tRNA ribosyltransferase-isomerase; OS = Paraburkholderia azotifigens OX=2057004 GN=queA PE=3; SV = 1
MFTLSDFDFDLPPELIAQIALPERSASRLLEVNGQPTPATFTDRRFAELPDCIESGDLLVFNDTKVLKARFLGQKASGGKIEVLVERLTGERTALAQIRASKSPGPGTVLRLADAFDVTVGERVEPFYTLHFPDDCLTLIEQFGRLPLPPYIEHDPDAFDETRYQTVYAQNPGAVAAPTAGLHFDDSIFARLDAKGVERATLTLHVGAGTFQPVRVENIAEHKMHSEWYQLPQSLVDKIAATRARGNRVIAVGTTSMRALEAAARDAEAAGKPLAATSAETDIFITPGYRFRVVDRLVTNFHLPKSTLLMLVSAFAGIETIRAAYRHAIEERYRFFSYGDAMLLTRSEDALNA

SEQ ID NO: 69878 - protein, 356 aa, unidentified
  source 1..356: note = Paraburkholderia bryophila
  REGION 1..356: note = tr|A0A329BUR7|A0A329BUR7_9BURK S-adenosylmethionine:tRNA ribosyltransferase-isomerase; OS = Paraburkholderia bryophila OX=420952 GN=queA PE=3 SV=1
MFTLSDFDFDLPPELIAQVALPERSASRLLEVDNTADADHARLVDRRFAELPECIAPGDLLVFNDTKVLKARFLGQKASGGKVEVLVERLTGERTALAQIRASKSPQPGTTIRLADAFDVTLGERVEPFYTLHFPDDCLTLIEQFGRLPLPPYIEHDPDSTDETRYQTVFAQNPGAVAAPTAGLHFDNALLARLDAHGVERATLTLHVGAGTFQPVRVENLAEHKMHSEWYHLPQSLADKIAATRARGNRVIAVGTTSMRALEAAARDAAVAGRPLGAASTETDIFITPGYPFRVVDRLVTNFHLPKSTLLMLVSAFSGVETIRAAYRHAIEQRYRFFSYGDAMLLTRRDPTAETS

SEQ ID NO: 69879 - protein, 351 aa, unidentified
  source 1..351: note = Paraburkholderia caballeronis
  REGION 1..351: note = tr|A0A1H7I778|A0A1H7I778_9BURK S-adenosylmethionine:tRNA ribosyltransferase-isomerase; OS = Paraburkholderia caballeronis OX=416943 GN=queA PE=3; SV = 1
MFKLSDFDFDLPAELIAQTALPERSASRLLEVDNLAQPPRLVDRRFAELPGCLAPGDLLVFNDTRVLKARFFGQKASGGKIEVLVERLTGARTALAQIRASKSPAPGTTLRLADAFDVTVGERVEPFYTLHFPDDCLTLIEQYGRLPLPPYITHDADATDETRYQTVFARNPGAVAAPTAGLHFDDALLARLDERGIERATLTLHVGAGTFQPVRVENIAEHQMHSEWYELPQSLVDRIAATRARGGRVVAVGTTSMRALEAAARDAENAGRPLAATAAETDIFITPGYRFRVVDRLVTNFHLPKSTLLMLVSAFAGMETIRAAYRHAIDERYRFFSYGDAMLLCRQEQAL

SEQ ID NO: 69880 - protein, 352 aa, unidentified
  source 1..352: note = Paraburkholderia caffeinilytica
  REGION 1..352: note = tr|A0A346BHM1|A0A346BHM1_9BURK S-adenosylmethionine:tRNA ribosyltransferase-isomerase; OS = Paraburkholderia caffeinilytica OX=1761016 GN=queA PE=3; SV = 1
MFTLSDFDFDLPPELIAQVALPERSASRLLEVANTADAPDAARLIDRRFAELPECIAPGDLLVFNDTKVLKARFLGQKASGGKIEVLVERLTGERTALAQIRASKSPQPGTTIRLANAFDVTVGERVEPFYTLHFPDDCLTLIEQFGRLPLPPYIEHDPDATDETRYQTVFAQNPGAVAAPTAGLHFDDALLARLDARGVERATLTLHVGAGTFQPVRVENLAEHKMHSEWYHLPQSLADKIAATRARGNRVIAVGTTSMRALEAAARDAEAAGRPLGAASTETDIFITPGYPFRVVDRLVTNFHLPKSTLLMLVSAFAGVETIRAAYRHAIEQRYRFFSYGDAMLLTRRDV

SEQ ID NO: 69881 - protein, 355 aa, unidentified
  source 1..355: note = Paraburkholderia caledonica
  REGION 1..355: note = tr|A0A2Z5M8J6|A0A2Z5M8J6_9BURK S-adenosylmethionine:tRNA ribosyltransferase-isomerase; OS = Paraburkholderia caledonica OX=134536 GN=queA PE=3 SV=1
MFKLSDFDFDLPPELIAQVALPERSASRLLQVDNAAHADGAARLVDRRFAELPECVSAGDLLVFNDTKVLKARFLGQKASGGKIEVLVERLTGERTALAQIRASKSPQEGTTIRLADAFDVTVGERVEPFYTLHFPDDCLTLIEQFGRLPLPPYIEHAPDSTDETRYQTVFAQNPGAVAAPTAGLHFDDALLARLDAAGVQRATLTLHVGAGTFQPVRVENLAEHKMHSEWYHLPQSLADKIAATKARGNRVLAVGTTSMRALEAAARDAEAAGRPLAAASTETDIFITPGYRFRVVDRLVTNFHLPKSTLLMLVSAFAGVETIRAAYRHAIEERYRFFSYGDAMLLTRRDDRAV

SEQ ID NO: 69882 - protein, 389 aa, unidentified
  source 1..389: note = Paraburkholderia caribensis
  REGION 1..389: note = tr|A0A0P0R7Z5|A0A0P0R7Z5_9BURK S-adenosylmethionine:tRNA ribosyltransferase-isomerase; OS = Paraburkholderia caribensis MBA4 OX=1323664 GN=queA; PE = 3 SV=1
MSRNHSRSTGAVVDAVESATRSSGGNPVKYRIKPVRMFTLSDFDFDLPPELIAQVALPERSASRLLEVNGQTSPATLADRRFADLPDCIESGDLLVFNDTKVLKARFIGQKASGGKIEVLIERLTGERTALAQIRASKSPGAGTVLRLADAFDVTVGERVEPFYTLHFPDDCLTLIEQFGRLPLPPYIEHDPDAFDETRYQTVYAQNPGAVAAPTAGLHFDDSIFARLDAKGVERATLTLHVGAGTFQPVRVENIAEHKMHSEWYRLPQSLVDKIAATKARGNRVIAVGTTSMRALEAAARDADAAGRPLAATSAETDIFITPGYRFRVVDRLVTNFHLPKSTLLMLVSAFAGIETIRAAYRHAIDERYRFFSYGDAMLLTRNDDALNA

SEQ ID NO: 69883 - protein, 353 aa, unidentified
  source 1..353: note = Paraburkholderia caribensis
  REGION 1..353: note = tr|A0A142YXP4|A0A142YXP4_9BURK S-adenosylmethionine:tRNA ribosyltransferase-isomerase; OS = Paraburkholderia caribensis OX=75105 GN=queA PE=3 SV=1
MFTLSDFDFDLPPELIAQVALPQRSASRLLEVNGQTSPATLADRRFADLPDCIESGDLLVFNDTKVLKARFIGQKASGGKIEVLIERLTGERTALAQIRASKSPGAGTVLRLADAFDVTVGERVEPFYTLHFPDDCLTLIEQFGRLPLPPYIEHDPDAFDETRYQTVYAQNPGAVAAPTAGLHFDDSIFARLDAKGVERATLTLHVGAGTFQPVRVENIAEHKMHSEWYQLPQSLVDRIAATKARGNRVIAVGTTSMRALEAAARDADAAGQPLAATSAETDIFITPGYRFRVVDRLVTNFHLPKSTLLMLVSAFAGIETIRAAYRHAIDERYRFFSYGDAMLLTRNDDALNA

SEQ ID NO: 69884 - protein, 353 aa, unidentified
  source 1..353: note = Paraburkholderia diazotrophica
  REGION 1..353: note = tr|A0A1H7D3R0|A0A1H7D3R0_9BURK S-adenosylmethionine:tRNA ribosyltransferase-isomerase; OS = Paraburkholderia diazotrophica OX=667676 GN=queA PE=3; SV = 1
MFTLSDFDFDLPPELIAQVALPERSASRLLEVNGQTKPATFADRRFADLPDLIDAGDLLVFNDTKVLKARFLGQKASGGKIEVLVERLTGERTALAQIRASKSPGPGTTLRLADAFDVTVGERVEPFYTLHFPDDCLTLIEQFGRLPLPPYIEHDPDAFDETRYQTVYAQNPGAVAAPTAGLHFDDSIFARLDEKGVERATLTLHVGAGTFQPVRVENIAEHKMHSEWYQLPQSLADRIAATKARGNRVIAVGTTSMRALEAAARDAEAAGRPLAATSADTDIFITPGYGFRVVDRLVTNFHLPKSTLLMLVSAFAGIETIRAAYRHAIEERYRFFSYGDAMLLTRSDDALNA

SEQ ID NO: 69885 - protein, 352 aa, unidentified
  source 1..352: note = Paraburkholderia dipogonis
  REGION 1..352: note = tr|A0A4Y8N6J8|A0A4Y8N6J8_9BURK S-adenosylmethionine:tRNA ribosyltransferase-isomerase; OS = Paraburkholderia dipogonis OX=1211383 GN=queA PE=3 SV=1
MLTLSDFDFDLPPELIAQVALPERSASRLLEVDHPADAAGPARLIDRRFAELPECIAPGDLLVFNDTKVLKARFLGQKASGGKIEVLVERLTGERTALAQVRASKSPQPGTTIRLADAFDVTVGERVEPFYTLHFPNDCLTLIEQFGRLPLPPYIEHDPDSTDETRYQTVFAQNPGAVAAPTAGLHFDDALLGRLDEKGVERATLTLHVGAGTFQPVRVENLAEHKMHSEWYHLPQSLADKIAATRARGNRVIAVGTTSMRALEAAARDAEAAGRPLAAASTETDIFITPGYKFRVVDRLVTNFHLPKSTLLMLVSAFAGVETIRETYRHAIEQRYRFFSYGDAMLLTRRDA

SEQ ID NO: 69886 - protein, 353 aa, unidentified
  source 1..353: note = Paraburkholderia eburnea
  REGION 1..353: note = tr|A0A2S4MNZ3|A0A2S4MNZ3_9BURK S-adenosylmethionine:tRNA ribosyltransferase-isomerase; OS = Paraburkholderia eburnea OX=1189126 GN=queA PE=3 SV=1
MFKLSDFDFDLPEALIAQTALPERSASRLLVVDNAVQPARLTDRTFADLPACIAPGDLLVFNDTKVLKARFFGQKASGGKIEVLVERLTGARTALAQIRASKSPGPGTVLRLADAFDVTVGERVDPFYTLHFPDDCLTLIEQHGRLPLPPYITHDADASDETRYQTVFAQNPGAVAAPTAGLHFDDALLAKLDAMGVERATLTLHVGAGTFQPVRVENIAEHKMHSEWYQLPQSLVDKIAATRARGGRVIAVGTTSMRALEAAARDAAKENRPLAATQAETDIFITPGYRFRVVDRLVTNFHLPKSTLLMLVSAFAGIETIRAAYRHAIEERYRFFSYGDAMLLTRIEDALKA

SEQ ID NO: 69887 - protein, 350 aa, unidentified
  source 1..350: note = Paraburkholderia endofungorum
  REGION 1..350: note = tr|A0A2P5K9R6|A0A2P5K9R6_9BURK S-adenosylmethionine:tRNA ribosyltransferase-isomerase; OS = Paraburkholderia endofungorum OX=417203 GN=queA PE=3; SV = 1
MYTLSDFDFNLPPELIAQHALPERSASRLLEVTPSGALLDHRFGELPACIEPGDLLVFNDTKVLKARFDGVKASGGRVEVLIERVTGLRTALAQIRASKRPAPGSTIRLAGAFDVSVGERVEPFHTLHFPHDCIELIDRYGRLPLPPYIEHSPDTYDEARYQTVFATTPGAVAAPTAGLHFDAPTLAALDARGVRRATLTLHVGAGTFQPVRTDDIAQHKMHSEWYHIPPALVEAIEATRAAGHSVIAVGTTSMRALEAAARDAERDGRELHAVHAETDIFITPGYQFRVIDRLVTNFHLPKSTLLMLVSAFAGVEPIRLAYRHAIAQRYRFFSYGDAMLLTRAASVAQP

SEQ ID NO: 69888 - protein, 349 aa, unidentified
  source 1..349: note = Paraburkholderia fungorum
  REGION 1..349: note = tr|A0A2N8QMI6|A0A2N8QMI6_9BURK S-adenosylmethionine:tRNA ribosyltransferase-isomerase; OS = Paraburkholderia fungorum OX=134537 GN=queA PE=3 SV=1
MFTLSDFDFDLPPELIAQVALPERSASRLLEVDNTVNPARLTDRGFAELPECIAPGDLLVFNDTKVLKARFLGQKASGGKIEVLVERLTGERTALAQIRASKSPQPGTTIRLADAFDVTVGERVEPFYTLHFPDDCLTLIDQFGRLPLPPYIEHDPDSTDETRYQTVFAQNPGAVAAPTAGLHFDDALLARLNARGVERATLTLHVGAGTFQPVRVENIAEHKMHSEWYHLPQSLADKIAATRARGNRVIAVGTTSMRALEAAARDAEAAGRPLGAASTETDIFITPGYRFRVVDRLVTNFHLPKSTLLMLVSAFAGVDTIREAYRHAIEQRYRFFSYGDAMLLTRRDA

SEQ ID NO: 69889 - protein, 351 aa, unidentified
  source 1..351: note = Paraburkholderia fungorum
  REGION 1..351: note = tr|A0A1H0ZMX1|A0A1H0ZMX1_9BURK S-adenosylmethionine:tRNA ribosyltransferase-isomerase; OS = Paraburkholderia fungorum OX=134537 GN=queA PE=3 SV=1
MLTLSDFDFDLPPELIAQVALPERSASRLLEVDNSVSADTARLIDRRFAELPECIAPGDLLVFNDTKVLKARFLGQKASGGKVEVLVERLTGERTALAQIRASKSPQPGTTIRLADAFDVTLGERVEPFYTLHFPDDCLTLIEQFGRLPLPPYIEHDPDSTDETRYQTVFAQNPGAVAAPTAGLHFDEALLAKLDAHGVERATLTLHVGAGTFQPVRVENLDEHKMHSEWYHLPQSLADKIAATKARGNRVIAVGTTSMRALEAAARDADAAGRPLGAASTETDIFITPGYKFRVVDRLVTNFHLPKSTLLMLVSAFAGVETIRAAYRHAIEQRYRFFSYGDAMLLTRRDD

SEQ ID NO: 69890 - protein, 352 aa, unidentified
  source 1..352: note = Paraburkholderia ginsengiterrae
  REGION 1..352: note = tr|A0A1A9N8L8|A0A1A9N8L8_9BURK S-adenosylmethionine:tRNA ribosyltransferase-isomerase; OS = Paraburkholderia ginsengiterrae OX=1462993 GN=queA PE=3; SV = 1
MFTLSDFDFDLPPELIAQVALPERSASRLLEVDNTAGADGAARLIDRRFAELPECIEAGDLLVFNDTKVLKARFLGQKASGGKIEVLVERLTGERTALAQIRASKSPQPGTTIRLADAFDVTVGERVEPFYTLHFPGDCLTLIEQYGRLPLPPYIEHDPDSTDETRYQTVFAQNPGAVAAPTAGLHFDQALLAQLDAKGVERATLTLHVGAGTFQPVRVENLAEHKMHSEWYHLPQALADKIAATRASGNRVIAVGTTSMRALEAAARDAEAAGRPLAAASTETDIFITPGYRFRVVDRLVTNFHLPKSTLLMLVSAFAGVETIREAYRHAIEQRYRFFSYGDAMLLTRLDT

SEQ ID NO: 69891 - protein, 352 aa, unidentified
  source 1..352: note = Paraburkholderia graminis
  REGION 1..352: note = tr|B1FWH2|B1FWH2_PARG4 S-adenosylmethionine:tRNA ribosyltransferase-isomerase OS=Paraburkholderia graminis (strain ATCC 700544 / DSM 17151 / LMG 18924 / NCIMB 13744/ C4D1M) OX=396598 GN=queA PE=3 SV=1
MFTLSDFDFDLPPELIAQVALPERSASRLLQVDNAADADRAARLIDRRFAELPDCIAPGDLLVFNDTKVLKARFLGQKASGGKIEVLVERLTGERTALAQIRASKSPQPGTTIRLADAFDVTVGERVEPFYTLHFPADCLTLIEQFGRLPLPPYIEHDPDSIDEARYQTVYAQNPGAVAAPTAGLHFDDALFARLDAHGVERATLTLHVGAGTFQPVRVENLAEHKMHSEWYHLPQSLADKIAATKARGNRVIAVGTTSMRALEAAARDAEAAGRPLAATSTETDIFITPGYRFRVVDRLVTNFHLPKSTLLMLVSAFAGVETIRAAYRHAIEQRYRFFSYGDAMLLTRRDG

SEQ ID NO: 69892 - protein, 353 aa, unidentified
  source 1..353: note = Paraburkholderia hospita
  REGION 1..353: note = tr|A0A244DVD7|A0A244DVD7_9BURK S-adenosylmethionine:tRNA ribosyltransferase-isomerase; OS = Paraburkholderia hospita OX=169430 GN=queA PE=3 SV=1
MFTLSDFDFDLPPELIAQVALPQRSASRLLEVNGQTSPATLADRRFADLPDCIESGDLLVFNDTKVLKARFIGQKASGGKIEVLIERLTGERTALAQIRASKSPAAGTTLRLADAFDVTVGERVEPFYTLHFPDDCLTLIEQFGRLPLPPYIEHDADAFDETRYQTVYAQNPGAVAAPTAGLHFDDSIFARLDAKGVERATLTLHVGAGTFQPVRVENIDEHKMHSEWYQLPQSLVDKIAATKARGNRVIAVGTTSMRALEAAARDADTAGRPLAATSAETDIFITPGYRFRVVDRLVTNFHLPKSTLLMLVSAFAGIETIRAAYRHAIDERYRFFSYGDAMLLTRNDDALNA

SEQ ID NO: 69893 - protein, 389 aa, unidentified
  source 1..389: note = Paraburkholderia hospita
  REGION 1..389: note = tr|A0A1H6NSV8|A0A1H6NSV8_9BURK S-adenosylmethionine:tRNA ribosyltransferase-isomerase; OS = Paraburkholderia hospita OX=169430 GN=queA PE=3 SV=1
MSRNHSRSTGAVVDAVESAARSSGGNPVKYRIKPVRMFTLSDFDFDLPPELIAQVALPQRSASRLLEVNGQTSPATLADRRFADLPDCIESGDLLVFNDTKVLKARFIGQKASGGKIEVLIERLTGERTALAQIRASKSPAAGTTLRLADAFDVTVGERVEPFYTLHFPDDCLTLIEQFGRLPLPPYIEHDPDAFDETRYQTVYAQNPGAVAAPTAGLHFDDSIFARLDAKGVERATLTLHVGAGTFQPVRVENIDEHKMHSEWYQLPQSLVDKIAATKARGNRVIAVGTTSMRALEAAARDADAAGRPLAATSAETDIFITPGYCFRVVDRLVTNFHLPKSTLLMLVSAFAGIETIRAAYRHAIDERYRFFSYGDAMLLTRHDDALNA

SEQ ID NO: 69894 - protein, 349 aa, unidentified
  source 1..349: note = Paraburkholderia insulsa
  REGION 1..349: note = tr|A0A2T1APU1|A0A2T1APU1_9BURK S-adenosylmethionine:tRNA ribosyltransferase-isomerase; OS = Paraburkholderia insulsa OX=1441714 GN=queA PE=3 SV=1
MFTLSDFDFDLPPELIAQVALPERSASRLLEVDNTVSPARLTDRGFAELPECIAPGDLLVFNDTKVLKARFLGQKASGGKIEVLVERLTGERTALAQIRASKSPQPGTTIRLADAFDVTVGERVEPFYTLHFPDDCLTLIEQFGRLPLPPYIEHDPDSTDETRYQTVFAQNPGAVAAPTAGLHFDDALLARLDARGVERATLTLHVGAGTFQPVRVENIAEHKMHSEWYHLPQSLADKIAATRARGNRVIAVGTTSMRALEAAARDAEAAGRPLGAASTETDIFITPGYRFRVVDRLVTNFHLPKSTLLMLVSAFAGVDTIREAYRHAIEQRYRFFSYGDAMLLTRRDA

SEQ ID NO: 69895 - protein, 353 aa, unidentified
  source 1..353: note = Paraburkholderia megapolitana
  REGION 1..353: note = tr|A0A1I3G9D7|A0A1I3G9D7_9BURK S-adenosylmethionine:tRNA ribosyltransferase-isomerase; OS = Paraburkholderia megapolitana OX=420953 GN=queA PE=3; SV = 1
MFTLSDFDFALPPELIAQTALPERSASRLLEVDGTRTPAHFTDRGFAELPNCIAPGDLLVFNDTKVLKARFLGQKASGGKIEVLIERLTGERTALAQIRASKTPVAGTTLRLADAFDVTVGERVEPFYTLHFPADCLTLIEQYGRLPLPPYIEHDPDATDETRYQTVFAQNPGAVAAPTAGLHFDDALLARLDERGVERATLTLHVGAGTFQPVRVENLSEHKMHSEWYALPQTLVEQIEATRRRGNRVIAVGTTSMRALEAAARDAEAAGRPLAATSAETDIFITPGYRFRVVDRLVTNFHLPKSTLLMLVSAFAGIETIRAAYRHAIEERYRFFSYGDAMLLTRTDDAAQN

SEQ ID NO: 69896 - protein, 371 aa, unidentified
  source 1..371: note = Paraburkholderia megapolitana
  REGION 1..371: note = tr|A0A1I3P4E7|A0A1I3P4E7_9BURK S-adenosylmethionine:tRNA ribosyltransferase-isomerase; OS = Paraburkholderia megapolitana OX=420953; GN = SAMN05192543_105629 PE=3 SV=1
MRAATVPIQRPRDARLLTVDRYGRIDEHPRTAFADLLRPGDCVIANDAATLPASLHGVHERSGNVIEVRLAGRTSLAGGDAMNRFSAIVFGTGDFHTLTEERAAPPDLHRGDRLRFGADGATIVRLLGHPRFVELHFDGDAAQVWRTLASHGKPVQYAHLADPLALWDVWTPIAAQPVAFEPPSAGFVLDWSTLDALHARGVPFATLTHAAGLSSTGDATLDQRLPLDEPYRIPVATAALVETTRARGGRVVAIGTTVVRALEHAAAIDGAVHPGDGTATQRIGPHTRLRAVDVIVSGTHEPDSSHYALLRAFADASTLARVTATLEAHRYRTHEFGDSMWVERSTDAVREEEHVYDERQGSWVAVPCDLS

SEQ ID NO: 69897 - protein, 352 aa, unidentified
  source 1..352: note = Paraburkholderia monticola
  REGION 1..352: note = tr|A0A149Q0P1|A0A149Q0P1_9BURK S-adenosylmethionine:tRNA ribosyltransferase-isomerase; OS = Paraburkholderia monticola OX=1399968 GN=queA PE=3 SV=1
MFTLSDFDFDLPPELIAQVALPERSASRLLDVDAAGAADGAARLIDRRFTELPECLAPGDLLVFNDTKVLKARFFGQKASGGKVEVLVERLTGERSALAQIRASKSPQAGTAIRLADAFDVTVGERVDQFYTLHFPADCLTLIEQYGRLPLPPYIEHDPDATDETRYQTVFAQNPGAVAAPTAGLHFDDALLARLDAHGVERATLTLHVGAGTFQPVRVENIAEHKMHSEWYHLPQALADKIAATKARGNRVIAVGTTSMRALEAAARDAEAAGHPLAAASAETDIFITPGYRFRVVDRLVTNFHLPKSTLLMLVSAFAGVETIRAAYRHAIEERYRFFSYGDAMLLTRRDA

SEQ ID NO: 69898 - protein, 349 aa, unidentified
  source 1..349: note = Paraburkholderia phenazinium
  REGION 1..349: note = tr|A0A1N6LIA3|A0A1N6LIA3_9BURK S-adenosylmethionine:tRNA ribosyltransferase-isomerase; OS = Paraburkholderia phenazinium OX=60549 GN=queA PE=3 SV=1
MFTLSDFDFDLPPELIAQTALPERSASRLLEVDGLATPARLTDRRFAELPDCIAPGDLLVFNDTKVLKARFLGQKASGGKIEVLVERLTGERTALAQIRASKSPAPGTTLRLADAFDVTVGERVEPFYTLHFPEDCLTLIEQFGRLPLPPYIEHGPDATDETRYQTVFAQNPGAVAAPTAGLHFDDALLARLDARGVERATLTLHVGAGTFQPVRVENLAEHKMHSEWYQLPQTLVERIAATKARGNRVIAVGTTSMRALEAAARDAEAAGRPLAATAAETDIFITPGYRFRVVDRLVTNFHLPKSTLLMLVSAFAGIETIRAAYRHAIEERYRFFSYGDAMLLTRNDG

SEQ ID NO: 69899 - protein, 444 aa, unidentified
  source 1..444: note = Paraburkholderia phenazinium
  REGION 1..444: note = tr|A0A4R7RCK9|A0A4R7RCK9_9BURK S-adenosylmethionine:tRNA ribosyltransferase-isomerase; OS = Paraburkholderia phenazinium OX=60549 GN=DFH20_2800; PE = 3 SV=1
MTMRAATLLVQRPHDARLLVVDRHGHIEHRPRHAFVELLRPGDCVIANDAATLPASLHGIHRRSDAVIEIRLAGRQSLDPQDVKRFKAVVFGAGDFHTPTEARAAPPRLAPGDRVSFGKLEATIVRMLDHPRFVELQFHADAARIWEMLAQQGKPVQYAHLHEALALWDVWTPIAAQPVAFEPPSAGFVLDWRSIDALQARSIPFATLTHAAGLSSTGDAVLDQRLPLDEPYRIPAATAALIAATRARQGRVVAIGTTVVRALEHAASGNGVVHAGDGVATQRIGPQTQLRAVDVIVSGTHEPDTSHYALLRAFTDTLTLQGVTDELEAHRYRTHEFGDSVWIERRACVVQGARTSPLDPRERERCPTLGIGLADSHRKDSAMPAVPSSRPHRAGPTLRKVPTVSDELTPVAPSPDKETSHDTRNHPADHPDPAADRRPAKLAV

SEQ ID NO: 69900 - protein, 352 aa, unidentified
  source 1..352: note = Paraburkholderia phenoliruptrix
  REGION 1..352: note = tr|K0DKY6|K0DKY6_9BURK S-adenosylmethionine:tRNA ribosyltransferase-isomerase OS=Paraburkholderia phenoliruptrix BR3459a OX=1229205 GN=queA PE=3 SV=1
MFTLSDFDFDLPPELIAQVALPERSASRLLQVDNAADAERAARLVDRRFSELPDCISPGDLLVFNDTKVLKARFLGQKASGGKIEVLVERLTGERTALAQIRASKSPQPGTTIRLADAFDVTVGERVEPFYTLHFPADCLTLIEQHGRLPLPPYIEHDPDAVDETRYQTVYAQNPGAVAAPTAGLHFDESLFARLDAHGVERATLTLHVGAGTFQPVRVENLAEHKMHSEWYHLPQTLADKIAATKARGNRVIAVGTTSMRALEAAARDAEAAGRPLGAASTETDIFITPGYRFRVVDRLVTNFHLPKSTLLMLVSAFAGVETIRAAYRHAIEQRYRFFSYGDAMLLTRRDG

SEQ ID NO: 69901 - protein, 353 aa, unidentified
  source 1..353: note = Paraburkholderia phymatum
  REGION 1..353: note = sp|B2JGG8|QUEA_PARP8 S-adenosylmethionine:tRNA ribosyltransferase-isomerase OS=Paraburkholderia phymatum (strain DSM 17167 / CIP 108236 / LMG 21445 / STM815); OX = 3910 38 GN=queA PE=3 SV=1
MFTLSDFDFDLPPELIAQTALPERSASRLLEVNGQTTPASFADRRFAELPECIQPGDLLVFNDTKVLKARFLGQKASGGKIEVLVERLTGERTALAQIRASKSPGPGTVLRLADAFDVTVGERVEPFYTLHFPDDCLTLIEQFGRLPLPPYIEHDPDAFDETRYQTVYAQNPGAVAAPTAGLHFDDSIFARLDAKGVERATLTLHVGAGTFQPVRVENIAEHKMHSEWYQLPQSLVDRIAATRARGNRVIAVGTTSMRALEAAARDADAAGKPLAATSAETDIFITPGYKFRVVDRLVTNFHLPKSTLLMLVSAFAGIETIRAAYRHAIDGRYRFFSYGDAMLLTRSEDALNA

SEQ ID NO: 69902 - protein, 352 aa, unidentified
  source 1..352: note = Paraburkholderia phytofirmans
  REGION 1..352: note = sp|B2SX83|QUEA_PARPJ S-adenosylmethionine:tRNA ribosyltransferase-isomerase OS=Paraburkholderia phytofirmans (strain DSM 17436 / LMG 22146 / PsJN); OX = 398527 GN=queAPE=3 SV=1
MLTLSDFDFDLPPELIAQVALPERSASRLLEVDNPAGAAGPARLIDRRFAELPECIAPGDLLVFNDTKVLKARFLGQKASGGKIEVLVERLTGERTALAQIRASKSPQPGTTIRLADAFDVTVGERVEPFYTLHFPDDCLTLIEQFGRLPLPPYIEHDPDSTDETRYQTVFAQNPGAVAAPTAGLHFDDALLARLDEKGVERATLTLHVGAGTFQPVRVENLAEHKMHSEWYHLPQALADKIAATRARGNRVIAVGTTSMRALEAAARDAEAAGRPLAAASTETDIFITPGYKFRVVDRLVTNFHLPKSTLLMLVSAFAGVETIRETYRHAIEQRYRFFSYGDAMLLTRRDA

SEQ ID NO: 69903 - protein, 353 aa, unidentified
  source 1..353: note = Paraburkholderia piptadeniae
  REGION 1..353: note = tr|A0A1N7RLP2|A0A1N7RLP2_9BURK S-adenosylmethionine:tRNA ribosyltransferase-isomerase; OS = Paraburkholderia piptadeniae OX=1701573 GN=queA PE=3; SV = 1
MFTLSDFDFDLPPELIAQVALPERSASRLLEVNGQTKPATFADRHFAELPELVDAGDLLVFNDTKVLKARFLGQKASGGKIEVLVERLTGERTALAQIRASKSPGPGTTLRLADAFEVTVGERVEPFYTLHFPGDCLTLIEQYGRLPLPPYIEHDPDAFDETRYQTVYAQNPGAVAAPTAGLHFDDSIFARLDEKGVERATLTLHVGAGTFQPVRVDNIAEHKMHSEWYQLPQSLVDRITATKARGNRVIAVGTTSMRALEAAARDAEAAGRPLAATSADTDIFITPGYRFRVVDRLVTNFHLPKSTLLMLVSAFAGIETIRAAYRHAIEERYRFFSYGDAMLLTRSDDALNA

SEQ ID NO: 69904 - protein, 350 aa, unidentified
  source 1..350: note = Paraburkholderia rhizosphaerae
  REGION 1..350: note = tr|A0A4R8LRY7|A0A4R8LRY7_9BURK S-adenosylmethionine:tRNA ribosyltransferase-isomerase; OS = Paraburkholderia rhizosphaerae OX=480658 GN=queA PE=3; SV = 1
MFTLSDFDFALPPELIAQVALPERSASRLLEVDNRTRPATLVDRHFAELPGCIAPGDLLVFNDTKVLKARFPGHKASGGKIEVLIERLTGERTALAQIRASKSPAAGTQLRLADAFDVTVGERVEPFYTLHFPADCLTLIEQYGRLPLPPYIEHDADATDETRYQTVYAQNPGAVAAPTAGLHFDEALLARLDARGVERATLTLHVGAGTFQPVRVENIAEHKMHSEWYQLPQSLVDKIAATRARGGRVIAVGTTSMRALEAAARDAQSAGRPLAATSAETDIFITPGYRFRVVDRLVTNFHLPKSTLLMLVSAFAGIDTIRAAYQHAIQERYRFFSYGDAMLLTRSGDA

SEQ ID NO: 69905 - protein, 359 aa, unidentified
  source 1..359: note = Paraburkholderia rhizoxinica
  REGION 1..359: note = tr|E5AM67|E5AM67_PARRH S-adenosylmethionine:tRNA ribosyltransferase-isomerase OS=Paraburkholderia rhizoxinica (strain DSM 19002 / CIP 109453 / HKI 454); OX = 882378 GN= queA PE=3 SV=1
MPLRYPSHFMYTLSDFDFDLPPELIAQHALPERSASRLLEVTPSGALLDRHFGELPACLEPGDLLVFNDTKVLKARFDGIKASGGRVEVLIERVTGPRTALAQIRASKRPAPGSTIRLADAFDVTVGERVEPFHTLHFPHDCIELIDQHGRLPLPPYIEHTPDTYDEARYQTVFATTPGAVAAPTAGLHFDAPTLAALDARGVRRATLTLHVGAGTFQPVRTDDIAQHKMHSEWYNIPPALVEAIEATRAAKRSVIAVGTTSMRALEAAARDAERDGRELHAVRAETDIFITPGYPFRVIDRLVTNFHLPKSTLLMLVSAFAGVEPIRRAYRHAIAQRYRFFSYGDAMLLTRAASVAQR

SEQ ID NO: 69906 - protein, 352 aa, unidentified
  source 1..352: note = Paraburkholderia rhynchosiae
  REGION 1..352: note = tr|A0A2N7WY97|A0A2N7WY97_9BURK S-adenosylmethionine:tRNA ribosyltransferase-isomerase; OS = Paraburkholderia rhynchosiae OX=487049 GN=queA PE=3 SV=1
MFTLSDFDFDLPPELIAQVALPERSASRLLEVANTVDAGDTARLIDRRFAELPECIAAGDLLVFNDTKVLKARFLGQKASGGKVEVLVERLTGERTALAQIRASKSPQPGTMIRLADAFDVTVGERVEPFYTLHFPDDCLTLIEQFGRLPLPPYIEHDPDSTDETRYQTVFAQNPGAVAAPTAGLHFDDALLARLDAKGVERGTLTLHVGAGTFQPVRVENLSEHKMHSEWYHLPQSLADKIAATKARGNRVIAVGTTSMRALEAAARDAEAAGRPLAAASTETDIFITPGYRFRVVDRLVTNFHLPKSTLLMLVSAFAGVETIRAAYRHAIEQRYRFFSYGDAMLLTRRDG

SEQ ID NO: 69907 - protein, 365 aa, unidentified
  source 1..365: note = Paraburkholderia ribeironis
  REGION 1..365: note = tr|A0A1N7S913|A0A1N7S913_9BURK S-adenosylmethionine:tRNA ribosyltransferase-isomerase; OS = Paraburkholderia ribeironis OX=1247936 GN=BN2475_450070; PE = 3 SV=1
MRAATLPIQRPDDARLLVVDGSGHIEHRARRALATFLRAYDCVIANDAATLPASLHGIHDRTGESIEVRLAGRPSLAADEVARFSAILFGAGDFHMQTEARAAPPALFPGDRLTLGPLTATVVRMLGHPRFVELRLHGSAVHIWHALALHGRPVQYAHLDSALALWDVWTPIAAQPVAFEPPSAGFVLDWRTIESLHARRISFATLTHAAGLSSTGDAGLDRCLPFDEPYRIPAATAALIEATRARQGRVVAIGTTVVRALEHAASVDGTVHAGDGIATQRIGPNTRLRIVDVVVSGAHEPGSSHYELLRAFADRATLARATAALEAHRYRTHEFGDSVWIERRKDDRQDAQVSAPCCCGQYATC

SEQ ID NO: 69908 - protein, 351 aa, unidentified
  source 1..351: note = Paraburkholderia ribeironis
  REGION 1..351: note = tr|A0A1N7S5K3|A0A1N7S5K3_9BURK S-adenosylmethionine:tRNA ribosyltransferase-isomerase; OS = Paraburkholderia ribeironis OX=1247936 GN=queA PE=3 SV=1
MFTLSDFDFDLPPELIAQVALSERSASRLLEVDNAGGADAARLIDRRFAELPECIAPGDLLVFNDTKVLKARFHGQKASGGKIEVLVERLTGERTALAQIRASKSPQPGTTIRLADAFDVTVGERVEPFYTLHFPGDCLTLIEQFGRLPLPPYIEHDPDATDETRYQTVFAQNPGAVAAPTAGLHFDDALLARLDERGVERATLTLHVGAGTFQPVRVENLAEHKMHSEWYHLPQSLADKIAATRARGNRVIAVGTTSMRALEAAARDAEAAGRPLAAASTETDIFITPGYRFRVVDRLVTNFHLPKSTLLMLVSAFAGVETIRAAYRHAIEQRYRFFSYGDAMLLTRRDA

SEQ ID NO: 69909 - protein, 357 aa, unidentified
  source 1..357: note = Paraburkholderia sacchari
  REGION 1..357: note = tr|A0A0A6QDP1|A0A0A6QDP1_9BURK S-adenosylmethionine:tRNA ribosyltransferase-isomerase; OS = Paraburkholderia sacchari OX=159450 GN=queA PE=3 SV=1
MFKLSDFDFDLPPELIAQTALPERSASRLLEVDNTARLPGQPARFTDRRFAELPACIAPGDLLVFNDTKVLKARFFGQKASGGKIEVLVERLTGARTALAQIRASKSPGQGTVLRLADAFDVTVGERVEPFYTLHFPDDCLTLIEQFGRLPLPPYITHDADANDETRYQTVFAQNPGAVAAPTAGLHFDDALLAQLDAQGVERATLTLHVGAGTFQPVRVENIADHTMHSEWYQLPQSLVDKISATRARGGRVIAVGTTSMRALEAAARDAANAGRELAATSAETDIFITPGYKFRVVDRLVTNFHLPKSTLLMLVSAFAGIETIRAAYRHAIEERYRFFSYGDAMLLTRTDDALNS

SEQ ID NO: 69910 - protein, 349 aa, unidentified
  source 1..349: note = Paraburkholderia sartisoli
  REGION 1..349: note = tr|A0A1H4DA61|A0A1H4DA61_9BURK S-adenosylmethionine:tRNA ribosyltransferase-isomerase; OS = Paraburkholderia sartisoli OX=83784 GN=queA PE=3 SV=1
MFTLSDFDFVLPPELIAQTALPERSASRLLEVDGSSAPARFNDRGFAELPACIAPGDLLVFNDTKVLKARFLGQKASGGKIEVLVERLTGETTALAQIRASKSPAPGTTLRLADAFDVTVGERVEPFYTLHFPADCLTLIEQYGRLPLPPYIEHDPDATDETRYQTVFAQNPGAVAAPTAGLHFDTSLLARLDEKGIERATLTLHVGAGTFQPVRVENLDEHKMHSEWYQLPQTLVDRIAATRARGNRVIAVGTTSMRALEAAARSAEEAGRPLAATSAETDIFITPGYRFRIVDRLVTNFHLPKSTLLMLVSAFAGVDTIRAAYAHAIEERYRFFSYGDAMLLTRRDA

SEQ ID NO: 69911 - protein, 352 aa, unidentified
  source 1..352: note = Paraburkholderia sediminicola
  REGION 1..352: note = tr|A0A495GBH8|A0A495GBH8_9BURK S-adenosylmethionine:tRNA ribosyltransferase-isomerase; OS = Paraburkholderia sediminicola OX=458836 GN=queA PE=3; SV = 1
MFTLSDFDFDLPPELIAQVALPERSASRLLEVANPADAADAARLIDRRFAELPECIAAGDLLVFNDTKVLKARFLGQKASGGKIEVLVERLTSERTALAQIRASKSPQPGTTIRLADAFDVTVGERVEPFYTLHFPDDCLTLIEQFGRLPLPPYIEHDPDATDETRYQTVFAQNPGAVAAPTAGLHFDNALLARLDAKGVERATLTLHVGAGTFQPVRVENLAEHKMHSEWYHLPQSLADKIAATRARGNRVIAVGTTSMRALEAAARDADAAGRPLGAASTETDIFITPGYKFRVVDRLVTNFHLPKSTLLMLVSAFAGVETIREAYRHAIEQRYRFFSYGDAMLLTRRDV

SEQ ID NO: 69912 - protein, 352 aa, unidentified
  source 1..352: note = Paraburkholderia sediminicola
  REGION 1..352: note = tr|A0A3R7KCX4|A0A3R7KCX4_9BURK S-adenosylmethionine:tRNA ribosyltransferase-isomerase; OS = Paraburkholderia sediminicola OX=458836 GN=queA PE=3; SV = 1
MFTLSDFDFDLPPELIAQVALPERSASRLLEVANPADAADAARLIDRRFAELPECIAAGDLLVFNDTKVLKARFLGQKASGGKIEVLVERLTGERTALAQIRASKSPQPGTTIRLADAFDVTVGERVEPFYTLHFPDDCLTLIEQFGRLPLPPYIEHDPDSTDETRYQTVFAQNPGAVAAPTAGLHFDNALLARLDAKGVERATLTLHVGAGTFQPVRVENLAEHKMHSEWYHLPQSVADKIAATRARGNRVIAVGTTSMRALEAAARDADAAGRPLGAASTETDIFITPGYKFRVVDRLVTNFHLPKSTLLMLVSAFAGVETIREAYRHAIEQRYRFFSYGDAMLLTRRDV

SEQ ID NO: 69913 - protein, 353 aa, unidentified
  source 1..353: note = Paraburkholderia silvatlantica
  REGION 1..353: note = tr|A0A2U1AAS8|A0A2U1AAS8_9BURK S-adenosylmethionine:tRNA ribosyltransferase-isomerase; OS = Paraburkholderia silvatlantica OX=321895 GN=queA PE=3; SV = 1
MFKLSDFDFDLPEELIAQTALPERSASRLLEVDNTTQPARLTDRRFSDLPSRIAPGDLLVFNDTRVLKARFFGQKASGGKIEVLVERLTGARTALAQIRASKSPGPGTVLRLADAFEVTVGERVDPFYTLHFPDDCLTLIEQHGRLPLPPYITHDADASDETRYQTVFAQNPGAVAAPTAGLHFDDALLAQLDARGVERATLTLHVGAGTFQPVRVENIAEHKMHSEWYELPQSLVDKIAATRARGGRVIAVGTTSMRALEAAARDADRAGRALGATQAETDIFITPGYPFRVVDRLVTNFHLPKSTLLMLVSAFAGIETIRAAYRHAIAERYRFFSYGDAMLLTRTDDALNR

SEQ ID NO: 69914 - protein, 351 aa, unidentified
  source 1..351: note = Paraburkholderia sp.
  REGION 1..351: note = tr|A0A4R1J1Z2|A0A4R1J1Z2_9BURK S-adenosylmethionine:tRNA ribosyltransferase-isomerase; OS = Paraburkholderia sp. BL8N3 OX=1938808 GN=queA PE=3 SV=1
MFTLSDFDFNLPPELIAQTALAERSASRLLEVDNRTSPATLTDRRFSELPGLIDAGDLLVFNDTKVLKARFLGKKASGGRIEVLIERLTGATTALAQIRASKSPAPGTTLTLADAFDVTVGERVEPFFTLHFPADCLTLIERYGRLPLPPYIEHDPDAVDETRYQTVYAANPGAVAAPTAGLHFDDALFAALDERGVARGTLTLHVGAGTFQPVRVENIAEHRMHSEWYELPQTLVDRIAATKARGNRVIAVGTTSMRALEAAARDAAVANRPLAAAAAETDIFITPGYEFRVVDRLITNFHLPKSTLLMLVSAFAGVETIREAYRHAIEARYRFFSYGDAMLLTRQSTGI

SEQ ID NO: 69915 - protein, 370 aa, unidentified
  source 1..370: note = Paraburkholderia sp.
  REGION 1..370: note = tr|A0A372K2Y2|A0A372K2Y2_9BURK S-adenosylmethionine:tRNA ribosyltransferase-isomerase; OS = Paraburkholderia sp. DHOC27 OX=2303330 GN=D0B32_16540; PE = 3 SV=1
MSLRAANLAIQRPHDARLLVVDQYGHIEHRPRTALIDLLREGDCVIANDAATLPASLAAIHERSGAPIEVRLAGRASLDPHDVQRFTAVLFGAGDFHTPTEARAAPPAVIEGDQLRLGSLRATVLCVLDHPRLVELRFEGNATSIWRTLAEQGKPVQYAHVPQALALWDVWTTIAAQPVAFESPSAGFVLDWQSVDAMRARGIDFATLTHAAGLSSTGDAALDTRLPFDEPYRIPPSTAQMIAATRARGGRVVAIGTTVVRALEHAARSDGIVHAGDGMATQQLGPGSILRVVDVIVSGTHEPDTSHYALLRAFTDTLTLQRASDELDAHRYRTHEFGDSVWIERRACAGRERHAKAFNNWSLTLPTEAI

SEQ ID NO: 69916 - protein, 352 aa, unidentified
  source 1..352: note = Paraburkholderia sprentiae
  REGION 1..352: note = tr|A0A1I9YHJ3|A0A1I9YHJ3_9BURK S-adenosylmethionine:tRNA ribosyltransferase-isomerase; OS = Paraburkholderia sprentiae WSM5005 OX=754502 GN=queA; PE = 3 SV=1
MFTLSDFDFDLPPELIAQVALPERSASRLLDVDAAGVADGAARLIDRRFTELPECVAPGDLLVFNDTKVLKARFFGQKASGGKIEVLVERLIGERSALAQVRASKSPQAGTTIRLADAFDVTVGERVDQFYTLHFPDDCLTLIEQYGRLPLPPYIEHDPDATDETRYQTVFAQNPGAVAAPTAGLHFDDALLARLDANGVERATLTLHVGAGTFQPVRVENIAEHKMHSEWYHLPQALADKIAATKARGNRVIAVGTTSMRALEAAARDAEAAGHPLAAASAETDIFITPGYRFRVVDRLVTNFHLPKSTLLMLVSAFAGVETIRAAYRHAIDERYRFFSYGDAMLLTRRDA

SEQ ID NO: 69917 - protein, 352 aa, unidentified
  source 1..352: note = Paraburkholderia susongensis
  REGION 1..352: note = tr|A0A1X7KMH2|A0A1X7KMH2_9BURK S-adenosylmethionine:tRNA ribosyltransferase-isomerase; OS = Paraburkholderia susongensis OX=1515439 GN=queA PE=3; SV = 1
MFTLSDFDFDLPPELIAQVALPERSASRLLDVDGTGRPDGAASLTDRHFTELPECIAPGDLLVFNDTKVLKARFFGVKASGGRIEVLVERLTGERTALAQIRASKSPQPGTTIRLADAFEVTVGERVDPFYTLHFPADCLTLIERYGRLPLPPYIEHDPDATDETRYQTVFAQNPGAVAAPTAGLHFDDALLAKLDARGVARATLTLHVGAGTFQPVRVEKIAEHKMHSEWYHLPQALADKIAATKARGNRVIAVGTTSMRALEAAARDADAAGRPLAAASAETDIFITPGYRFRVVDRLVTNFHLPKSTLLMLVSAFAGVETIRAAYRHAIEERYRFFSYGDAMLLTRRNV

SEQ ID NO: 69918 - protein, 353 aa, unidentified
  source 1..353: note = Paraburkholderia terrae
  REGION 1..353: note = tr|I5D1V2|I5D1V2_9BURK S-adenosylmethionine:tRNA ribosyltransferase-isomerase OS=Paraburkholderia terrae BS001 OX=1171375 GN=queA PE=3 SV=1
MFTLSDFDFDLPPELIAQVALPQRSASRLLEVNGQTSPATLADRHFADLPDCIESGDLLVFNDTKVLKARFIGQKASGGKIEVLIERLTGERTALAQIRASKSPAAGTTLRLADAFDVTVGERVEPFYTLHFPDDCLTLIEQFGRLPLPPYIEHDPDAFDETRYQTVYAQNPGAVAAPTAGLHFDDSIFARLDAKGVERATLTLHVGAGTFQPVRVENIDEHKMHSEWYQLPQSLVDKIAATKARGNRVIAVGTTSMRALEAAARDADTAGRPLAATSAETDIFITPGYRFRVVDRLVTNFHLPKSTLLMLVSAFAGIETIRAAYRHAIDERYRFFSYGDAMLLTRNDDALNA

SEQ ID NO: 69919 - protein, 353 aa, unidentified
  source 1..353: note = Paraburkholderia terrae
  REGION 1..353: note = tr|A0A2I8ELY0|A0A2I8ELY0_9BURK S-adenosylmethionine:tRNA ribosyltransferase-isomerase; OS = Paraburkholderia terrae OX=311230 GN=queA PE=3 SV=1
MFTLSDFDFDLPPELIAQVALPQRSASRLLEVNGQTSPATLADRRFADLPDCIESGDLLVFNDTKVLKARFIGQKASGGKIEVLIERLTGERTALAQIRASKSPAAGTTLRLADAFDVTVGERVEPFYTLHFPDDCLTLIDQFGRLPLPPYIEHDPDAFDETRYQTVYAQNPGAVAAPTAGLHFDDSIFARLDAKGVERATLTLHVGAGTFQPVRVENIDEHKMHSEWYQLPQSLVDKIAATKARGNRVIAVGTTSMRALEAAARDADAAGRPLAATSAETDIFITPGYRFRVVDRLVTNFHLPKSTLLMLVSAFAGIETIRAAYRHAIDERYRFFSYGDAMLLTRHDDALNA

SEQ ID NO: 69920 - protein, 351 aa, unidentified
  source 1..351: note = Paraburkholderia terricola
  REGION 1..351: note = tr|A0A1M6MFP1|A0A1M6MFP1_9BURK S-adenosylmethionine:tRNA ribosyltransferase-isomerase; OS = Paraburkholderia terricola OX=169427 GN=queA PE=3 SV=1
MFTLSDFDFDLPPELIAQVALPERSASRLLEVDNPLDAGAARLIDRRFAELPDCIAAGDLLVFNDTKVLKARFLGQKASGGKVEVLVERLTGERTALAQIRASKSPQPGTTIRLADAFDVTVGERVEPFYTLHFPDDCLTLIEQHGRLPLPPYIEHDPDATDETRYQTVFAQNPGAVAAPTAGLHFDDALLAKLDAKGVQRATLTLHVGAGTFQPVRVENLAEHKMHSEWYHLPQSLADKIAATRERGNRVIAVGTTSMRALEAAARDAEAAGRPLAAASTETDIFITPGYKFRVVDRLVTNFHLPKSTLLMLVSAFAGVETIRKAYRHAIDERYRFFSYGDAMLLTRRDG

SEQ ID NO: 69921 - protein, 353 aa, unidentified
  source 1..353: note = Paraburkholderia tropica
  REGION 1..353: note = tr|A0A1A5X2J2|A0A1A5X2J2_9BURK S-adenosylmethionine:tRNA ribosyltransferase-isomerase; OS = Paraburkholderia tropica OX=92647 GN=queA PE=3 SV=1
MFKLSDFDFDLPEALIAQIALPERSASRLLEVDNSVQPARLTDRTVADLPACIAPGDLLVFNDTKVLKARFFGQKASGGKIEVLVERLTGARTALAQIRASKSPAPGTTLRLADAFDVTVGERVEPFYTLHFPDDCLTLIEQFGRLPLPPYITHDADAGDETRYQTVFAQNPGAVAAPTAGLHFDDALFAKLDAQGVERATLTLHVGAGTFQPVRVENIADHTMHSEWYQLPQSLVDKIAATRARGGRVIAVGTTSMRALEAAARDAEREGRPLAATQAETDIFITPGYQFRVVDRLVTNFHLPKSTLLMLVSAFAGIETIRAAYRHAIAERYRFFSYGDAMLLTRTADALKA

SEQ ID NO: 69922 - protein, 356 aa, unidentified
  source 1..356: note = Paraburkholderia tuberum
  REGION 1..356: note = tr|A0A1H1EME8|A0A1H1EME8_9BURK S-adenosylmethionine:tRNA ribosyltransferase-isomerase; OS = Paraburkholderia tuberum OX=157910 GN=queA PE=3 SV=1
MFTLSDFDFDLPPELIAQVALPERSASRLLDVDAAGAADGAADGAARLIDRRFTELPECLAPGDLLVFNDTKVLKARFFGQKSSGGKIEVLVERLTGERSALAQIRASKSPQAGTTIRLADAFDVTVGERVDQFYTLHFPDDCLTMIEQYGRLPLPPYIEHDPDATDETRYQTVFAQNPGAVAAPTAGLHFDDTLLARLDALGIDRATLTLHVGAGTFQPVRVENIAEHKMHSEWYHLPQALADKIAATKARGNRVIAVGTTSMRALEAAARDAEAAGHPLGAASAETDIFITPGYRFRVVDRLVTNFHLPKSTLLMLVSAFAGVETIRAAYRHAIDERYRFFSYGDAMLLTRRDA

SEQ ID NO: 69923 - protein, 357 aa, unidentified
  source 1..357: note = Paraburkholderia unamae
  REGION 1..357: note = tr|A0A328XRB6|A0A328XRB6_9BURK S-adenosylmethionine:tRNA ribosyltransferase-isomerase; OS = Paraburkholderia unamae OX=219649 GN=queA PE=3 SV=1
MFKLSDFDFDLPEALIAQTALPERSASRLLEVDNAAPLPGEPARLTDRRFSDLPACLAPGDLLVFNDTKVLKARFFGQKASGGKIEVLVERLTGARTALAQIRASKSPGPGTVLRLADAFDVTVGERVDQFYTLHFPDDCLTLIEQYGRLPLPPYITHDADASDETRYQTVFAQNPGAVAAPTAGLHFDDALLAQLDAQGVERATLTLHVGAGTFQPVRVENIAEHKMHSEWYQLPQSLVDKIAATRARGGRVIAVGTTSMRALEAAARDAANENRELAATQAETDIFITPGYRFRVVDRLVTNFHLPKSTLLMLVSAFAGIETIRAAYRHAIAERYRFFSYGDAMLLTKTDDALNK

SEQ ID NO: 69924 - protein, 352 aa, unidentified
  source 1..352: note = Paraburkholderia xenovorans
  REGION 1..352: note = sp|Q145H9|QUEA_PARXL S-adenosylmethionine:tRNA ribosyltransferase-isomerase OS=Paraburkholderia xenovorans (strain LB400) OX=266265 GN=queA PE=3 SV=1
MLTLSDFDFDLPPELIAQVALPERSASRLLEVDNPAGATGPARLIDRRFAELPDCIAAGDLLVFNDTKVLKARFLGQKASGGKIEVLVERLTGERTALAQIRASKSPQPGTTIRLADAFDVTVGERVEPFYTLHFPADCLTLIEQFGRLPLPPYIEHDPDATDETRYQTVFAQNPGAVAAPTAGLHFDEALLARLDAAGVERATLTLHVGAGTFQPVRVENLAEHKMHSEWYHLPQSLADKIAATRARGNRVIAVGTTSMRALEAAARDAEAAGRPLAAASTETDIFITPGYRFRVVDRLVTNFHLPKSTLLMLVSAFAGVETIREAYRHAIEARYRFFSYGDAMLLTRRDA

SEQ ID NO: 69925 - protein, 355 aa, unidentified
  source 1..355: note = Paracandidimonas soli
  REGION 1..355: note = tr|A0A4R3V7U3|A0A4R3V7U3_9BURK S-adenosylmethionine:tRNA ribosyltransferase-isomerase; OS = Paracandidimonas soli OX=1917182 GN=queA PE=3 SV=1
MTPSLDISQFDYELPQELIAQSPPPQRGDSRLLHLDSRGQLHDLQFPDLLSLLRPNDLLVFNDTRVIKARLLGRKASGGKVEVLIERITRSDQALAHVRSSKSPKPGTVLDLADAFQATVLGREGELFLLAFPEPVLDLLDRHGATPLPPYIEHAAGQEDEERYQTVYAREPGAVAAPTAGLHFSDALMEKIDALGVQKAFVTLHVGAGTFQPVRGAIEDHVMHSERFRVPADTLRKAQAARQAGGRVIAVGTTSVRSLESAAAVCSPEQLAAGAALPDSIEDDTRLFITPGYRYQWVDALITNFHLPQSTLLMLVSAFAGLEPIRRAYRHAVQSRYRFFSYGDAMFLESPDTIL

SEQ ID NO: 69926 - protein, 345 aa, Parachlamydia acanthamoebae
  REGION 1..345: note = tr|F8L074|F8L074_PARAV S-adenosylmethionine:tRNA ribosyltransferase-isomerase OS=Parachlamydia acanthamoebae (strain UV7) OX=765952 GN=queA PE=3 SV=1
MTNSPYHLSSYHFDLPQELIAQHPCTPRDHSRLMVVDRGSGILSEIPFYELADFLQKGDSLIFNNTKVIPARLLGKRLTGGQAEVFLKAQRSDGTWEVLVKPGKQLGLGSKVIFSETFSCEIVDVLPEGARCVRFFHEGDFNQVLEQHGKIPLPKYIKREPDVKEDGERYQTVYAAHPGAVAAPTAGLHFTQPLLNRITSKGVERIEVTLHVGLGTFLPIKVEDIRDHQMHDESFFISVQAAQQLNNPSSGRQICIGTTSCRALESAAGHSSIIQPGEYSTDIFISPGYQFRKMQALLTNFHLPCSSLLVLVSTFAGHELIREAYQKAVKEKFRFYSYGDAMLIL

SEQ ID NO: 69927 - protein, 362 aa, Parachlamydia acanthamoebae
  REGION 1..362: note = tr|A0A0C1E928|A0A0C1E928_9BACT S-adenosylmethionine:tRNA ribosyltransferase-isomerase; OS = Parachlamydia acanthamoebae OX=83552 GN=queA PE=3 SV=1
MGHLVSQMPFRPQKQNLMTNSPYHLSSYHFDLPQELIAQHPCTPRDHSRLMVVDRGSGILSEIPFYELADFLQKGDSLIFNNTKVIPARLLGKRLTGGQAEVFLKAQRSDGTWEVLVKPGKQLGLGSKVIFSETFSCEIVDVLPEGARCVRFFHEGDFNQVLEQHGKIPLPKYIKREPDVKEDGERYQTVYAAHPGAVAAPTAGLHFTQPLLNRITSKGVERIEVTLHVGLGTFLPIKVEDIRDHQMHDESFFISVQAAQQLNNPSSGRQICIGTTSCRALESAAGHSSIIQPGEYSTDIFISPGYQFRKMQALLTNFHLPCSSLLVLVSTFAGHELIREAYQKAVKEKFRFYSYGDAMLIL

SEQ ID NO: 69928 - protein, 345 aa, Parachlamydia sp.
  REGION 1..345: note = tr|A0A2H9SQI4|A0A2H9SQI4_9BACT S-adenosylmethionine:tRNA ribosyltransferase-isomerase; OS = Parachlamydia sp. OX=2052048 GN=queA PE=3 SV=1
MTNMPYQLSSYHFELPKELIAQHPCQPRDHSRLMIVDRAAGSLTEIPFFELPHLLEKGDRLVFNNTKVIPARLIGKRLTGGSAEVFLKEKRKDGTWEVLVKPGKQLGVGAKVIFGDSFFCEITEVLAEGSRYVRFFHEGDFEQVLAQYGQIPLPKYIKRDPSFKEDGESYQTVYAACPGAVAAPTAGLHFTKPLLNQLTQQGVEQIQITLHVGLGTFLPIKVSDIRQHQMHQESFIISPQAAEQLNQPNTGKQICVGTTSCRALEAAAAIAPTIEAGEYATDIFIAPGYQFHRVKSLLTNFHLPGSSLLVLVSAFAGHELIMEAYQKAVKEKFRFFSYGDAMLIL

SEQ ID NO: 69929 - protein, 341 aa, unidentified
  source 1..341: note = Paraclostridium benzoelyticum
  REGION 1..341: note = tr|A0A0M3DGW1|A0A0M3DGW1_9FIRM S-adenosylmethionine:tRNA ribosyltransferase-isomerase; OS = Paraclostridium benzoelyticum OX=1629550 GN=queA PE=3; SV = 1
MKTSDFYFDLPEELIAQTPLQDRSNSRLMILDRKTGDVEHKIFKDVIDYLNPGDCLVLNNTRVIPARLIGEKVDTGGKIEFLLLKRTEKDVWQALVKPGKRAKVGTKFSFGNGKLIGEVVGLAEEGSRLVKFYYEGIFEEVLDELGNMPLPPYITERLEERERYQTVYSKHNGSAAAPTAGLHFTNELLESIKAKGVDIAFVTLHVGLGTFRPVKVDDVLEHEMHSEYYIVDKEASEKINKAKKNGNKVICVGTTSCRTVESASNENGEIIESSGWTNIFIYPGYKFKIVDRLITNFHLPESTLIMLVSALVSKDAVLNAYNTAVKEKYRFFSFGDAMIIK

SEQ ID NO: 69930 - protein, 341 aa, unidentified
  source 1..341: note = Paraclostridium bifermentans
  REGION 1..341: note = tr|A0A1X2JGB1|A0A1X2JGB1_PARBF S-adenosylmethionine:tRNA ribosyltransferase-isomerase; OS = Paraclostridium bifermentans OX=1490 GN=queA PE=3 SV=1
MKTSDFYFDLPEELIAQTPLEDRSNSRLMVLDRETGDVEHKIFKDVIDYLNPGDCLVLNNTRVIPARLIGEKVDTGGKIEFLLLKRTEKDVWQALVKPGKRAKIGTKFSFGNGKLIGEVVGLAEEGSRLVKFYYEGIFEEVLDELGNMPLPPYITERLEERERYQTVYSKHNGSAAAPTAGLHFTNELLESIKAKGIDIAFVTLHVGLGTFRPVKVDDVLAHEMHSEYYMVDKEAAEKINRAKKNGNKVICVGTTSCRTVESASNENGEIVESSGWTNIFIYPGYKFKVVDRLITNFHLPESTLIMLVSALVSKDAVLNAYNTAVKEKYRFFSFGDAMIIK

SEQ ID NO: 69931 - protein, 341 aa, unidentified
  source 1..341: note = Paraclostridium bifermentans
  REGION 1..341: note = tr|T4VWY5|T4VWY5_PARBF S-adenosylmethionine:tRNA ribosyltransferase-isomerase OS=Paraclostridium bifermentans ATCC 19299 OX=1233170 GN=queA PE=3 SV=1
MKTSDFYFDLPEELIAQTPLEDRSNSRLMVLDRKTGDVEHKIFKDVIDYLNPGDCLVLNNTRVIPARLIGEKVDTGGKIEFLLLKRTEKDVWQALVKPGKRAKIGTKFSFGNGKLIGEVVGLAEEGSRLVKFYYEGIFEEVLDELGNMPLPPYITERLEERERYQTVYSKHNGSAAAPTAGLHFTNELLESIKAKGIDIAFVTLHVGLGTFRPVKVDDVLAHEMHSEYYMVDKEAAEKINRAKKNGNKVICVGTTSCRTVESASNENGEIVESSGWTNIFIYPGYKFKVVDRLITNFHLPESTLIMLVSALVSKDAVLNAYNTAVKEKYRFFSFGDAMIIK

SEQ ID NO: 69932 - protein, 348 aa, Paracoccus aestuarii
  REGION 1..348: note = tr|A0A419A0B5|A0A419A0B5_9RHOB S-adenosylmethionine:tRNA ribosyltransferase-isomerase; OS = Paracoccus aestuarii OX=453842 GN=queA PE=3 SV=1
MKLSDFDFDLPEGLIATRPARPRSAARLLLAQGGGIEDRIVADLPEILRPGDLLVLNDTRVIPARLTGTRTRATPQGDATARIEVTLLEPAAEGWQALAKPLRKLRAGEVIRFGQDLSAEVAEITEGGLRLVFDAQGEAFDAALNRVGAMPLPPYIAALRAPDDQDRDDYQTVWAARQGAVAAPTASLHFDAPLLEALAARGLEFAHVTLHVGAGTFLPVKVDDVTTHRMHSEWGEVSQDAADAINRARAEGRRVIPVGTTALRLIESAATGPGRIAAFRGTTDIFIYPGHHFRVTDGLMTNFHLPKSTLMMLVSALMGREKIREIYGHAVRERYRFFSYGDASLLIP

SEQ ID NO: 69933 - protein, 349 aa, Paracoccus alcaliphilus
  REGION 1..349: note = tr|A0A1H8FLJ1|A0A1H8FLJ1_9RHOB S-adenosylmethionine:tRNA ribosyltransferase-isomerase; OS = Paracoccus alcaliphilus OX=34002 GN=queA PE=3 SV=1
MKLSDFDFDLPSDLIATRPARPRTSARLLLAEGGAGIEDRRVSDLPDILRPGDLLVLNDTRVIPARLTGQRHRQTVQGEVVARIEVTLLEPAADGWRALAKPLRKLREGEVIRFGDALSATVAGIAEGELQLRFDAQGDAFDTALQKVGAMPLPPYIAALRAPDEQDRHDYQTVWARHQGAVAAPTASLHFDQPLLDRLAAMGVGFARVTLHVGAGTFLPVKVEDVASHRMHAEWGEVLPDAADAINAARHEGRRVIAVGTTALRLIESAAVPGGRVAPFRGTTDIFIHPGYQFRVTDGLMTNFHLPKSTLLMLVSALMGPQRIRDIYDHAVGSGYRFFSYGDASLLIP

SEQ ID NO: 69934 - protein, 353 aa, Paracoccus alkenifer
  REGION 1..353: note = tr|A0A1H6L1N2|A0A1H6L1N2_9RHOB S-adenosylmethionine:tRNA ribosyltransferase-isomerase; OS = Paracoccus alkenifer OX=65735 GN=queA PE=3 SV=1
MRLSDFDFDLPERLIATRPARPRSAARLLVARGDAITDAHVRDLPAFLRPGDLLVLNDTRVIPARLTGTRTRDSDAGPATARIEVTLLEPAPGGLWRALAKPLRKLREAEVIRFGDTLSARVDRIEDAALLLDFDAAGEAFDAALAQVGAMPLPPYIAALRPPDEQDRTDYQTVWAERPGAVAAPTASLHFDDALLGALAAMGVQTTRVTLHVGAGTFLPVKTDDISQHRMHAERGIVSAEAAAAINAARAEGRRVIPVGTTALRLIESAAAPDGRVAAYDGMTDIFIRPGHRFRVTDGLMTNFHLPKSTLMMLVSALMGVDPVRAIYSHAVNENYRFFSYGDASLLLPEETC

SEQ ID NO: 69935 - protein, 349 aa, Paracoccus aminophilus
  REGION 1..349: note = tr|S5YWL9|S5YWL9_PARAH S-adenosylmethionine:tRNA ribosyltransferase-isomerase OS=Paracoccus aminophilus JCM 7686 OX=1367847 GN=queA PE=3 SV=1
MKLDDFDFDLPEGLIATRPAQPRSAARLLVAEGPDLRDLQVHDLTRVLQPGDLLVLNDTKVIPARLTGKRDRMTAQGLVSAKIEVTLLEPDAAGNWRALAKPLRKLQPGERIIFSDQLSAEVVEIADAGLSLRFDAEGSAFEEELARVGAMPLPPYIAALRAPDEQDRTDYQTVWAKNSGAVAAPTASLHFDAPLLDALREMGVRFTYVTLHVGAGTFLPVKVDDVATHKMHAEWGEVSEAAAQAINAAKAEGARVIPVGTTALRLIESAASEDGRMQPFQGTTEIFIYPGYRFRVTDALMTNFHLPKSTLLMLVSALMGQERIREIYGHAVSSGYRFFSYGDASLLIP

SEQ ID NO: 69936 - protein, 351 aa, Paracoccus aminovorans
  REGION 1..351: note = tr|A0A1I3C0B4|A0A1I3C0B4_9RHOB S-adenosylmethionine:tRNA ribosyltransferase-isomerase; OS = Paracoccus aminovorans OX=34004 GN=queA PE=3 SV=1
MRLEDFDFHLPEALIATRPARPRSSARLLLAEGDAIRDLHVHDLAELLGPGDLLVLNDTKVIPARLTGTRTRRTAQGAAVAKVEITLLEPAADGWKALAKPLRKLKPGEVIRFSDALSAEVVEIAQAGLTLRFDAAGEAFDAALSRVGAMPLPPYIAALRPPDEADRTDYQTVWARHSGAVAAPTASLHFDEPLLAALRARGVRFAHVTLHVGAGTFLPVKVEDVTTHRMHGEWGEVTPEAAAAINATRAAGGRVIPVGTTALRLIESAAAEDGTVHPFRDVTEIFIYPGYRFRVTDALMTNFHLPRSTLLMLVSALMGRDRIRVVYRHAVESGYRFFSYGDASLLIPKRE

SEQ ID NO: 69937 - protein, 351 aa, Paracoccus bengalensis
  REGION 1..351: note = tr|A0A3D9X9W5|A0A3D9X9W5_9RHOB S-adenosylmethionine:tRNA ribosyltransferase-isomerase; OS = Paracoccus bengalensis OX=302403 GN=queA PE=3 SV=1
MKLDDFDFHLPEGLIATRPARPRTAARLLLALGDSIRDLHVRDLADLLGPGDLLVLNDTKVIPARLTGTRARPTPQGEAVAKVEVTLLEPAADGWKALAKPLRKLKPGEVIRFGEALSAEVAGISEGELTLRFDATGAAFDAALAQVGAMPLPPYIAALRAPDDADRQDYQTVWARRSGAVAAPTASLHFDDALLGQLAARGVRFAHVTLHVGAGTFLPVKVEDVTTHKMHGEWGEVTPEAAAAINATRAQGGRVIPVGTTALRLIESAADQDGIVHPFQGVTEIFIYPGYRFRVTDALITNFHLPKSTLLMLVSALMGQDRIRGIYHHAVESGYRFFSYGDASLLIPKDP

SEQ ID NO: 69938 - protein, 351 aa, Paracoccus chinensis
  REGION 1..351: note = tr|A0A1G9E3B0|A0A1G9E3B0_9RHOB S-adenosylmethionine:tRNA ribosyltransferase-isomerase; OS = Paracoccus chinensis OX=525640 GN=queA PE=3 SV=1
MRLSDFDFELPEGLIATRPARPRSSARLLVAHGHSTTDARVSDLPSFLRPGDLLVLNDTRVIPARLTGTRTRDSAQGPATARIEVTLLEPAPGGQWQALAKPLRKLRQGEVIRFGEALSARVEAITDAGLTLSFDAEGEAFDAALAQVGAMPLPPYIAALRAPDDQDRTDYQTVWAERPGAVAAPTASLHFDEPLLASLEAMGVQRVHVTLHVGAGTFLPVKTDDVSQHRMHAERGIVTAEAAAAINAAKAEGRRVIPVGTTALRLIESAATEDGRIHPFDAQTDIFIRPGYRFRVTDGLMTNFHLPKSTLMMLVSALMGTERIRAIYAHAVHENYRFFSYGDASLLIPGD

SEQ ID NO: 69939 - protein, 352 aa, unidentified
  source 1..352: note = Paracoccus contaminans
  REGION 1..352: note = tr|A0A1W6CU71|A0A1W6CU71_9RHOB S-adenosylmethionine:tRNA ribosyltransferase-isomerase; OS = Paracoccus contaminans OX=1945662 GN=queA PE=3 SV=1
MRLSDFDFDLPEGLIATRPARPRTAARLLVAQGARMTDATVADLPQFLRAGDLLVLNDTRVIPARLNGTRGRATPQGEVSARIEITLMEPAPDGAWRALAKPLRKLRAGDRLHFAGRLSAMVEAIGEGDVTLRFDAEGEAFDAALAAVGAMPLPPYIAALRAPDEQDREDYQTVWARAPGAVAAPTASLHFDEALLTRLAGMGVGLAHVTLHVGAGTFLPVKTDDVSQHRMHAERGIVTPQAAAAIAGAKAEGRRVIAVGTTALRLIETAAAAGKIGPFDGSTDIFIRPGFRFHVADGLMTNFHLPRSTLMMLVSALMGPDRIRAIYAHAIAARYRFFSYGDASLLLPGVPC

SEQ ID NO: 69940 - protein, 353 aa, Paracoccus denitrificans
  REGION 1..353: note = tr|A0A2W4ZQL0|A0A2W4ZQL0_PARDE S-adenosylmethionine:tRNA ribosyltransferase-isomerase; OS = Paracoccus denitrificans OX=266 GN=queA PE=3 SV=1
MQLQDFDFDLPADLIATRPARPRSSARLLVAQGDDITDTTVAHLGDFLRPGDLLVLNDTRVIPARLTGTRSRSTPQGDATAKIEITLLEPAPGGLWRALAKPLRKLREEEVIRFGDRLTATVAAIAEGELTLQFDATGDDFDAALNAVGAMPLPPYIAAQRAPDDADRTDYQTVWARNSGAVAAPTASLHFDEGLLDDLRARGIQTTHVTLHVGAGTFLPVKVDDVTTHKMHAEWGEVTPAAAEAIATAKAEGRRVIPVGTTALRLIESAAQPTGQIAPFQGTTDIFIYPGFRFQVTDALMTNFHLPKSTLMMLVSALMGQDRVRAIYAHAVAQKYRFFSYGDASLLIPEVHR

SEQ ID NO: 69941 - protein, 352 aa, Paracoccus denitrificans
  REGION 1..352: note = tr|A0A533IEP4|A0A533IEP4_PARDE S-adenosylmethionine:tRNA ribosyltransferase-isomerase; OS = Paracoccus denitrificans OX=266 GN=queA PE=3 SV=1
MNLSDFDFHLPDGLIATRPARPRSAARLMLAEGSSISDRHVFDLPDILREGDLLVLNDTKVIPARLTGQRSRQTAQGEVSAKIEITLLEPVSNGWRALAKPLRKLKPGEVIRFGETLSARVAEMTETDLTLEFDATGDALDKALDQVGAMPLPPYIAALRAPDMADRTDYQTVWARNSGAVAAPTASLHFDDALLADLRARGIRFAHVTLHVGAGTFLPVKVEDVTTHKMHAEWGEITPEAATLINATRAAGGRVIPVGTTALRLIESAADVDGHVQPFAAATDIFIYPGYRFRVTDALMTNFHLPKSTLLMLVSALMGQDRIREIYRHAVDTGYRFFSYGDASLLIPEGSP

SEQ ID NO: 69942 - protein, 348 aa, unidentified
  source 1..348: note = Paracoccus gahaiensis
  REGION 1..348: note = tr|A0A4U0R5G3|A0A4U0R5G3_9RHOB S-adenosylmethionine:tRNA ribosyltransferase-isomerase; OS = Paracoccus gahaiensis OX=1706839 GN=queA PE=3 SV=1
MKLSDFDFDLPAHLIATRPARPRSSARLLRAEGGRIEDRHVGDLPDILRPSDLLVLNDTKVIPARLSGTRTRQSAQGEVTARIEITLLEPAAEGWQALAKPLRKLRVGEVIRFGNALAATVAEIGEGGLRLVFDAVGEAFDAALNQVGAMPLPPYIAALRAPDDQDRQDYQTVWAARQGAAAAPTASLHFDAPLLAALRARGVEFVHVTLHVGAGTFLPVKVEDVTTHRMHAEWGEVDAAAAAAITRAKAEGRRVIPVGTTALRLIESAATGPGRVDPFRGTTDIFIYPGHHFRVTDGLMTNFHLPKSTLMMLVSALMGPEKIREIYGHAVGNGYRFFSYGDGSLLIP

SEQ ID NO: 69943 - protein, 348 aa, Paracoccus haeundaensis
  REGION 1..348: note = tr|A0A5C4R7J9|A0A5C4R7J9_9RHOB S-adenosylmethionine:tRNA ribosyltransferase-isomerase; OS = Paracoccus haeundaensis OX=225362 GN=queA PE=3 SV=1
MKLSDFDFDLPADLIATRPAKPRSSARLLLAEGGAIADRHVGDLPQILRPGDLLVLNDTKVIPARLTGTRARQTPQGEAVARIEVTLLEPAAEGWQALAKPLRKLRVGEVIRFGDALSASVAEMTATGLRLVFDATGDAFDAALQQVGAMPLPPYIAALRAPDDQDRDDYQTVWAARQGAVAAPTASLHFDAPLLETLAAQGVQFVHVTLHVGAGTFLPVKVDDVTTHRMHAEWGEVSPEAAEAINRAKAEGRRVIPVGTTALRLIESAAPQVGRIAPFRGTTDIFIYPGYQFRVTDGLMTNFHLPKSTLLMLVSALMGSEKIREIYGHAVERGYRFFSYGDASLLIP

SEQ ID NO: 69944 - protein, 351 aa, Paracoccus halophilus
  REGION 1..351: note = tr|A0A099EZS6|A0A099EZS6_9RHOB S-adenosylmethionine:tRNA ribosyltransferase-isomerase; OS = Paracoccus halophilus OX=376733 GN=queA PE=3 SV=1
MKLDDFDFHLPDSLIATRPARPRSSARLLLAQGARIRDLHVSDLADLLGPGDLLVLNDTRVIPARLSGKRVRRTPQGEAVAGIEVTLLEPVAGGWKALAKPLRKLKPGEVIRFADDLSAEVAGIGDGALTLRFDAEGQAFDAALARVGAMPLPPYIAALRAPDQADHEDYQTIWARRSGAVAAPTASLHFDRPLLDRLAEKGVRTTHVTLHVGAGTFLPVKVEDVTRHRMHGEWGEVTPGAAAAINETRAAGGRVIPVGTTALRLIESAADEDGRVRPYSGITEIFIYPGYRFRVTDALMTNFHLPKSTLLMLVSALMGQQRIREVYRHAVDSGYRFFSYGDASLLIPGDP

SEQ ID NO: 69945 - protein, 348 aa, unidentified
  source 1..348: note = Paracoccus hibiscisoli
  REGION 1..348: note = tr|A0A4U0QXH3|A0A4U0QXH3_9RHOB S-adenosylmethionine:tRNA ribosyltransferase-isomerase; OS = Paracoccus hibiscisoli OX=2023261 GN=queA PE=3 SV=1
MKLTDFDFDLPEGLIATRPARPRSAARLLLAEGGTIADRHVGDLPQILRPGDLLVLNDTKVIPARLTGTRARQTPQGEAVARIEITLLEPAADGWQALAKPLRKLRVGEVIRFGDALTAEVAEMSATGLRLIFDATGEAFDAALQQVGAMPLPPYIAALRAPDDQDRDDYQTVWAAHQGAVAAPTASLHFDAPLLEALAARGVEFVHVTLHVGAGTFLPVKVDDVTTHRMHAEWGEVTPEAAAAINRAKAEGRRVIPVGTTALRLIESAAPEPGRIAPFRGTTDIFIYPGHHFRVTDGLMTNFHLPKSTLLMLVSALMGAEKIREIYGHAVRDGYRFFSYGDASLLIP

SEQ ID NO: 69946 - protein, 348 aa, Paracoccus homiensis
  REGION 1..348: note = tr|A0A1I0IX28|A0A1I0IX28_9RHOB S-adenosylmethionine:tRNA ribosyltransferase-isomerase; OS = Paracoccus homiensis OX=364199 GN=queA PE=3 SV=1
MKLTDFDFDLPERLIATRPARPRSSARLLLAQNGGIADRHVHDLPQILQPGDLLVLNDTKVIPARLNGTRSRQTGQGEVTARIEVTLLEPAADGWQALAKPLRKLREGEVIRFGEALSAEVVQIGDGGLRLRFDATGDAFDAALRQVGAMPLPPYIASLRAPDEQDHQDYQTVWAERQGAVAAPTASLHFDAPLLDALADRGVEFVHVTLHVGAGTFLPVKVEDVTTHRMHAEWGEVTPEAAARINRAKAEGRRVIPVGTTALRLIESAATEDGRMQAFADTTDIFIYPGYQFRVTDGLMTNFHLPKSTLLMLVSALMGVQRIKDIYDHALDREYRFFSYGDASLLLP

SEQ ID NO: 69947 - protein, 352 aa, Paracoccus isoporae
  REGION 1..352: note = tr|A0A1G7E180|A0A1G7E180_9RHOB S-adenosylmethionine:tRNA ribosyltransferase-isomerase; OS = Paracoccus isoporae OX=591205 GN=queA PE=3 SV=1
MKLSDFDFDLPEGLIATRPARPRSSARLLLADGDMLADRSVSDLPNILQPGDLLVLNDTKVIPARLSGRRTRISAQGAVTARVEITLLEPTAEGWRALARPLRKLKPGEIVQFGEALSAEILSISQTELLLRFDAEGDALDSALDQVGAMPLPPYIAAQRAPDEDDRTDYQTVWARRKGAVAAPTASLHFDDELLAALRARGVEFAYVTLHVGAGTFLPVKVEDVATHRMHAERGEVTAAAAAQINRTRAAGGRVIPVGTTALRLIESAADEDGTLRAFDADTDIFIYPGYRFRVTDALMTNFHLPKSTLLMLVSALMGKERIRRIYRHAVDNRYRFFSYGDASLLIPPRPE

SEQ ID NO: 69948 - protein, 349 aa, unidentified
  source 1..349: note = Paracoccus laeviglucosivorans
  REGION 1..349: note = tr|A0A521AMV6|A0A521AMV6_9RHOB S-adenosylmethionine:tRNA ribosyltransferase-isomerase; OS = Paracoccus laeviglucosivorans OX=1197861 GN=queA PE=3; SV = 1
MKLDDFDFDLPEGLIATRPARPRTSARLLVAKGDDLRDLHVRDLPDLLGPGDLLVLNDTKVIPARLTGHRTRHTPQGDATAKVEITLLEPQADGTWRALAKPLRKLKPGEVIRFGDTLSAEVAAMSDTDLSLRFDAVGEAFDAALAQVGAMPLPPYIAALRPPDEADRQDYQTVWAEKTGAVAAPTASLHFDDALLQALRDRGVRFTHVTLHVGAGTFLPVKVEDVTTHKMHGEWGEVTPEAAEAINATRANGGRIIPVGTTALRLIESAAAEDGTIAPYQGVTEIFIYPGYRFRVTDALMTNFHLPKSTLLMLVSALMGQDRIGTLYRHAVNSGYRFFSYGDASLLIP

SEQ ID NO: 69949 - protein, 351 aa, unidentified
  source 1..351: note = Paracoccus lutimaris
  REGION 1..351: note = tr|A0A368Z258|A0A368Z258_9RHOB S-adenosylmethionine:tRNA ribosyltransferase-isomerase; OS = Paracoccus lutimaris OX=1490030 GN=queA PE=3 SV=1
MKLDDFDFHLPETLIATRPARPRSSARLLLAEGDATRDLHVHDLADLLGPGDLLVLNDTKVIPARLSGTRARQTPQGEAVARIEVTLLEPAADGWRALAKPLRKLKPGEVIRFSDRFSAEVTEIADGELTLRFDATGADFDAALARVGAMPLPPYIAALRAPDAADHQDYQTVWARRSGAVAAPTASLHFDADLLARLAQKGVRFTHVTLHVGAGTFLPVKVEDVTTHRMHGEWGEVTPEAAAIINETRRAGGRVIPVGTTALRLIESAADAGGRVHAFSGVTDIFIYPGYRFRVTDALMTNFHLPKSTLLMLVSALMGQDRIKALYRHAVESGYRFFSYGDASLLIPKGS

SEQ ID NO: 69950 - protein, 348 aa, unidentified
  source 1..348: note = Paracoccus mutanolyticus
  REGION 1..348: note = tr|A0A2Z4PGA7|A0A2Z4PGA7_9RHOB S-adenosylmethionine:tRNA ribosyltransferase-isomerase; OS = Paracoccus mutanolyticus OX=1499308 GN=queA PE=3 SV=1
MTLDDFDFDLPEGLIATRPARPRSSARLLAATGDSLRDLHVRDLPELLGPGDLLVLNDTRVIPARLTGTRSRATSQGEAVARVEITLLEPVADGWKALAKPLRKLKPGEVIRFGDALSAEVAGIGDGALVLRFDATGDAFDAALAQVGAMPLPPYIAALRAPDEADRQDYQTVWARRSGAVAAPTASLHFDEPLLAALRARGVRFAHVTLHVGAGTFLPVKVKDVTTHKMHGEWGEVTPEAAAAINETRAAGGRVIPVGTTALRLIESAATPDGRVQPFRGVTEIFIYPGYRFRVTDGLMTNFHLPKSTLLMLVSALMGQDRIRALYRHAVESGYRFFSYGDASLLVP

SEQ ID NO: 69951 - protein, 351 aa, Paracoccus pantotrophus
  REGION 1..351: note = tr|A0A1K1VF61|A0A1K1VF61_PARPN S-adenosylmethionine:tRNA ribosyltransferase-isomerase; OS = Paracoccus pantotrophus OX=82367 GN=queA PE=3 SV=1
MKLDDFDFHLPEGLIATRPARPRTAARLLLAQGDSIRDLHVRDLADLLGPGDLLVLNDTKVIPARLTGTRARPTPQGEAVAKVEVTLLEPAADGWKALAKPLRKLKPGEVIRFGEALSAEVAGISEGELTLRFDATGAAFDAALAQVGAMPLPPYIAALRAPDDADRQDYQTVWARRSGAVAAPTASLHFDDALLGQLAARGVRFAHVTLHVGAGTFLPVKVEDVTTHKMHGEWGEVTPEAAAAINATRAQGGRVIPVGTTALRLIESAADQDGIVHPFQGVTEIFIYPGYRFRVTDALMTNFHLPKSTLLMLVSALMGQDRIRGIYHHAVESGYRFFSYGDASLLIPKDP

SEQ ID NO: 69952 - protein, 351 aa, Paracoccus pantotrophus
  REGION 1..351: note = tr|A0A1I5F5I0|A0A1I5F5I0_PARPN S-adenosylmethionine:tRNA ribosyltransferase-isomerase; OS = Paracoccus pantotrophus OX=82367 GN=queA PE=3 SV=1
MKLDDFDFHLPEGLIATRPARPRTAARLLLAQGDSIRDLHVRDLVDLLGPGDLLVLNDTKVIPARLNGTRARQTPQGEAVAKVEVTLLEPAADGWKALAKPLRKLKPGEVIRFGAALSAEVAGISGGELTLRFDATGEAFDAALAQVGAMPLPPYIAALRAPDEADREDYQTVWARRSGAVAAPTASLHFDDALLERLAAKGVGFAHVTLHVGAGTFLPVKVEDVTTHKMHGEWGEVTPEAAAAINATRAQGGRVIPVGTTALRLIESAAAEDGTVHPFQGVTEIFIYPGYRFRVTDALMTNFHLPKSTLLMLVSALMGPDRIRGIYHHAVESGYRFFSYGDASLLIPKDP

SEQ ID NO: 69953 - protein, 352 aa, unidentified
  source 1..352: note = Paracoccus salipaludis
  REGION 1..352: note = tr|A0A2A2GMK5|A0A2A2GMK5_9RHOB S-adenosylmethionine:tRNA ribosyltransferase-isomerase; OS = Paracoccus salipaludis OX=2032623 GN=queA PE=3 SV=1
MRLSDFDFELPERLIATRPARPRSSARLLVARGDAITDARVSDLPSFLRSGDLLVLNDTRVIPARLTGTRTRDSAQGPATARIEVTLLEPAPGGHWQALAKPLRKLRQGEVIRFGEALSARVEAITEAGLTLSFDAEGEAFDAALAQVGAMPLPPYIAALRAPDEQDRTDYQTVWAERPGAVAAPTASLHFDEPLLDALDAMGVRRVHVTLHVGAGTFLPVKTDDVSRHRMHAERGIVTAEAAAAINAARAEGRRVIPVGTTALRLIESAASEDGLVHPFDAQTDIFIRPGYRFRVTDGLMTNFHLPKSTLMMLVSALMGTERIRAIYAHAVHENYRFFSYGDASLLLPRES

SEQ ID NO: 69954 - protein, 348 aa, Paracoccus saliphilus
  REGION 1..348: note = tr|A0A1N7KZY0|A0A1N7KZY0_9RHOB S-adenosylmethionine:tRNA ribosyltransferase-isomerase; OS = Paracoccus saliphilus OX=405559 GN=queA PE=3 SV=1
MKLSDFDFDLPEELIATRPARPRSSARLLLAEADGIADRHVHDLPQILRPGDLLVLNDTKVIPARLTGTRTRQTGQGDAVAKIEVTLLEPAADGWQALAKPLRKLREGEVIRFGEALSAEIVEIADGGLRLRFDAEGDAFDAALTEVGAMPLPPYIASLRPPDEQDRQDYQTVWAHRQGAVAAPTASLHFDAPLLEALEARGIEFVHVTLHVGAGTFLPVKVEDVATHKMHAEWGEVSEAAAASINAAKKQGRRVIPVGTTALRLIESAATEEGRVRPFAATTEIFIYPGYHFRVSDGLMTNFHLPKSTLLMLVSALMGMDKIQRIYSHAVTREYRFFSYGDASLLLP

SEQ ID NO: 69955 - protein, 361 aa, unidentified
  source 1..361: note = Paracoccus sanguinis
  REGION 1..361: note = tr|A0A1H2RE43|A0A1H2RE43_9RHOB S-adenosylmethionine:tRNA ribosyltransferase-isomerase; OS = Paracoccus sanguinis OX=1545044 GN=queA PE=3 SV=1
MQPADPPPLRLSDFDFDLPEGLIATRPARPRSAARLLVAQGDRITDATVADLPAFLRPGDLLVLNDTKVIPARLTGTRTRPTPQGDAVARIEVTLTEPTPEGGWKALVKPLRKLKPGEVIRFGDHLSARVTAIAEGEATLAFDAVGAAFDAALAEVGAMPLPPYIAALRAPDAQDRTDYQTVWARAAGAVAAPTASLHFDAPLLAQLARDGVEFVHVTLHVGAGTFLPVKTDDVSQHRMHAERGIVTPEAAAAIARARTEGRRVIAVGTTALRLIESAADADGTIRPFDGATDIFIRPGYRFRVTDGLMTNFHLPKSTLLMLVSALMGQDRIRAIYAHAIAARYRFFSYGDASLLLPEASC

SEQ ID NO: 69956 - protein, 361 aa, unidentified
  source 1..361: note = Paracoccus sanguinis
  REGION 1..361: note = tr|A0A099G2K3|A0A099G2K3_9RHOB S-adenosylmethionine:tRNA ribosyltransferase-isomerase; OS = Paracoccus sanguinis OX=1545044 GN=queA PE=3 SV=1
MQPADPPPLRLSDFDFDLPEGLIATRPARPRSAARLLVAQGDRITDATVADLPGFLRPGDLLVLNDTKVIPARLTGTRTRPTPQGDAVARIEVTLTEPTPGGGWKALVKPLRKLKPGEVIRFGDHLSARVTAISEGEATLAFDATGAAFDAALAEVGAMPLPPYIAALRAPDAQDRTDYQTVWARAAGAVAAPTASLHFDAPLLAQLAQSGVELVHVTLHVGAGTFLPVKTDDVSQHRMHAERGLVTPEAAAAIARARTEGRRVIAVGTTALRLIESAADADGTIRPFDGATDIFIRPGYRFRVTDGLMTNFHLPKSTLLMLVSALMGQDRIRAIYAHAIAARYRFFSYGDASLLLPEASC

SEQ ID NO: 69957 - protein, 348 aa, unidentified
  source 1..348: note = Paracoccus sediminis
  REGION 1..348: note = tr|A0A238UX16|A0A238UX16_9RHOB S-adenosylmethionine:tRNA ribosyltransferase-isomerase; OS = Paracoccus sediminis OX=1214787 GN=queA PE=3 SV=1
MKLSDFDFDLPPALIATRPVRPRSSARLLVAQASAIADHRVSDLPGILRAGDVLVLNDTQVIPARLTGTRARPTPQGEAVAGIEVTLLEPAAQGWRALARPLRKLRVGEVIRFGDALSAEVVEIAGGELLLRFDAHGDAFDAALAQVGAMPLPPYIAALRAPDDQDRDDYQTVWAARRGAVAAPTASLHFDADLLDRLAAQGVQFVHVTLHVGAGTFLPVKVDDVTTHRMHAEWGEVGADAAAAINRAKAEGRRVIPVGTTALRLIESAARPDGRIAPFRGTTDIFIYPGYRFRVTDGLMTNFHLPKSTLLMLVSALMGQDRIRRVYDHAVTQGYRFFSYGDASLLIP

SEQ ID NO: 69958 - protein, 352 aa, Paracoccus seriniphilus
  REGION 1..352: note = tr|A0A239PNU7|A0A239PNU7_9RHOB S-adenosylmethionine:tRNA ribosyltransferase-isomerase; OS = Paracoccus seriniphilus OX=184748 GN=queA PE=3 SV=1
MKLSDFDFHLPESLIATRPARPRSSARLLLAQGEEICDRHVSDLPQILQPGDLLVLNDTKVIPARLAGTRTRVTPQGDAVARIEVTLLEPAASGWNALAKPLRKLREGEVIRFGDELSARVVEIADGGLRLAFDAEGDAFDAALNKVGAMPLPPYIAALRAPDARDHEDYQTVWAERQGAVAAPTASLHFDAPLLDALRARGVEFVHVTLHVGAGTFLPVKVEDVTTHRMHAEWGEVSAQAAAQINRAKSEGRRVIAVGTTALRLIESAATAEGRMQPFRDTTDIFIYPGYQFRVTDALMTNFHLPKSTLLMLVSALMGQEKIQKIYEHAVENGYRFFSYGDASLLIPECRI

SEQ ID NO: 69959 - protein, 348 aa, unidentified
  source 1..348: note = Paracoccus siganidrum
  REGION 1..348: note = tr|A0A418ZXZ9|A0A418ZXZ9_9RHOB S-adenosylmethionine:tRNA ribosyltransferase-isomerase; OS = Paracoccus siganidrum OX=1276757 GN=queA PE=3 SV=1
MKLSDFDFDLPEGLIATRPARPRSSARLLLAEAGGIEDRRVSDLPGILRPGDLLVLNDTRVIPARLSGTRVRKTAQGEAVARIEVTLLEPAADGWQALARPLRKLREGEVIRFGAALSAEVVAIGEGALRLRFDAEGDAFDAALAEVGAMPLPPYIAALRAPDAQDLQDYQTVWAARQGAVAAPTASLHFDQPLLDGLAARGVEFAHVTLHVGAGTFLPVKVEDVTTHRMHAEWGEVSEAAAAAVNAARAEGRRVIAVGTTALRLVESAATPEGALRPFSGTTDIFIYPGHQFRVIDGLMTNFHLPKSTLLMLVSALMGQQRIREIYAHAVRSGYRFFSYGDASLLIP

SEQ ID NO: 69960 - protein, 387 aa, Paracoccus solventivorans
  REGION 1..387: note = tr|A0A1M7FPQ9|A0A1M7FPQ9_9RHOB S-adenosylmethionine:tRNA ribosyltransferase-isomerase; OS = Paracoccus solventivorans OX=53463 GN=queA PE=3 SV=1
MPGGGRDSGLVPPARAGLRGQAVDPARRRADNAIMRLSDFDFDLPERLIATRPARPRSAARLLVAQGDTITDAHVRDLPAFLRPGDLLVLNDTRVIPARLTGTRTRASEQGPATARIEVTLLEPAPGGRWRALAKPLRKLREGEVIRFGDALSARVDRIEDAALLLDFDAAGEAFDAALALVGAMPLPPYIAALRPPDEQDRTDYQTVWAERPGAVAAPTASLHFDDALLATLAAMGVQTTRVTLHVGAGTFLPVKTDDISQHRMHAERGIVSAAAAAAINAARAEGRRVIPVGTTALRLIESAAAPDGRVSPYDGMTDIFIRPGYRFRVTDGLMTNFHLPKSTLMMLVSALMGVDRVRAIYAHAVDQDYRFFSYGDASLLLPEAPC

SEQ ID NO: 69961 - protein, 348 aa, Paracoccus sp.
  REGION 1..348: note = tr|A0A3A3DI80|A0A3A3DI80_9RHOB S-adenosylmethionine:tRNA ribosyltransferase-isomerase; OS = Paracoccus sp. JM45 OX=2283626 GN=queA PE=3 SV=1
MKLSDFDFDLPETLIATRPAKPRSSARLLLAQGDDIADRHVSDLPDILKAGDVLVLNDTKVIPARLTGQRHRASAQGDVTAKIEVTLLEPAAEGWRALAKPLRKLREGEVIHFGDALSATVAEIADGGLRLVFDATGDAFDEALAQVGAMPLPPYIATLRAPDEQDHQDYQTVWAANSGAVAAPTASLHFDAPLLQALKDKGVEFVHVTLHVGAGTFLPVKVEDVTTHRMHAEWGEVCADAAAAITRAKSEGRRVIPVGTTALRLIESAATEDGIVAPFQGTTDIFIYPGHHFRVTDALMTNFHLPKSTLMMLVSAVMGQEKIKSIYAHALARQYRFFSYGDASLLIP

SEQ ID NO: 69962 - protein, 358 aa, Paracoccus sp.
  REGION 1..358: note = tr|A0A2K9EKN5|A0A2K9EKN5_9RHOB S-adenosylmethionine:tRNA ribosyltransferase-isomerase; OS = Paracoccus sp. BM15 OX=1529068 GN=queA PE=3 SV=1
MKLNDFDFDLPDALIATRPARPRSAARMLLAEGGVISDRHVFDLPQILQPGDLLVLNDTKVIPARLTGTRSRQTGQGEAVARVEITLLEPAADGWRALAKPLRKLREGEVIRFGQALSAEVAEIAGGELRLRFDAAGEAFDAALQQVGAMPLPPYIAAQRAPDQQDHQDYQTVWAARQGAVAAPTASLHFDAALLQALADRGVDFVHVTLHVGAGTFLPVKVEDVTTHRMHAEWGEVTADAAAQINAARAAGRRVIPVGTTALRLIESAATQDGRVEAFEGTTDIFIYPGYHFMVTDGLMTNFHLPKSTLLMLVSALMGVEKIQEIYDHAVHERYRFFSYGDASLLIPDGRFRAGIGD

SEQ ID NO: 69963 - protein, 353 aa, Paracoccus sphaerophysae
  REGION 1..353: note = tr|A0A099F2B3|A0A099F2B3_9RHOB S-adenosylmethionine:tRNA ribosyltransferase-isomerase; OS = Paracoccus sphaerophysae OX=690417 GN=queA PE=3 SV=1
MRLSDFDFHLPEGLIATRPARPRSAARLLVAQSDRIADAHVRDLPRFLRPGDLLVLNDTRVIPARLAGTRTRATPQGDAVAKIEVTLTEPAAGGDWHALARPLRKLKPGERIRFDDALSAEVVALSETGLTLRFDSAGQDFDATLARVGAMPLPPYIAALRAPDDQDRTDYQTVWARHSGAVAAPTASLHFDDDLLAALRGMGVEFAHVTLHVGAGTFLPVKTDDVSQHRMHAERGIVTPAAAAAITTARAEGRRVIAVGTTALRLIESAAGPDGTVRPFDGETDIFIRPGHAFRVTDGLMTNFHLPKSTLLMLVSALMGRDRIRAIYAHAVNESYRFFSYGDASLLLPEESC

SEQ ID NO: 69964 - protein, 351 aa, Paracoccus sulfuroxidans
  REGION 1..351: note = tr|A0A562NSB5|A0A562NSB5_9RHOB S-adenosylmethionine:tRNA ribosyltransferase-isomerase; OS = Paracoccus sulfuroxidans OX=384678 GN=queA PE=3 SV=1
MRMKLDDFDFDLPEGLIATRPARPRSSARLLLAQSGGMRDLHVHDLVDLLGPGDLLVLNDTRVIPARLSGTRSRMTPQGEAVARIEITLLEPTPEGDWRALAKPLRKLKPGETVRFGEALSAEVTRIGDAELTLRFDQSGEGFERALSEVGAMPLPPYIAALRAPDEADRTDYQTVWARNSGAVAAPTASLHFDADLLEKLKARGVQFVHVTLHVGAGTFLPVKVEDVTTHKMHAEWGEITEEAARLINQTRASGGRVIPVGTTALRLIESAASEDGIVHPFRDTTQIFIYPGYRFRVTDGLMTNFHLPKSTLLMLVSALMGQDQIRDIYRHAVDSGYRFFSYGDASLLIP

SEQ ID NO: 69965 - protein, 351 aa, Paracoccus thiocyanatus
  REGION 1..351: note = tr|A0A3D8PEA5|A0A3D8PEA5_9RHOB S-adenosylmethionine:tRNA ribosyltransferase-isomerase; OS = Paracoccus thiocyanatus OX=34006 GN=queA PE=3 SV=1
MKLDDFDFHLPEGLIATRPARPRSSARLLLAQGDSIRDLHVRDLSDLLGPGDLLVLNDTKVIPARLTGTRARPTPQGEAVAKVEVTLLEPAADGWRALAKPLRKLKPGEVIRFGEALSATVARIAQGELTLRFDATGEAFDAALAQVGAMPLPPYIAALRPPDEADRQDYQTVWARHSGAVAAPTASLHFDDALLARLAARGVGFAHVTLHVGAGTFLPVKVEDVTTHKMHGEWGEVTPQAAAAINATRAQGGRVIPVGTTALRLIESAARPDGTVHPFQGVTEIFIYPGYRFRVTDALMTNFHLPKSTLLMLVSALMGRDRIRGIYRHAVESGYRFFSYGDASLLIPKDP

SEQ ID NO: 69966 - protein, 351 aa, Paracoccus thiocyanatus
  REGION 1..351: note = tr|A0A1N6RAE5|A0A1N6RAE5_9RHOB S-adenosylmethionine:tRNA ribosyltransferase-isomerase; OS = Paracoccus thiocyanatus OX=34006 GN=queA PE=3 SV=1
MKLDDFDFHLPEGLIATRPARPRSSARLLLAQGDSIRDLHVRDLSDLLGPGDLLVLNDTKVIPARLTGTRSRPTPQGEAVAKVEVTLLEPAADGWRALAKPLRKLKPGEVIRFGEALSATVARIAQGELTLRFDATGEAFDAALAQVGAMPLPPYIAALRPPDEADRQDYQTVWARRSGAVAAPTASLHFDDALLAQLAARGVRFAHVTLHVGAGTFLPVKVEDVTTHKMHGEWGEVTPQAAAAINATRAQGGRVIPVGTTALRLIESAADPDGTVRPFQGVTEIFIYPGYRFRVTDALMTNFHLPKSTLLMLVSALMGQDRIRGIYRHAVESGYRFFSYGDASLLIPKDP

SEQ ID NO: 69967 - protein, 348 aa, unidentified
  source 1..348: note = Paracoccus tibetensis
  REGION 1..348: note = tr|A0A1G5BP71|A0A1G5BP71_9RHOB S-adenosylmethionine:tRNA ribosyltransferase-isomerase; OS = Paracoccus tibetensis OX=336292 GN=queA PE=3 SV=1
MQLSDFDFDLPEDLIATRPARPRSAARLLHLAGDAMTDRRVSDLPQILQPGDVLVLNDTKVIPARLTGTRTRAGAAGEGVARIEVTLLEPAATGWRALAKPLRKLRAGEVIVFGPQLSAEVAEIAEGELRLVFAALGDAFDAALAEVGAMPLPPYIASLRAPDEADKDDYQTVWAARQGAVAAPTASLHFDAPLLAALAARGVQFVHVTLHVGAGTFLPVKVDDVTTHRMHAEWGEVSAEAAAAINRAKTEGRRVIPVGTTALRLIESAASGEGRIAAFEGTTDIFIYPGFRFRIADGLMTNFHLPRSTLMMLVSALMGRERIMAAYAHAIAQRYRFFSYGDASLLIP

SEQ ID NO: 69968 - protein, 351 aa, Paracoccus versutus
  REGION 1..351: note = tr|A0A099FQ48|A0A099FQ48_PARVE S-adenosylmethionine:tRNA ribosyltransferase-isomerase; OS = Paracoccus versutus OX=34007 GN=queA PE=3 SV=1
MKLDDFDFHLPEGLIATRPARPRTAARLLLAQGDSIRDLHVRDLADLLGPGDLLVLNDTKVIPARLTGTRARPTPQGEAVAKVEVTLLEPAADGWKALAKPLRKLKPGEVIRFGEALSAEVAGISEGELTLRFDATGAAFDAALAQVGAMPLPPYIAALRAPDDADRQDYQTVWARRSGAVAAPTASLHFDDALLGQLAARGVRFAHVTLHVGAGTFLPVKVEDVTTHKMHGEWGEVTPEAAAAINATRAQGGRVIPVGTTALRLIESAAAPDGIVHPFQGVTEIFIYPGYRFRVTDALMTNFHLPKSTLLMLVSALMGQDRIRGIYHHAVESGYRFFSYGDASLLIPKDP

SEQ ID NO: 69969 - protein, 370 aa, Paracoccus yeei
  REGION 1..370: note = tr|A0A386UI31|A0A386UI31_9RHOB S-adenosylmethionine:tRNA ribosyltransferase-isomerase; OS = Paracoccus yeei OX=147645 GN=queA PE=3 SV=1
MTFLLDHPGQLDPVARRGQNPAMTLDDFDFDLPEGLIATRPARPRSSARLLAATGDSLRDLHVRDLPELLGPGDLLVLNDTRVIPARLTGTRSRATPQGEAVARVEITLLEPVADGWKALAKPLRKLKPGEVIRFGDALSAEVAEIGDGALVLRFDATGDAFDAALAQVGAMPLPPYIAALRAPDEADRQDYQTVWARRSGAVAAPTASLHFDEPLLAALRARGVRFAHVTLHVGAGTFLPVKVKDVTTHKMHGEWGEVTPEAAAAINETRAAGGRVIPVGTTALRLIESAATPDGRVQPFRGVTEIFIYPGYRFRVTDGLMTNFHLPRSTLLMLVSALMGQDRIRRIYRHAVDSGYRFFSYGDASLLVP

SEQ ID NO: 69970 - protein, 348 aa, Paracoccus yeei
  REGION 1..348: note = tr|A0A1V0GXP6|A0A1V0GXP6_9RHOB S-adenosylmethionine:tRNA ribosyltransferase-isomerase; OS = Paracoccus yeei OX=147645 GN=queA PE=3 SV=1
MTLDDFDFDLPEGLIATRPARPRSSARLLAATGDSLRDLHVRDLPELLGPGDLLVLNDTRVIPARLTGTRSRATPQGEAVARVEITLLEPVADGWKALAKPLRKLKPGEVIRFGDALSAEVAAIGDGALVLRFDATGDAFDAALAQVGAMPLPPYIAALRAPDEADRQDYQTVWARRSGAVAAPTASLHFDEPLLAALRARGVRFAHVTLHVGAGTFLPVKVKDVTTHKMHGEWGEVTPEAAAAINETRAAGGRVIPVGTTALRLIESAATPDGRVQPFRGVTEIFIYPGYPFRVTDGLMTNFHLPRSTLLMLVSALMGQDRIRRIYRHAVDSGYRFFSYGDASLLVP

SEQ ID NO: 69971 - protein, 348 aa, unidentified
  source 1..348: note = Paracoccus zhejiangensis
  REGION 1..348: note = tr|A0A2H5EU44|A0A2H5EU44_9RHOB S-adenosylmethionine:tRNA ribosyltransferase-isomerase; OS = Paracoccus zhejiangensis OX=1077935 GN=queA PE=3 SV=1
MKLSDFDFDLPEGLIATRPARPRSSARLLLAEGGAMADRHVFDLPSILRPGDLLVLNDTKVIPARLTGSRTRQTGQGEVTAKIEVTLLEPAADGWRALAKPLRKLRAGEVIRFGEALSAEVAEIGEAELRLRFDATGDAFDAALGQVGAMPLPPYIAAQRAPDAQDHQDYQTVWAARQGAVAAPTASLHFDEDLLKALAARGVGFTHVTLHVGAGTFLPVKVEDVTTHRMHAEWGEVSPEAAAAITAAKAEGRRVIPVGTTALRLIESAAVADGRVEPFRQTTDIFIYPGHHFRVTDGLMTNFHLPKSTLLMLVSALMGAEKIKEIYAHAVNERYRFFSYGDASLLIP

SEQ ID NO: 69972 - protein, 357 aa, Paracraurococcus sp.
  REGION 1..357: note = tr|A0A4R4DPQ8|A0A4R4DPQ8_9PROT S-adenosylmethionine:tRNA ribosyltransferase-isomerase; OS = Paracraurococcus sp. NE82 OX=2527868 GN=queA PE=3 SV=1
MRTEDFNFALPERLIAQEPARPRDAARLLVVRPDRLDDRGVRDLPGLLGPGDVMVVNDTRVIPARLHGRRGEAAIEIMLNRAEEGSTVWEALVRNARRLRPGDVIAIEGAADLPCRVVSREGGTARLDFGPDPALLAAALERAGEIPLPPYIARPEGPRPEDRADYQTLFAARPGAVAAPTASLHFTPELVAALEARGVQRATVTLHVGAGTFLPLRAEDPRAHTLHAEWGEVTEAAAALINAARPAGGRIVAIGTTALRLLETAARGGKDGVDDPLRPVRPFRGLTDIFLLPGHRFRAADLLMTNFHLPKSTLFMLVSAFAGTARMRAAYAHAIAEEYRFYSYGDGSLLFRAEEPA

SEQ ID NO: 69973 - protein, 361 aa, Paraeggerthella hongkongensis
  REGION 1..361: note = tr|A0A3N0B1F2|A0A3N0B1F2_9ACTN S-adenosylmethionine:tRNA ribosyltransferase-isomerase; OS = Paraeggerthella hongkongensis OX=230658 GN=queA PE=3; SV = 1
MKTSDFDYNLPPELIAQEPAAERDGCRMLVMDRATGALEDRIFRDIAEYLRPGDLLVANETRVMPARLLGAKRGTGGAAEVFLLREITGREPRTNASALWEVLVRPGKRLKPGTGATVDFLDPDGNVALSAEIVDWAEGAQKGERLARLTTTLPSLDEALHAVGHTPLPPYIKNYAGDEELYQTVYSRRESSAAAPTAGLHFTPELIKHLKEQGVRWETVELEVGLDTFRTVDEDDPAQHVIHTEFYTVPERTVEAIAETRRQGGRVVAVGTTSVRSLESAWNPQAGAVTPREREATSLYLLPGSEFHVVDALVTNFHVPKSTLMMLVSAFSSRENVMAAYEHAIAERYRLLSFGDAMFIQ

SEQ ID NO: 69974 - protein, 361 aa, Paraeggerthella hongkongensis
  REGION 1..361: note = tr|A0A369LH91|A0A369LH91_9ACTN S-adenosylmethionine:tRNA ribosyltransferase-isomerase; OS = Paraeggerthella hongkongensis OX=230658 GN=queA PE=3; SV = 1
MKTSDFDYNLPPELIAQEPAVERDGCRMLVMDRATGALEDRIFRDIAEYLRPGDLLVANETRVMPARLLGAKRGTGGAAEVFLLREITGREPRTNASALWEVLVRPGKRLKPGTGAVVDFLDPDGNVALSAEIVDWAEGAQKGERLARLTTTLPSLDEALHAVGHTPLPPYIKNYAGDEELYQTVYSRRESSAAAPTAGLHFTPELIKRLKEQGVRWETVELEVGLDTFRTVDEDDPAQHVIHTEFYTVPERTVEAIAETRRQGGRIVAVGTTSVRSLESAWNPQAGTVTPREREATSLYLLPGSEFHVVDALVTNFHVPKSTLMMLVSAFSSRENVMAAYEHAIAERYRLLSFGDAMFIQ

SEQ ID NO: 69975 - protein, 416 aa, unidentified
  source 1..416: note = Parafilimonas terrae
  REGION 1..416: note = tr|A0A1I5Z9V2|A0A1I5Z9V2_9BACT S-adenosylmethionine:tRNA ribosyltransferase-isomerase; OS = Parafilimonas terrae OX=1465490 GN=queA PE=3 SV=1
MSISPKQLQIKDFDYDLPDEKIAKHPLAKRDASKLLIYKNGEIKTDNFIHLSNYLPEGSLIIFNNTKVVEARLLFKKTTGTTIEIFCLEPADDYADITTAMLQHKKVLWKCLIGNAKKWKDEILVKKILHNGKEIELSVKKISRQGENFIIEFSWNDEQLSFAEILHTGGVIPLPPYMHRDADDEDKKRYQTVYAKHDGSVAAPTAGLHFTGNVFERLSAKNIQRDFVTLHVGAGTFKPVKTETIEAHEMHSEFFEVSVELIEKLINASNQNIIAVGTTSLRTLESLYWMGVKISQQSTVNGQQNITIDDITIHQWDVYELNDENISFEDALHALLEWMKANNLNKLIAKTQIIIAPPYKLKVADILITNFHQPKSTLLLLVAAVIGNDWKKVYDYALNNNFRFLSYGDSCLFFAL

SEQ ID NO: 69976 - protein, 349 aa, unidentified
  source 1..349: note = Parafilimonas terrae
  REGION 1..349: note = tr|A0A1I5S724|A0A1I5S724_9BACT S-adenosylmethionine:tRNA ribosyltransferase-isomerase; OS = Parafilimonas terrae OX=1465490 GN=queA PE=3 SV=1
MKLSQFRFDLPLNLIAQNPTKRREDSRMMVVHRQTGQLENKHFKDILDYFDDKDVFVVNNTKVFPARMYGRKEKTGARIEVFLLRELNKPNRLWDVIVDPARKIRVGNKLYFGENDELVAEVIDNTTSRGRTIRFLWEGDDASFRNMLEFLGETPLPKYIKRKPDEEDKERYQTVYAKNEGAVAAPTAGFHFSRELIKRCEIKGIRFAELTLHTGLGTFRPIEVEDLSKHKMDAEYYRIDEECCQIVNKAKETSHRICSIGTTTMRAMETSFTAQKLLKPSEGWTNIFIHPPYNFNVADSLVTNFHLPKTSLLIMACAFAGYDLIIEAYKKAIKDKYRFFSYGDAMLII

SEQ ID NO: 69977 - protein, 342 aa, unidentified
  source 1..342: note = Parageobacillus caldoxylosilyticus
  REGION 1..342: note = tr|A0A023DA00|A0A023DA00_9BACI S-adenosylmethionine:tRNA ribosyltransferase-isomerase; OS = Parageobacillus caldoxylosilyticus NBRC 107762; OX = 1220594 GN=queA PE=3 SV=1
MKIDLFDFELPEELIAQTPLPNRDASRLMVLNKKTGEIHHETFRNIISYLREGDCLVLNDTRVMPARLYGEKTDTGANIEVLLLKQLEGDRWETLVKPAKRVKVGTEITFGDGRLKAVCVDTLEHGGRVLEFSYQGIFYEVLEQLGEMPLPPYIKEKLEDPERYQTVYAREVGSAAAPTAGLHFTKPLLDDIRAKGVHIAFITLHVGLGTFRPVSVENIEEHDMHAEFYQMPGETAQLLNEVRQQGGRIIAVGTTSTRTLETIATRHDGKFVAESGWTDIFIYPGYEFKGIDGLVTNFHLPKSTLIMLVSALAGRENILHAYHVAVKERYRFFSFGDAMLII

SEQ ID NO: 69978 - protein, 342 aa, unidentified
  source 1..342: note = Parageobacillus caldoxylosilyticus
  REGION 1..342: note = tr|A0A150LSJ7|A0A150LSJ7_9BACI S-adenosylmethionine:tRNA ribosyltransferase-isomerase; OS = Parageobacillus caldoxylosilyticus OX=81408 GN=queA; PE = 3 SV=1
MKIDLFDFELPEELIAQTPLPNRDASRLMVLNKKTGEIRHETFRNIISYLREGDCLVLNDTRVMPARLYGEKTDTGANIEVLLLKQLEGDRWETLVKPAKRVKVGTEITFGDGRLKAVCVDTLEHGGRVLEFSYQGIFYEVLEQLGEMPLPPYIKEKLEDPERYQTVYAREVGSAAAPTAGLHFTKPLLDDIRAKGVHIAFITLHVGLGTFRPVSVENIEEHDMHAEFYQMPEETAQLLNEVRQQGGRIIAVGTTSTRTLETIATRHDGKFVAESGWTDIFIYPGYEFKGIDGLVTNFHLPKSTLIMLVSALAGRENILHAYHVAVKERYRFFSFGDAMLII

SEQ ID NO: 69979 - protein, 342 aa, unidentified
  source 1..342: note = Parageobacillus genomosp.
  REGION 1..342: note = tr|A0A023CLW4|A0A023CLW4_9BACI S-adenosylmethionine:tRNA ribosyltransferase-isomerase; OS = Parageobacillus genomosp. 1 OX=1295642 GN=queA PE=3 SV=1
MKIDLFDFELPEELIAQTPLSNRDASRLMVLNKKTGEIRHEAFRNIISYLHKGDCLVLNDTRVMPARLYGEKTDTGANIEVLLLKQLEGDRWETLVKPAKRVKVGTEITFGDGRLKAVCIDTLEHGGRILEFSYQGIFYEVLEQLGEMPLPPYIKEKLEDPERYQTVYAREVGSAAAPTAGLHFTAQLLDDIRAKGVHIAFITLHVGLGTFRPVSVENIEEHDMHAEFYQMSEETAQLLNEVRQQGGRIIAVGTTSTRTLETIATRHNGKFVAESGWTDIFIYPGYEFKGIDGLVTNFHLPKSTLIMLVSALAGRENILHAYHVAVKERYRFFSFGDAMLII

SEQ ID NO: 69980 - protein, 342 aa, unidentified
  source 1..342: note = Parageobacillus thermantarcticus
  REGION 1..342: note = tr|A0A1I0SGN9|A0A1I0SGN9_9BACI S-adenosylmethionine:tRNA ribosyltransferase-isomerase; OS = Parageobacillus thermantarcticus OX=186116 GN=queA PE=3; SV = 1
MKIDLFDFDLPEELIAQTPLPNRDASRLMVLDKKTGEIRHETFRNILSYLREGDCLVLNDTRVMPARLYGEKEDTGANIEVLLLKQLEGDRWETLVKPAKRVKVGTTIIFGDGRLKATCVNTLEHGGRILQFSYRGIFYEVLEQLGEMPLPPYIKEKLDDPERYQTVYAREIGSAAAPTAGLHFTEQLLDDIRAKGVHIAFITLHVGLGTFRPVNVENIEEHDMHAEFYQMTEETARLLNEVRRQGGRIIAVGTTSTRTLETIATRHNGTFVAESGWTDIFIYPGYEFKAIDGLVTNFHLPKSTLIMLVSALAGRENILRAYNVAVKERYRFFSFGDAMLII

SEQ ID NO: 69981 - protein, 342 aa, unidentified
  source 1..342: note = Parageobacillus thermoglucosidasius
  REGION 1..342: note = tr|A0A1B7KWD0|A0A1B7KWD0_PARTM S-adenosylmethionine:tRNA ribosyltransferase-isomerase; OS = Parageobacillus thermoglucosidasius OX=1426 GN=queA; PE = 3 SV=1
MKIDLFDFNLPEELIAQTPLPNRDASRLMVLDKKTGEIRHETFRNILSYLREGDCLVLNDTRVMPARLYGEKEDTGANIEVLLLKQLEGDRWETLVKPARRVKDGTKIIFGDGRLKATCVDTLEHGGRVLQFSYRGIFYEVLEQLGEMPLPPYIKEKLDDPERYQTVYAREIGSAAAPTAGLHFTEQLLDDIRAKGVHIAFITLHVGLGTFRPVNVENIEEHDMHAEFYQMTEETAQLLNETRRQGGRIIAVGTTSTRTLETIAARHNGTFVAESGWTDIFIYPGYEFKAIDGLVTNFHLPKSTLIMLVSALAGRENILRAYNVAVKERYRFFSFGDAMLII

SEQ ID NO: 69982 - protein, 342 aa, unidentified
  source 1..342: note = Parageobacillus thermoglucosidasius
  REGION 1..342: note = tr|A0A369X081|A0A369X081_PARTM S-adenosylmethionine:tRNA ribosyltransferase-isomerase; OS = Parageobacillus thermoglucosidasius OX=1426 GN=queA; PE = 3 SV=1
MKIDLFDFDLPEELIAQTPLPNRDASRLMVLDKKTGEIHHETFRNILSYLREGDCLVLNDTRVMPARLYGEKENTGAHIEVLLLKQLEGDRWETLVKPAKRVKAGTKIIFGDGRLQATCVDTLEHGGRVLQFSYRGIFYEVLEQLGEMPLPPYIKEKLADPERYQTVYAREIGSAAAPTAGLHFTEQLLDDIRAKGVHIAFITLHVGLGTFRPVNVENIEEHDMHAEFYQMTEATAQLLNETKRQGGRIIAVGTTSTRTLETIAARHDGTFVAESGWTDIFIYPGYEFKAIDGLVTNFHLPKSTLIMLVSALAGRENILHAYNVAVKERYRFFSFGDAMLII

SEQ ID NO: 69983 - protein, 342 aa, unidentified
  source 1..342: note = Parageobacillus toebii
  REGION 1..342: note = tr|A0A3D8LXH1|A0A3D8LXH1_9BACI S-adenosylmethionine:tRNA ribosyltransferase-isomerase; OS = Parageobacillus toebii OX=153151 GN=queA PE=3 SV=1
MKIDLFDFDLPEELIAQTPLLNRDASRLMVLDKKTGEIRHETFRNILSYLHEGDCLVLNDTRVMPARLYGEKENTGANIEVLLLKQLEGDRWETLVKPAKRVKVGTEITFGDGRLKATCVDTLEHGGRILEFSYQGIFYEVLEQLGEMPLPPYIKEKLDDPERYQTVYAREVGSAAAPTAGLHFTEQLLDDIRAKGVHIAFITLHVGLGTFRPVSVENIEEHDMHAEFYQMTEETARLLNEVRQQGGRIIAVGTTSTRTLETIASKHNGAFVAESGWTDIFIYPGYEFKAIDGLVTNFHLPKSTLIMLVSALAGRENILRAYNAAVKERYRFFSFGDAMLII

SEQ ID NO: 69984 - protein, 342 aa, unidentified
  source 1..342: note = Parageobacillus toebii
  REGION 1..342: note = tr|A0A3M0EUY4|A0A3M0EUY4_9BACI S-adenosylmethionine:tRNA ribosyltransferase-isomerase; OS = Parageobacillus toebii NBRC 107807 OX=1223503 GN=queA; PE = 3 SV=1
MKIDLFDFELPEELIAQTPLLNRDASRLMVLDKKTGEIHHETFRNILSYLHKGDCLVLNDTRVMPARLYGEKENTGANIEVLLLKQLEGDRWETLVKPAKRVKVGTEITFGDGRLKATCVDTLEHGGRILEFSYQGIFYEVLEQLGEMPLPPYIKEKLDDPERYQTVYAREVGSAAAPTAGLHFTEQLLDDIRAKGVHIAFITLHVGLGTFRPVNVENIEEHDMHAEFYQMTEKTARLLNEVRQQGGRIIAVGTTSTRTLETIASKHNGAFAAESGWTDIFIYPGYEFKAIDGLVTNFHLPKSTLIMLVSALAGRENILRAYNAAVKERYRFFSFGDAMLII

SEQ ID NO: 69985 - protein, 350 aa, unidentified
  source 1..350: note = Paraglaciecola agarilytica
  REGION 1..350: note = tr|K6WW17|K6WW17_9ALTE S-adenosylmethionine:tRNA ribosyltransferase-isomerase OS=Paraglaciecola agarilytica NO2 OX=1125747 GN=queA PE=3 SV=1
MKVSEFQFDLPEALIARYPTKERTASRLMHLAKTGLSHLQFTDVVDLINPGDLLIFNNTRVIPARLLGQKASGGKVEVLIERIVDEHHVLAHVRASKSPKEGSQLLLEDKVEMEMVGRQDALFKLKLLNPEPILEILEQYGHMPLPPYIDRPDEESDKERYQTVYNEKPGAVAAPTAGLHFDDAILQKLKDKGVSTEFVTLHVGAGTFQPVRVDNILEHQMHSEYAEVPQNVIDAIAKTKAAGKRVIAVGTTSVRSLESAAKAASSNGTELAPFFSDTDIFIYPGYQFQVVDAMLTNFHLSESTLIMLVSAFAGKENVMSAYQEAIAQQYRFFSYGDAMFIEKNQPANRD

SEQ ID NO: 69986 - protein, 349 aa, unidentified
  source 1..349: note = Paraglaciecola arctica
  REGION 1..349: note = tr|K6YYX2|K6YYX2_9ALTE S-adenosylmethionine:tRNA ribosyltransferase-isomerase OS=Paraglaciecola arctica BSs20135 OX=493475 GN=queA PE=3 SV=1
MKLSDFQFDLPENLIARYPTAQRSSSRLMHLNGNSGEVNHKQFTDIVELIDQGDLLIFNNTRVIPARLLGQKESGGKVEVLIERVLDEHRVLAHVRASKSPKVGSKLILEGKVQAKMVARHDALFELVFLNDEPVLALLEEFGHMPLPPYIDRPDEDSDKERYQTVYNQVPGAVAAPTAGLHFDEDVLQMLKSKGVKSEFVTLHVGAGTFQPVRVDNILEHQMHSEYAEVSQQVVDAILATKAAGKRVIAVGTTSVRSIESAAHASLKAGTELAPFLSDTDIFIYPGYEFQLVDAMLTNFHLSESTLLMLVSAFCGKENIENAYQQAIDQEYRFFSYGDAMFLEKKVGQ

SEQ ID NO: 69987 - protein, 348 aa, unidentified
  source 1..348: note = Paraglaciecola hydrolytica
  REGION 1..348: note = tr|A0A136A025|A0A136A025_9ALTE S-adenosylmethionine:tRNA ribosyltransferase-isomerase; OS = Paraglaciecola hydrolytica OX=1799789 GN=queA PE=3 SV=1
MKLADFRFDLPEHLIARYPTTERTASRLMHLKGNGGEVVHRQFQDIVNLIEPGDLLVFNNTRVIPARLLGQKVSGGKVEVLVERVLDEQRVLAHVRASKAPKVGSLLILESSIQVEMLARHDALFELKFLTQEPVLEVLEQFGHMPLPPYIDRPDEDSDKERYQTVYNQVPGAVAAPTAGLHFDQALLETLKNRGVNTAFVTLHVGAGTFQPVRVDNILEHQMHAEYAEVPQNVVDAVLQTKAAGKRVIAVGTTSVRSLESAAQASLKAGNKLSPFFADTSIFIYPGYQFQLVDALLTNFHLSESTLLMLVSAFAGKQHIFAAYGQAIAEQYRFFSYGDAMFIEKRTD

SEQ ID NO: 69988 - protein, 346 aa, unidentified
  source 1..346: note = Paraglaciecola mesophila
  REGION 1..346: note = tr|K6Z0K9|K6Z0K9_9ALTE S-adenosylmethionine:tRNA ribosyltransferase-isomerase OS=Paraglaciecola mesophila KMM 241 OX=1128912 GN=queA PE=3 SV=1
MKVSEFQFDLPEALIARYPTKERTASRLMHLATTGLSHLQFTDVVNLINPGDLLIFNNTRVIPARLLGQKASGGKVEVLIERIIDEHHVLAHVRASKSPKEGTQLLLEDKVEMEMVGRQDALFTLKLLNPEPILEILEQYGHMPLPPYIDRPDEESDKERYQTVYNEKPGAVAAPTAGLHFDDVILKQLRDKGVNTEFVTLHVGAGTFQPVRVDNILEHQMHSEYAEVPQNVVDAIAKTKAAGKRVIAVGTTSVRSLESAAKAALENGTALAPFFSDTDIFIYPGYKFQVIDAMLTNFHLSESTLIMLVSAFAGKENVMRAYQEAIAQQYRFFSYGDAMFIEKNQD

SEQ ID NO: 69989 - protein, 346 aa, unidentified
  source 1..346: note = Paraglaciecola polaris
  REGION 1..346: note = tr|K6ZVF2|K6ZVF2_9ALTE S-adenosylmethionine:tRNA ribosyltransferase-isomerase OS=Paraglaciecola polaris LMG 21857 OX=1129793 GN=queA PE=3 SV=1
MKVSEFQFDLPEALIARYPTKERTASRLLHLSPDGLSHLQFTDVLSLINPGDLLIFNNTRVIPARLLGQKASGGKVEVLIERIIDDHHVLAHVRASKSPKEGTRLLLESSVQMEMVGRQDALFELKLLNSEPILEVLEQYGHMPLPPYIDRPDEASDKERYQTVYNQKPGAVAAPTAGLHFDDAILKQLQDKGVNTEFVTLHVGAGTFQPVRVDNILEHKMHSEYAEVPESVVNAIAKTKAAGKRVIAVGTTSVRSLESAAQAAIKDGTGLAPFFSDTDIFIYPGYQFQVVDAMLTNFHLSESTLIMLVSAFAGKENVMNAYQAAIAQQYRFFSYGDAMFIEKNQS

SEQ ID NO: 69990 - protein, 348 aa, unidentified
  source 1..348: note = Paraglaciecola psychrophila
  REGION 1..348: note = tr|K7AVN1|K7AVN1_9ALTE S-adenosylmethionine:tRNA ribosyltransferase-isomerase OS=Paraglaciecola psychrophila 170 OX=1129794 GN=queA PE=3 SV=1
MKLSDFHFDLPENLIARYPTEKRSSSRLMHLNSNKGEVVHKQFSDIVELIDEGDLLIFNNTRVIPARLLGQKESGGKVEVLIERVLDEHRVLAHVRASKSPKVGSKLILEGVVQAEMVARHDALFELKFLNDEPVLSLLEQFGHMPLPPYIDRPDEDSDKERYQTVYNKVPGAVAAPTAGLHFDEDILKILKDKGVKSEFVTLHVGAGTFQPVRVDNILEHKMHSEYAEVSQQVVDAILATRAAGKRVVAVGTTSVRSIESAAQASLKAGTELAPFLSDTDIFIYPGYEFQLVDAMLTNFHLSESTLLMLVSAFCGKENIESAYQQAIEQEYRFFSYGDAMFLERKER

SEQ ID NO: 69991 - protein, 350 aa, unidentified
  source 1..350: note = Paraglaciecola sp.
  REGION 1..350: note = tr|A0A2N1CUF7|A0A2N1CUF7_9ALTE S-adenosylmethionine:tRNA ribosyltransferase-isomerase; OS = Paraglaciecola sp. MB-3u-78 OX=2058332 GN=queA PE=3 SV=1
MKLSDFHFDLPENLIARYPTEKRSSSRLMHLCGNNGDVVHKQFTHIVELIDEGDLLIFNNTRVIPARLLGQKESGGKVEVLIERVLDEHRVLAHVRASKSPKVGSKLILEGFVQAEMVARHEALFELRFLNDAPVLSLLEQFGHMPLPPYIDRPDEDSDKERYQTVYNKVPGAVAAPTAGLHFDEDILKMLKEKGVKSEFVTLHVGAGTFQPVRVDNILEHQMHSEYAEVSQQVVDAILATKAAGKRVIAVGTTSVRSIESAAQASLKAGTELVPFISDTDIFIYPGYEFQLVDAMLTNFHLSESTLLMLVSAFCGKQNIESAYQQAIEQEYRFFSYGDAMFLEKKLACS

SEQ ID NO: 69992 - protein, 356 aa, unidentified
  source 1..356: note = Parahaliea aestuarii
  REGION 1..356: note = tr|A0A5C8ZVS3|A0A5C8ZVS3_9GAMM S-adenosylmethionine:tRNA ribosyltransferase-isomerase; OS = Parahaliea aestuarii OX=1852021 GN=queA PE=3 SV=1
MKRSDFTYHLPPELIAQHPLAERSASRLLCLDGASGELAHRQFPDLLAQLRPDDLLVFNNTRVIPARLWGQKETGGRLEILIERLTGIDTALAHIRSSKSPKPGSRILLSTEPGGEPGPFSLEVTERVGALFALKAPEGEPLSEILQVIGHMPLPPYIERPDDAEDQGRYQTVFAEREGAVAAPTAGLHFSDELLAAIEARGVRRAFVTLHVAAGTFQPVREENIEDHPMHAEYLEVSAETCEAVAETRRRGGRVVAVGTTAVRSLETASQASGEPQPYCGDTDIFIYPGYRFRAVDAMVTNFHLSESTLLMLVSAFVGRECILAAYREAIAERYRFFSYGDAMFITAGPESGRLS

SEQ ID NO: 69993 - protein, 364 aa, unidentified
  source 1..364: note = Parahaliea aestuarii
  REGION 1..364: note = tr|A0A5C9A5G6|A0A5C9A5G6_9GAMM S-adenosylmethionine:tRNA ribosyltransferase-isomerase; OS = Parahaliea aestuarii OX=1852021 GN=queA PE=3 SV=1
MKRSDFAYHLPPELIAQHPLAERSGSRLLCLDGQSGDLAHRQFPELLDQLQPDDLLVFNNTRVIPARLWGQKETGGKLEILVERLTGIDMALAHIRCSKSPKPGSRILLSTAEGGEPGPFTLEVTERVGALFGLKTPEGQPLSEILQVIGHMPLPPYIERPDDAEDQGRYQTVYAEREGAVAAPTAGLHFTDDLLAAIDARGIRRAFVTLHVAAGTFQPVRTEEIEDHPMHAEYLEVDEATCAAVAETRRRGGRVIAVGTTAVRSLETASQASGEPRPYCGDTDIFIYPGYRFRAVDAMVTNFHLSESTLLMLVSAFVGRETMLAAYAEAIAQRYRFFSYGDAMFITAGPQAGRRPDPEQGNDA

SEQ ID NO: 69994 - protein, 374 aa, Paralcaligenes ureilyticus
  REGION 1..374: note = tr|A0A4V2UZC5|A0A4V2UZC5_9BURK S-adenosylmethionine:tRNA ribosyltransferase-isomerase; OS = Paralcaligenes ureilyticus OX=627131 GN=queA PE=3 SV=1
MATTRAALTTQACLRARPQLQDLRVNHRLELSQFDYELPPELIAQTPAPERTGSRLLHLDAAGALHDRQFTHLPELLKPNDLLVFNDTRVIKARLRGHKESGGKVEALIESITQPRVALAHVRASKSPRPGSVLIMAEAFNVKVLGRQGELFELEFPERVLDLLDRYGSTPLPPYITHAAQPQDEERYQTVYAREPGAVAAPTAGLHFDTAMLARLAAQGIGESFVTLHVGAGTFQPVRVENLDEHIMHSEHYSVSAQTLQQIRATRAAGGRVIAVGTTSVRALESAAQHAGQDSSAEVSPIEGDTRLFITPGYRFQIIDALITNFHLPQSTLLMLISALAGMDPIRRAYAHAIQSRYRFFSYGDAMFIETPQP

SEQ ID NO: 69995 - protein, 342 aa, Paraliobacillus ryukyuensis
  REGION 1..342: note = tr|A0A366EG27|A0A366EG27_9BACI S-adenosylmethionine:tRNA ribosyltransferase-isomerase; OS = Paraliobacillus ryukyuensis OX=200904 GN=queA PE=3 SV=1
MNINDFDFDLPEELIAQTPLKDRSSSRLLVMNREDQALSHHTFSDIIDYIGKGDCLVLNDTKVLPARLYGSKKDTGAKVEVLLLHQESDDDWEVLVKPAKKIKEGTEIVFGDGKLTAICLEEKEHGGRTLRFHYHGIFLEVLNELGEMPLPPYIKEQLPDQERYQTVYAREEGSAAAPTAGLHFTTTLLEQLKQKGVQVVFLTLHVGLGTFRPVSVDTVEEHDMHAEFYHMSQETADVINQVKANGGRVISVGTTSTRTLETIARDNDGNLVEASGWTDIFIYPPYQFQAVDGLITNFHLPKSTLVMLVSALAGRDFVLKAYHEAIEQRYRFFSFGDAMLIL

SEQ ID NO: 69996 - protein, 342 aa, Paraliobacillus sp.
  REGION 1..342: note = tr|A0A0U1KLT6|A0A0U1KLT6_9BACI S-adenosylmethionine:tRNA ribosyltransferase-isomerase; OS = Paraliobacillus sp. PM-2 OX=1462524 GN=queA PE=3 SV=1
MNINDFNFELPEQLIAQTPLKDRTSSKLLVMERQSQTISHHRFNDIIDYIQPGDCLVLNDTKVLPARLYGSKKDTGAKIEVLLLHQIEGDEWEVLVKPAKKIKIGSKITFGDDKLTAICTEEKEHGGRILQFSYHGIFLEVLNELGEMPLPPYIKEQLPDQERYQTVYAREEGSAAAPTAGLHFTNELLAQLKEKGIKIVFLTLHVGLGTFRPVSVDTIEAHDMHAEFYHMPQETADTINQVKQDGGKVISVGTTSTRTLETIARDNNGELVAASGWTDIFIYPPYQFRAVDGLITNFHLPKSTLVMLVSAFATRDFIMEAYHEAIKKDYRFFSFGDAMLIL

SEQ ID NO: 69997 - protein, 341 aa, unidentified
  source 1..341: note = Paramaledivibacter caminithermalis
  REGION 1..341: note = tr|A0A1M6QUE5|A0A1M6QUE5_9CLOT S-adenosylmethionine:tRNA ribosyltransferase-isomerase; OS = Paramaledivibacter caminithermalis DSM 15212 OX=1121301; GN = queA PE=3 SV=1
MKTSDFYFDLPEELIAQVPLKERDKSRLMVLNKENGEIRHRNFTDILDYLRQGDCLVLNDTRVIPARLFGVKDTGANVEFLLLKRIDKNRWQTLVKPGKRAKLGSRFVFGNNDELTGEIVDLAEEGTRIIEFKYEGIFEEVLDELGNMPLPPYITEKLEDKERYQTVYSKNTGSAAAPTAGLHFTETLLNKIRDRGVKIAYITLHVGLGTFRPVKTENILEHKMHSEFYMVSKDAAELINATKVSGGKIISVGTTATRTLETVGTNDGLIREGNGWTDIFIYPGYEFKVIDGLLTNFHLPESTLIMLVSSLAGRENVLKAYNEAVKERYRFFSFGDAMLVI

SEQ ID NO: 69998 - protein, 358 aa, unidentified
  source 1..358: note = Paramesorhizobium deserti
  REGION 1..358: note = tr|A0A135HWJ4|A0A135HWJ4_9RHIZ S-adenosylmethionine:tRNA ribosyltransferase-isomerase; OS = Paramesorhizobium deserti OX=1494590 GN=queA PE=3 SV=1
MRVDLFDFDLPEERIALRPMEPRDHARLLVVQPGSPFADRRVDNLPDLLQPGDALVFNDTKVIPAQLEGIRERDGTVAQISATLHMRVGPDRWKAFLRPGKRVKEGERIRFGHGGSSCFLGTLDATVAEKGEAGEALLVFDLSGAMLDEAVAAAGHIPLPPYIASKRPDDQRDRTDYQTVYAREEGAVAAPTAGLHFTPSLLETLKQRGIEEHFVTLHVGAGTFLPVKADDTSEHKMHAEIGHVSEETAQALNRVRERGGRIVCVGTTSLRLLESAADENGVIQPWSGATDIFITPGYRFRAVDLLMTNFHLPRSTLFMLVSAFSGMDTMRAAYEHAIREDYRFYSYGDASLLLRAPS

SEQ ID NO: 69999 - protein, 349 aa, unidentified
  source 1..349: note = Paramuribaculum intestinale
  REGION 1..349: note = tr|A0A2V1J0S2|A0A2V1J0S2_9BACT S-adenosylmethionine:tRNA ribosyltransferase-isomerase; OS = Paramuribaculum intestinale OX=2094151 GN=queA PE=3 SV=1
MKLSQFRFKLPEELIAQHASEHRDEARMMVVHRASGEIEHRVFKDIINYFVDGDIFVFNDTKVFPARLYGNKEKTGAKIEVSLLRELNAENKLWDVLVEPARKIRIGNKLYFGDDDSMVAEVIDNTTSRGRTLRFLYDGDHDEFKEALFKLGQTLLPEYIKREPEEEDAERYQTIYADKEGAVVAPAAGLHFSRELLKRMEIKGIHQAFLTVHSGLGNFREIDVEDLTKHRMDSEQMEVSQALVDMVNGVKDNDHRVCAVGTSVLRGIASAVSMGGHMKTYSGWTNKFIFPPYDFTVTDALVTNFHMPYSIMLMMTTAFGGYDLVMKAYDEAISEKYRFGAYGDAMLIL

SEQ ID NO: 70000 - protein, 406 aa, unidentified
  source 1..406: note = Paramuribaculum intestinale
  REGION 1..406: note = tr|A0A2V1J3C1|A0A2V1J3C1_9BACT S-adenosylmethionine:tRNA ribosyltransferase-isomerase; OS = Paramuribaculum intestinale OX=2094151 GN=queA PE=3 SV=1
MTDPRLISIEAFDYPLPDGLIARHPLAVRDTCRLLVRHGDGSLEERVFADIAQLLSSDDMLVMNNTKVINARLRFRKGGGDQGARIEVFCLEPVAPADYERSFASRIGCSWRCFVGNSKKWKEGSVTMNVDVAGEGTVVLTARRLRHEGASSVIGFEWDNDSVTFSQIIEAAGELPIPPYLNRDTEESDLTDYQTVYSRIQGSVAAPTAGLHFTPALFESLRQRGVELRELTLHVGAGTFQPVKSETIGGHPMHSEFISVGIGLIEELARTDRRVVAVGTTSVRTLESLYWLGVRASRGESLDELPQWYPYDGHPTAMSRNEAMGCLLDRLRKDGSDVLTADTRIIIAPGYRYRVVDAMVTNFHQPKSTLLLLVSAFTGGDWRRMYDLAMEREFRFLSYGDACLLL

SEQ ID NO: 70001 - protein, 349 aa, Parapedobacter composti
  REGION 1..349: note = tr|A0A1I1KJG0|A0A1I1KJG0_9SPHI S-adenosylmethionine:tRNA ribosyltransferase-isomerase; OS = Parapedobacter composti OX=623281 GN=queA PE=3 SV=1
MKLSQFKFNLPESLIAYEPTDNRDESRLMVLDRKTGKIEHKIFKDILNYFDDKDVMILNNTKVFPARMYGNKEKTGATIEVFLLRELNKELRLWDVLVDPARKIRVGNKLYFGENDLLVAEVVDNTTSRGRTIRFLFDGTDEEFRRNIELLGETPLPKYIKRKATPEDKFRYQTIFAKHEGAVAAPTAGLHFSRELMKRLELKGVEFAEITLHVGLGTFRPVEVEDLTKHKMDSEQFIISEEAAKTVNKAIDSKRRVCAVGTTSMRAIESSVSADRHLKPANDWTSKFIYPPYDFSIANSMITNFHTPESTLLVMIAAFGGYEHVMNAYEVAVKEKYRFYSYGDAMLIV

SEQ ID NO: 70002 - protein, 349 aa, unidentified
  source 1..349: note = Parapedobacter indicus
  REGION 1..349: note = tr|A0A1I3QZY6|A0A1I3QZY6_9SPHI S-adenosylmethionine:tRNA ribosyltransferase-isomerase; OS = Parapedobacter indicus OX=1477437 GN=queA PE=3 SV=1
MKLSQFKFNLPESLIANEPTESRDESRLMVLDRKTGKIEHKIFKDILNYFDDKDVMILNNTKVFPARMYGNKEKTGATIEVFLLRELNKELRLWDVLVDPARKIRVGNKLYFGDDDLLVAEVVDNTTSRGRTIRFLFDGTDEEFRRNIEILGETPLPKYIKRKATPEDKFRYQTIFAKHEGAVAAPTAGLHFSRELMKRLELKGVEFAEITLHVGLGTFRQVEVEDLTKHKMDSEQFIIPEESATMVNKAIDAKRRVCAVGTTSMRAIESSVSADKHLKPANEWTSKFIYPPYEFSIANTMVTNFHTPESTLLVMIAAFGGYEHVMNAYEIAVKEKYRFYSYGDAMLII

SEQ ID NO: 70003 - protein, 349 aa, Parapedobacter koreensis
  REGION 1..349: note = tr|A0A1H7LYR0|A0A1H7LYR0_9SPHI S-adenosylmethionine:tRNA ribosyltransferase-isomerase; OS = Parapedobacter koreensis OX=332977 GN=queA PE=3 SV=1
MKLSQFKFNLPESLIAYEPTENRDESRLMVLDRKTGKIEHKIFKDILNYFDDKDVMILNNTKVFPARMYGNKEKTGATIEVFLLRELNKELRLWDVLVDPARKIRVGNKLYFGDDDLLVAEVVDNTTSRGRTIRFLFDGTDEEFRRNIEILGETPLPKYIKRRATPEDKFRYQTIFAKHEGAVAAPTAGLHFSRELMKRLELKGVEFAEVTLHVGLGTFRQVEVEDLTKHKMDSEQFIVPEEAAKVVNKAIDAKKRVCAVGTTSMRAIESSVSADKHLKPASEWTSKFIYPPYDFSIANSMVTNFHTPESTLLVMIAAFGGYEHVMNAYEVAVKEKYRFYSYGDAMLII

SEQ ID NO: 70004 - protein, 349 aa, Parapedobacter luteus
  REGION 1..349: note = tr|A0A1T5F068|A0A1T5F068_9SPHI S-adenosylmethionine:tRNA ribosyltransferase-isomerase; OS = Parapedobacter luteus OX=623280 GN=queA PE=3 SV=1
MKLSQFKFNLPESLIAYEPTESRDESRLMVLDRKTGKIEHKIFKDILNYFDDKDVMILNNTKVFPARMYGNKEKTGATIEVFLLRELNKELRLWDVLVDPARKIRVGNKLYFGDDDLLVAEVVDNTTSRGRTIRFLFDGTDEEFRRNIEILGETPLPKYIKRRATPEDKFRYQTIFAKHEGAVAAPTAGLHFSRELMKRLELKGVEFAEITLHVGLGTFRQVEVEDLTKHKMDSEQFVIPEEAARIVNQAIDAKKRVCAVGTTSMRAIESSVSADKHLKPANEWTSKFIYPPYDFSIANSMVTNFHTPESTLLVMIAAFGGYENVMNAYEIAVKEKYRFYSYGDAMLII

SEQ ID NO: 70005 - protein, 349 aa, Parapedobacter sp.
  REGION 1..349: note = tr|A0A3N7GSC2|A0A3N7GSC2_9SPHI S-adenosylmethionine:tRNA ribosyltransferase-isomerase; OS = Parapedobacter sp. OX=1958893 GN=queA PE=3 SV=1
MKLSQFKFNLPESLIAYEPTESRDESRLMVLDRKTGKIEHKIFKDILNYFDDKDVMILNNTKVFPARMYGNKEKTGATIEVFLLRELNKELRLWDVLVDPARKIRVGNKLYFGDDDLLVAEVVDNTTSRGRTIRFLFDGTDEEFRRNIEILGETPLPKYIKRKATPEDKFRYQTIFAKHEGAVAAPTAGLHFSRELMKRLELKGVEFAEITLHVGLGTFRQVEVEDLTKHKMDSEQFIIPEEAARTVNKAIDAKRRVCAVGTTSMRAIESSVSADKHLKPANEWTSKFIYPPYDFSIANSMITNFHTPESTLLVMIAAFGGYENVMNAYEIAVKEKYRFYSYGDAMLII

SEQ ID NO: 70006 - protein, 398 aa, Paraperlucidibaca baekdonensis
  REGION 1..398: note = tr|A0A3E0H5S3|A0A3E0H5S3_9GAMM S-adenosylmethionine:tRNA ribosyltransferase-isomerase; OS = Paraperlucidibaca baekdonensis OX=748120 GN=queA PE=3; SV = 1
MQRRDFHFDLPDALIARYPLPERSASRLLCLNSRDGRVTHRQFRELPGLIAPGDLLVFNQSRVMPARLFAQKASGGQVEILIERLPTATTALTHVRASKSPKPGSTLVLSDGTVVRMAARAEALFVLEADEPWAGIMARIGEMPLPPYFQREAEASDDERYQTVYARDEGSVAAPTAGLHFDAGVMAALDARGIETAFVTLHVGAGTFQPVRADALEDHIMHAEWLTVSAEVVAAVQATRARGGRVIAVGTTSVRALESMAWASRGIDPEQWRVGQSQQSDNQPQPASVHPATDKAAVAAQLHEFAGDTRLFITPGYAWQIVDAMVTNFHLPESTLLMLVSAMAGREAVLAAYAEAIAQHYRFFSYGDAMWVTGPDWQAEPSATSSAPHAAAIHRDSL

SEQ ID NO: 70007 - protein, 352 aa, unidentified
  source 1..352: note = Paraphotobacterium marinum
  REGION 1..352: note = tr|A0A220VDS6|A0A220VDS6_9GAMM S-adenosylmethionine:tRNA ribosyltransferase-isomerase; OS = Paraphotobacterium marinum OX=1755811 GN=queA PE=3 SV=1
MKRSKFFYELPKELIASKPAKHRTDSRLLMLDSNNEAIYHKNFVDVLDLVQPGDLLVFNNTKVMPARLFAVKETGGKVEILIERVLDNNKVLVHLKSSNTPKKDALIFIEADQNISLKMIERKEDLFILQFENKVNVFDTLEKFGHMPLPPYIERPDTDEDKNRYQTVYGEKVGAVAAPTAGLHFDQDLLDKLKEKGVNFSFVTLHVGAGTFKSVKSDDIEDHQMHSEYIDVSKDVVQQILNTKKNNKRIIAVGTTSVRALESAAKNSLKTLESFTGDTDIFIYPGYKFKVVDAMITNFHLPESTLLMLVSAFSGYQNIMEAYQKAIEKEYRFFSYGDAMFITKNDTHSSED

SEQ ID NO: 70008 - protein, 419 aa, Paraprevotella clara
  REGION 1..419: note = tr|G5SWK2|G5SWK2_9BACT S-adenosylmethionine:tRNA ribosyltransferase-isomerase OS=Paraprevotella clara YIT 11840 OX=762968 GN=HMPREF9441_03775 PE=3 SV=1
MEETKHIQIKDFNYELPEERIAKFPLTERDQSKLLVYRHGTVGEDTFTSLPDYLPKGALMVFNNTKVIQARLHFHKDTGALIEVFCLEPVRPHDYALMFQQTGRCSWLCLVGNLKKWKSGSLSRPVEISGRSITLKATRGENRGTSHWIDFEWDDEQTTWAEILEAVGELPIPPYLNRETQESDKTTYQTVYSKIKGSVAAPTAGLHFTERVLADLDAHGIDREEVTLHVGAGTFKPVKSEEIAGHEMHTEYICVHRSTIEKLLAHGGACIAVGTTSVRTLESLYYIGVALDGNPDASEEELHVPQWMPYEYAARTRPSRSPDDGRPEALTTMQALQNVWDYLNRHELTALHTSTQIIIAPGYEYHIVRMMVTNFHQPQSTLLLLVSAFVHGDWRTIYDYALAHDFRFLSYGDSSLLIP

SEQ ID NO: 70009 - protein, 353 aa, Paraprevotella clara
  REGION 1..353: note = tr|A0A412U7P6|A0A412U7P6_9BACT S-adenosylmethionine:tRNA ribosyltransferase-isomerase; OS = Paraprevotella clara OX=454154 GN=queA PE=3 SV=1
MKLSQFKFKLLEEQIAQYPAHHRDESRLMVLHKKSGDIEHRQYFKDILDYFDDKDVFIFNDTKVFPARLYGNKEKTGARIEVFLLRELNEDLRLWDVLVDPARKIRIGNKLYFGEDDSMVAEVIDNTTSRGRTLRFLYDGPHDEFKAALYALGEAPLPKHIVKRPAEPEDMERFQCIFARNEGAVTAPSSGLHFSRELMKRLEIKGVDFAYVTMHCGLGNFRDIDVEDLTKHKMDSEEMFVEADACRIVNAAKDGGHRVCAVGTTVQRVIETAVGTDGHLKEFTGWTNKFIFPPYEFNVADCMVANFYMPYSTLLMLTAAYGGYDLVMQGYKEALKEGYRFGTYGDAMLILND

SEQ ID NO: 70010 - protein, 431 aa, Paraprevotella xylaniphila
  REGION 1..431: note = tr|F3QTV3|F3QTV3_9BACT S-adenosylmethionine:tRNA ribosyltransferase-isomerase OS=Paraprevotella xylaniphila YIT 11841 OX=762982 GN=HMPREF9442_01622 PE=3 SV=1
MPNFATLKQSTPMEETRHIQIKDFNYNLPEERIAKFPLTERDQSKLLVYRHGTVGEDTFTSLPDYLPQGALMVFNNTKVIQARLHFHKDTGALIEVFCLEPVRPHDYALMFQQTGRCSWLCLVGNLKKWKSGSLSCPVEIGGRSITLKATRGENRGTSHWIDFEWDDEQTTWAEILEAVGELPIPPYLNRETQESDKTTYQTVYSKIKGSVAAPTAGLHFTERVLADLDAHGIDREEVTLHVGAGTFKPVKSEEIAGHEMHTEYICVHRSTIEKLLAHGGACIAVGTTSVRTLESLYYIGVALNGNPDASEEELHVPQWMPYEYAARTRPVGSPDNGHPEALTTLQALQNVLDYLDRHGLTALHTSTQIIIAPGYEYHIVRMMVTNFHQPQSTLLLLVSAFVHGDWRTIYDYALAHDFRFLSYGDSSLLIP

SEQ ID NO: 70011 - protein, 353 aa, Paraprevotella xylaniphila
  REGION 1..353: note = tr|F3QVC2|F3QVC2_9BACT S-adenosylmethionine:tRNA ribosyltransferase-isomerase OS=Paraprevotella xylaniphila YIT 11841 OX=762982 GN=queA PE=3 SV=1
MKLSQFKFKLPEEQIAQYPARHRDESRLMVLHKKSGDIEHREYFKDILDYFDDKDVFIFNDTKVFPARLYGNKEKTGARIEVFLLRELNEDLRLWDVLVDPARKIRIGNKLYFGEDDSMVAEVIDNTTSRGRTLRFLYDGPHDEFKAALYALGEAPLPKHIVKRPAEPEDMERFQCIFARNEGAVTAPSAGLHFSRELMKRLEIKGVNFAFVTMHCGLGCFRDIDVEDLTKHKMDSEEMFVGADACRIVNTAKEGGHRVCAVGTTVQRVLETAVGTDCNLKEFTGWTNKFIFPPYEFGVADCMVANFYMPYSTMLMLTAAYGGYDLVMQGYKEALKEGYRFGTYGDAMLILND

SEQ ID NO: 70012 - protein, 344 aa, unidentified
  source 1..344: note = Pararheinheimera mesophila
  REGION 1..344: note = tr|A0A3P3QIT4|A0A3P3QIT4_9GAMM S-adenosylmethionine:tRNA ribosyltransferase-isomerase; OS = Pararheinheimera mesophila OX=1547515 GN=queA PE=3 SV=1
MQVKDFSFELPEQLIARFPKAERSSSRLLKMQRHTGELSHLVFTDLVAQLNSGDLLVFNNTRVIPARLFGQKQSGGKVEILVERVLDSQRFLAHVRASKAPKPETTILVDDTTKLKMLQRHDTLFELELLGDEPLLQMLERLGHMPLPPYIDRPDSDEDKQRYQTVYNQKPGAVAAPTAGLHFDEPLLAALKAKGVEFTYVTLHVGAGTFQPVRVDNVLDHQMHAEYIEVEQAVVDAITACKARGNRVVAVGTTSVRSLESAAQIALQQGKTLQPYSGDTKIFIYPGYQFQVIDGLVTNFHLPESTLIMLVSAFSQKDYVMHAYHTAIAQQYRFYSYGDAMLIL

SEQ ID NO: 70013 - protein, 344 aa, unidentified
  source 1..344: note = Pararheinheimera tangshanensis
  REGION 1..344: note = tr|A0A5C8LV60|A0A5C8LV60_9GAMM S-adenosylmethionine:tRNA ribosyltransferase-isomerase; OS = Pararheinheimera tangshanensis OX=400153 GN=queA PE=3; SV = 1
MQVKDFSFELPEQLIARFPKAERSSSRLLKMQRQTGELSHLVFTDLVAQLNSGDLLVFNNTRVIPARLFGQKESGGKVEILLERVLDSQRFLAHVRASKAPKPDTIILVDDNTKLKMLQRHDTLFELELLGDEPLLGMLDRLGHMPLPPYIDRPDSDEDKQRYQTVYNQKPGAVAAPTAGLHFDEPLLAALKAKGVEFAYVTLHVGAGTFQPVRVDNVLDHQMHAEYIEVDQAVVDAIHACKARGNRVVAVGTTSVRSLESAAQIALQQGKALQPYSGDTKIFIYPGYQFQVIDGLITNFHLPESTLIMLVSAFSQKDYVMRAYQTAIEQEYRFYSYGDAMLIL

SEQ ID NO: 70014 - protein, 366 aa, unidentified
  source 1..366: note = Pararhizobium polonicum
  REGION 1..366: note = tr|A0A1C7NYQ8|A0A1C7NYQ8_9RHIZ S-adenosylmethionine:tRNA ribosyltransferase-isomerase; OS = Pararhizobium polonicum OX=1612624 GN=queA PE=3 SV=1
MRVDLFDFDLPEDNIALRPASPRDSARLLVVQPQSDEPLSDHGVMDLPSFLRPGDALVFNDTKVIPAQLEGLRRRGEDVVTEVSLTLHMRTAPDRWKAFARPAKRLKPGDRIEFGHGSNTCLMGSLDATVEEKGEAGEVTLRFDLSGPALDEAILAVGHIPLPPYIASKRPEDEKDRTDYQTVYAREQGAVAAPTAGLHFTDRLFAALDALGVERHFVTLHVGAGTFLPMKVDDTDDHVMHQEIGHVSAEAAERLNAVRARGGRIVCVGTTSLRLIESAAEENGDIRPWSGPTGIFITPGYRFRAVDMLMTNFHLPKSTLFMLVSAFSGMETMRRAYAHAIETGYRFYSYGDSSLLFRDAPMSETL

SEQ ID NO: 70015 - protein, 358 aa, unidentified
  source 1..358: note = Pararhizobium sp.
  REGION 1..358: note = tr|A0A506UAB7|A0A506UAB7_9RHIZ S-adenosylmethionine:tRNA ribosyltransferase-isomerase; OS = Pararhizobium sp. BGMRC6574 OX=2590452 GN=queA PE=3 SV=1
MRVDLFDFELPDERIALRPASPRDTARQLVVRPGEPLEDRVVADLDTLLEPGDALVLNDTRVIPARLDGIRRRGEDARTHVQATLHMRTDGNTWKAFARPGKRIRAGDRIAFSGQEDGEGKLDAEVVEKGEAGEVTLRFGLAGGELDRAIAAAGHVPLPPYIASKRAEDASDIEDYQTVYARENGAVAAPTAGLHFTEDLFERLRVRGVSLHFVTLHVGAGTFLPVKADDTGDHRMHSEIGQVSEETAAALNAVRASGGRVVSVGTTSLRLLESAAREDGTLEPWSGATDIFITPGYRFRFVDVLMTNFHLPRSTLFMLVSAFSGLETMQAAYAHAIANGYRFYSYGDSNLLFRSEPS

SEQ ID NO: 70016 - protein, 348 aa, unidentified
  source 1..348: note = Pararhodobacter aggregans
  REGION 1..348: note = tr|A0A2T7UR63|A0A2T7UR63_9RHOB S-adenosylmethionine:tRNA ribosyltransferase-isomerase; OS = Pararhodobacter aggregans OX=404875 GN=queA PE=3 SV=1
MKLSDFDFDLPEDLIATRPMKPRPAARLLLAEGDAIADRHVRDLVDILRPGDRLVLNNTRVIPARLFGERLRDTKDGSGRAKVEVTLLNPEPSGGWRVLARPLRKLAPGDRLDFGAGLTAVVSGKDETEAVLAFDLTGPAFDAALEEAGRMPLPPYIESRRPADAQDREDYQPVFARERGAVAAPTASLHFDQPLLDALRAMGVDFTEVTLHVGAGTFLPVKVEDVTTHRMHAEWGEVTPEAAAQINVTKAAGGRVIPVGTTALRLIESAARSGRVEPWRGETDIFIYPGFTFHAANGLLTNFHLPKSTLLMLVSALMGAERIRAIYDHAVTERYRFFSYGDASLLLP

SEQ ID NO: 70017 - protein, 348 aa, unidentified
  source 1..348: note = Pararhodobacter sp.
  REGION 1..348: note = tr|A0A2T8HXD2|A0A2T8HXD2_9RHOB S-adenosylmethionine:tRNA ribosyltransferase-isomerase; OS = Pararhodobacter sp. AM505 OX=2172121 GN=queA PE=3 SV=1
MRLSDFDFDLPEELIATRPVRPRPAARLLHVEGGAMVDRQVADLLDILRPGDRLILNNTKVIPARLFGERLRDTRDGSGRAKVEVTLIGPEGQGAWRALARPLRKLAAGDRIEFSEDLAAIVRGKSEGEAVLVFEQSGTDFDAALEAAGKMPLPPYIESRRPADAQDREDYQTVFARESGAVAAPTASLHFDDGLLAALRAKGVMMSEVTLHVGAGTFLPVKVEDVTTHKMHAEWGEVSEAAAEEINATRAQGGRVIAVGTTALRLIESAARSGRVESWRGETDIFIYPGFEFHATDGLMTNFHLPKSTLLMLVSALMGKGLMDAVYAHAIAERYRFFSYGDASLLIP

SEQ ID NO: 70018 - protein, 351 aa, unidentified
  source 1..351: note = Pararhodobacter sp.
  REGION 1..351: note = tr|A0A2U2CE54|A0A2U2CE54_9RHOB S-adenosylmethionine:tRNA ribosyltransferase-isomerase; OS = Pararhodobacter sp. CIC4N-9 OX=2184063 GN=queA PE=3 SV=1
MKLSDFDFDLPEELIATRPVKPRPAARLLLAEGDTIADRHVRDLTQILQPGDRLVLNNTRVIPARLFGTRSRATKDGSGVARIEATLLNPDPSGGWRVLARPLRKLAPGDRVDFGAGLTATVSARDETEAVLDFDLKGPDFDAALDAAGRMPLPPYIESRRPADAQDAEDYQTVFARLRGAVAAPTASLHFDAALLDALKARGVAFTEVTLHVGAGTFLPVKVEDVKTHRMHAEWGEVTPDAADAINATKAAGGRVIPVGTTALRLIESAARSGRVEPWRGETDIFIYPGFEFHAADALMTNFHLPKSTLLMLVSALMGKERIDAIYAHAVASGYRFFSYGDASLLVPRRE

SEQ ID NO: 70019 - protein, 351 aa, unidentified
  source 1..351: note = Pararhodospirillum oryzae
  REGION 1..351: note = tr|A0A512H3V4|A0A512H3V4_9PROT S-adenosylmethionine:tRNA ribosyltransferase-isomerase; OS = Pararhodospirillum oryzae OX=478448 GN=queA PE=3 SV=1
MRVDLFDFPLPRECIAVRPAVPRDSARLLRVPATGPFQDLGVRDLPGLLDPGDVLVVNDTRVIPARLKGRVGEGGVEVTLHLQEAPDRWRCFARPARKLTLGRVVTFAPDFTAEVVARGEGGEVVLSFNRAGPALTQALEAHGRLPLPPYMGREDDARDREDYQTTYASHDGAVAAPTAGLHLTPALFQALADRGVACEALTLHVGAGTFLPVTADDTADHVMHAERGILTPEVAGRLNQARAEGRRIVAVGTTVARLLESAADDAGVIHPFETTTRLFLVPGARFKVVDRLMTNFHLPRSTLFMLVSAFAGLGRMQAAYAHAIKAGYRFYSYGDACLLDRADLAAGDERA

SEQ ID NO: 70020 - protein, 478 aa, unidentified
  source 1..478: note = Pararhodospirillum photometricum
  REGION 1..478: note = tr|H6SQS3|H6SQS3_PARPM S-adenosylmethionine:tRNA ribosyltransferase-isomerase OS=Pararhodospirillum photometricum DSM 122 OX=1150469 GN=queA PE=3 SV=1
MTLSLSLPWATPKVMVPSKTRKKRSARRPSLNRVSPAANCPSWARSAKRSIKVGSSPRKNGWWSRVSRRSVSSAMVSPLSNRPTFRRPARRQRNSLSPPGAVLVKHTKWRVTRKTRLGRPDSFGAKAPGMRVDLFDFDLPRERIAVRPAEPREAARLLRVGPGAALQDLSVRDFPALLAPGDLLVLNDTRVIPARLKGRVGAGGVEVTLHFQEALDCWRCFAKPARKLTPGREILFAEDFRAVVESRGEGGEAVLRFNVAGAALMAALEAHGRLPLPPYMGREDDARDRTDYQTVYARVDGAVAAPTAGLHLTPALLDALAARGIGRVAVTLHVGAGTFLPVTADDTNDHRMHAERGVLTPEVAATINATRAAGGKIVAVGTTALRLLESAADDSGIVHPFDEATRLFLVPGARFKVVDRLLTNFHLPRSTLFMLVSAFAGLETMHAAYAHAIAAGYRFYSYGDTSLLSRAVAGSAAD

SEQ ID NO: 70021 - protein, 354 aa, unidentified
  source 1..354: note = Parasaccharibacter apium
  REGION 1..354: note = tr|A0A2C6IXL1|A0A2C6IXL1_9PROT S-adenosylmethionine:tRNA ribosyltransferase-isomerase; OS = Parasaccharibacter apium OX=1510841 GN=queA PE=3 SV=1
MTDELSLYDFTLPRDSIATEPARPRDTARLLHVIPPALTGTEQARLTLHHIHNLPDLLKEGDLLIANNTEVIPAKMEARRGEARIGITLDRILPEGQWHALARNARKLRPHDTLHFEDDPVTATILTNEGDGAITLRFSVEGDAFDRFLERRAALALPPYIARPHGPTEADTHDYRTIFSRFRGAVAAPTAGLHFTNDVLKALTAKGIAQETLTLHVGAGTFLPVRSSIAEHKMHAEWGHIPPETAQRINETRARGGRIVAVGTTSLRLLESAADEHGLIHPWQGETSIFIKPGYRFRAVDALLTNFHLPRSTLFMLVCAFAGTDTMRHAYHYAITEGLRFYSYGDACLLERTP

SEQ ID NO: 70022 - protein, 354 aa, unidentified
  source 1..354: note = Parasaccharibacter apium
  REGION 1..354: note = tr|A0A2S4PG21|A0A2S4PG21_9PROT S-adenosylmethionine:tRNA ribosyltransferase-isomerase; OS = Parasaccharibacter apium OX=1510841 GN=queA PE=3 SV=1
MTDDLSLFDFTLPRDHIATEPARPRDMAQLLHVVPPALAGTDDATLSLHRIRNLPELLKEGDLLVANDTEVIRAKMEARRGDAKIGITLDRILPEGQWHALARNARKLRPGDRLHFEDDPVTADVLTNEGDGAVTLRFSVEGDEFDDFLERRAALALPPYIARPNGPTEADNSDYRTIFSRFRGAVAAPTAGLHFTEELLEALAARGIQKQTLTLHVGAGTFLPVRSTIAEHKMHAEWGHIDEETARLINGTRANGGRVVAVGTTSLRLLESAADEQGIVHPWTGETSIFIRPGYRFRAVDALLTNFHLPRSTLFMLVCAFAGTETMRHAYHHAIAEGLRFYSYGDACLLERAP

SEQ ID NO: 70023 - protein, 345 aa, unidentified
  source 1..345: note = Parashewanella curva
  REGION 1..345: note = tr|A0A3L8PYY3|A0A3L8PYY3_9GAMM S-adenosylmethionine:tRNA ribosyltransferase-isomerase; OS = Parashewanella curva OX=2338552 GN=queA PE=3 SV=1
MRVADFSFDLPDELIARYPTKERTASRLLTLDGNSGEVHDKCFTDLIDFIEAGDLMVFNNTRVIPARLFGQKATGGKLEILVERMLDDKRILAHVRSSKSPKVDAIIHLDNDYQMKMLARQEALFELELLSDRTVLEVLEEIGHMPLPPYIDRPDEDSDKERYQTVYNENPGAVAAPTAGLHFDDETLAKLKAKGVNTAFVTLHVGAGTFQPVRVDDIEDHVMHSEWANVPSDVVEQIKQTKAAGKRVIAVGTTSVRSLESAAKANEGEIAPFSADTDIFIYPGYEFFVVDAMVTNFHLPESTLIMLISAFAGKQPVMSAYQHAIEEKYRFFSYGDAMFITRKGK

SEQ ID NO: 70024 - protein, 345 aa, unidentified
  source 1..345: note = Parashewanella spongiae
  REGION 1..345: note = tr|A0A3A6TSH4|A0A3A6TSH4_9GAMM S-adenosylmethionine:tRNA ribosyltransferase-isomerase; OS = Parashewanella spongiae OX=342950 GN=queA PE=3 SV=1
MRVADFSFDLPDELIARYPTEQRSASRLLTLDGNTGQISDKQFNDLSDFIQPGDLMVFNNTRVIPARLFGQKSTGGKLEILVERMLDDKRILAHVRSSKSPKVDAIIDLDNGYQMKMLARHDTLFELELQSELTILEVLEEIGHMPLPPYIDRPDEDADKERYQTVYNETPGAVAAPTAGLHFDDEMLARLKDKGVNTAFVTLHVGAGTFQPVRVDNVLEHKMHSEWANVPQSVVDLIEQTKAAGNRIIAVGTTSVRSLESAARENDGKIAAYSSDTDIFIYPGYEFNVVDAMVTNFHLPESTLIMLISAFADQQLVMDAYQHAIKQKYRFFSYGDAMFITRKTK

SEQ ID NO: 70025 - protein, 358 aa, unidentified
  source 1..358: note = Parasphingopyxis lamellibrachiae
  REGION 1..358: note = tr|A0A3D9FDX7|A0A3D9FDX7_9SPHN S-adenosylmethionine:tRNA ribosyltransferase-isomerase; OS = Parasphingopyxis lamellibrachiae OX=680125 GN=queA PE=3; SV = 1
MRRWVPQRRTIRRNNRSVRVDLFDFALPEDRIALRPASPRDSARMLVLDGDAMVDRLVSDLPDCLRAGDILVFNDTRVIPAQLEGRRGEAKIGATLHKREGLRQWRAFIRNAKRIREGDRIDFGGEVAAIASDRGADGSFLLTFEGSEPVEILLERAGTMPLPPYIAGKRPTDDRDAADYQTMFAREKGAVAAPTAALHFTPELLTRLTAAGVDHVTLTLHVGAGTFLPMKADDSDDHVMHAEWGRIDTGTAKRLNAARAAGGRIIGVGTTSLRLLESAADEEGLIHPFEDDTAIFITPGYRFRAIDGLMTNFHLPRSTLFMLVSALMGRERMQSAYKHAIAEKYRFYSYGDASLLLP

SEQ ID NO: 70026 - protein, 341 aa, Parasporobacterium paucivorans
  REGION 1..341: note = tr|A0A1M6ER10|A0A1M6ER10_9FIRM S-adenosylmethionine:tRNA ribosyltransferase-isomerase; OS = Parasporobacterium paucivorans DSM 15970 OX=1122934; GN = queA PE=3 SV=1
MNLHDYYYELPEELIAQDPLADRSGSRLLTVDRRTGETGHTIFRNIVDYLQEGDCLVLNNTKVLPARLFGVKEDTGAIIEVLLLTRKENNNWEVLVRPGKKARPGTRIVFGNGELKGEILEIVEEGNRLIHFEYEGIFEEILDKLGQMPLPPYIKHTLEDKTRYQTVYAKHEGSAAAPTAGLHFTRELLLEIERKGVTIANVTLHVGLGTFRPVKAENILEHHMHSEYFSIDEEEARLINRTKERGGRIVAVGTTSTRTLESAADENGFITAKSGWTEIFIYPGYEFKVIDALITNFHLPESTLLMLVSAFSSREVILRAYNEALENKYRFFSFGDAMLIY

SEQ ID NO: 70027 - protein, 354 aa, Parasutterella excrementihominis
  REGION 1..354: note = tr|R5EJI0|R5EJI0_9BURK S-adenosylmethionine:tRNA ribosyltransferase-isomerase OS=Parasutterella excrementihominis CAG:233 OX=1263099 GN=queA PE=3 SV=1
METKEQHLSDFDFELPESLIAQYPLKDRAASRLLHVKPDGSVEDLHFRDILDLLKPGDLLVFNNTKVIKARLNGKKETGGVFEAMTERVTGTYEAISMMRASKAAKPGTILYFDHPEGKEPARAEVLGREGEFFRLRFDHPVLEVLDEYGKVPLPPYIQHAAEKSDESRYQTVYAKYPGAVAAPTAGLHFTDELLQQIRDKGCEEVFVTLHVGAGTFQPVRVENLSEHVMHSEWYSISPEAAEKINKAKTERRRVVCVGTTSLRTVEASASQNPEGKVRAESADTRLFIKPGYEFKVCDAMVTNFHLPKSTLVMLVIALCGRDEILSAYKHAVDEKYRFFSYGDACFLEQKVNQ

SEQ ID NO: 70028 - protein, 354 aa, Parasutterella excrementihominis
  REGION 1..354: note = tr|F3QH25|F3QH25_9BURK S-adenosylmethionine:tRNA ribosyltransferase-isomerase OS=Parasutterella excrementihominis YIT 11859 OX=762966 GN=queA PE=3 SV=1
METKEQHLSDFDFELPESLIAQYPLKDRAASRLLHVKPDGSVEDLHFRDILNLLKPGDLLVFNNTKVIKARLNGKKETGGVFEAMTERVTGTYEAISMMRASKAAKPGTILYFDHPEGKEPARAEVLGREGEFFRLKFDHPVLEVLDEYGKVPLPPYIQHAAEKSDESRYQTVYAKYPGAVAAPTAGLHFTDELLQQIRDKGCEEVFVTLHVGAGTFQPVRVENLSEHVMHSEWYSISPEAAEKINKAKAEGRRVVCVGTTSLRTVEASASQNPEGKVRAESADTRLFIKPGYEFKVCDAMVTNFHLPKSTLVMLVSALCGRDEILAAYKHAVDEKYRFFSYGDACFLEQKVNQ

SEQ ID NO: 70029 - protein, 104 aa, unidentified
  source 1..104: note = Parcubacteria bacterium
  REGION 1..104: note = tr|A0A124FT21|A0A124FT21_9BACT S-adenosylmethionine:tRNA ribosyltransferase-isomerase; OS = Parcubacteria bacterium 34_609 OX=1641386 GN=XD85_0651; PE = 3 SV=1
MKEEWYSISSENARIINQAILDKRRIVGVGTSVTRTLESAFVQDRVSEGTRWTNLFIYPGYQFQVLGALVTNFHLPRSTPLLLAAAFAGKDLLLKAYREAIHKN

SEQ ID NO: 70030 - protein, 156 aa, unidentified
  source 1..156: note = Parcubacteria bacterium
  REGION 1..156: note = tr|A0A101GSY7|A0A101GSY7_9BACT S-adenosylmethionine:tRNA ribosyltransferase-isomerase; OS = Parcubacteria bacterium 34_609 OX=1641386 GN=XD85_0652; PE = 3 SV=1
MDITLFDFELPPSYIAQEPLKKRDDSKLMILDRKTGLVEHKKFFQIIDYLKPDDLLVLNDSKVVPVRLVGYKKKTGGKVEVLLIKSVSGYLWQVLLKPGRRTPPGTEIIFSSQLKGMVIGKDEKEGVYLLEIQVKGNFREILGKIGKMPTPPYIEG

SEQ ID NO: 70031 - protein, 367 aa, unidentified
  source 1..367: note = Parcubacteria group
  REGION 1..367: note = tr|A0A554KTJ0|A0A554KTJ0_9BACT S-adenosylmethionine:tRNA ribosyltransferase-isomerase; OS = Parcubacteria group bacterium Gr01-1014_13 OX=2017175; GN = queA PE=3 SV=1
MLTSDFNYNLPKQLIAQIPLEPRDSSRLMVLDRETKKVEDKYFFDIVDYLQKGDLLVWNNTKVFKARLRGTLALDEQVIEVKEKINSSDKILNVGPVEIFLVKPMENNKVWKVLAKPGKKLRLGMKIVFAPDFSAQVLLKENDGTYLIEFAEDDMLVRAKANKYGEVPTPPYVETVSSSERYQTVYAKEEGSVAAPTAGFHFTPELIDKLKSKGVEFAEVTLHVGLGTFLPVKTDSLEEHLMHSEWVELTSKNTDLINAAKAEGRRVVAVGTTTVRALEGIALKFAGQTNVEPILRQYSGDINIFIYPGFKFKVVDALITNFHLPKSTLLMLVSAFIGNRELVLDCYQKAVEEKYRFFSFGDAMFVK

SEQ ID NO: 70032 - protein, 345 aa, unidentified
  source 1..345: note = Parcubacteria group
  REGION 1..345: note = tr|A0A1V5R2N8|A0A1V5R2N8_9BACT S-adenosylmethionine:tRNA ribosyltransferase-isomerase; OS = Parcubacteria group bacterium ADurb.Bin326 OX=1852943; GN = queA PE=3 SV=1
MSNISKGKKKKLSLSDFDYVLPSELIAQEPIKPRDAARLLVLDKKSGKMMHQHFFDLPEILRPGDVLVFNNSKVIPARLYGTKPTGGKVEIFLLQPAGRGMWQCLVKGKVKTGEKITLAPKVIAESVKQLEDGREWLIKFNVNNKKLFSLGETPTPPYIKKKADLKDYQTVFAKTEGSVAASTAGLHFTKKLLHQLKQRGIKVEFVTLHVGLGTFASVETENILEHKMHSEWASIDAATAKRLVQAKSQGKRIIAVGTTASRVLESFADRSGAIKEQNGWTDIFIYPGYKFKFVDALITNFHLPKSTLLMLVSALASKKNIDQAYREAVRLKYKFFSFGDGMLIK

SEQ ID NO: 70033 - protein, 342 aa, unidentified
  source 1..342: note = Parendozoicomonas haliclonae
  REGION 1..342: note = tr|A0A1X7AEH0|A0A1X7AEH0_9GAMM S-adenosylmethionine:tRNA ribosyltransferase-isomerase; OS = Parendozoicomonas haliclonae OX=1960125 GN=queA PE=3; SV = 1
MRVSDFHFELPDELIARYPMPERSASRLLVVEPETGQPVHRTFRDIINYLNPGDLLVLNNTRVIPARLFGQKESGGKIEVLVERVLDEHRVLAHVRSSKSPKPGARLLMEGGLEATMVERQDALFLLEFDGEEPVVHLLEQHGHMPLPPYITREDELGDRERYQTVYGEKKGAVAAPTAGLHFDEELLAEVEAKGINKAFVTLHVGAGTFQPVRVDDIKDHHMHSEYLEVSEEVVEAIKRTKANGGRVIAVGTTSVRSLETAARDGELKPYAGETDIFIYPGYTFNVVDALITNFHLPESTLLMLVSAFSGYDEIMNAYRVAIDERYRFFSYGDAMFLNRKG

SEQ ID NO: 70034 - protein, 408 aa, unidentified
  source 1..408: note = Parolsenella catena
  REGION 1..408: note = tr|A0A3G9KAX2|A0A3G9KAX2_9ACTN S-adenosylmethionine:tRNA ribosyltransferase-isomerase; OS = Parolsenella catena OX=2003188 GN=queA PE=3 SV=1
MRTDDFDYPLPDELIAQAPADPRDSCRLLVLHRGGGAGVTGEAEAIADGGSVEHRHFYDIADYLEPGDLLVANKTRVMPARLVGRKAKTGGVAETLLLKRREDLDAMGHVWECLVNPGKRLKPGALIEYRAGGLHAPESSPVVLTGEVVDFVEDSKGGRLVRFEPKGEDPATGEPRTLDAAIHAAGHVPLPPYITSYEGDPEKYQTVYAMHEEHSAAAPTAGLHFTPELIERLKAKGIGWATVELEVGIDTFRLVEEDDPTQHVMHTERYHVTRDVIDAVHATKAAGHRVVAVGTTAVRSLESAFDAEAPAAEPPMVARGFAGREDSADTLGRGDIVVRENATTQLYLMPGSTYHVVDALITNFHVPRSTLMMLVSALATHDQIMDAYAAAMRERYRFLSFGDAMLIE

SEQ ID NO: 70035 - protein, 360 aa, unidentified
  source 1..360: note = Parvibacter caecicola
  REGION 1..360: note = tr|A0A3N0AD35|A0A3N0AD35_9ACTN S-adenosylmethionine:tRNA ribosyltransferase-isomerase; OS = Parvibacter caecicola OX=747645 GN=queA PE=3 SV=1
MRTDDFDYPLPEELIAQEPWPVRDECRLLVMDRESGALQDRIFKDIAEYVRPGDVFVVNETRVRPARLLGQKRGSGGAAEVFLLREVLGQTPHGNQSALWEVLVRPGKRLKPGSGAVVDIPDAQGQVALSVEVVDWVEGGQKGERIARLSTALPSLDEALHAAGKTPLPPYIKEYNGDMELYQTVYSRRESSAAAPTAGLHFTPALIEAVQVAGAQWRTVELEVGLDTFRVVDEEDPAAHAIHTEFYSVSPETAAVVNEARDAGGRVIAVGTTSVRSLESAAAETGRVRPVDREATSLYILPGYQFKAVDALITNFHVPRSTLMMLVSAFSSRENVMAAYRHAIEQRYRMLSFGDAMFIC

SEQ ID NO: 70036 - protein, 350 aa, Parvibaculum lavamentivorans
  REGION 1..350: note = sp|A7HXM7|QUEA_PARL1 S-adenosylmethionine:tRNA ribosyltransferase-isomerase OS=Parvibaculum lavamentivorans (strain DS-1 / DSM 13023 / NCIMB 13966); OX = 402881 GN=queAPE=3 SV=1
MRVSDFDFDLPEELIALRPARPRDSARMLVIGPAENALADKSVSDLPSHLREGDILVFNDTKVIPARLFGTRRRGEASARIEVMLHKRESADEWRAFLRPAKKLNLSETIDFPGGLSAAVEEKGEGGEAGLRFSLSGPALDAAIAAAGEMPLPPYIARKRAADDEDVADYQTLHADEPGAVAAPTAGLHFTPALMAAIEARGVSTVRLTLHVGAGTFLPVTAEDTDTHKMHAERGEITEAEAAAINEARAKGGRIVAVGTTSLRLLESAVDEAGTVHPFRGETDIFITPGYRFRAVDVLMTNFHLPRSTLFMLVSALRSTEEMKRAYAHAVAEKYRFYSYGDACLIYGAS

SEQ ID NO: 70037 - protein, 356 aa, Parvibaculum sp.
  REGION 1..356: note = tr|A0A2E1EFV2|A0A2E1EFV2_9RHIZ S-adenosylmethionine:tRNA ribosyltransferase-isomerase; OS = Parvibaculum sp. OX=2024848 GN=queA PE=3 SV=1
MRVSDFDFELPENLIALRPARPRDAARLLVIGPEENALEDRIVRDLPSFLAPGDLLVFNDTKVIPARLFGTRTRGEASAKIEVMLHRRVSASEWRAFLRPAKKLNIGEEISFPGGLSATVEEKAEGGEAGLRFSASGPALDAAIAAAGEMPLPPYIARKRATDKEDLADYQTLYAAEPGAVAAPTAGLHFTPELMDALAARGVGTVRLTLHVGAGTFLPVTAEDTEEHRMHAEWGEISEEEAAAINEARAKGGRIVAVGTTSLRLLESAADAKGVVHPFAKETDIFITPGYRFRATDILMTNFHLPRSTLFMLVSALRSTDEMKRAYAHAVAAKYRFYSYGDACLIYGAPMNGTKT

SEQ ID NO: 70038 - protein, 356 aa, Parvibaculum sp.
  REGION 1..356: note = tr|A0A2D8RUM0|A0A2D8RUM0_9RHIZ S-adenosylmethionine:tRNA ribosyltransferase-isomerase; OS = Parvibaculum sp. OX=2024848 GN=queA PE=3 SV=1
MRVSDFDFELPEELIALRPARPRDAARLLVIGPAENALEDRTVSDLPSFLRAGDLLVFNDTKVIPARLFGTRTRGEASARIEVMLHRRVSADEWRAFLRPAKKLNTGEEIAFPGGFSATVEEKAEGGEAGLRFSLSGPALDAAIASAGEMPLPPYIARKRAPDDEDLADYQTLHAAEPGAVAAPTAGLHFTPALMAALDARGVSTVRLTLHVGAGTFLPVTAEDTDAHKMHAEWGEISGAEAATINEARARGGRIVAVGTTSLRLLESAADAKGVVHPFAKETDIFITPGYRFRATDILMTNFHLPRSTLFMLVSALRSTDEMKRAYAHAVASKYRFYSYGDATLIYRGLIYGSAE

SEQ ID NO: 70039 - protein, 361 aa, unidentified
  source 1..361: note = Parvibium lacunae
  REGION 1..361: note = tr|A0A368L1X6|A0A368L1X6_9BURK S-adenosylmethionine:tRNA ribosyltransferase-isomerase; OS = Parvibium lacunae OX=1888893 GN=queA PE=3 SV=1
MQLDDFDYFLPPELIAQYPLSHRSASRLLACPRDLDGHIGHQDLQFTDLPQFLQAGDVLVFNNTKVIPARLYGRKASGGQIEVLIERILNDHQAWTHIKASNAPPAGSMLHFEMGEVHFQADVLGRSGPESSLFHLRFHLPTEITNLYSLLEAYGELPLPPYITHTPDSQDKDRYQTVYASQPGAVAAPTAGLHFDTPLLEQLRKQGIHLAYLTLHVGAGTFQPVRVNTIAEHRMHSEWYHIPEDTAATIAAAKAQGRRVIAVGTTSMRSLEAACLRGQGAVCSGSAETDIFITPGFKFQAVDALITNFHLPKSTLLMLIAAFVGMDAMRAAYAHAIAQHYRFFSYGDAMYLERGPLPSSN

SEQ ID NO: 70040 - protein, 347 aa, Parvimonas micra
  REGION 1..347: note = tr|A8SLR6|A8SLR6_9FIRM S-adenosylmethionine:tRNA ribosyltransferase-isomerase OS=Parvimonas micra ATCC 33270 OX=411465 GN=queA PE=3 SV=1
MNSLKTDDFDFELDESLIAQFPLKDRSSSKLLVVNRENFDLEHKNFKNIVDYIKKDDVLVINDTKVIPARLFGARPGKDEAIEVLLLKKHDDNTWETLVKPGKKMKIGSKVEFGNGKLLGEVVGISEEGERFVKFSYDGIFEEILDELGTMPLPPYIHEKLEERDRYQTVYAKHNGSAAAPTAGLHFTDELLKELQEKGVKIARVTLHVGLGTFRPVKVDNVLEHKMHDEYYEISEESVEIINSAKEKGNRIFAVGTTSVRTLETVYKKYGELVACKGNTDIFIYPGFEFKVVDCLITNFHLPKSTLIMLVSAFASKEIIMNAYNEATKNKYRFFSFGDAMLIKKEK

SEQ ID NO: 70041 - protein, 347 aa, Parvimonas micra
  REGION 1..347: note = tr|A0A0B4S226|A0A0B4S226_9FIRM S-adenosylmethionine:tRNA ribosyltransferase-isomerase; OS = Parvimonas micra OX=33033 GN=queA PE=3 SV=1
MNSLKTDDFDFELDESLIAQFPLKDRSSSKLLVVNRENFDLEHKNFKNIVDYIKKDDVLVINDTKVIPARLFGARPGKDEAIEVLLLKKHEDNTWETLVKPGKKMKIGSKVEFGNGKLLGEVVGISEDGERFVKFSYDGIFEEILDELGTMPLPPYIHEKLEERDRYQTVYAKHNGSAAAPTAGLHFTDELLKELQEKGVKIARVTLHVGLGTFRPVKVDNVLEHKMHDEYYEISEESVEVINSAKEKGNRIFAVGTTSVRTLETVYKKFGKLVACKGNTDIFIYPGFEFKVVDCLITNFHLPKSTLIMLVSAFASKEIIMNAYNEATKKKYRFFSFGDAMLIKKEK

SEQ ID NO: 70042 - protein, 347 aa, Parvimonas sp.
  REGION 1..347: note = tr|F5TC23|F5TC23_9FIRM S-adenosylmethionine:tRNA ribosyltransferase-isomerase OS=Parvimonas sp. oral taxon 110 str. F0139 OX=767100 GN=queA PE=3 SV=1
MNILKTDDFDFELDESLIAQFPLKDRSSSKLLVVNRENFDLEHKNFKNIVDYIKKDDVLVINDTKVIPARLFGARPGKEEAIEVLLLKKHEDNTWETLVKPGKKMKIGSKVEFGNGKLLGEVVGISEDGERFVKFSYDGIFEEILDELGTMPLPPYIHEKLEERDRYQTVYAKHNGSAAAPTAGLHFTDELLKELQEKGVKIARVTLHVGLGTFRPVKVDNVLEHKMHDEYYEISEETVEIINTAKEKGNRIFAVGTTSVRTLETVYKKYGKLVACKGNTDIFIYPGFEFKVVDCLITNFHLPKSTLIMLVSAFASKEIIMNAYNEATKNKYRFFSFGDAMLIKKEK

SEQ ID NO: 70043 - protein, 359 aa, Parvimonas sp.
  REGION 1..359: note = tr|A0A134AGC9|A0A134AGC9_9FIRM S-adenosylmethionine:tRNA ribosyltransferase-isomerase; OS = Parvimonas sp. KA00067 OX=1588755 GN=queA PE=3 SV=1
MYFIFYIEGRELMKSLKTDDFDFELDESLIAQFPLKDRSSSKLLVVNRENFDLEHKVFKDIVEYINSGDVLVINDTKVIPARLFGSRPNKEEVIEVLLLKKHEDNTWETLVKPGKKMKIGSKVEFGNGKLVGEVVGISVDGERFVKFSYDGIFEEILDELGTMPLPPYIHEKLEEKNRYQTVYAKHNGSAAAPTAGLHFTDELLEKLKEKGVKIARVTLHVGLGTFRPVKVDNVLEHKMHEEYYEISKESVEIINSAKENGNRVFAVGTTSVRTLETVYKKYGKLVACNGDTDIFIYPGFEFGVVDCLITNFHLPKSTLIMLVSAFSSKEIIMNAYNEATKNRYRFFSFGDAMLIKKEK

SEQ ID NO: 70044 - protein, 356 aa, Parvularcula bermudensis
  REGION 1..356: note = tr|E0THV1|E0THV1_PARBH S-adenosylmethionine:tRNA ribosyltransferase-isomerase OS=Parvularcula bermudensis (strain ATCC BAA-594 / HTCC2503 / KCTC 12087) OX=314260; GN = queA PE=3 SV=1
MRVDLFDYDLPEEQIALVPPPERDGARLLIVPPNGPFGHDLIAHLAEHFGPSDVLILNDTKVIPATLAGMRPARDVGGGDPAGVGIDITLLKCLEERDDGVRWQAFVRPAKRVRAGDDIEIGPVTARVKRREGAEAVLHIPLTPSAFQSFLYDHGTMPLPPYIARKRAVEVSDQDRYQTVFGKRPGSVAAPTAGLHFTDRLLSAIAERGATILRVTLHVGAGTFLPITAADCTDHRMHSEWGEVSPPVAERLRAAKAGGERITCVGTTALRIVETAAQSGEVQAFAGETDIFITPGFSFQCADRLLTNFHLPRSTLLMLVSAFSGRERILSAYREAINEGYRFFSYGDACLLERVS

SEQ ID NO: 70045 - protein, 124 aa, Parvularcula sp.
  REGION 1..124: note = tr|A0A357LEI2|A0A357LEI2_9PROT S-adenosylmethionine:tRNA ribosyltransferase-isomerase (Fragment) OS=Parvularcula sp. OX=1979207 GN=DEA50_10995; PE = 3 SV=1
RDHRRPGGEITEDQAACINAARASGGRIVAVGTTSLRLLESAADEAGFIRPFTAETDIFITPGYRFRSVDALMTNFHLPRSTLFMLVCAFAGTETMKRAYAHAIDAGYRFYSYGDASLLERAVR

SEQ ID NO: 70046 - protein, 350 aa, Parvularcula sp.
  REGION 1..350: note = tr|A0A2E1XK93|A0A2E1XK93_9PROT S-adenosylmethionine:tRNA ribosyltransferase-isomerase; OS = Parvularcula sp. OX=1979207 GN=queA PE=3 SV=1
MRVDLFDFDLPPERIALSPAVPRDSARLLHVKPSGVEDRIVRDLPSLLRPGDLLVANDTKVIPAQLFGERPARESGGDPVSIEATLHKDLGGNRWRAFVRPAKRIREGDLIRFGEALSAEVVARDGAEAELQFDTGRDSFYAALDKAGVMPLPPYIARKRPAGEEDKASYQTMFAEEVGSVAAPTAGLHFTPALIAALRDKGVKQTTITLHVGAGTFLPVTAEDTADHKMHSEWGEITAEQAAAINTARGAGGRVIAVGTTSLRLLESAAAEGGTINPFAAETDIFITPGYRFKAVDMLMTNFHLPRSTLFMLVSAFAGTDAIKAAYAHAIEKQYRFYSYGDACLLERAS

SEQ ID NO: 70047 - protein, 363 aa, Pasteurella aerogenes
  REGION 1..363: note = tr|A0A448K211|A0A448K211_PASAE S-adenosylmethionine:tRNA ribosyltransferase-isomerase; OS = Pasteurella aerogenes OX=749 GN=queA PE=3 SV=1
MHLSDFYFDLPDELIARYPKVERTSSRLLQLNGQNGELFHRTFSDVVDLINEGDLLIFNNTRVIPARIFGRKASGGKIEVLIERILTENRFLAHIRASKAPKEGAELILGEDKLGEEKGIKARMVSRHDALFEVEIAEKNTALLEILPQIGHMPLPPYIDRPDEEADKERYQTVYNKVPGAVAAPTAGLHFDQPLLEKLKAKGVNFAFVTLHVGAGTFQPVRVEHIEDHKMHAEYVEVPQEVVEAILATKAHGKRVIAVGTTSVRSIESAALFAEENQLNTLIAPFFSDTSIFIYPGKKFRVTDALITNFHLPESTLIMLVSAFAGYQHTMNAYKSAVENRYRFFSYGDAMFISKNPNVKGLE

SEQ ID NO: 70048 - protein, 363 aa, Pasteurella bettyae
  REGION 1..363: note = tr|I3DCE9|I3DCE9_9PAST S-adenosylmethionine:tRNA ribosyltransferase-isomerase OS=Pasteurella bettyae CCUG 2042 OX=1095749 GN=queA PE=3 SV=1
MQLSDFYFDLPDELIARYPKIERTSSRLLQLNGETGELNHLVFNDVLDLINEGDLLIFNNTRVIPARMYGRKSSGGKIEVLIERVLTETRFLAHVRASKAPKEGAELILGEDKLGEGNGVKAIMIGRQDALFELEISEKGTALLDVLQKIGHMPLPPYIDRPDEDSDQERYQTVYNKVPGAVAAPTAGLHFDNTLLDKLKSKGVNFAFVTLHVGAGTFQPVRVENIEDHHMHAEYVEVSQEVVDAILATKANGKRVIAVGTTSVRSIESAALNAEQKASSQLIEPFFSDTSIFIYPGKKFRVIDCLITNFHLPESTLIMLVSAFAGYKNTMNAYKIAVENAYRFFSYGDAMFITKNHHVKGLD

SEQ ID NO: 70049 - protein, 363 aa, unidentified
  source 1..363: note = Pasteurella caecimuris
  REGION 1..363: note = tr|A0A4S2E2F0|A0A4S2E2F0_9PAST S-adenosylmethionine:tRNA ribosyltransferase-isomerase; OS = Pasteurella caecimuris OX=1796644 GN=queA PE=3 SV=1
MRVSDFHFDLPDELIARYPKKDRSSCRLLTLNGENGEISHRTFTDVFDLIDAGDLLIFNNTRVIPARMFGRKASGGKIEVLVERMLDEHRFLAHIRSSKSPKEGTELFLGEDKLGENKGIQAVMTARHDTLFEVELTDKSTALLTVLQQIGHMPLPPYIDRPDEEEDQECYQTVYNKVPGAVAAPTAGLHFDDELLAKLQAKGVNFEFVTLHVGAGTFQPVRVENIEDHIMHAEYVELSQEVCNAIIETKKAGKRVIAVGTTSVRSIETAALSAEENGNPDLIEPYFSDTSIFIYPGKKFRVVDVLITNFHLPESTLIMLVSAFAGFTHTMNAYKSAVENCYRFFSYGDAMFITKNARVKGLE

SEQ ID NO: 70050 - protein, 363 aa, Pasteurella canis
  REGION 1..363: note = tr|A0A379ESZ0|A0A379ESZ0_9PAST S-adenosylmethionine:tRNA ribosyltransferase-isomerase; OS = Pasteurella canis OX=753 GN=queA PE=3 SV=1
MRVADFHFNLPDELIARYPKTERTSSRLLQLNGENGELSHHTFADIIEQINPGDLLIFNNTRVIPARMFGRKASGGKVEVLVERILTDTRFLAHIRSSKAPKAGTELFLGEDKLGENNGIKMVMLDRHDTLFEVEIVEKQTTLLDVLQQIGHMPLPPYIDRPDEDADQERYQTVYNKVPGAVAAPTAGLHFDDELLAQLKTKGVNFAFVTLHVGAGTFQPVRVEQIEDHKMHAEYVEVPQDVCHAILETKQAGKRVIAVGTTSVRSVESAALNAEEQGSKQLIEPYFSDTSIFLYPGKPFRIVDCLITNFHLPESTLIMLVSAFAGYKHTMTAYQSAVENRYRFFSYGDAMFITKNPNVTGLD

SEQ ID NO: 70051 - protein, 363 aa, Pasteurella dagmatis
  REGION 1..363: note = tr|C9PPT6|C9PPT6_9PAST S-adenosylmethionine:tRNA ribosyltransferase-isomerase OS=Pasteurella dagmatis ATCC 43325 OX=667128 GN=queA PE=3 SV=1
MRVADFHFDLPDELIARYPKTERKSSRLLQLNGENGEISHRTFADVIDQINEGDLLIFNNTRVIPARMFGRKASGGKVEVLVERILTDTRFLAHVRSSKAPKEGAELWLGEDKLGENNGVKMTMVARHDTLFELEIAEKQTALLEVLQQIGHMPLPPYIDRPDEDADQERYQTVYNKVPGAVAAPTAGLHFDDELLAQLKAKGVNFAFVTLHVGAGTFQPVRVEHIEDHKMHAEYVEVPQEVCDAIIATKQAGKRVIAVGTTSVRSVESAALATEEKHSARLIEPYFSDTSIFIYPGKTFRVVDCLITNFHLPESTLIMLVSAFAGYKHTMQAYQSAVENRYRFFSYGDAMFITKNPNVKGLE

SEQ ID NO: 70052 - protein, 361 aa, Pasteurella langaaensis
  REGION 1..361: note = tr|A0A2U0SNS4|A0A2U0SNS4_9PAST S-adenosylmethionine:tRNA ribosyltransferase-isomerase; OS = Pasteurella langaaensis DSM 22999 OX=1122935 GN=queA; PE = 3 SV=1
MAKTMLVSDFHFDLPDELIARYPKPERTASRLLQLNGENGEIFHRTFSDVLELINEGDLLVFNNTRVIPARMYGRKASGGKIEVLVERVLSETTFLAHVRSSKAPKTGAELILGEDKLGEGNGVRVNMLGRQDALFELEIADKSTALLEVLQKIGHMPLPPYIDRPDEEADQERYQTVYNKVPGAVAAPTAGLHFDNELLAKLKAKGVNFAFVTLHVGAGTFQPVRVDKIEDHHMHAEYVEVPQDVVDAILATKAAGKRVIAVGTTSVRSIESAALAAEEKGSAQIIEPFFADTSIFIYPGKKFRVIDCLITNFHLPESTLIMLVSAFAGYEHTMNAYKSAVENRYRFFSYGDSMFISKKS

SEQ ID NO: 70053 - protein, 363 aa, Pasteurella multocida
  REGION 1..363: note = tr|A0A0E3ZPH1|A0A0E3ZPH1_PASMD S-adenosylmethionine:tRNA ribosyltransferase-isomerase; OS = Pasteurella multocida subsp. multocida OH4807; OX = 1304873 GN=queA PE=3 SV=1
MRVADFNFDLPDELIARYPKTDRTSSRLLQLNGENGDISHRTFADILTLIDEGDLLIFNNTRVIPARMFGRKASGGKVEVLIERILTDTRFLAHIRSSKAPKENTTLFLGEDKLGENEGIKMIMVARHDTLFEVEIAEKQGALLDILQQIGHMPLPPYIDRPDEEADKERYQTVYNQVPGAVAAPTAGLHFDDDLLAKLKAKGVNFAFVTLHVGAGTFQPVRVEHIEDHKMHAEYVEVPQAVCDAIIATKQAGKRVIAVGTTSVRSVESAALAAEENGSAQLIMPYFSDTSIFIYPGKPFRIIDGLITNFHLPESTLIMLVSAFAGYKHTMAAYQQAVANRYRFFSYGDAMFITKNHHVTGLD

SEQ ID NO: 70054 - protein, 363 aa, Pasteurella multocida
  REGION 1..363: note = sp|P57832|QUEA_PASMU S-adenosylmethionine:tRNA ribosyltransferase-isomerase OS=Pasteurella multocida (strain Pm70) OX=272843 GN=queA PE=3 SV=1
MRVSDFYFDLPDELIARYPKPDRTASRLLQLNGENGEITHRTFADILDQIHEGDLLIFNNTRVIPARMFGRKASGGKVEVLVERILSDTRFLAHVRSSKAPKEGAELWLGEDKLGEHHGVKMIMVARHDTLFELEIAQKQTALLDVLQQIGHMPLPPYIDRPDEEADKERYQTVYNKVPGAVAAPTAGLHFDDALLAQLKAKGVNFAFVTLHVGAGTFQPVRVEQIEDHKMHAEYVEVPQEVCDAIIATKQAGKRVIAVGTTSVRSVESAALATEEKGEHALITPYFSDTSIFIYPGKTFRVVDCLITNFHLPESTLIMLVSAFAGYRHTMQAYQSAVENRYRFFSYGDAMFISKNPHVNGLD

SEQ ID NO: 70055 - protein, 361 aa, Pasteurella skyensis
  REGION 1..361: note = tr|A0A1H8AAS9|A0A1H8AAS9_9PAST S-adenosylmethionine:tRNA ribosyltransferase-isomerase; OS = Pasteurella skyensis OX=97481 GN=queA PE=3 SV=1
MLLSDFHFDLPNELIARYPTKQRTASRLLYVNGETGQYSDQQFIDILDHINEGDLLIFNNTRVIPARLYGKKLSGGKLEVLVERVLDEHRCLAHIRCSKAPKEGSTIILGEDKLGEGKGFNATMVARHDTLFELRFEEVQPLFELLDRAGHMPLPPYIDRPDEETDQERYQTVYSKELGAVAAPTAGLHFDDELLTKLTQKGVQTAFVTLHVGAGTFQPVRVETIEDHKMHVEYAEVSQEVVDKILKTKANGKRVIAVGTTSVRSIESAAQQAEKSNQLIESFFSDTSIFIYPGKTFRVIDALLTNFHLPESTLIMLVSAFAGYSNCMQAYQHAVVQQYRFFSYGDAMFIDKNPNAINDVP

SEQ ID NO: 70056 - protein, 363 aa, Pasteurella sp.
  REGION 1..363: note = tr|A0A4Y9H4B1|A0A4Y9H4B1_9PAST S-adenosylmethionine:tRNA ribosyltransferase-isomerase; OS = Pasteurella sp. WM03 OX=2558280 GN=queA PE=3 SV=1
MRVSDFHFDLPDELIARYPKADRSSCRLLTLNGENGEISHRTFTDVLDLIDEGDLLIFNNTRVIPARMFGRKASGGKIEVLVERMLDEHRFLAHIRSSKSPKEGTELFLGENKLGENKGIQAVMTARHDTLFEVELTDKSTSLLTVLQQIGHMPLPPYIDRPDEEADQECYQTVYSKVPGAVAAPTAGLHFDDELLAKLQAKGVNFEFVTLHVGAGTFQPVRVENIEEHIMHAEYVELSQEVCNAIIDTKKAGKRVIAVGTTSVRSIETAALSAEENGNPDLIEPYFSDTSIFIYPGKKFRVVDALITNFHLPESTLIMLVSAFSGFNHTMNAYKSAVENRYRFFSYGDAMFITKNTQVKGLE

SEQ ID NO: 70057 - protein, 362 aa, Pasteurella testudinis
  REGION 1..362: note = tr|A0A1W1V9V3|A0A1W1V9V3_9PAST S-adenosylmethionine:tRNA ribosyltransferase-isomerase; OS = Pasteurella testudinis DSM 23072 OX=1122938 GN=queA; PE = 3 SV=1
MQVSDFHFELPDELIARYPKTERSSSRLLCLNGENGELQHRRFADVLELVNAGDLLVFNNTRVIPARMFGRKSSGGKLEVLVERVLGEKSCLAHVRASKAPQAGSQIILGEDKLGEGNGIVFVMKTRHDTLFELEVAGDTPLLAVLQQIGHIPLPPYIDRPDEEMDQERYQTVYNQVPGAVAAPTAGLHFDQPLLEKLKQKGVNFAFVTLHVGAGTFQPVRVEKVEDHHMHAEYVEVDEQTVAAILATKAAGKRVIAVGTTSVRSIESAALAAAEQGEPHLLAPYFSDTAIFLYPGKTFRVTDALITNFHLPESTLVMLVSAFAGYRNTMRAYQSAVAEKYRFFSYGDAMFISKNPDVSGLD

SEQ ID NO: 70058 - protein, 362 aa, unidentified
  source 1..362: note = Pasteurellaceae bacterium
  REGION 1..362: note = tr|A0A5C4QJ59|A0A5C4QJ59_9PAST S-adenosylmethionine:tRNA ribosyltransferase-isomerase; OS = Pasteurellaceae bacterium BK431 OX=2585026 GN=queA PE=3; SV = 1
MQVSDFHFELPDELIARYPKAQRTSSRLLCLNGETGELQHRQFADVLHLVNAGDLLVFNNTRVIPARMFGRKSSGGKLEVLVERVLSENSCLAHVRASKAPQAGSQIILGEDKLGEGNGIAFMMKARHDTLFELEVVGEAPLLAVLQQIGHIPLPPYIDRPDEEMDQERYQTVYNQVPGAVAAPTAGLHFDQALLQQLTEKGVNFTFVTLHVGAGTFQPVRVEKVEDHHMHAEYVEVGEQTVEAILATKAAGKRVIAVGTTSVRSIESAALAAAETDQPHLLAPYFSDTTIFLYPGKPFRVVDALITNFHLPESTLVMLVSAFAGYQNTMRAYQSAVAERYRFFSYGDAMFISKNPMVKGLE

SEQ ID NO: 70059 - protein, 361 aa, unidentified
  source 1..361: note = Pasteurellaceae bacterium
  REGION 1..361: note = tr|A0A1V3TJH6|A0A1V3TJH6_9PAST S-adenosylmethionine:tRNA ribosyltransferase-isomerase; OS = Pasteurellaceae bacterium 15-036681 OX=1924934 GN=queA; PE = 3 SV=1
MLVSDFHFDLPDELIARYPTAERSASRLLHLNGATGEFHDQQFNELLSHINEGDLLIFNNTRVISARVYGRKASGGKVEMLVERVLDEHRCLAHVRSSKAPKEGAELFWGEDKLGEGNGFKATMVARHDTLFELEFDAETPLFDLLQQAGHMPLPPYIDRPDEDADQERYQTVYSKVLGAVAAPTAGLHFDNDMLAKLQAKGVDTAFVTLHVGAGTFQPVRVDTIEEHKMHAEYAEVSQDVVDKILATKANGKRVICVGTTSVRSIESAAQAAEKEGKLIAPFYSDTAIFLYPGKTFRVVDALVTNFHLPESTLIMLVSAFAGYSNCMKAYQHAVEQKYRFFSYGDAMFINKNPNALNDVP

SEQ ID NO: 70060 - protein, 284 aa, unidentified
  source 1..284: note = Patescibacteria group
  REGION 1..284: note = tr|A0A5C7J7I0|A0A5C7J7I0_9BACT S-adenosylmethionine:tRNA ribosyltransferase-isomerase (Fragment) OS=Patescibacteria group bacterium OX=2052139; GN = E6P97_01535 PE=3 SV =1
MQLSDFHYVIPDELIADQPPKVRGTTRLLTLDRITGNVADKKYADIVGLLSPGDVLVINDTKVIKARLIATKPSGGERELVLVEKHGEADDWHRHRVIYRRKLKAGDELTVGKYAIHVEEIVGDGIAIIRSDTDLLQVADEFGSVPLPPYMRRDATSEDIERYQTVWAREQGSVAAPTASLNMTNEMLEKLQARGIKVVYATLHVGLGTFLPIRVDDVTTHKMHQEYFEVPKSTVEAIQVAKKRGNQVVALGTTITRTLEYCHDEILNKPAKDLQGEADIFMYP

SEQ ID NO: 70061 - protein, 341 aa, unidentified
  source 1..341: note = Patescibacteria group
  REGION 1..341: note = tr|A0A3C1EUY9|A0A3C1EUY9_9BACT S-adenosylmethionine:tRNA ribosyltransferase-isomerase; OS = Patescibacteria group bacterium OX=2052139 GN=queA PE=3; SV = 1
MKMSEFIYNLPDEKIAKFPPEVRGTTNLLVLDRKDGRIEHKKYFNVSEYIQPGDVVVLNETKVEKRRTFFLTEGGRRLEVLFLNRIGDGRWYCLIKGSRYVKSGDILKGEEDENIRIQISERSGMGFLVKPIAEEGEKIFDKIGHTPIPPYMKRPDTKEDYVRYNTIFARLLGSVAAPTASLNLTDEILAQIQQKGVKIAKVELKVGWGTFAPIREENIEEHDIHKEEIAISAESAEIINQAKRKGKKVWAFGTTVARTLESVSNEEGLIKEFEGETQLYIYPGYTWKCVDHLVTNFHMPDSSLILLVSSFAGTENIKKAYQEALDNDYKFLSYGDSMLII

SEQ ID NO: 70062 - protein, 358 aa, unidentified
  source 1..358: note = Paucibacter aquatile
  REGION 1..358: note = tr|A0A2N8L028|A0A2N8L028_9BURK S-adenosylmethionine:tRNA ribosyltransferase-isomerase; OS = Paucibacter aquatile OX=2070761 GN=queA PE=3 SV=1
MSFSSSSSSSSVTPQYTVSDFDFELPPELIAQHPAAERSGSRLLDGRSDVPVDRVFRELPDLLNPGDLLVFNNTKVIKARMYGAKATGGSVEALIERVLPGTQEVWAHVRASKSPKPGSWIRFNEAFDAEVLGRCGPDGGMFHLRFPSDPFALLEQHGHVPLPPYIEHADEADDVRRYQTVFAREPGAVAAPTAALHFDEALLARMSERGIASAHVTLHVGAGTFQPVRVEHLSEHKMHSEWFEVPAETVAAVAACRARGGRVVAVGTTTLRALESAAQGGELVAGARETEIFITPGFPFRVVDSLVTNFHLPKSTLMMLVSALAGHGRVMALYRHAIAQRYRFFSYGDAMLLQRAGD

SEQ ID NO: 70063 - protein, 347 aa, Paucibacter sp.
  REGION 1..347: note = tr|A0A0U3EY94|A0A0U3EY94_9BURK S-adenosylmethionine:tRNA ribosyltransferase-isomerase; OS = Paucibacter sp. KCTC 42545 OX=1768242 GN=queA PE=3 SV=1
MSARQHSVSDFDFELPPELIAQHPAAERSASRLLDGRHATAVDRIFRELPDLLAPGDLLVFNNTRVIKARIYGQKATGGSVEGLIERVIAGTNEVWAHLRASKSPKPGSWVRFNEAFDAEVLGRCGPDNGMFHLRFPSDPFALLEQHGHVPLPPYIEHADEADDVRRYQTVFAKEPGAVAAPTAALHFDEALLARLAERGVGTAHVTLHVGAGTFQPVRVEQLSDHKMHSEWFEVSAETVAAIAACKARGGRVVAVGTTTLRALESAAQGGELQAGARETAIFITPGFQFRVVDTLVTNFHLPKSTLMMLVSAFAGYEPIMALYRHAIAHQYRFFSYGDAMLLQRAG

SEQ ID NO: 70064 - protein, 353 aa, Paucibacter sp.
  REGION 1..353: note = tr|A0A3N7DUE6|A0A3N7DUE6_9BURK S-adenosylmethionine:tRNA ribosyltransferase-isomerase; OS = Paucibacter sp. KBW04 OX=2153361 GN=queA PE=3 SV=1
MSASPAAADRHYTVSDFDFFLPPELIAQHPAAERSASRLLDGRSQPPVDRVFRELPDLLEPGDLLIFNNTRVIKARLYGQKATGGSVEGLIERVLPGTHEVWAHLRASKSPKPGSWVRFNNAFDAEVLGRCGPDAGMFHLRFPSEPFALLEQHGHVPLPPYIEHADEADDVRRYQTVFAREPGAVAAPTAALHFDEALLERLAARGISTAHVTLHVGAGTFQPVRVEALSEHKMHSEWFEVPAETVAAVAACRARGGRVIAVGTTTLRALESAALPGELQAGARETAIFITPGFQFRVVDVLVTNFHLPKSTLMMLVSAFAGYESIMALYDHAIAAQYRFFSYGDAMLLQRRT

SEQ ID NO: 70065 - protein, 374 aa, Paucibacter toxinivorans
  REGION 1..374: note = tr|A0A4R6QQL2|A0A4R6QQL2_9BURK S-adenosylmethionine:tRNA ribosyltransferase-isomerase; OS = Paucibacter toxinivorans OX=270368 GN=queA PE=3 SV=1
MSRLFTASDFDFTLPPELIAQHPAPERSGSRLLDGRAATPVDRQFRDLPGLLDAGDLLVFNNTLVIKARLFGRKWGPQAPASRSLPPEGELGQLGSGPALAQATGGSVEALIERVLPGTQEVWAHMRASKSPKPGALVRFNDAFDAEVLGRCGPDNGLFHLRFPSDPFALLDAHGHVPLPPYITHEDSGDDVRRYQTVFAREPGAVAAPTAALHFDEGVLADLAARGVVTAHVTLHVGAGTFQPVRVETLAEHKMHSEWFQVPAETVAAIAETRARGGKVVAVGTTTLRALESAALGGTLKAGARETDIFITPGFEFQVVDRLLTNFHLPKSTLMMLVSAFAGYEPVMDLYRHAIAEQYRFFSYGDAMLLARAG

SEQ ID NO: 70066 - protein, 354 aa, Paucimonas lemoignei
  REGION 1..354: note = tr|A0A2X4AQE4|A0A2X4AQE4_PAULE S-adenosylmethionine:tRNA ribosyltransferase-isomerase; OS = Paucimonas lemoignei OX=29443 GN=queA PE=3 SV=1
MRVADFTFELPDSLIARHPLAERRSSRLLTLDGVSGALAHEHFSDLLEHVRARDLMVFNNTRVIPARLFGQKASGGKLEILVERVLDTHRVLAHVRSSKSPKPGSMILIDGGGEAEMVVRHDTLFELRFTESVLPLLERVGHMPLPPYIDRPDESADRERYQTVYAQRAGAVAAPTAGLHFDQPLLDAMKAKGVEMAFVTLHVGAGTFQPVRVERLEDHHMHSEWLEVGQDVVDAVAACRERGGRVIAVGTTSVRSLESAARDGVLKPFSGDTDIFIFPGRPFHVVDALVTNFHLPESTLLMLVSAFAGYPETMAAYAAAVENGYRFFSYGDAMFITRNPAPTAPKASGPEDQA

SEQ ID NO: 70067 - protein, 339 aa, Paucimonas lemoignei
  REGION 1..339: note = tr|A0A4R3HZG8|A0A4R3HZG8_PAULE S-adenosylmethionine:tRNA ribosyltransferase-isomerase; OS = Paucimonas lemoignei OX=29443 GN=queA PE=3 SV=1
MYSLSDFDFDLPPELIAQTPLAKRSASRLLEVDGPRLVDRQFTEVVDLLSPGDLLVFNDTRVLKARFFGAKQSGGKVEVLIERILDNRTAHAQVRASKSPQPGSSIRLADAFDVTVGERAGEFYTLSFPSDVFELIEAHGRLPLPPYIEHAADEFDEERYQTVYAKEPGAVAAPTAGLHFDDELLARLRAKGVNMAFVTLHVGAGTFQPVRSENLAEHQMHSEWYTIPQETVEAVRATQAAGRNVVAVGTTSMRALESASQSGKLEAGSNDTRLFITPGYTFKTVTRLVTNFHLPKSTLLMLVSAFAGYEEIRAAYAHAIAQKYRFFSYGDAMLLKLKR

SEQ ID NO: 70068 - protein, 340 aa, Pectinatus cerevisiiphilus
  REGION 1..340: note = tr|A0A4R3KAD0|A0A4R3KAD0_9FIRM S-adenosylmethionine:tRNA ribosyltransferase-isomerase; OS = Pectinatus cerevisiiphilus OX=86956 GN=queA PE=3 SV=1
MLLTDFDYELPEELIAQTPCPERDHSRLMVLNRKDESITHAHFFELKKYLKAGDTLVFNNTRVIPARLIGRRDQTGGKVEVFLLRRQEGNQWEVLVKPGRKARVGSIINFGSKLSCEIKENTDFGGRIVEFSYEGIWEEVLDRLGQTPLPPYIHEKLKDKERYQTVYAKENGSAAAPTAGLHFTKELLAELKDMGVNLEFVTLHVGLGTFRPVNEDNIEDHVMHKEYFHIEKETADRINAARARGSRIIAVGTTSIRTLESAARDDGFLPAKCGETGIFIYPGYKFKIVDGIITNFHLPKSTLIMLISAFAGREYVLRAYKTAVQERYRFFSFGDAMLIL

SEQ ID NO: 70069 - protein, 355 aa, unidentified
  source 1..355: note = Pectobacterium actinidiae
  REGION 1..355: note = tr|A0A1V2R700|A0A1V2R700_9GAMM S-adenosylmethionine:tRNA ribosyltransferase-isomerase; OS = Pectobacterium actinidiae OX=1507808 GN=queA PE=3 SV=1
MRVADFSFELPESLIAHYPQAERSGCRLLSLDGATGNLTHGVFTDLLDKLNPGDLLVFNNTRVIPARLFGRKASGGKLEVLVERVLDEHRVLAHVRASKAPKPGTELLLGDDESVKATMAARHDALFELHFDDSRDVLSILNDIGHMPLPPYIDRPDEDADRELYQTVYSQRPGAVAAPTAGLHFDEPMLAALREKGIDMAFVTLHVGAGTFQPVRVDTIEDHIMHAEYAEVPQDVVDAVLACKARGNRVIAVGTTSVRSLESAAQASQNAAIEPFFGDTKIFIYPGYHYRIIDALVTNFHLPESTLIMLVSAFAGYQNTMSAYRQAVAEQYRFFSYGDAMFITHNPMAEQEKVG

SEQ ID NO: 70070 - protein, 355 aa, unidentified
  source 1..355: note = Pectobacterium aquaticum
  REGION 1..355: note = tr|A0A426IR04|A0A426IR04_9GAMM S-adenosylmethionine:tRNA ribosyltransferase-isomerase; OS = Pectobacterium aquaticum OX=2204145 GN=queA PE=3 SV=1
MRVTDFSFELPESLIAHYPQAERSGCRLLSLDGPTGNLTHGVFTDLLDKLNPGDLLVFNNTRVIPARLFGRKASGGKLEVLVERVLDDHRVLAHVRASKAPKPGAELLLGDDESVKATMAARHDALFELHFDDARDVLSILNDIGHMPLPPYIDRPDEDADRELYQTVYSQRPGAVAAPTAGLHFDEPMLAALRDKGIDMAFVTLHVGAGTFQPVRVDTIEDHIMHAEYAEVPQDVVDAVLACKARGNRVIAVGTTSVRSLESAAQASQNAAIEPFFGDTKIFIYPGYHYRIIDALVTNFHLPESTLIMLVSAFAGYQNTMSAYRQAVAEQYRFFSYGDAMFITHNPMAEQEKVG

SEQ ID NO: 70071 - protein, 355 aa, Pectobacterium atrosepticum
  REGION 1..355: note = sp|Q6D856|QUEA_PECAS S-adenosylmethionine:tRNA ribosyltransferase-isomerase OS=Pectobacterium atrosepticum (strain SCRI 1043 / ATCC BAA-672) OX=218491; GN = queA PE=3 S V=1
MRVADFSFELPESLIAHYPQAERSGCRLLSLDGPTGDLTHGVFTDLLEKLNPGDLLVFNNTRVIPARLFGRKVSGGKLEVLVERVLDDHRILAHVRASKAPKPGTELLLGDDESVKATMVARHDALFELHFDDSRDVLSILNDIGHMPLPPYIDRPDEDADRELYQTVYSQRPGAVAAPTAGLHFDEPMLAALRAKGIEMAFVTLHVGAGTFQPVRVDTIEDHIMHAEYAEVPQDVVDAVLACKARGNRVIAVGTTSVRSLESAAQASQDAPIAPFFGDTKIFIYPGYHYRIIDALVTNFHLPESTLIMLVSAFAGYQNTMSAYREAVAEQYRFFSYGDAMFITHSPMAEQEKVG

SEQ ID NO: 70072 - protein, 355 aa, Pectobacterium betavasculorum
  REGION 1..355: note = tr|A0A093UE64|A0A093UE64_9GAMM S-adenosylmethionine:tRNA ribosyltransferase-isomerase; OS = Pectobacterium betavasculorum OX=55207 GN=queA PE=3 SV=1
MRVADFSFELPESLIAHYPQAERSGCRLLSLDGPTGNLTHGVFTDLLEKLNPGDLLVFNNTRVIPARLFGRKVSGGKLEVLVERVLDDHRILAHVRASKAPKPGTELLLGDDESVKVTMVARHDALFELHFDDARDALSILNDIGHMPLPPYIDRPDEDADRELYQTVYSQRPGAVAAPTAGLHFDEPMLAALREKGIEMAFVTLHVGAGTFQPVRVDTIEDHIMHAEYAEVPQDVVDAVLACKARGNRVIAVGTTSVRSLESAAQASQNAPIAPFFGDTKIFIYPGYHYRIIDALVTNFHLPESTLIMLVSAFAGYQNTMSAYRQAVAEQYRFFSYGDAMFITHNPMAEQEKVG

SEQ ID NO: 70073 - protein, 355 aa, unidentified
  source 1..355: note = Pectobacterium brasiliense
  REGION 1..355: note = tr|A0A086F080|A0A086F080_9GAMM S-adenosylmethionine:tRNA ribosyltransferase-isomerase; OS = Pectobacterium brasiliense OX=180957 GN=queA PE=3 SV=1
MRVTDFSFELPESLIAHYPQAERSGCRLLSLDGPTGNLTHGVFTDLLDKLNPGDLLVFNNTRVIPARLFGRKASGGKLEVLVERVLDDHRVLAHVRASKAPKPGTELLLGDDESVKATMTARHDALFELHFDDARDVLSILNDIGHMPLPPYIDRPDEDADRELYQTVYSQRPGAVAAPTAGLHFDEPMLAALREKGIDMAFVTLHVGAGTFQPVRVDTIEDHIMHAEYAEVPQDVVDAVLACKARGNRVIAVGTTSVRSLESAAQASQNAAIEPFFGDTKIFIYPGYHYRIIDALVTNFHLPESTLIMLVSAFAGYQNTMSAYRQAVAEQYRFFSYGDAMFITHNPMAEQENVG

SEQ ID NO: 70074 - protein, 355 aa, Pectobacterium carotovorum
  REGION 1..355: note = sp|C6DB25|QUEA_PECCP S-adenosylmethionine:tRNA ribosyltransferase-isomerase OS=Pectobacterium carotovorum subsp. carotovorum (strain PC1) OX=561230 GN=queA PE=3 SV=1
MRVADFSFELPESLIAHYPQAERSGCRLLSLDGPTGDLTHGVFTDLLDKLNPGDLLVFNNTRVIPARLFGRKVSGGKLEVLVERVLDDHRVLAHVRASKAPKPGTELLLGDDESVKATMAARHDALFELHFDDSRDVLSILNDIGHMPLPPYIDRPDEDADRELYQTVYSQRPGAVAAPTAGLHFDEPMLAALREKGIEMAFVTLHVGAGTFQPVRVDTIEDHIMHAEYAEVPQDVVDAVLACKARGNRVIAVGTTSVRSLESAAQASQNAPIEPFFGDTKIFIYPGYHYRIIDALVTNFHLPESTLIMLVSAFAGYQNTMSAYRQAVAEQYRFFSYGDAMFITHNPMAEQEKVG

SEQ ID NO: 70075 - protein, 355 aa, Pectobacterium carotovorum
  REGION 1..355: note = tr|A0A221TD10|A0A221TD10_PECCA S-adenosylmethionine:tRNA ribosyltransferase-isomerase; OS = Pectobacterium carotovorum OX=554 GN=queA PE=3 SV=1
MRVTDFSFELPESLIAHYPQAERSGCRLLSLDGPTGNLTHGVFTDLLNKLNPGDLLVFNNTRVIPARLFGRKASGGKLEVLVERVLDDHRVLAHVRASKAPKPGAELLLGDDESVKATMAARHDALFELHFDDARDVLSILNDIGHMPLPPYIDRPDEDADRELYQTVYSQRPGAVAAPTAGLHFDEPMLAALREKGIDMAFVTLHVGAGTFQPVRVDTIEDHIMHAEYAEVPQDVVDAVLACKARGNRVIAVGTTSVRSLESAAQASQNAAIEPFFGDTKIFIYPGYHYRIIDALVTNFHLPESTLIMLVSAFAGYQNTMSAYRQAVAEQYRFFSYGDAMFITHNPMAEQEKVG

SEQ ID NO: 70076 - protein, 355 aa, unidentified
  source 1..355: note = Pectobacterium odoriferum
  REGION 1..355: note = tr|A0A094UAS7|A0A094UAS7_9GAMM S-adenosylmethionine:tRNA ribosyltransferase-isomerase; OS = Pectobacterium odoriferum OX=78398 GN=queA PE=3 SV=1
MRVADFSFELPESLIAHYPQAERSGCRLLSLDGPTGNLTHGVFTDLLNKLNPGDLLVFNNTRVIPARLFGRKASGGKLEVLVERVLDEHRVLAHVRASKAPKPGTELLLGDDESVKATMAARHDALFELHFDDSRDVLSILNDIGHMPLPPYIDRPDEDADRELYQTVYSQRPGAVAAPTAGLHFDEPMLAALREKGIEMAFVTLHVGAGTFQPVRVDTIEDHIMHAEYAEVPQDVVDAVLACKTRGNRVIAVGTTSVRSLESAAQASQKAAIEPFFGDTKIFIYPGYHYRIIDALVTNFHLPESTLIMLVSAFAGYQNTMSAYRQAVAEQYRFFSYGDAMFITHNPMAEQEKVG

SEQ ID NO: 70077 - protein, 355 aa, unidentified
  source 1..355: note = Pectobacterium parmentieri
  REGION 1..355: note = tr|A0A0H3IBP3|A0A0H3IBP3_PECPM S-adenosylmethionine:tRNA ribosyltransferase-isomerase; OS = Pectobacterium parmentieri OX=1905730 GN=queA PE=3 SV=1
MRVADFSFELPESLIAHYPQAERSGCRLLSLDGPTGNLTHGVFTDLLEKLNPGDLLVFNNTRVIPARLFGRKASGGKLEVLVERVLDDRRVLAHVRASKAPKPGTELLLGDDESVKATMAARHDALFELHFDDARDVLSILNAIGHMPLPPYIDRPDEDADRELYQTVYSQRPGAVAAPTAGLHFDEPMLAALREKGIEMAFVTLHVGAGTFQPVRVDTIEDHIMHAEYAEVPQDVVDAVLACKARGNRVIAVGTTSVRSLESAAQASQDAPIAPFFDDTKIFIYPGYHYRIIDALVTNFHLPESTLIMLVSAFAGYQNTMSAYREAVAEQYRFFSYGDAMFITHNPLAEQEKVA

SEQ ID NO: 70078 - protein, 355 aa, unidentified
  source 1..355: note = Pectobacterium parmentieri
  REGION 1..355: note = tr|A0A3Q9JX10|A0A3Q9JX10_PECPM S-adenosylmethionine:tRNA ribosyltransferase-isomerase; OS = Pectobacterium parmentieri OX=1905730 GN=queA PE=3 SV=1
MRVADFSFELPESLIAHYPQAERSGCRLLSLDGPTGNLTHGVFTDLLEKLNPGDLLVFNNTRVIPARLFGRKASGGKLEVLVERVLDDRRVLAHVRASKAPKPGTELLLGDDESVKATMAARHDALFELHFDDARDVLSILNAIGHMPLPPYIDRPDEDADRELYQTVYSQRPGAVAAPTAGLHFDEPMLTALREKGIEMAFVTLHVGAGTFQPVRVDTIEDHIMHAEYAEVPQDVVDAVLACKARGNRVIAVGTTSVRSLESAAQASQDAPIAPFFDDTKIFIYPGYHYRIIDALVTNFHLPESTLIMLVSAFAGYQNTMSAYREAVAEQYRFFSYGDAMFITHNPLAEQEKVA

SEQ ID NO: 70079 - protein, 355 aa, unidentified
  source 1..355: note = Pectobacterium peruviense
  REGION 1..355: note = tr|A0A0J5Y1B9|A0A0J5Y1B9_9GAMM S-adenosylmethionine:tRNA ribosyltransferase-isomerase; OS = Pectobacterium peruviense OX=2066479 GN=queA PE=3 SV=1
MRVADFSFELPESLIAHYPQAERSGCRLLSLDGPTGDLTHGVFTDLLEKLNPGDLLVFNNTRVIPARLFGRKVSGGKLEVLVERVLDDHRILAHVRASKAPKPGTELLLGDDESVKATMVARHDALFELHFDDARDVLSILNDIGHMPLPPYIDRPDEDADRELYQTVYSQRPGAVAAPTAGLHFDEPMLAALREKGIEMAFVTLHVGAGTFQPVRVDTIEDHIMHAEYAEVPQDVVDAVLASKARGNRVIAVGTTSVRSLESAAQASQDAPIAPFFGDTKIFIYPGYHYRIIDALVTNFHLPESTLIMLVSAFAGYQNTMSAYREAVAEQYRFFSYGDAMFITHNPMAEQEKVG

SEQ ID NO: 70080 - protein, 355 aa, unidentified
  source 1..355: note = Pectobacterium polaris
  REGION 1..355: note = tr|A0A3A3ZW18|A0A3A3ZW18_9GAMM S-adenosylmethionine:tRNA ribosyltransferase-isomerase; OS = Pectobacterium polaris OX=2042057 GN=queA PE=3 SV=1
MRVADFSFELPESLIAHYPQAERSGCRLLSLDGPTGNLTHGVFTDLLDKLNPGDLLVFNNTRVIPARLFGRKASGGKLEVLVERVLDDHRVLAHVRASKAPKPGTELLLGDDESVKATMAARHDALFELHFDDSRDVLSILNDIGHMPLPPYIDRPDEDADRELYQTVYSQRPGAVAAPTAGLHFDEPMLAALREKGIDMAFVTLHVGAGTFQPVRVDTIEDHIMHAEYAEVPQDVVDAVLACKARGNRVIAVGTTSVRSLESAAQASQNAPIEPFFGDTKIFIYPGYHYRIIDALVTNFHLPESTLIMLVSAFAGYQNTMSAYRQAVAEQYRFFSYGDAMFITHNPMAEQEKVG

SEQ ID NO: 70081 - protein, 355 aa, unidentified
  source 1..355: note = Pectobacterium polaris
  REGION 1..355: note = tr|A0A433P2V2|A0A433P2V2_9GAMM S-adenosylmethionine:tRNA ribosyltransferase-isomerase; OS = Pectobacterium polaris OX=2042057 GN=queA PE=3 SV=1
MRVADFSFELPESLIAHYPQAERSGCRLLSLDGPTGNLTHGVFTDLLDKLNPGDLLVFNNTRVIPARLFGRKASGGKLEVLVERVLDDHRVLAHVRASKAPKPGTELLLGDDESVKATMAARHDALFELHFDDSRDVLSILNDIGHMPLPPYIDRPDEDADRELYQTVYSQRPGAVAAPTAGLHFDEPMLAALREKGIDMAFVTLHVGAGTFQPVRVDTIEDHIMHAEYAEVPQDVVDAVLACKARGNRVIAVGTTSVRSLESAAQASQNAPIEPFFGDTKIFIYPGYHYRIIDALVTNFHLPESTLIMLVSAFAGYQNTMSAYRQAVAEQYRFFSYGDAMFITHNPMAEKEKVG

SEQ ID NO: 70082 - protein, 355 aa, unidentified
  source 1..355: note = Pectobacterium polonicum
  REGION 1..355: note = tr|A0A4U7KJI1|A0A4U7KJI1_9GAMM S-adenosylmethionine:tRNA ribosyltransferase-isomerase; OS = Pectobacterium polonicum OX=2485124 GN=queA PE=3 SV=1
MRVTDFSFELPESLIAHYPQAERSGCRLLSLDGPTGNLTHGVFTDLLDKLNPGDLLVFNNTRVIPARLFGRKASGGKLEVLVERVLDDHRVLAHVRASKAPKPGTELLLGDDESVKATMAARHDALFELHFDDSRDVLSILNAIGHMPLPPYIDRPDEDADRELYQTVYSQRPGAVAAPTAGLHFDEPMLAALREKGIEMAFVTLHVGAGTFQPVRVDTIEDHIMHAEYAEVPQDVVDAVLACKARGNRVIAVGTTSVRSLESAAQASQDALIAPFFDDTKIFIYPGYHYRVIDALVTNFHLPESTLIMLVSAFAGYRNTMSAYREAVAEQYRFFSYGDAMFITHNPLAEQEKVG

SEQ ID NO: 70083 - protein, 355 aa, unidentified
  source 1..355: note = Pectobacterium punjabense
  REGION 1..355: note = tr|A0A2T3VZ22|A0A2T3VZ22_9GAMM S-adenosylmethionine:tRNA ribosyltransferase-isomerase; OS = Pectobacterium punjabense OX=2108399 GN=queA PE=3 SV=1
MRVTDFSFELPESLIAHYPQAERSGCRLLSLDGPTGDLTHGVFTDLLDKLNPGDLLVFNNTRVIPARLFGRKASGGKLEVLVERVLDDRRVLAHVRASKAPKPGTELLLGDDESVKATMAARHDALFELHFDDSRDVLSILNAIGHMPLPPYIDRPDEDADRELYQTVYSQRPGAVAAPTAGLHFDEPMLAALREKDIEMAFVTLHVGAGTFQPVRVDTIEDHIMHAEYAEVPQDVVDAVLACKARGNRVIAVGTTSVRSLESAAQASQDALIAPFFDDTKIFIYPGYHYRVIDALVTNFHLPESTLIMLVSAFAGYQNTMSAYREAVAEQYRFFSYGDAMFITHNPLAEQEKVG

SEQ ID NO: 70084 - protein, 355 aa, Pectobacterium wasabiae
  REGION 1..355: note = tr|A0A1D7Z3M6|A0A1D7Z3M6_9GAMM S-adenosylmethionine:tRNA ribosyltransferase-isomerase; OS = Pectobacterium wasabiae CFBP 3304 OX=1175631 GN=queA; PE = 3 SV=1
MRVADFSFELPESLIAHYPQAERSGCRLLSLDGATGDLTHGVFTDLLEKLNPGDLLVFNNTRVIPARLFGRKASGGKLEVLVERVLDEHRVLAHVRASKAPKPGTELLLGDDESVKATMAARHDALFELHFDDARDVLSILNDIGHMPLPPYIDRPDEDADRELYQTVYSQRPGAVAAPTAGLHFDEPMLAALREKGIEMAFVTLHVGAGTFQPVRVDTIEDHIMHAEYAEVPQDVVDAVLACKARGNRVIAVGTTSVRSLESAAQASQDAPISPFFDDTKIFIYPGYHYRIIDALVTNFHLPESTLIMLVSAFAGYQNTMSAYRAAVAEQYRFFSYGDAMFITHNPMAEQEKVA

SEQ ID NO: 70085 - protein, 344 aa, Pediococcus acidilactici
  REGION 1..344: note = tr|A0A1A5VCL8|A0A1A5VCL8_PEDAC S-adenosylmethionine:tRNA ribosyltransferase-isomerase; OS = Pediococcus acidilactici OX=1254 GN=queA PE=3 SV=1
MTLTTEDFNYDLPHELIAQTPIKKRDASRMLVLDHKTGEMADKHFYDIVDQLNPGDAIVMNDSRVMPARIYGVKEETGGHLEVLLLHNIEGDRWETLVKPARRAKVGTKITFGDGSLTATVKKELDHGGREIEFEYDGIFMEILEKLGEMPLPPYIKEKLDDPERYQTVYSKEPGSAAAPTAGLHWTKELLQKVQDKGVKLVYLTLHVGLGTFRPVDEENIEDHKMHSEFYRLSEESAATLNEVRKNGGRIIATGTTSIRTLETIGTKFNGEIKPDSGWTDIFIKPGYEWKVVDAFITNFHLPKSTLVMLVAAFTGRETILNAYKHAVEEKYRFFSFGDAMFIK

SEQ ID NO: 70086 - protein, 347 aa, Pediococcus acidilactici
  REGION 1..347: note = tr|A0A1D8RLW3|A0A1D8RLW3_PEDAC S-adenosylmethionine:tRNA ribosyltransferase-isomerase; OS = Pediococcus acidilactici OX=1254 GN=queA PE=3 SV=1
MEKMTLTTEDFNYDLPHELIAQTPIKKRDASRMLVLDHKTGEMADKHFYDIVDQLNPGDAIVMNDSRVMPARIYGVKEETGGHLEVLLLHNIEGDRWETLVKPARRAKVGTKITFGDGSLTATVKKELDHGGREIEFEYDGIFMEILEKLGEMPLPPYIKEKLDDPERYQTVYSKEPGSAAAPTAGLHWTKELLQKVQDKGVKLVYLTLHVGLGTFRPVDEENIEDHKMHSEFYRLSEESAATLNEVRKNGGRIIATGTTSIRTLETIGTKFNGEIKPDSGWTDIFIKPGYEWKVVDAFITNFHLPKSTLVMLVAAFTGRETILNAYKHAVEEKYRFFSFGDAMFIK

SEQ ID NO: 70087 - protein, 344 aa, Pediococcus argentinicus
  REGION 1..344: note = tr|A0A0R2NQ17|A0A0R2NQ17_9LACO S-adenosylmethionine:tRNA ribosyltransferase-isomerase; OS = Pediococcus argentinicus OX=480391 GN=queA PE=3 SV=1
MTLTVDDFDYDLPHELIAQTPIKQRDTSRLLVLDHKTGTMEDKHFYDILDQLNPGDAVVMNNSRVMPARIYGIKENTGGHFEVLLLHNIEGDKWETLVKPAKRAKLGTKIDFGDGLLTATVTKELEHGGREIEFSYDGIFMEILNQLGEMPLPPYIKEKLDDQERYQTVYSKEPGSAAAPTAGLHWTKELLQKVEDKGVKLVYLTLHVGLGTFRPVDEKNIEDHKMHSEFYQLSEESAATLNEVRKNGGRIIATGTTSIRTLETIGSKFDGEIKADSGWTDIFIKPGYEWKVVDAFITNFHLPKSTLVMLVAAFTGRDLILNAYQHAIEEKYRFFSFGDAMFVK

SEQ ID NO: 70088 - protein, 344 aa, Pediococcus cellicola
  REGION 1..344: note = tr|A0A0R2IJC9|A0A0R2IJC9_9LACO S-adenosylmethionine:tRNA ribosyltransferase-isomerase; OS = Pediococcus cellicola OX=319652 GN=queA PE=3 SV=1
MTLSVDDFDYDLPHELIAQTPIKERDESRLLVLDHKTGALEDKHFYDILNELHAGDAVVMNDSRVMPARIYGVKKETGAHLEVLLLHNDNGDQWETLVKPAKRAKVGTEIEFGEGLLKATVTKELEHGGREIEFHYDGIFMEILEKLGETPLPPYIKEKLDDPERYQTVYARESGSAAAPTAGLHWTKELLQKVEEKGVKLVYLTLHVGLGTFRPVDEKNIEDHKMHSEFYRLSESSAATLNEVRQNGGRIIATGTTSIRTLETIGTKFDGEIKADSGWTDIFIKPGYEWKVVDAFITNFHLPKSTLVMLVAAFTGRDMILNAYQHAINEKYRFFSFGDAMFIK

SEQ ID NO: 70089 - protein, 344 aa, Pediococcus claussenii
  REGION 1..344: note = tr|G8PCM2|G8PCM2_PEDCP S-adenosylmethionine:tRNA ribosyltransferase-isomerase OS=Pediococcus claussenii (strain ATCC BAA-344 / DSM 14800 / JCM 18046 / KCTC 3811 / P0 6) OX=701521 GN=queA PE=3 SV=1
MTLTVDDFDYDLPHELIAQTPIKERDASRLLVLDHKTGEMQDKHFYDVIDQLNPGDAVVMNNSRVMPARIYGVKGETGGHLEVLLLHNIEGDRWETLVKPAKRAKVGTEINFGDGALRATVTKELEHGGREIEFSYDGIFMEILNQLGEMPLPPYIKEKLDDQERYQTVYSKEPGSAAAPTAGLHWTKELLDKVEAKGIKLVYLTLHVGLGTFRPVDEDNIEDHKMHSEFYQLSEESAKTLNDVRANGGRIIATGTTSIRTLETIGTKFDGEIKADSGWTDIFIKPGYDWKVVDAFITNFHLPKSTLVMLVAAFTGRDMILNAYQHAIEEKYRFFSFGDAMFIK

SEQ ID NO: 70090 - protein, 344 aa, Pediococcus ethanolidurans
  REGION 1..344: note = tr|A0A0R2JY42|A0A0R2JY42_9LACO S-adenosylmethionine:tRNA ribosyltransferase-isomerase; OS = Pediococcus ethanolidurans OX=319653 GN=queA PE=3 SV=1
MTLTVDDFDYDLPHELIAQTPIKERDESRLLVLNHKTGTLEDKHFYDILDQLHAGDAVVMNDSRVMPARIYGVKPETGAHMEVLLLHNDTGDQWETLVKPAKRAKVGTVIEFGDGLLKATVIKELEHGGREIEFHYDGIFMEILEKLGETPLPPYIKEKLDDPERYQTVYARESGSAAAPTAGLHWTKELLKKVEDKGVKLVYLTLHVGLGTFRPVDEANIEDHKMHSEFYRLSEESAATLNEVRKNGGRIIATGTTSIRTLETIGTKFNGEIKADSGWTDIFIKPGYQWQVVDAFITNFHLPKSTLVMLVAAFTGRDMILNAYQHAIKEKYRFFSFGDAMFIK

SEQ ID NO: 70091 - protein, 344 aa, Pediococcus parvulus
  REGION 1..344: note = tr|A0A176TGX4|A0A176TGX4_9LACO S-adenosylmethionine:tRNA ribosyltransferase-isomerase; OS = Pediococcus parvulus OX=54062 GN=queA PE=3 SV=1
MTLTVDDFDYNLPHELIAQTPIKERDESRLLVLDHKTGILEDKHFYDILDQLHAGDAVVMNDSRVMPARIYGIKPETGAHMEVLLLHNDVGDQWETLVKPAKRAKVGTIIEFGDGLLKATVVKELEHGGREIEFHYDGIFMEILEKLGETPLPPYIKEKLDDPERYQTVYARESGSAAAPTAGLHWTKELLKKVEDKGVKLVYLTLHVGLGTFRPVDEANIEDHKMHSEFYRLSEESAATLNEVRKNGGRIVATGTTSIRTLETIGTKFNGEIKADSGWTDIFIKPGYKWQVVDAFITNFHLPKSTLVMLVAAFTGRDMILNAYQHAIEEKYRFFSFGDAMFIK

SEQ ID NO: 70092 - protein, 344 aa, Pediococcus pentosaceus
  REGION 1..344: note = sp|Q03ER1|QUEA_PEDPA S-adenosylmethionine:tRNA ribosyltransferase-isomerase OS=Pediococcus pentosaceus (strain ATCC 25745 / CCUG 21536 / LMG 10740 / 183-1w); OX = 27819 7 GN=queA PE=3 SV=1
MTLTTEDFNYDLPHELIAQTPIKERDESRLLVLDHETGAMEDKHFYDIIDQLNPGDAVVMNNSRVMPARIYGIKDKTGGHFEVLLLHNIEGDRWETLVKPAKRAKTGTKIIFGDGALTATVTKELEHGGREIVFDYDGIFMEVLEKLGEMPLPPYIKEKLDDPERYQTVYSKEPGSAAAPTAGLHWTKELLEKVEQKGIKLVYLTLHVGLGTFRPVDEDNIEDHKMHSEFYQLSEESAAALNEVKKQGGRIVATGTTSIRTLETIGSKFNGEIKADSGWTDIFIKPGYEWKVVDAFITNFHLPKSTLVMLVAAFTGRENILNAYQHAIEEKYRFFSFGDAMFIK

SEQ ID NO: 70093 - protein, 344 aa, Pediococcus pentosaceus
  REGION 1..344: note = tr|A0A512K6P2|A0A512K6P2_PEDPE S-adenosylmethionine:tRNA ribosyltransferase-isomerase; OS = Pediococcus pentosaceus OX=1255 GN=queA PE=3 SV=1
MTLTTEDFNYDLPHELIAQTPIKERDESRLLVLDHETGAMEDKHFYDIIDQLNPGDAVVMNNSRVMPARIYGIKDKTGGHFEVLLLHDIEGDRWETLVKPAKRAKTGTKIIFGDGALTATVTKELEHGGREIVFDYDGIFMEVLEKLGEMPLPPYIKEKLDDPERYQTVYSKEPGSAAAPTAGLHWTKELLEKVEQKGIKLVYLTLHVGLGTFRPVDEDNIEDHKMHSEFYQLSEESAAALNEVKKQGGRIVATGTTSIRTLETIGSKFNGEIKADSGWTDIFIKPGYEWKVVDAFITNFHLPKSTLVMLVAAFTGRENILNAYQHAIEEKYRFFSFGDAMFIK

SEQ ID NO: 70094 - protein, 344 aa, Pediococcus stilesii
  REGION 1..344: note = tr|A0A0R2KY46|A0A0R2KY46_9LACO S-adenosylmethionine:tRNA ribosyltransferase-isomerase; OS = Pediococcus stilesii OX=331679 GN=queA PE=3 SV=1
MTLTTEDFNYDLPHELIAQTPIKERDESRLLVLDHQTGKMEDKHFYDIIDQLNPGDAVVMNDSRVMPARIYGIKDQTGGHFEVLLLHNIEGDRWETLVKPAKRAKTGTKIVFGDGALTATVTKELDHGGREIVFDYDGIFMEVLEKLGEMPLPPYIKEKLDDPERYQTVYSKEPGSAAAPTAGLHWTKELLEKVEKKGIKLVYLTLHVGLGTFRPVDEDNIEDHKMHSEFYRLSEESAKTLNEVRNNGGRIIATGTTSIRTLETIGTKFNGEIKADSGWTDIFIKPGYEWKVVDAFITNFHLPKSTLVMLVAAFTGRETILNAYEHAIKEKYRFFSFGDAMFIK

SEQ ID NO: 70095 - protein, 349 aa, Pedobacter africanus
  REGION 1..349: note = tr|A0A1W2CK95|A0A1W2CK95_9SPHI S-adenosylmethionine:tRNA ribosyltransferase-isomerase; OS = Pedobacter africanus OX=151894 GN=queA PE=3 SV=1
MKLSQFKFNLPESLVANNPSEERDEARLMVLHKDSGKIEHKIFKDVLEYFDDQDVMILNNTKVFPARLYGNKEKTGATIEVFLLRELNKELRLWDVLVDPARKIRVGNKLYFGDDDLLVAEVVDNTTSRGRTIRFLFDGTDEEFRKNIEILGETPLPKYIKRKATAQDKERYQTIFAKHEGAVAAPTAGLHFSRELMKRLELKGVNFAEVTLHVGLGTFRSVEVEDLTKHKMDSEQFIIEQKDADIVNKAIERKKRVCAVGTTSMRAIESAVSSARTLKAANDWTSKFIFPPYDFSIANSMITNFHTPESTLLMMVSAFGGYDYVRHAYEVALKEKYRFYSYGDAMLII

SEQ ID NO: 70096 - protein, 349 aa, Pedobacter alluvionis
  REGION 1..349: note = tr|A0A497YHD3|A0A497YHD3_9SPHI S-adenosylmethionine:tRNA ribosyltransferase-isomerase; OS = Pedobacter alluvionis OX=475253 GN=queA PE=3 SV=1
MKLSQFKFNLPESLVANNPAEQRDEARLMVLHKDSGKIEHKIFKDVLGYFDDKDVMILNNTKVFPARLYGNKEKTGATIEVFLLRELNKELRLWDVLVDPARKIRVGNKLYFGDDDLLVAEVVDNTTSRGRTIRFLFEGTDEEFRKNVEILGETPLPKYIKRKATAEDKERYQTIFAKHEGAVAAPTAGLHFSRELMKRLELKGVEFAEVTLHVGLGTFRTVEVEDLTKHKMDSEQFIIEPKDANIVNKALEDKRKICAVGTTSMRAIESAVSANRTLKAANDWTSKFIFPPYDFSIANSMITNFHTPESTLLMMVSAFGGYENVMNAYEVAVKEKYKFYSYGDAMLII

SEQ ID NO: 70097 - protein, 349 aa, unidentified
  source 1..349: note = Pedobacter antarcticus
  REGION 1..349: note = tr|A0A081PKB1|A0A081PKB1_9SPHI S-adenosylmethionine:tRNA ribosyltransferase-isomerase; OS = Pedobacter antarcticus 4BY OX=1358423 GN=queA PE=3 SV=1
MKLSQFKFNLPESLVANNPSEQRDEARLMVLHKDTGKIEHKIFKDILEYFDDQDVMILNNTKVFPARLYGNKEKTGATIEVFLLRELNKELRLWDVLVDPARKIRVGNKLYFGDDDLLVAEVVDNTTSRGRTIRFLFDGTDEEFRKNIEILGETPLPKYIKRKATAQDKERYQTIFAKHEGAVAAPTAGMHFSRELMKRLELKGINFAEVTLHVGLGTFRSVEVEDLTKHKMDSEQFIIEEKQANIVNKALEEKRKICAVGTTSMRAIESAVSSGKMLKPANDWTSKFIFPPYDFSIANSMITNFHTPESTLLMMVSAFGGYDYVRNAYEVALKEKYRFYSYGDAMLII

SEQ ID NO: 70098 - protein, 349 aa, unidentified; identical to SEQ ID NO: 70097
  source 1..349: note = Pedobacter antarcticus
  REGION 1..349: note = tr|A0A1I2BCI1|A0A1I2BCI1_9SPHI S-adenosylmethionine:tRNA ribosyltransferase-isomerase; OS = Pedobacter antarcticus OX=34086 GN=queA PE=3 SV=1

SEQ ID NO: 70099 - protein, 361 aa, Pedobacter bauzanensis
  REGION 1..361: note = tr|A0A4R1M0K3|A0A4R1M0K3_9SPHI S-adenosylmethionine:tRNA ribosyltransferase-isomerase; OS = Pedobacter bauzanensis OX=653929 GN=queA PE=3 SV=1
MSFKGYTISIYIMKLSQFKFNLPQSLIASHPTPTRDESRLMVLHKDTGEIEHKIFKDILEYFDEKDVMIFNNTKVFPARLYGNKEKTGATIEVFLLRELNKELRLWDVLVDPARKIRVGNKLYFGDDDLLVAEVVDNTTSRGRTIRFLFDGTDEEFRKNIEILGETPLPKYINRKAVPEDKFRYQTIYAKHEGAVAAPTAGLHFSRELMKRLELKGVEFAEVTLHVGLGTFRTVEVEDLTKHKMDSEQFIVGEKEAELVNEAIDNKRRVCAVGTTSMRAIESAVSANLRLKAANSWTSKFIFPPYDFSIANSMITNFHTPESTLLMMVSAFGGYENVMNAYEVAVKEKYRFYSYGDAMLII

SEQ ID NO: 70100 - protein, 372 aa, Pedobacter borealis
  REGION 1..372: note = tr|A0A4R8P167|A0A4R8P167_9SPHI S-adenosylmethionine:tRNA ribosyltransferase-isomerase; OS = Pedobacter borealis OX=475254 GN=queA PE=3 SV=1
MRLIKYEKEKLNSYFCTSKNSSRMKLSQFKFNLPESLVANNPAEQRDEARLMVLHKDSGKIEHKIFKDVLGYFDDKDVMILNNTKVFPARLYGNKEKTGATIEVFLLRELNKELRLWDVLVDPARKIRVGNKLYFGDDDLLVAEVVDNTTSRGRTIRFLFEGTDEEFRKNVEILGETPLPKYIKRKATAEDKERYQTIFAKHEGAVAAPTAGLHFSRELMKRLELKGVEFAEVTLHVGLGTFRTVEVEDLTKHKMDSEQFIIEQKDANIVNKAIEDRKKICAVGTTSMRAIESAVSANRTLKAANDWTSKFIFPPYDFSIANAMITNFHTPESTLLMMVSAFGGYENVMNAYEVAVKEKYKFYSYGDAMLII

SEQ ID NO: 70101 - protein, 368 aa, Pedobacter caeni
  REGION 1..368: note = tr|A0A1M5IZ54|A0A1M5IZ54_9SPHI S-adenosylmethionine:tRNA ribosyltransferase-isomerase; OS = Pedobacter caeni OX=288992 GN=queA PE=3 SV=1
MKKKIIFLKFAPLIITSKNMKLSQFKFNLPESLVANNPSEHRDEARLMVLHKDSGKIEHKIFKDVLSYFDDKDVMILNNTKVFPARLYGNKEKTGATIEVFLLRELNKELRLWDVLVDPARKIRVGNKLYFGDDDLLVAEVVDNTTSRGRTIRFLFDGTDEEFRKNIEILGETPLPKYIKRKATAQDKERYQTIFAKHEGAVAAPTAGLHFSRELMKRLELKGINFAEVTLHVGLGTFRSVEVEDLTKHKMDSEQFIIEQKDADIVNKAIEEKRRICAVGTTSMRAIESAVSSGRMLKPANDWTSKFIFPPYDFSIANSMITNFHTPESTLLMMVSAFGGYDYVRNAYEVALKEKYRFYSYGDAMLII

SEQ ID NO: 70102 - protein, 349 aa, unidentified
  source 1..349: note = Pedobacter chitinilyticus
  REGION 1..349: note = tr|A0A443Z2E3|A0A443Z2E3_9SPHI S-adenosylmethionine:tRNA ribosyltransferase-isomerase; OS = Pedobacter chitinilyticus OX=2233776 GN=queA PE=3 SV=1
MKLSQFKFNLPDSLLASDPAEERDEARLMVLHKDTGKIEHKIFKDVLNYFDDKDVMILNNTKVFPARLYGNKEKTGATIEVFLLRELNKELRLWDVLVDPARKIRVGNKLYFGDDDLLVAEVVDNTTSRGRTIRFLFDGTDEEFRRNVEILGETPLPKYIKRKATEMDKERYQTIFAKHEGAVAAPTAGLHFSRELMKRLELKGIEFAEVTLHVGLGTFRQVEVEDLTKHKMDSEQFIIEQKDADIVNKGIEDKRRICAVGTTSMRAIESAVSANKTLKAANDWTSKFIFPPYDFSIANSMITNFHTSESTLLMMVSAFGGYENVMNAYEVAVKEKYRFYSYGDAMLII

SEQ ID NO: 70103 - protein, 349 aa, Pedobacter cryoconitis
  REGION 1..349: note = tr|A0A127V9B8|A0A127V9B8_9SPHI S-adenosylmethionine:tRNA ribosyltransferase-isomerase; OS = Pedobacter cryoconitis OX=188932 GN=queA PE=3 SV=1
MKLSQFKFNLPESLVANNPSEHRDEARLMVLHKETGKIEHKIFKDVLEYFDDQDVMILNNTKVFPARLYGNKEKTGATIEVFLLRELNKELRLWDVLVDPARKIRVGNKLYFGDDDLLVAEVVDNTTSRGRTIRFLFDGTDEEFRKNIEILGETPLPKYIKRKATAQDKERYQTIFAKHEGAVAAPTAGMHFSRELMKRLELKGINFAEVTLHVGLGTFRSVEVEDLTKHKMDSEQFIIEESQANIVNKALNEKRRICAVGTTSMRAIESAVSSGRMLKPANDWTSKFIFPPYDFSIANSMITNFHTPESTLLMMVSAFGGYDYVRNAYEVALKEKYRFYSYGDAMLII

SEQ ID NO: 70104 - protein, 349 aa, Pedobacter duraquae
  REGION 1..349: note = tr|A0A4R6IHR9|A0A4R6IHR9_9SPHI S-adenosylmethionine:tRNA ribosyltransferase-isomerase; OS = Pedobacter duraquae OX=425511 GN=queA PE=3 SV=1
MKLSQFKFNLPESLVANTPSEQRDEARLMVLHKDSGKIEHKIFKDVLGYFDDKDVMILNNTKVFPARLYGNKEKTGATIEVFLLRELNKELRLWDVLVDPARKIRVGNKLYFGDDDLLVAEVVDNTTSRGRTIRFLFDGTDEEFRKNIEILGETPLPKYIKRKATAQDKERYQTIFAKHEGAVAAPTAGLHFSRELMKRLELKGVNFAEVTLHVGLGTFRSVEVEDLTKHKMDSEQFIINQKDADIVNKALEDKRKICAVGTTSMRAIESAVSSGKTLKAANDWTSKFIFPPYDFSIANSMITNFHTPESTLLMMVSAFGGYDYVRHAYEVALKEKYRFYSYGDAMLII

SEQ ID NO: 70105 - protein, 349 aa, Pedobacter ginsengisoli
  REGION 1..349: note = tr|A0A2D1U2M6|A0A2D1U2M6_9SPHI S-adenosylmethionine:tRNA ribosyltransferase-isomerase; OS = Pedobacter ginsengisoli OX=363852 GN=queA PE=3 SV=1
MKLSQFKFNLPESLVANNPSEQRDEARLMVLHKDSGKIEHKIFKDILGYFDDKDVMILNNTKVFPARLYGNKEKTGATIEVFLLRELNKELRLWDVLVDPARKIRVGNKLYFGDDDLLVAEVVDNTTSRGRTIRFLFDGTDEEFRKNIEILGETPLPKYIKRKATAQDKERYQTIFAKHEGAVAAPTAGLHFSRELMKRLELKGINFAEVTLHVGLGTFRSVEVEDLTKHKMDSEQFIIEQKDADIVNKAIEDKRRVCAVGTTSMRAIESAVSSNRTLKAANDWTSKFIFPPYDFSIANSMITNFHTPESTLLMMVSAFGGFDYVRHAYEVALKEKYRFYSYGDAMLII

SEQ ID NO: 70106 - protein, 349 aa, unidentified
  source 1..349: note = Pedobacter ginsenosidimutans
  REGION 1..349: note = tr|A0A0T5VKP4|A0A0T5VKP4_9SPHI S-adenosylmethionine:tRNA ribosyltransferase-isomerase; OS = Pedobacter ginsenosidimutans OX=687842 GN=queA PE=3 SV=1
MKLSQFKFNLPESLVANNPAEQRDEARLMVLHKDSGKIEHKIFKDVLGYFDDKDVMILNNTKVFPARLYGNKEKTGATIEVFLLRELNKELRLWDVLVDPARKIRVGNKLYFGDDDLLVAEVVDNTTSRGRTIRFLFEGTDEEFRKNVEILGETPLPKYIKRKATAEDKERYQTIFAKHEGAVAAPTAGLHFSRELMKRLELKGIEFAEVTLHVGLGTFRTVEVEDLTKHKMDSEQFIIEQKDANIVNKALEEKRKICAVGTTSMRAIESAVSANRTLKSANDWTSKFIFPPYDFSIANSMITNFHTPESTLLMMVSAFGGYENVMNAYEVAVKEKYKFYSYGDAMLII

SEQ ID NO: 70107 - protein, 424 aa, Pedobacter glucosidilyticus
  REGION 1..424: note = tr|A0A0B8Y0E8|A0A0B8Y0E8_9SPHI S-adenosylmethionine:tRNA ribosyltransferase-isomerase; OS = Pedobacter glucosidilyticus OX=1122941 GN=queA_2 PE=3; SV = 1
MELNNKLEAQQFEIKNFTYDLPENRIAKYPLAERDLSKLLVYHNGKISEDIYRNLDKYIFEKSIFIFNNTKVVQSRLYFNNSTGGKIEVFCLEPSKKNHEPSMAMMKKACVEWKCLIGRLDRWKEKVISINTKDISLDAEILERDGNVFTIRFSWQPTSFSFAEILEHFGAMPIPPYLKRESEEIDVSRYQTVYAEQQGSVAAPTAGLHFTNQILEKIKSKNAIVDYVTLHVGAGTFIPVKSETLEGHQMHYEWIEVSQETILNIVAQISDEQTNKNIIAIGTTSLRTIESLYWMGVKANQNMSASIDELEVKQWDAYELQQSLTASDALNCLLTWLKRNKIEKIICKTQLLIVPSYQLKIANALITNFHQPSSTLLLLVAAVVGDDWKVIYDYALKNDFRFLSYGDGSLLFDNKRNKNESIQY

SEQ ID NO: 70108 - protein, 349 aa, Pedobacter glucosidilyticus
  REGION 1..349: note = tr|A0A0B8YH23|A0A0B8YH23_9SPHI S-adenosylmethionine:tRNA ribosyltransferase-isomerase; OS = Pedobacter glucosidilyticus OX=1122941 GN=queA_1 PE=3; SV = 1
MKLSQFKFHLPESLIAHHPAETRDESRLMVLDKKTGHIEHKLFKDVLGYFEEKDVMILNNTKVFPARLYGNKEKTGATIEVFLLRELNKELRLWDVLVDPARKIRVGNKLYFGDDDLLVAEVVDNTTSRGRTIRFLFDGTDEEFRQNIEILGETPLPKYIKRKPTAEDKERYQTIFAKNEGAVAAPTAGLHFSRELLKRLELKGIEFAEVTLHIGLGTFRQVEVEDLTKHKMDSEQIIITQKDADIVNKGIADKRKVCAVGTTVMRSIESAVSASHTLKPINDWTSKFIFPPYDFSIANCMITNFHTPESTLLMMIAAFGGYENVMNAYEVAVKEKYRFYSYGDAMLII

SEQ ID NO: 70109 - protein, 349 aa, Pedobacter hartonius
  REGION 1..349: note = tr|A0A1H4D4T0|A0A1H4D4T0_9SPHI S-adenosylmethionine:tRNA ribosyltransferase-isomerase; OS = Pedobacter hartonius OX=425514 GN=queA PE=3 SV=1
MKLSQFKFNLPESLVANNPSEQRDEARLMVLHKDTGKIEHKIFKDILEYFDDQDVMILNNTKVFPARLYGNKEKTGATIEVFLLRELNKELRLWDVLVDPARKIRVGNKLYFGDDDLLVAEVVDNTTSRGRTIRFLFDGTDEEFRKNIEILGETPLPKYIKRKATAMDKERYQTIFAKHEGAVAAPTAGMHFSRELMKRLELKGINFAEVTLHVGLGTFRSVEVEDLTKHKMDSEQFIIEEKEAAIVNKALENKKRICAVGTTSMRAIESAVSSGKMLKPANDWTSKFIFPPYDFSIANSMITNFHTPESTLLMMVSAFGGYDYVKHAYEVALKEKYRFYSYGDAMLII

SEQ ID NO: 70110 - protein, 349 aa, Pedobacter heparinus
  REGION 1..349: note = tr|C6Y064|C6Y064_PEDHD S-adenosylmethionine:tRNA ribosyltransferase-isomerase OS=Pedobacter heparinus (strain ATCC 13125 / DSM 2366 / CIP 104194 / JCM 7457 / NBRC 12 017 / NCIMB 9290 / NRRL B-14731 / HIM 762-3) OX=
MKLSQFKFNLPESLVANNPSEQRDEARLMVLHKDSGKIEHKIFKDVLDYFDDQDVMILNNTKVFPARLYGNKEKTGATIEVFLLRELNKELRLWDVLVDPARKIRVGNKLYFGDDDLLVAEVVDNTTSRGRTIRFLFDGTDEEFRKNIEILGETPLPKYIKRKATAQDKERYQTIFAKHEGAVAAPTAGLHFSRELMKRLELKGINFAEVTLHVGLGTFRSVEVEDLTKHKMDSEQFIIEQKDADIVNKAIERKKRICAVGTTSMRAIESAVSSGRTLKAANDWTSKFIFPPYDFSIANSMITNFHTPESTLLMMVSAFGGYDYVRHAYEVALKEKYRFYSYGDAMLII

SEQ ID NO: 70111 - protein, 349 aa, Pedobacter insulae
  REGION 1..349: note = tr|A0A1I2UQB4|A0A1I2UQB4_9SPHI S-adenosylmethionine:tRNA ribosyltransferase-isomerase; OS = Pedobacter insulae OX=414048 GN=queA PE=3 SV=1
MKLSQFKFNLPESLLANNPAEHRDEARLMVLHKDSGKIEHKIFKDVLGYFDDQDVMILNNTKVFPARLYGNKEKTGATIEVFLLRELNKELRLWDVLVDPARKIRVGNKLYFGDDDLLVAEVVDNTTSRGRTIRFLFDGTDEEFRKNVEILGETPLPKYIKRKATAEDKERYQTIFAKHEGAVAAPTAGLHFSRELMKRLELKGVDFAEVTLHVGLGTFRPVEVEDLTKHKMDSEQFIIDQTAVDVVNKALDNKKKICAVGTTSMRAIESAVSSGRKLKAANDWTSKFIFPPYDFSIANCMITNFHTPESTLLMMVSAFGGYENVMNAYQVAVKEKYRFYSFGDAMLII

SEQ ID NO: 70112 - protein, 349 aa, unidentified
  source 1..349: note = Pedobacter jejuensis
  REGION 1..349: note = tr|A0A3N0BUI6|A0A3N0BUI6_9SPHI S-adenosylmethionine:tRNA ribosyltransferase-isomerase; OS = Pedobacter jejuensis OX=1268550 GN=queA PE=3 SV=1
MKLSQFKFNLPESLIANNPAEQRDEARLMVLHKDSGKIEHKIFKDVLGYFDDKDVMILNNTKVFPARLYGNKEKTGATIEVFLLRELNKELRLWDVLVDPARKIRVGNKLYFGDDDLLVAEVVDNTTSRGRTIRFLFEGTDEEFRRNVEILGETPLPKYIKRKATAEDKERYQTIFAKHEGAVAAPTAGLHFSRELMKRLELKGVEFAEVTLHVGLGTFRTVEVEDLTKHKMDSEQFIIEQKDANIVNKALEEKRKICAVGTTSMRAIESAVSANRTLKSANDWTSKFIFPPYEFNIANSMITNFHTPESTLLMMVSAFGGYENVMNAYEVAVKEKYKFYSYGDAMLII

SEQ ID NO: 70113 - protein, 349 aa, unidentified
  source 1..349: note = Pedobacter kyonggii
  REGION 1..349: note = tr|A0A4Q9HA03|A0A4Q9HA03_9SPHI S-adenosylmethionine:tRNA ribosyltransferase-isomerase; OS = Pedobacter kyonggii OX=1926871 GN=queA PE=3 SV=1
MKLSQFKFNLPESLVANNPAEQRDEARLMVLHKDSGKIEHKIFKDVLGYFDDKDVMILNNTKVFPARLYGNKEKTGATIEVFLLRELNKELRLWDVLVDPARKIRVGNKLYFGDDDLLVAEVVDNTTSRGRTIRFLFEGTDEEFRKNVEILGETPLPKYIKRKATAEDKERYQTIFAKHEGAVAAPTAGLHFSRELMKRLELKGIEFAEVTLHVGLGTFRTVEVEDLTKHKMDSEQFIIEPKDAKIVNKALEEKRKICAVGTTSMRAIESAVSANRTLKSANDWTSKFIFPPYDFSIANSMITNFHTPESTLLMMVSAFGGYENVMNAYEVAVKEKYKFYSYGDAMLII

SEQ ID NO: 70114 - protein, 349 aa, unidentified
  source 1..349: note = Pedobacter kyungheensis
  REGION 1..349: note = tr|A0A0C1FVG7|A0A0C1FVG7_9SPHI S-adenosylmethionine:tRNA ribosyltransferase-isomerase; OS = Pedobacter kyungheensis OX=1069985 GN=queA PE=3 SV=1
MKLSQFKFNLPESLVANNPAEERDEARLMVLHKDSGKIEHKIFKDVLGYFDDKDVMILNNTKVFPARLYGNKEKTGATIEVFLLRELNKELRLWDVLVDPARKIRVGNKLYFGDDDLLVAEVVDNTTSRGRTIRFLFEGSDEEFRKNVEILGETPLPKYIKRKATAEDKERYQTIFAKHEGAVAAPTAGLHFSRELMKRLELKGVDFAEVTLHVGLGTFRTVEVEDLTKHKMDSEQFIIEQKDANIVNRALENKKRICAVGTTSMRAIESAVSANRTLKAANDWTSKFIFPPYDFSIANSMITNFHTPESTLLMMVSAFGGYENVMNAYEVAVKEKYKFYSYGDAMLII

SEQ ID NO: 70115 - protein, 349 aa, unidentified
  source 1..349: note = Pedobacter lusitanus
  REGION 1..349: note = tr|A0A0D0GD02|A0A0D0GD02_9SPHI S-adenosylmethionine:tRNA ribosyltransferase-isomerase; OS = Pedobacter lusitanus OX=1503925 GN=queA PE=3 SV=1
MKLSQFKFNLPESLIANNPSEHRDEARLMVLHRDSGKIEHKIFKDILEYFDDQDVMILNNTKVFPARLYGNKEKTGATIEVFLLRELNKELRLWDVLVDPARKIRVGNKLYFGDDDLLVAEVVDNTTSRGRTIRFLFDGTDEEFRKNIEILGETPLPKYIKRKATAQDKERYQTIFAKHEGAVAAPTAGMHFSRELMKRLELKGINFAEVTLHVGLGTFRSVEVEDLTKHKMDSEQFIIEESQANIVNKALAEKRRICAVGTTSMRAIESAVSSGRTLKPANDWTSKFIFPPYDFSIANSMITNFHTPESTLLMMISAFGGYDYVRHAYDVALKEKYRFYSYGDAMLII

SEQ ID NO: 70116 - protein, 349 aa, unidentified
  source 1..349: note = Pedobacter luteus
  REGION 1..349: note = tr|A0A1T5B5B2|A0A1T5B5B2_9SPHI S-adenosylmethionine:tRNA ribosyltransferase-isomerase; OS = Pedobacter luteus OX=572036 GN=queA PE=3 SV=1
MKLSQFKFDLPESLIAHNPSEQRDEARLMVLDRKTGAIEHKIFKDVLGYFGDKDVMILNNTKVFPARLYGNKEKTGATIEVFLLRELNRELRLWDVLVDPARKIRVGNKLYFGDDDLLVAEVVDNTTSRGRTIRFLFDGTDEEFRRNIEILGETPLPKYIKRKATAEDKERYQTIFAKKEGAVAAPTAGLHFSRELMKRLELKGVDFAEVTLHVGLGTFRAVEVEDLTKHKMDSEQFIIEQKSVNIVNKAIENKQKVCAVGTTSMRAIESAVSAGRELKAANDWTSKFIFPPYEFSIANSMITNFHTPESTLLMMVAAFGGYDHVMKAYEVAVKEKYRFYSYGDAMLII

SEQ ID NO: 70117 - protein, 349 aa, Pedobacter metabolipauper
  REGION 1..349: note = tr|A0A4R6SYN6|A0A4R6SYN6_9SPHI S-adenosylmethionine:tRNA ribosyltransferase-isomerase; OS = Pedobacter metabolipauper OX=425513 GN=queA PE=3 SV=1
MKLSQFKFNLPESLVANNPSENRDEARLMVLHKDSGKIEHKIFKDVLSYFDDKDVMILNNTKVFPARLYGNKEKTGATIEVFLLRELNKELRLWDVLVDPARKIRVGNKLYFGDDDLLVAEVVDNTTSRGRTIRFLFDGTDEEFRKNIEILGETPLPKYIKRKATAQDKERYQTIFAKHEGAVAAPTAGLHFSRELMKRLELKGVEFAEVTLHVGLGTFRSVEVEDLTKHKMDSEQYIIEQKDADIVNKAIADKRKICAVGTTSMRAIESAVSSNRTLKPANDWTSKFIFPPYDFSIANSMITNFHTPESTLLMMVSAFGGYDYVRNAYEVALKEKYRFYSYGDAMLII

SEQ ID NO: 70118 - protein, 349 aa, unidentified
  source 1..349: note = Pedobacter nutrimenti
  REGION 1..349: note = tr|A0A318UII2|A0A318UII2_9SPHI S-adenosylmethionine:tRNA ribosyltransferase-isomerase; OS = Pedobacter nutrimenti OX=1241337 GN=queA PE=3 SV=1
MKLSQFKFNLPESLVANNPSEQRDEARLMVLHKDSGKIEHKIFKDVLNYFDDHDVMILNNTKVFPARLYGNKEKTGATIEVFLLRELNKELRLWDVLVDPARKIRVGNKLYFGDDDLLVAEVVDNTTSRGRTIRFLFDGTDEEFRKNIEILGETPLPKYIKRKATAQDKERYQTIFAKHEGAVAAPTAGLHFSRELMKRLELKGVNFAEVTLHVGLGTFRSVEVEDLTKHKMDSEQFIIEQKDADIVNKALEEKRKICAVGTTSMRAIESAVSSGRTLKAANDWTSKFIFPPYDFSIANSMITNFHTPESTLLMMVSAFGGYDYVRNAYEVALKEKYRFYSYGDAMLII

SEQ ID NO: 70119 - protein, 349 aa, Pedobacter nyackensis
  REGION 1..349: note = tr|A0A1W2F3J3|A0A1W2F3J3_9SPHI S-adenosylmethionine:tRNA ribosyltransferase-isomerase; OS = Pedobacter nyackensis OX=475255 GN=queA PE=3 SV=1
MKLSQFKFNLPESLVANNPSEQRDEARLMVLHKDSGKIEHKIFKDVLDYFDDQDVMILNNTKVFPARLYGNKEKTGATIEVFLLRELNKELRLWDVLVDPARKIRVGNKLYFGDDDLLVAEVVDNTTSRGRTIRFLFDGTDEEFRKNIEILGETPLPKYIKRKATAQDKERYQTIFAKHEGAVAAPTAGLHFSRELMKRLELKGVNFAEVTLHVGLGTFRSVEVEDLTKHKMDSEQFIIEQKDADIVNLGIERKKKICAVGTTSMRAIESAVSSGRMLKPANDWTSKFIFPPYDFSIANSMITNFHTPESTLLMMVSAFGGYDYVRHAYEVALKEKYRFYSYGDAMLII

SEQ ID NO: 70120 - protein, 349 aa, unidentified
  source 1..349: note = Pedobacter psychrophilus
  REGION 1..349: note = tr|A0A179DF27|A0A179DF27_9SPHI S-adenosylmethionine:tRNA ribosyltransferase-isomerase; OS = Pedobacter psychrophilus OX=1826909 GN=queA PE=3 SV=1
MKLSQFKFHLPESLIAHTPSESRDESRLMVLDKKTGKIEHKIFKDVLGYFEEKDVMILNNTKVFPARLYGNKEKTGATIEVFLLRELNKELRLWDVLVDPARKIRVGNKLYFGDDDLLVAEVVDNTTSRGRTIRFLFDGTDEEFRQNIEILGETPLPKYIKRKPTAEDKDRYQTIFAKNEGAVAAPTAGLHFSRELMKRLELKGVDFAEVTLHIGLGTFRQVEVEDLTKHKMDSEQIIIEQKDADIVNKAKEEKRRICAVGTTVMRSIESAVSANHTLKPVNDWTSKFIFPPYDFSIANSMITNFHTPESTLLMMVAAFGNYDYVMNAYEQAVKEKYRFFSYGDAMLII

SEQ ID NO: 70121 - protein, 349 aa, unidentified
  source 1..349: note = Pedobacter psychrotolerans
  REGION 1..349: note = tr|A0A4R2H6W6|A0A4R2H6W6_9SPHI S-adenosylmethionine:tRNA ribosyltransferase-isomerase; OS = Pedobacter psychrotolerans OX=1843235 GN=queA PE=3 SV=1
MKLSQFKFNLPEALIANNPAEQRDEARLMVLHKDSGKIEHKIFKDVLGYFDDKDVMILNNTKVFPARLYGNKEKTGATIEVFLLRELNKELRLWDVLVDPARKIRVGNKLYFGDDDLLVAEVVDNTTSRGRTIRFLFEGTDEEFRRNVEILGETPLPKYIKRKATAEDKERYQTIFAKHEGAVAAPTAGLHFSRELMKRLELKGVEFAEVTLHVGLGTFRTVEVEDLTKHKMDSEQFIIEPKDANIVNKALEEKRKICAVGTTSMRSIESAVSANRTLKSANDWTSKFIFPPYEFSIANSMITNFHTPESTLLMMVSAFGGYENVMNAYEVAVKEKYKFYSYGDAMLII

SEQ ID NO: 70122 - protein, 349 aa, Pedobacter rhizosphaerae
  REGION 1..349: note = tr|A0A1H9LZ25|A0A1H9LZ25_9SPHI S-adenosylmethionine:tRNA ribosyltransferase-isomerase; OS = Pedobacter rhizosphaerae OX=390241 GN=queA PE=3 SV=1
MKLSQFKFNLPESLVAHNPSEERDEARLMVLHKDSGKIEHKIFKDVLGYFDDQDVMILNNTKVFPARLYGNKEKTGATIEVFLLRELNKELRLWDVLVDPARKIRVGNKLYFGDDDLLVAEVVDNTTSRGRTIRFLFEGTDEEFRRNVEILGETPLPKYIKRKATAEDKERYQTIFAKHEGAVAAPTAGLHFSRELMKRLELKGINFAEVTLHVGLGTFRTVEVEDLTKHKMDSEQFIIEQKDADIVNKGIADKRKVCAVGTTSMRAIESAVSANRTLKAANDWTSKFIFPPYDFSIANSMITNFHTPESTLLMMISAFGGYENVMNAYEVAVKEKYKFYSYGDAMLII

SEQ ID NO: 70123 - protein, 349 aa, unidentified
  source 1..349: note = Pedobacter ruber
  REGION 1..349: note = tr|A0A1G9M3U0|A0A1G9M3U0_9SPHI S-adenosylmethionine:tRNA ribosyltransferase-isomerase; OS = Pedobacter ruber OX=990371 GN=queA PE=3 SV=1
MKLSQFKFDLPESLIAHNPVENRDEARLMVLDKKTGAIEHKIFKDILGYFEEKDVMILNNTKVFPARLYGNKEKTGATIEVFLLRELNRELRLWDVLVDPARKIRVGNKLYFGDDDLLVAEVVDNTTSRGRTIRFLFDGTDDEFRRNIEILGETPLPKYIKRKATAEDKERYQTIFAKKEGAVAAPTAGLHFSRELMKRLELKGVDFAEVTLHVGLGTFRAVEVEDLTKHKMDSEQFIIEQKDADIVNKAILEKRRVCAVGTTSMRAIESAVSAGKELKAANDWTSKFIFPPYDFSIANCMITNFHTPESTLLMMVAAFGGYENVMKAYEVAVKEKYRFYSYGDAMLII

SEQ ID NO: 70124 - protein, 349 aa, Pedobacter soli; identical to SEQ ID NO: 70114
  REGION 1..349: note = tr|A0A1G6SHV6|A0A1G6SHV6_9SPHI S-adenosylmethionine:tRNA ribosyltransferase-isomerase; OS = Pedobacter soli OX=390242 GN=queA PE=3 SV=1

SEQ ID NO: 70125 - protein, 349 aa, Pedobacter sp.; identical to SEQ ID NO: 70096
  REGION 1..349: note = tr|A0A4R2ZGJ8|A0A4R2ZGJ8_9SPHI S-adenosylmethionine:tRNA ribosyltransferase-isomerase; OS = Pedobacter sp. CF074 OX=2135714 GN=queA PE=3 SV=1

SEQ ID NO: 70126 - protein, 349 aa, Pedobacter sp.
  REGION 1..349: note = tr|A0A0Q5TQP9|A0A0Q5TQP9_9SPHI S-adenosylmethionine:tRNA ribosyltransferase-isomerase; OS = Pedobacter sp. Leaf194 OX=1736297 GN=queA PE=3 SV=1
MKLSQFKFNLPESLVANNPSEERDEARLMVLHKDSGKIEHKIFKDVLGYFDDKDVMILNNTKVFPARLYGNKEKTGATIEVFLLRELNKELRLWDVLVDPARKIRVGNKLYFGDDDLLVAEVVDNTTSRGRTIRFLFEGTDEEFRKNVEILGETPLPKYIKRKATAEDKERYQTIFAKHEGAVAAPTAGLHFSRELMKRLELKGIEFAEVTLHVGLGTFRTVEVEDLTKHKMDSEQFIIEQKDANIVNKALEEKRKICAVGTTSMRAIESAVSANRTLKAANDWTSKFIFPPYDFSIANSMITNFHTPESTLLMMVSAFGGYENVMNAYEVAVKEKYKFYSYGDAMLII

SEQ ID NO: 70127 - protein, 349 aa, Pedobacter steynii
  REGION 1..349: note = tr|A0A1D7QK32|A0A1D7QK32_9SPHI S-adenosylmethionine:tRNA ribosyltransferase-isomerase; OS = Pedobacter steynii OX=430522 GN=queA PE=3 SV=1
MKLSQFKFNLPESLVANNPSEHRDEARLMVLHKDSGKIEHKIFKDVLSYFDDKDVMILNNTKVFPARLYGNKEKTGATIEVFLLRELNKELRLWDVLVDPARKIRVGNKLYFGDDDLLVAEVVDNTTSRGRTIRFLFDGTDEEFRKNIEILGETPLPKYIKRKATAQDKERYQTIFAKHEGAVAAPTAGLHFSRELMKRLELKGVNFAEVTLHVGLGTFRSVEVEDLTKHKMDSEQFIIEQKDADIVNKAIEEKRKICAVGTTSMRAIESAVSSGRMLKAANDWTSKFIFPPYDFSIANSMITNFHTPESTLLMMVSAFGGYDYVRNAYDVALKEKYRFYSYGDAMLII

SEQ ID NO: 70128 - protein, 368 aa, Pedobacter steynii
  REGION 1..368: note = tr|A0A1G9PS95|A0A1G9PS95_9SPHI S-adenosylmethionine:tRNA ribosyltransferase-isomerase; OS = Pedobacter steynii OX=430522 GN=queA PE=3 SV=1
MKKKIIFLKFAPLIITSKNMKLSQFKFNLPESLVANNPSEHRDEARLMVLHKDSGKIEHKIFKDVLSYFDDQDVMILNNTKVFPARLYGNKEKTGATIEVFLLRELNKELRLWDVLVDPARKIRVGNKLYFGDDDLLVAEVVDNTTSRGRTIRFLFDGTDEEFRKNIEILGETPLPKYIKRKATAQDKERYQTIFAKHEGAVAAPTAGLHFSRELMKRLELKGINFAEVTLHVGLGTFRSVEVEDLTKHKMDSEQFIIEQKDADIVNKAIEEKRKICAVGTTSMRAIESAVSSGKMLKPANDWTSKFIFPPYDFSIANSMITNFHTPESTLLMMVSAFGGYDYVRNAYEVALKEKYRFYSYGDAMLII

SEQ ID NO: 70129 - protein, 372 aa, Pedobacter suwonensis; identical to SEQ ID NO: 70100
  REGION 1..372: note = tr|A0A1I0U651|A0A1I0U651_9SPHI S-adenosylmethionine:tRNA ribosyltransferase-isomerase; OS = Pedobacter suwonensis OX=332999 GN=queA PE=3 SV=1

SEQ ID NO: 70130 - protein, 349 aa, Pedobacter terrae
  REGION 1..349: note = tr|A0A1G7P7T3|A0A1G7P7T3_9SPHI S-adenosylmethionine:tRNA ribosyltransferase-isomerase; OS = Pedobacter terrae OX=405671 GN=queA PE=3 SV=1
MKLSQFKFNLPESLVANNPAEQRDEARLMVLHKDSGKIEHKIFKDVLGYFDDKDVMILNNTKVFPARLYGNKEKTGATIEVFLLRELNKELRLWDVLVDPARKIRVGNKLYFGDDDLLVAEVVDNTTSRGRTIRFLFEGTDEEFRKNVEILGETPLPKYIKRKATAEDKERYQTIFAKHEGAVAAPTAGLHFSRELMKRLELKGVEFAEVTLHVGLGTFRTVEVEDLTKHKMDSEQFIIEPKDAGIVNKAIEEKRKICAVGTTSMRAIESAVSANRTLKAANDWTSKFIFPPYDFSIANSMITNFHTPESTLLMMVSAFGGYENVMNAYEVAVKEKYKFYSYGDAMLII

SEQ ID NO: 70131 - protein, 349 aa, Pedobacter terrae
  REGION 1..349: note = tr|A0A561GFQ3|A0A561GFQ3_9SPHI S-adenosylmethionine:tRNA ribosyltransferase-isomerase; OS = Pedobacter terrae OX=405671 GN=queA PE=3 SV=1
MKLSQFKFNLPESLVANNPAEQRDEARLMVLHKDSGKIEHKIFKDVLGYFDDKDVMILNNTKVFPARLYGNKEKTGATIEVFLLRELNKELRLWDVLVDPARKIRVGNKLYFGDDDLLVAEVVDNTTSRGRTIRFLFEGTDEEFRKNVEILGETPLPKYIKRKATAEDKERYQTIFAKHEGAVAAPTAGLHFSRELMKRLELKGVEFAEVTLHVGLGTFRTVEVEDLTKHKMDSEQFIIEPKDANIVNKALENKRKICAVGTTSMRAIESAVSANRTLKAANDWTSKFIFPPYDFSIANSMITNFHTPESTLLMMVSAFGGYENVMNAYEVAVKEKYKFYSYGDAMLII

SEQ ID NO: 70132 - protein, 349 aa, unidentified
  source 1..349: note = Pedobacter tournemirensis
  REGION 1..349: note = tr|A0A4V1KJ03|A0A4V1KJ03_9SPHI S-adenosylmethionine:tRNA ribosyltransferase-isomerase; OS = Pedobacter tournemirensis OX=699437 GN=queA PE=3 SV=1
MKLSQFKFNLPDSLIAHSPSDQRDEARLMVLDRNTGAIEHKIFKDVLDYFEEKDVMILNNTKVFPARLYGNKEKTGATIEVFLLRELNKELRLWDVLVDPARKIRVGNKLYFGDDDLLVAEVVDNTTSRGRTIRFLFDGTDEEFRRNIEILGETPLPKYIKRKATAEDKERYQTIFAKHEGAVAAPTAGLHFSRELMKRLELKGVEFAEVTLHVGLGTFRPVEVEDLTKHKMDSEQFIIEQKSADLVNNAIENKRRVCAVGTTSMRAIESAVSANKTLKAANDWTSKFIFPPYDFSIANTMITNFHTPESTLLMMICAFGGYENVMNAYEVAVKEKYRFYSYGDAMLII

SEQ ID NO: 70133 - protein, 349 aa, Pedobacter westerhofensis
  REGION 1..349: note = tr|A0A521BKG0|A0A521BKG0_9SPHI S-adenosylmethionine:tRNA ribosyltransferase-isomerase; OS = Pedobacter westerhofensis OX=425512 GN=queA PE=3 SV=1
MKLSQFKFNLPESLVASNPSDQRDEARLMVLHKDTGEIEHRIFKDVLEYFDDQDVMILNNTKVFPARLYGNKEKTGATIEVFLLRELNRELRLWDVLVDPARKIRVGNKLYFGDDDLLVAEVVDNTTSRGRTIRFLFDGTDEEFRKNIEILGETPLPKYIKRKATAMDKERYQTIFAKHEGAVAAPTAGMHFSRELMKRLELKGINFAEVTLHIGLGTFRTVEVEDLTKHKMDSEQFIIEESQAKIVNKALENKKRICAVGTTSMRAIESAVSSGKMLKPANDWTSKFIFPPYDFSIANSMITNFHTPESTLLMMISAFGGYEYVRHAYEVALKEKYRFYSYGDAMLII

SEQ ID NO: 70134 - protein, 349 aa, unidentified
  source 1..349: note = Pedobacter xixiisoli
  REGION 1..349: note = tr|A0A285ZRL8|A0A285ZRL8_9SPHI S-adenosylmethionine:tRNA ribosyltransferase-isomerase; OS = Pedobacter xixiisoli OX=1476464 GN=queA PE=3 SV=1
MKLSQFKFNLPDSLLANDPAEERDEARLMVLHKDSGKIEHKIFKDVLGYFDDKDVMILNNTKVFPARLYGNKEKTGATIEVFLLRELNKELRLWDVLVDPARKIRVGNKLYFGDDDLLVAEVVDNTTSRGRTIRFLFDGTDEEFRRNVEILGETPLPKYIKRKATEKDKERYQTIFAKHEGAVAAPTAGLHFSRELMKRLELKGVEFAEVTLHVGLGTFRQVEVEDLTKHKMDSEQFIIEQKDANLVNKALEEKRKICAVGTTSMRAIESAVSANKTLKAANDWTSKFIFPPYDFSIANSMITNFHTSESTLLMMVSAFGGYENVMNAYEVAVKEKYRFYSYGDAMLII

SEQ ID NO: 70135 - protein, 349 aa, unidentified
  source 1..349: note = Pedobacter yonginense
  REGION 1..349: note = tr|A0A317ER41|A0A317ER41_9SPHI S-adenosylmethionine:tRNA ribosyltransferase-isomerase; OS = Pedobacter yonginense OX=651869 GN=queA PE=3 SV=1
MKLSQFKFNLPESLIANNPAEQRDEARLMVLHKDSGKIEHKIFKDVLGYFDDKDVMILNNTKVFPARLYGNKEKTGATIEVFLLRELNKELRLWDVLVDPARKIRVGNKLYFGDNDLLVAEVVDNTTSRGRTIRFLFEGTDEEFRRNVEILGETPLPKYIKRKATAEDKERYQTIFAKHEGAVAAPTAGLHFSRELMKRLELKGVNFAEVTLHVGLGTFRTVEVEDLTKHKMDSEQFIIEQKDANIVNKALEEKRRICAVGTTSMRSIESAVSANRTLKAANDWTSKFIFPPYDFSIANSMITNFHTPESTLLMMVSAFGGYENVMNAYEVAVKEKYKFYSYGDAMLII

SEQ ID NO: 70136 - protein, 349 aa, unidentified
  source 1..349: note = Pedobacter yulinensis
  REGION 1..349: note = tr|A0A2T3HLJ0|A0A2T3HLJ0_9SPHI S-adenosylmethionine:tRNA ribosyltransferase-isomerase; OS = Pedobacter yulinensis OX=2126353 GN=queA PE=3 SV=1
MKLSQFKFNLPDSLIASTPSENRDEARLMVLHKDSGKIEHKIFKDVLDYFDDKDVMILNNTKVFPARLYGNKEKTGATIEVFLLRELNKELRLWDVLVDPARKIRVGNKLYFGDDDLLVAEVVDNTTSRGRTIRFLFDGTDEEFRKNVEILGETPLPKYIKRKATAQDKERYQTIFAKHEGAVAAPTAGLHFSRELMKRLELKGIEFAEVTLHVGLGTFRPVEVEDLTKHKMDSEQFIIEDRDARIVNKALEEKRRICAVGTTSMRAIESAVSASHTLKAASDWTSKFIFPPYDFSIANSMITNFHTPESTLLMMIAAFGGYDNVMNAYEIAVKEKYRFYSYGDAMLII

SEQ ID NO: 70137 - protein, 358 aa, unidentified
  source 1..358: note = Pedosphaera parvula
  REGION 1..358: note = tr|B9XIH7|B9XIH7_PEDPL S-adenosylmethionine:tRNA ribosyltransferase-isomerase OS=Pedosphaera parvula (strain Ellin514) OX=320771 GN=queA PE=3 SV=1
MRTSDFDFALPPELIAQAPTATRDQSRLLVLKRNTAEIAHRKFRDVLEFLKPGDVLVLNNSRVIPARLRALNARTNGQFEVLLLEEHATNDWWVMMRPGKRARIGTELVFRDKTGVVAHIRASVIDTNPEGHRRIHFTGTPNIIENLDALGEIPLPPYIERNSDKGLAEDDIRYQTVYAKPAGSVAAPTAGLHFTDELLHEIRSRGIQICFVTLHVGLGTFAPVKAETLSEHVMHEERYELSAETAQTITTAKHAGRRIIAVGTTSVRVLESVAAQHHGKLIAGKGRTRIFIHPPYSFSVVDVLLTNFHLPCSTLLMLVSAFAAPGEMRGREIVLAAYAEAVREKYRFFSYGDAMLVI

SEQ ID NO: 70138 - protein, 357 aa, unidentified
  source 1..357: note = Pedosphaera sp.
  REGION 1..357: note = tr|A0A2A2RVE0|A0A2A2RVE0_9BACT S-adenosylmethionine:tRNA ribosyltransferase-isomerase; OS = Pedosphaera sp. Tous-C6FEB OX=1982324 GN=queA PE=3 SV=1
MRTAEFDFTLPLDLIAQSPADARDGSRLLVLERRTGHVKHRRFRDILDLFGPGDVLVLNNSRVLRARLRGRKPSSGGEVELLLVEEVGVNDWWTLLRPGKRVRPGTEIQLCTNTGDPSTLRAIVQEKNAEGHCRASFIGTPNILAELEAHGEIPLPPYIGRAAGAGDDTRYQTVFARSAGSVAAPTAGLHFTPEVLAELRARGVHIHFVTLHVGLGTFAPVKADHLSDHVMHEERFELPADTAEAINAAKREGRRVIAVGTTTVRVLESAAALSTLNSQLSTQRGRTRIFIHPPYRFRIVDALLTNFHLPQSTLLMLVSAFAAPGELRGREQILAAYAEAVRERYRFFSYGDAMLIL

SEQ ID NO: 70139 - protein, 370 aa, unidentified
  source 1..370: note = Pedosphaera sp.
  REGION 1..370: note = tr|A0A2D5VZ99|A0A2D5VZ99_9BACT S-adenosylmethionine:tRNA ribosyltransferase-isomerase; OS = Pedosphaera sp. OX=2024890 GN=queA PE=3 SV=1
  VARIANT 299: note = Xaa can be any naturally occurring amino acid
  VARIANT 352: note = Xaa can be any naturally occurring amino acid
MVSGQQLTSSLRTDQFDFHLPGELIAQKPIDGPRDRSRLLVYERKSHQLKHSQFRDHAAWLQPGDLLIMNNSKVIPARLRGRKAGSGGKFEIFLLEEITHNQWLVMLKPGKRTRPGTLIEIQTAAERTQPLMCEVISKTTDGHYCVTFHGSKRVDEQLEDIGEIPLPPYIQRTGKPSKEDQERYQTVYADKNGSVAAPTAGLHYTPELLETLRKHGVQLSWVTLHVGLGTFNPIKTEWATDHRMHEERYEISEDTMRAIQAAKKAGRRVIAVGTTSLRVLESVASIWSTDQPARPIKQXTDIFIYPPYRFGLTDGLITNFHLPQSSLMMLVSAFSSPGSLEGIQILKDLYAXAVKERYRFFSFGDAMMIL

SEQ ID NO: 70140 - protein, 349 aa, unidentified
  source 1..349: note = Pelagibaca abyssi
  REGION 1..349: note = tr|A0A1P8UPM8|A0A1P8UPM8_9RHOB S-adenosylmethionine:tRNA ribosyltransferase-isomerase; OS = Pelagibaca abyssi OX=1250539 GN=queA PE=3 SV=1
MKLSDFDFDLPEALIATRPAQPRSSARLLVAEGERITDAVVSDLGNWLRPGDRLVLNDTKVIPARLFGTRSRQSAQGLTRAQIEVTLLEPRAGGLWAALVKPLKKLREGETVVFSDALSATLEAREEGQGLFRFNLAGEDFDAALAEAGAMPLPPYIAAKRAADARDKQDYQTVWAKHSGAVAAPTASLHFDAPLLAALRERGVAFTHVTLHVGAGTFLPVKVDDVTTHKMHGEWGEVSAAAAAEIAATKAAGGRVIPVGTTALRLIETAARETGAIVPWTGVTEIFIYPGFEFRVTDALMTNFHLPKSTLMMLVSALMGQERIKRIYAHAVAERYRFFSYGDSSLLLP

SEQ ID NO: 70141 - protein, 349 aa, Pelagibaca sp.
  REGION 1..349: note = tr|A0A2D6B348|A0A2D6B348_9RHOB S-adenosylmethionine:tRNA ribosyltransferase-isomerase; OS = Pelagibaca sp. OX=1979400 GN=queA PE=3 SV=1
MHLSDFDFDLPDALIATRPANPRSSARLLVAEGDTITDAVVRDLTQWLRLGDRLVLNDTKVIPARLSGARTRESAQGVTQAQIEITLLEPRPGGLWAALVKPLKKLREGETVVFSEALSATLEARENGQGLLRFNLEGEDFDAALAEAGAMPLPPYIAAKRAADAQDKTDYQTVWAERTGAVAAPTASLHFDAGLLAALEAHGVAFTKVTLHVGAGTFLPVKVDDVTTHKMHGEWGEVSESAAAEIAATKAAGGRVIPVGTTALRLLETAARDSGAIAPWQGVTDIFIYPGFEFRVTDALMTNFHLPKSTLMMLVSALMGRERMMGIYEHAISERYRFFSYGDSSLLIP

SEQ ID NO: 70142 - protein, 337 aa, unidentified
  source 1..337: note = Pelagibacteraceae bacterium
  REGION 1..337: note = tr|A0A1Z9SP38|A0A1Z9SP38_9PROT S-adenosylmethionine:tRNA ribosyltransferase-isomerase; OS = Pelagibacteraceae bacterium TMED258 OX=1986820 GN=queA; PE = 3 SV=1
  VARIANT 2: note = Xaa can be any naturally occurring amino acid
  VARIANT 17: note = Xaa can be any naturally occurring amino acid
  VARIANT 23: note = Xaa can be any naturally occurring amino acid
  VARIANT 33: note = Xaa can be any naturally occurring amino acid
  VARIANT 36: note = Xaa can be any naturally occurring amino acid
  VARIANT 43: note = Xaa can be any naturally occurring amino acid
  VARIANT 59: note = Xaa can be any naturally occurring amino acid
  VARIANT 65: note = Xaa can be any naturally occurring amino acid
  VARIANT 73..74: note = Xaa can be any naturally occurring amino acid
  VARIANT 82..83: note = Xaa can be any naturally occurring amino acid
  VARIANT 99: note = Xaa can be any naturally occurring amino acid
  VARIANT 104: note = Xaa can be any naturally occurring amino acid
  VARIANT 106: note = Xaa can be any naturally occurring amino acid
  VARIANT 118: note = Xaa can be any naturally occurring amino acid
  VARIANT 122: note = Xaa can be any naturally occurring amino acid
  VARIANT 129: note = Xaa can be any naturally occurring amino acid
  VARIANT 133: note = Xaa can be any naturally occurring amino acid
  VARIANT 152: note = Xaa can be any naturally occurring amino acid
MXISHFDFDLPQELIAXRPIQPXNISRLLIGSXPVXHDNFNNXLNYIEKNDLLVVNNSXVIPAYXSIKHKSNXXRITFHKKXXESLWKAFIKPGKKINXGDKIXLXDSYFLDVIEKTXEGDXIIKINGXEDIXFRNFGKMPLPPYILKSRNXDKNDFNDYQTVYASHDGSIAAPTAGLHFNNEIFNKIKDRDQLAEITLHVGAGTFMPIRDNIENHKMHSELGFISNEVIELIKEKKSKKGRIISVGTTSLRLLESAALSGELSPFSGKTDIFIKPGFKFKVVDMLLTNFHLPKSTLMLLVSAFSGIDKIQSIYRTAIENDYRFFSYGDVSLLYRNE

SEQ ID NO: 70143 - protein, 93 aa, unidentified
  source 1..93: note = Pelagibacteraceae bacterium
  REGION 1..93: note = tr|A0A1Z8L578|A0A1Z8L578_9PROT S-adenosylmethionine:tRNA ribosyltransferase-isomerase; OS = Pelagibacteraceae bacterium TMED13 OX=1986627; GN = CBB73_04955 PE=3 SV=1
  VARIANT 51: note = Xaa can be any naturally occurring amino acid
  VARIANT 61: note = Xaa can be any naturally occurring amino acid
  VARIANT 80: note = Xaa can be any naturally occurring amino acid
  VARIANT 89: note = Xaa can be any naturally occurring amino acid
MKLEDLDFEINSDLIALRPKKPRDESKLLISEDPLKIIKFKNIIETLRPGXVLVVNDTKVXRSDITGYINESKVSINLNXIVDKKKKIXVCIY

SEQ ID NO: 70144 - protein, 344 aa, unidentified
  source 1..344: note = Pelagibacterales bacterium
  REGION 1..344: note = tr|A0A2E5MSH0|A0A2E5MSH0_9PROT S-adenosylmethionine:tRNA ribosyltransferase-isomerase; OS = Pelagibacterales bacterium OX=2026776 GN=queA PE=3 SV=1
MNIDAFEFNLPKQLIAQSSLEQPDKSRLLYISDKSIRDYNTLDLSNILKPGDLLIANNTKVINSRIIGKIEHKSFSITMLNEYEIGIWQALVKGSKKLNLGDNVILPNNMLISVQSKGERGIVYFNVNLNKTDFINYLNHYGELPLPPYIKLDDKSNNIINYQTLFAKNYGAVAAPTAGLHFTNNLKTNLANKNINICEITLHVGAGTFLPIEVSDISKHNMHSEYFSIDDEVANKINLTKKNGGRIIAIGTTVLRALESSCDVNGYVNSFKGDTSIFISPGYKIKSTDYLLTNFHLPKSTLFILVCAYAGIKTMHKAYQHAIDKKYRFYSLGDACLIKKTHIL

SEQ ID NO: 70145 - protein, 342 aa, unidentified
  source 1..342: note = Pelagibacterales bacterium
  REGION 1..342: note = tr|A0A2E4X5Q8|A0A2E4X5Q8_9PROT S-adenosylmethionine:tRNA ribosyltransferase-isomerase; OS = Pelagibacterales bacterium OX=2026776 GN=queA PE=3 SV=1
MIIDDFDYNLPKELIAQRPASPRSSSKLLVTEKNLITSFNKLYTFLDKNDVLIINNTKVIPAVIIGKYEGKKIKITLHTKLSTRTWIAFAKPAKLLEAGSILSFRDDVSAKVLNKNEAHVELNFNLSMKGFNSFLNRYGELPIPPYIKTKSTKIKNEKYYQSIFSKNFGAYASPTASLHFDDLLLRNIKKKKIDIIEITLHVGAGTFLPLNNKIVEKNKLHKEKGYISAESAKKISDALENKKNIVALGTTVLRLLEDCFLKYSDIQSYNEETELFIYPGFKFNVVNKLITNFHLPKSSLFLLVCAFGGKKNILKCYNKAVEKKMRFFSYGDGMIINRYDKI

SEQ ID NO: 70146 - protein, 357 aa, Pelagibacterium halotolerans
  REGION 1..357: note = tr|G4R9Q7|G4R9Q7_PELHB S-adenosylmethionine:tRNA ribosyltransferase-isomerase OS=Pelagibacterium halotolerans (strain DSM 22347 / JCM 15775 / CGMCC 1.7692 / B2) OX=1 082931 GN=queA PE=3 SV=1
MKVDLFDFELPEDRIALHPVSPRDSAKMLVVAGNGALSDRVVTDLETILRAGDVLVVNDTRVIPAELRGTRHRGAFAASVSFNLHKRVDGNTWLAFARPAKRLKAGDRVVFGATSEVCMLDELAASVKAVEDGQVTLAFDFSDAVLDEAIKARGAMPLPPYIGAKRDIEERDKTDYQTVYAEHDGAVAAPTAGLHFTPELLERLEGRGIAIEHVTLHVGAGTFLPMKADDTEDHTMHAEWGVVSPETVERINAAKAAGGRIVAVGTTSLRLLESAARKTGALEPFADETDIFITPGFTFGVVDVLMTNFHLPRSTLFMLVSAFSGLETMHKAYKHAIDHHYRFYSYGDSSLLFRADR

SEQ ID NO: 70147 - protein, 357 aa, Pelagibacterium luteolum
  REGION 1..357: note = tr|A0A1G7VXP2|A0A1G7VXP2_9RHIZ S-adenosylmethionine:tRNA ribosyltransferase-isomerase; OS = Pelagibacterium luteolum OX=440168 GN=queA PE=3 SV=1
MKVDLFDFDLPDRHIALHPVTPRDSAKMLVVSPDVELSDQVVTDLEALLVPGDVLVVNDTRVIPADLRGTRHRGEFSASVSFNLHKRENGNTWLAFARPAKRLKAGDRVVFGATTEVCMLDELSATVKAVEDGQVTLAFDFSDAILDEAIKARGAMPLPPYIGAKRGIEDRDKTDYQTVYAQHDGAVAAPTAGLHFTPELLARLEAKGVTIERVTLHVGAGTFLPMKADDTDDHKMHAEWGVVSPETVQRINAARAEGGRVVAVGTTSLRLLESAARKTGTLEPFADETDIFITPGFNFRVVDVLMTNFHLPRSTLFMLVSAFSGLETMRKAYKHAIDTDYRFYSYGDSSLLFRSAP

SEQ ID NO: 70148 - protein, 360 aa, Pelagibacterium sp.
  REGION 1..360: note = tr|A0A1E4DXY0|A0A1E4DXY0_9RHIZ S-adenosylmethionine:tRNA ribosyltransferase-isomerase; OS = Pelagibacterium sp. SCN 63-126 OX=1660123 GN=queA PE=3; SV = 1
MRVSDFDFDLPENLIALHPAEPRDSARLLVVEEGKPLLDRHIPDLKQLLRPGDVLVVNDTRVLPAELKGTRIRGENRAGVSFNLHKRVDAHTWRAFARPAKKLALLDELELGNGGAADALLARVSGRGESGEVTLEFELGGAALDEAIKSHGAMPLPPYIGAKRGVEERDKVDYQTVYAAEDGAVAAPTAGLHFTESLLQQLAEMDVAMERVTLHVGAGTFLPMKVDDTDDHVMHSEWGEIDQATVERIKARRDAGGRVVAVGTTSLRLLETASLATGELMPFVGDTDIFITPGFRFRTVDLLMTNFHLPKSTLFMLVSAFAGFDTMKAAYGHAIADGYRFYSYGDSSLLHRAPHPRDRA

SEQ ID NO: 70149 - protein, 357 aa, Pelagibacterium sp.
  REGION 1..357: note = tr|A0A2E7FT95|A0A2E7FT95_9RHIZ S-adenosylmethionine:tRNA ribosyltransferase-isomerase; OS = Pelagibacterium sp. OX=1967288 GN=queA PE=3 SV=1
MKVDLFDFDLPEDRIALHPVSPRDSAKMLVVGEEGALSDRVVTDLEAILRAGDVLVVNDTRVIPAELRGRRHRGEFSASVSFNLHKRVDGNTWLAFARPAKRLKSGDRVVFGATSEVCMLDELAATVKAVEDGQVTLGFDLSDAVLDEAIKARGAMPLPPYIGAKRDIEERDKTDYQTVYAEHDGAVAAPTAGLHFTPELLERLESKGVGIEHVTLHVGAGTFLPMKADDTEDHQMHAEWGVVSPETVERIKAAKATGGRIVAVGTTSLRLLESAARKSGTLEPFADETDIFITPGFGFRVVDVLMTNFHLPRSTLFMLVSAFSGLETMHRAYKHAIDQNYRFYSYGDSSLLFRADR

SEQ ID NO: 70150 - protein, 356 aa, unidentified
  source 1..356: note = Pelagibaculum spongiae
  REGION 1..356: note = tr|A0A2V1GZ89|A0A2V1GZ89_9GAMM S-adenosylmethionine:tRNA ribosyltransferase-isomerase; OS = Pelagibaculum spongiae OX=2080658 GN=queA PE=3 SV=1
MKLSDFQFDLPDEQIARFPLADRTASRLMEVQGATGELTQRHFADIETLLQPGDLLVLNNTRVIPARMYGQKASGGKLEVLVERLLDDKRALCHIRSSKSPKPGSMIRLEGLVDAEIEGREDALFLVKVQSEQTFLEVLDAHGHMPLPPYIDRPDENSDRERYQTVFGEHAGAVAAPTAGLHFDQSLLDRLVSKGVEIARVTLHVGAGTFQPVRVDNILEHHMHSEWIKVEQPVCDQVAACKARGGRVIAVGTTAVRSLETAAMSGELKPFEGDTDIFIYPGYRFQVVDCMVTNFHLSESTLLMLVSAFAGYRNMMQAYQQAVTDKFRFFSYGDAMFLHRCDNPDLPPSAMDRSSD

SEQ ID NO: 70151 - protein, 348 aa, Pelagicola litoralis
  REGION 1..348: note = tr|A0A4U7N6G4|A0A4U7N6G4_9RHOB S-adenosylmethionine:tRNA ribosyltransferase-isomerase; OS = Pelagicola litoralis OX=420403 GN=queA PE=3 SV=1
MQLSDFDFDLPDHLIATRPAVPRTSARLLVSNGPQTVDATVGDMPEWLRPGDRLVLNDTKVIPARLTGARHRVGPEGPTSAKIEVTLLEPRADGQWSALLKPLKKVREGEEIVFADNFKATLLHKDAGQAVLQFDLRGEDFDGALAAAGAMPLPPYIAAKRAADEQDKTDYQTVWAEHSGAVAAPTASLHFDQALLDTLAQMGVTFTFVTLHVGAGTFLPVKVDNVLDHKMHSEWGRVSPEAARDIQDTKANGGRVIPVGTTALRLIETAARSGQIQPWQGGTDIFIYPGFTFHVADALITNFHLPKSTLMMLVSAFVGADRIREIYQHAVSKEYRFFSYGDASLLIP

SEQ ID NO: 70152 - protein, 348 aa, unidentified
  source 1..348: note = Pelagicola litorisediminis
  REGION 1..348: note = tr|A0A1Y5R5P2|A0A1Y5R5P2_9RHOB S-adenosylmethionine:tRNA ribosyltransferase-isomerase; OS = Pelagicola litorisediminis OX=1312363 GN=queA PE=3 SV=1
MKLSDFDFALPEDLIATRPARPRSSARMLVATGDSITDACVSDLGQWLRKGDRLVLNDTRVIPARLTGQRRRSGDQGDSVARIEVTLLDPQADGHWTALVKPLKKLREGEEVRFGAGLSAILTAKVDGQAVLWFNLSGDEFDDALARAGAMPLPPYIAAKRPADAQDKTDYQTVFARNPGAVAAPTASLHFDEQLLQGLRDSGVAFSHVTLHVGAGTFLPVKVEDVTTHKMHAEWGEVNAQAAEEIAATKAAGGRIIPVGTTALRLIESAARGGQIAPWSGETDIFIYPGFEFRVADALMTNFHLPCSTLMMLVSALMGQDRIRRIYGHAIAEKYRFFSYGDASLLIP

SEQ ID NO: 70153 - protein, 351 aa, Pelagicola sp.
  REGION 1..351: note = tr|A0A2U2CTZ9|A0A2U2CTZ9_9RHOB S-adenosylmethionine:tRNA ribosyltransferase-isomerase; OS = Pelagicola sp. LXJ1103 OX=2175247 GN=queA PE=3 SV=1
MQLSDFDFELPEALIATRPARPRSSARLLVAEGAQITDAVVTDLVEWLRPGDRLVLNDTKVIPARLSGSRARESAQGATEARIEVTLLEPQAEAVVWSALVKPLKKLKIGERVIFSDMLSADLVDKAEGQGLLRFNLTGDDFDAALAEAGAMPLPPYIAAKRAADSQDTEDYQTVWARRSGAVAAPTASLHFDAPLLEALAARGVAFSHVTLHVGAGTFLPVKVEDVTTHKMHAEWGEVTPAAAAEMAATRKAGGRIIPVGTTALRLIESAAAASGEIAAWEGETDIFIYPGFTFRAADALMTNFHLPKSTLMMLVSALMGQETVRNIYAHAVAEKYRFFSYGDASLLIPR

SEQ ID NO: 70154 - protein, 349 aa, unidentified
  source 1..349: note = Pelagimonas varians
  REGION 1..349: note = tr|A0A238KDL2|A0A238KDL2_9RHOB S-adenosylmethionine:tRNA ribosyltransferase-isomerase; OS = Pelagimonas varians OX=696760 GN=queA PE=3 SV=1
MNLSDFDFDLPESLIATRPAKPRSSARLLVAKGGQVTDGVVTDLVNWLQPGDRLVLNDTKVIPARLSGIRKRTSAQGDTEAKIEVTLLEPRADGCWSALVKPLKKLKEGEEVRFSDDLAAVLEAKEDGQGHLRFNLIGDDFDAALNAAGAMPLPPYIAAKRAADAQDHEDYQTVWAANTGAVAAPTASLHFDEPLLAQLRDMGVQFSHVTLHVGAGTFLPVKVDDITTHKMHGEWGSVSAQAVEEIEATKAAGGRVIPVGTTALRLIESAARGGQIAQFEGVTDIFIYPGFDFHVADALMTNFHLPKSTLMMLVAALVGHDRILGIYDHAIRENYRFFSYGDASLLFPG

SEQ ID NO: 70155 - protein, 342 aa, unidentified
  source 1..342: note = Pelagirhabdus alkalitolerans
  REGION 1..342: note = tr|A0A1G6HQJ8|A0A1G6HQJ8_9BACI S-adenosylmethionine:tRNA ribosyltransferase-isomerase; OS = Pelagirhabdus alkalitolerans OX=1612202 GN=queA PE=3; SV = 1
MKIEDFDFELPEDLIAQTPLKDRSSSRLLVMNRQEQSIEHQRFAQIESYLKRGDCLVLNNTKVLPARLYGVKQDTGGKVELLLLHQRENDEWEVLVKPAKKVKEGTVIEFGDGRLRATCTEIQAHGGRVVTFDYKGIFLEVLNELGEMPLPPYIKEQLDDQDRYQTVYAEEEGSAAAPTAGLHFTEELLDRLKYKGVDIAFVTLHVGLGTFRPVSVDDIEKHDMHAEFYHVSEEAAEQIEETKKSGGRIISVGTTSIRTLETVASLNEGKVVPSSGWTSIFIYPPYTFKVVDGLITNFHLPKSTLMMLVSAFASRDFIMEAYQAAIDEKYRFFSFGDAMFII

SEQ ID NO: 70156 - protein, 357 aa, unidentified
  source 1..357: note = Pelagivirga sediminicola
  REGION 1..357: note = tr|A0A2T7GCC3|A0A2T7GCC3_9RHOB S-adenosylmethionine:tRNA ribosyltransferase-isomerase; OS = Pelagivirga sediminicola OX=2170575 GN=queA PE=3 SV=1
MKLSDFDYDLPETLIATRPARPRSAARLLVAEGSRITDAHVGDLPDWLRPGDRLVLNDTRVIPARLSGTRRRSGAQGETEARIEVTLLEPRADGAWAAMVKPLKKLAMGETVVFSAALSATLEGKADGQAHLRFNLAGDDFDAALEQAGAMPLPPYIAARRPADAADRDDYQTVWARHSGAVAAPTASLHFDDALLAALTAKGVALTHVTLHVGAGTFLPVKVDDVTTHKMHAEWGEVTPQAAAEIAATRAAGGRVIPVGTTALRLIESAARASGAIAPWQGETDIFIYPGFDFRVTDALMTNFHLPKSTLMMLVSALMGHETVRQIYAHAVTHEYRFFSYGDASLLIPRPKTAKAD

SEQ ID NO: 70157 - protein, 351 aa, unidentified
  source 1..351: note = Pelistega indica
  REGION 1..351: note = tr|V8FXC3|V8FXC3_9BURK S-adenosylmethionine:tRNA ribosyltransferase-isomerase OS=Pelistega indica; OX = 1414851 GN=queA PE=3 SV=1
MIDPNLHLADFDYELPTELIAQKPTAQRTQSRLLRIDAQRHWHDHHFIDLPSFLKPNDLLVFNNTKVIKARLFGTKESGGKIEGLVERILTPTQALMHIKSSKSPKPGSKIIFANAIEATVLGRQDDLFGVEFAVDILTTLDQYGSLPLPPYIQHAADEQDSERYQTVYASPVGAVAAPTAGLHFDEQMLETLKQQGINTSFVTLHVGAGTFQPVRVDKISDHIMHAEWYEVSEETVAAIKHCRDLGGRVFAIGTTSVRALESAAIQAGTIEGKRIPKPHRGDTRLFMTPGFDIKVVDGLLTNFHLPQSTLLMLVSAFIGIDNMRAAYAYAIEQKYRFFSYGDAMLIEPTF

SEQ ID NO: 70158 - protein, 343 aa, Pelobacter acetylenicus
  REGION 1..343: note = tr|A0A1L3GJA9|A0A1L3GJA9_PELAE S-adenosylmethionine:tRNA ribosyltransferase-isomerase; OS = Pelobacter acetylenicus OX=29542 GN=queA PE=3 SV=1
MRLNDFDFELPEALIAQHPLQERQSSRLMVLNRETQQAQLARFAEIVDWFRAGDVLVVNDTRVIPARLLGRKETGGRIEVFLVRRLPGDDETWACLTRCSKSPRTGMRLCFGEGLEGVVTEGGASPYRHVRFECPGDFAAVLGRVGRIPLPPYIRREATEEDHIRYQTVFARAAGAVAAPTAGLHFTGGILQALRTRGVDIRTLTLHVGLGTFLPVRTDNLAEHRMHEENYIVPADTAAAVNLAKQEGRRVIALGTTSTRTLEYAVDDRGRLCEGQGSCDLFIRPGFDFRIIDGLITNFHLPCSTLLMLVAAFAGRDFVLEAYRRAVAERFRFFSYGDCMLIL

SEQ ID NO: 70159 - protein, 343 aa, Pelobacter carbinolicus
  REGION 1..343: note = sp|Q3A3C1|QUEA_PELCD S-adenosylmethionine:tRNA ribosyltransferase-isomerase OS=Pelobacter carbinolicus (strain DSM 2380 / NBRC 103641 / GraBd1) OX=338963 GN=queA; PE = 3 SV=1
MRLSDFDFELPEELIAQHPLAQRQASRLMVLNRVTQQLQLAQFADIADWFRPGDVLVVNDTRVIPARLIGRKQTGGRIEVFLVRRLPGVEEVWACLTKCSKSPRPGTRLILGEGLEGTVVEGGEPPYRHVRFSFQGDFSQVLEQVGRIPLPPYIRREATPDDRSRYQTVFAREAGAVAAPTAGLHFTDEILDVLRAKGVEIQPLTLHVGLGTFLPMRTDDITEHRMHEENYFVPEGTAAAVNRAKDDGRRVIALGTTSTRTLEYAVDEQGRLQAGAGTCDLFIRPGFKFRIVDGLVTNFHLPCSTLLVLVAALAGREFILEAYQRAVAEKFRFFSYGDCMLIL

SEQ ID NO: 70160 - protein, 343 aa, Pelobacter propionicus
  REGION 1..343: note = sp|A1APZ3|QUEA_PELPD S-adenosylmethionine:tRNA ribosyltransferase-isomerase OS=Pelobacter propionicus (strain DSM 2379 / NBRC 103807 / OttBd1) OX=338966 GN=queA; PE = 3SV=1
MLVKEFDYHLPEELIARYPAPERDGSRLMLLNRESGTIGHGLFRDIADHLRPGDLLVLNDTRVIPARLFGRKATGGRVEIFLVRRQETQAERWSCLMRSSKGMRPGQLITLAGAMTALVVERLEPEGWLLEFQGAEPFSVWLEREGEMPLPPYLQRPAESGDQLRYQTVFARSAGAVAAPTAGLHFTPELLERLAERGVATACLTLHTGPGTFQPLRVERVQDHRIHSERYHISAETCQAIAETKQRGGRVVAVGTTSARTLEYAADEKGGLCPGSGDADIFIYPGYRFRVVDALVTNFHLPESTLIMLVSAFAGKEYVFHAYHEAARLGYRFYSYGDAMFIE

SEQ ID NO: 70161 - protein, 343 aa, Pelobacter sp.
  REGION 1..343: note = tr|A0A1L3GMQ9|A0A1L3GMQ9_9DELT S-adenosylmethionine:tRNA ribosyltransferase-isomerase; OS = Pelobacter sp. SFB93 OX=1842532 GN=queA PE=3 SV=1
MHLSDFDFDLPEELIAQEPLAERTGSRLMVLDRATGNLTIGGFSDIVDHFRSGDVLVVNDTRVIPARLLGCKESGGKVEVLLVRRLAGKEETWICLTKASKGPRVGTRLLLGESLTATVVEGGEDPYKHIQFASEGDFLQQIEQIGRMPLPPYIRRDDSQLDKERYQTVFAQNAGAVAAPTAGLHFTPEILEQLRNKGVEIHPLTLHVGIGTFLPVRVDNIREHRMHEEHFTVPATTAEAVNLARAAGRRIFALGTTSTRTLEYAVDDQGRLQAGSGACDLFIYPGYRFRTVDAMLTNFHLPRSTLLMLVSAFAGREAVLAAYRRAVAEGFRFFSYGDCMLIL

SEQ ID NO: 70162 - protein, 349 aa, unidentified
  source 1..349: note = Pelobium manganitolerans
  REGION 1..349: note = tr|A0A419S5M6|A0A419S5M6_9SPHI S-adenosylmethionine:tRNA ribosyltransferase-isomerase; OS = Pelobium manganitolerans OX=1842495 GN=queA PE=3 SV=1
MKLSQFKFHLPESLIAHTPAEARDESRLMVLDRKTGKIEHKIFKDVLNYFDEKDVMILNNTKVFPARLYGNKEKTGATIEVFLLRELNKELRLWDVLVDPARKIRVGNKLYFGDDDLLVAEVVDNTTSRGRTIRFLFDGTDEEFRQNIEILGETPLPKYIKRKPTAEDKERYQTIFAKNEGAVAAPTAGLHFSRELLKRLELKGVEFAEVTLHVGLGTFRQVEVEDLTKHKMDSEQIIIDEKAANIVNKAIESKNRVCAVGTTAMRTIESAVSANHTLKPINDWTSKFIFPPYDFSIANSMITNFHTPESTLLMMVAAFGGYDYVMHAYEEAVKEKYRFYSYGDAMLII

SEQ ID NO: 70163 - protein, 346 aa, unidentified
  source 1..346: note = Pelodictyon luteolum
  REGION 1..346: note = tr|Q3B3A8|Q3B3A8_PELLD S-adenosylmethionine:tRNA ribosyltransferase-isomerase OS=Pelodictyon luteolum (strain DSM 273 / 2530) OX=319225 GN=queA PE=3 SV=1
MRLSNFRYTLPKTKIADHPADPRDSCKMMVLNRRKKDIEHKVFEDIASYFKKGDLLILNNSRVFPAKIFGQKEKTDAKIEVFLLRVLNREAGLWDVLVDPARKVRVGNKIYFDEDVVAEVVDNTTSRGRTIRFLNPEIDVFSLVDRIGNVPLPPYFTRKSKDSDKENYQTVYANQTGSVVAPMAGLHFTMPLLQKIQKIGVKVLPITLHPSLSTFNAIEVEDVSKHKMDSEYFNIPYQTAMEINETKMKKSGRVIAVGTTTCRVLEANATVDGKIKFGQGWTDKFIYPPYQFKVTDALVTNFQQPETTLLMVVSAFAEHRLLMDAYKVALKNDYKFLAYGDAMFIH

SEQ ID NO: 70164 - protein, 341 aa, unidentified
  source 1..341: note = Pelodictyon luteolum
  REGION 1..341: note = sp|Q3B5E2|QUEA_PELLD S-adenosylmethionine:tRNA ribosyltransferase-isomerase OS=Pelodictyon luteolum (strain DSM 273 / 2530) OX=319225 GN=queA PE=3 SV=1
MRVADFDYPLPEERIAKYPPLQRGSTRLLVICREGGTVSHARYRELDTFLRKGDLLVLNNTRVVKARLMAEKSTGAAIELMLLEKHGQEQSLVLFRGRVKQGDRLRSHGHEFLVEEIVDHGVARLSLPEGRSIQPVFEAHAEVPIPPYLRRPAEPVDRERYQTVFAEHAGSVAAPTASLNMTPELLLRLRDGGVETSSITLHVGLGTFLPIRVDSMEEHVMHREFYSIPAATIEKIRATKASGGRIIALGTTVTRALEHAALSLSGHSGPGPLEGEADIFIYPGCSFRLIDALLTNFHAPRSTVLMLTAAFAGPDLLRRAYREALDKEYRFLSYGDSTLIL

SEQ ID NO: 70165 - protein, 346 aa, unidentified
  source 1..346: note = Pelodictyon phaeoclathratiforme
  REGION 1..346: note = tr|B4SAG6|B4SAG6_PELPB S-adenosylmethionine:tRNA ribosyltransferase-isomerase OS=Pelodictyon phaeoclathratiforme (strain DSM 5477 / BU-1) OX=324925; GN = queA PE=3 SV=1
MRLSNFRYTLPKTKIADEPASPRGKCKMMVLNRRKKDIEHKVFEDIVSYFKKGDLLVLNNSRVFPAKIFGQKEKTDAKIEVFLLRVLNKEAGLWDVLVDPARKVRVGNKIYFEEDVVAEVVDNTTSRGRTIRFLNPDIDVFSLVERIGNIPLPPYFTRPPRESDKENYQTVYASETGAVVAPMAGLHFTMPILQKIQKIGVKILPITLHPSLSTFNAIEVEDVSKHKMDSEYFNIPYQTAMEINETKVNKTGRVIAVGTTTCRVLEANATVDGKIKFGRGWTDKFIYPPYQFKVTDALLTNFQQPETTLLMTVSAFAEHRLLMEAYKTALKEDYQFLAYGDAMFIH

SEQ ID NO: 70166 - protein, 341 aa, unidentified
  source 1..341: note = Pelodictyon phaeoclathratiforme
  REGION 1..341: note = sp|B4SEZ1|QUEA_PELPB S-adenosylmethionine:tRNA ribosyltransferase-isomerase OS=Pelodictyon phaeoclathratiforme (strain DSM 5477 / BU-1) OX=324925; GN = queA PE=3 SV=1
MRTGDFDYELSEEKIAKYPPAERGSTRLLVLNRHSGAVVHASYASLDLFLQPGDLLVLNNTRVLRARLYASKSTGARIELMLLEKHQEEQNRVLYRGKLKKGDKLMAHDQELLVTDIVDHGIARIAVCGERSLSDLFERFGGVPIPPYLKRDAEEVDRERYQTVFAELPGSVAAPTASLNMTSELLDTLRRKGVDMVTLTLHVGLGTFLPVRADALEEHVMHREYYSIPATLVEKIRKVKTTGGRVIAVGTTVTRALEHAGERMETFTGDAPLTGEADIFIYPGYQFRIIDCLLTNFHAPRSTVLMLTAAFAGPDHLRNAYQKALEEGYRFLSYGDSMFIA

SEQ ID NO: 70167 - protein, 336 aa, unidentified
  source 1..336: note = Pelolinea submarina
  REGION 1..336: note = tr|A0A347ZV43|A0A347ZV43_9CHLR S-adenosylmethionine:tRNA ribosyltransferase-isomerase; OS = Pelolinea submarina OX=913107 GN=queA PE=3 SV=1
MKTDDFNYDLPPELIAQVPLKTRTDSRLLVYSRAQDRITHTYFRDIRQYLRPGDLLVVNNTRVIPARLYAHKETGGKVEVLLLKKLENEQWEVLVGGKRVTTGKKLTFDEGVEGTIVAELEGSKRIIQFNQPVGPHLKDLGEMPLPPYIHEHLDDPERYQTVYAEVEGSAAAPTAGLHFTKEIMAELRSYGVIFTEVLLHVGLDTFAPVTEDTVEEHKIHTEWCQVSPESAALINQAKAEGRRVIAVGTTSVRTLESAMDGQGGVRPYADTTGLFIYPGYRFKVVDAMITNFHLPKSTLLMLVSAFAGFENMRRCYQAAIEEKYRFYSFGDAMLIE

SEQ ID NO: 70168 - protein, 354 aa, Pelomonas puraquae
  REGION 1..354: note = tr|A0A254N8Q5|A0A254N8Q5_9BURK S-adenosylmethionine:tRNA ribosyltransferase-isomerase; OS = Pelomonas puraquae OX=431059 GN=queA PE=3 SV=1
MSAAAPATYTVADFDFDLPPELIAQHPAAERSASRLLDGTGPTPVDRVFRDLPGLLSPGDLLVFNNTRVIKARLYGIKATGGHVEALVERVLPGTQEVWMHLRASKSPKPGSRVRFAEAFDAEVLGRCGPDNGLFHLRFDGDPFALLEAHGHVPLPPYIEHADSADDERRYQTVFAKEPGAVAAPTAALHFDEGVLAALTARGVEQAHVTLHVGAGTFQPVRVEKIDEHKMHSEWFEVPQATVEAVAACRARGGRVVAVGTTTLRALESAARDSTLQAGARETDIFITPGFEFRVVDRLVTNFHLPKSTLMMLVSALAGHAHVMALYRHAIAERYRFFSYGDAMLLSRAQATRP

SEQ ID NO: 70169 - protein, 355 aa, Pelomonas saccharophila
  REGION 1..355: note = tr|A0A4R3VBS4|A0A4R3VBS4_PELSC S-adenosylmethionine:tRNA ribosyltransferase-isomerase; OS = Pelomonas saccharophila OX=304 GN=queA PE=3 SV=1
MSSSPPTTHAVADFDFDLPPELIAQHPAPERSASRLLDAAGTEAVDRVFRELPELLAPGDLLVFNNTRVIKARLYGAKASGGAVEALVERVLPGTREVWMHLRASKSPKPGSRVRFAEAFDAEVLGRCGPDNGLFHLRFDGDPFALLEAHGHVPLPPYIDHADEAEDERRYQTVFAKQPGAVAAPTAALHFDEALLARLAARGVASAHVTLHVGAGTFQPVRVQTLAEHKMHSEWFDVPQPTVDAVAACRARSGGVVAVGTTTLRALESAARGGQLQAGARETDIFITPGFEFRVVDRLVTNFHLPRSTLMMLVSAFAGHELVMALYSHAIRERYRFFSYGDAMLLRRATIPAPC

SEQ ID NO: 70170 - protein, 354 aa, Pelomonas sp.
  REGION 1..354: note = tr|A0A0Q7B4Y3|A0A0Q7B4Y3_9BURK S-adenosylmethionine:tRNA ribosyltransferase-isomerase; OS = Pelomonas sp. Root405 OX=1736529 GN=queA PE=3 SV=1
MTTSAGSTHTVADFDFELPPELIAQHPAAERSASRLLDASGPEAADRVFRELPTLLQAGDLLVFNNTRVIKARLYGVKSSGGAVEALVERVLPGTQEVWMHLRASKSPKPGGRVRFADAFDAEMLGRCGPDNGLFHLRFDGDPFALLEAHGHVPLPPYIAHADGEDDVRRYQTVFAKEPGAVAAPTAALHFDEALLARLAERGVERAHVTLHVGAGTFQPVRVEQLSEHKMHSEWFDVPQSTVDAVAACRARGGRVVAVGTTTLRALESAARGGELVAGSRETDIFITPGFQFQVVDRLVTNFHLPRSTLMMLVSAFAGYDKVMALYRHAIAQRYRFFSYGDAMLLSRTQATRP

SEQ ID NO: 70171 - protein, 290 aa, Pelomonas sp.
  REGION 1..290: note = tr|A0A2R7SRT1|A0A2R7SRT1_9BURK S-adenosylmethionine:tRNA ribosyltransferase-isomerase (Fragment) OS=Pelomonas sp. HMWF004 OX=2056841; GN = DBR42_14720 PE=3 SV=1
MNTSAAAAYTVADFDFDLPPELIAQHPAAERSASRLLDATAPQPVDRIFRDLPGLLQPGDLLVFNNTQVIKARLYGVKATGGNVEALVERVLPGTREVWMHLRASKSPKPGSRIRFAHAFNAEVLGRCGPDGGLFHLRFDGDPFALLEAHGHVPLPPYIAHADDADDVHRYQTVFATAPGAVAAPTAALHFDAAVLAALAERGVGTAEVTLHVGAGTFQPVRVDRIAEHKMHSEWCHVSPETAARITATRAAGGRVLAVGTTTLRTLESAAVAARQAGSAELLQTGARET

SEQ ID NO: 70172 - protein, 339 aa, Pelosinus fermentans
  REGION 1..339: note = tr|I9AZT4|I9AZT4_9FIRM S-adenosylmethionine:tRNA ribosyltransferase-isomerase OS=Pelosinus fermentans B4; OX = 1149862 GN=queA PE=3 SV=1
MLLSEFDYFLPEELIAQHPCEPRDHSRLLMLDKNTGAISHHYFFDLLQYLNAGDTLVFNDTRVIPARLIGAKSETGGKVEVFLLNRKSESDWEALVKPGKKARPGAIIVFSDRLSCEILESTDFGGRIVRFRYEGIFEEILDELGETPLPPYITEQLADKERYQTVYARERGSAAAPTAGLHFTMDLMKRIEEKGIHLAFVTLHVGLGTFRPVNTDNITDHVMHREYYSVLPETAELINRTKQEGGRIIAVGTTAIRTLETATINGILEAKSGWTEIFIYPGYTFKIVDAAVTNFHLPKSTLLMLISALAGQQNVFAAYKEAVEQGYKFFSFGDAMLII

SEQ ID NO: 70173 - protein, 339 aa, Pelosinus fermentans
  REGION 1..339: note = tr|I8U5G4|I8U5G4_9FIRM S-adenosylmethionine:tRNA ribosyltransferase-isomerase OS=Pelosinus fermentans JBW45; OX = 1192197 GN=queA PE=3 SV=1
MLLSEFDYFLPEELIAQHPCEPRDHSRLLVLDKNTGAISHNYFFDLLQYLNAGDTLVFNDTRVIPARLIGAKAETGGKVEVFLLNRKSESDWEALVKPGKKARPGAIIIFSDRLSCEILESTDFGGRIVRFRYEGIFEEILDELGETPLPPYITEQLADKERYQTVYARERGSAAAPTAGLHFTTDLMKRIEEKGIHLAFVTLHVGLGTFRPVNTDNITDHVMHREYYSVLPETAELINRTKQEGGRIIAVGTTAIRTLETATINGLLEAKSGWTEIFIYPGYTFKIVDAAVTNFHLPKSTLLMLVSALAGQQKVFAAYKEAVEQGYKFFSFGDAMLII

SEQ ID NO: 70174 - protein, 339 aa, Pelosinus propionicus
  REGION 1..339: note = tr|A0A1I4KTU8|A0A1I4KTU8_9FIRM S-adenosylmethionine:tRNA ribosyltransferase-isomerase; OS = Pelosinus propionicus DSM 13327 OX=1123291 GN=queA PE=3; SV = 1
MLLSEFDYFLPEELIAQHPCEPRDHSRLLVLDKNTGAISHNRFFDLLQYLNAGDTLVFNNTRVIPARLIGTKAETGGKVEVFLLNRKTENDWEALVKPGKKARPGATIIFSDRLSCEILESTDFGGRIVRFRYEGIFEEILDELGETPLPPYITEQLADKERYQTVYAHERGSAAAPTAGLHFTTDLMKRIEEKGIHLAFVTLHVGLGTFRPVNTDNITDHVMHREYYSVLPEAAELINRTKREGGRIIAVGTTAIRTLETATTNGILESKSGWTEIFIYPGYTFKIVDAAITNFHLPKSTLLMLISALAGQKKVFAAYKEAVEQKYKFFSFGDAMLII

SEQ ID NO: 70175 - protein, 339 aa, Pelosinus sp.
  REGION 1..339: note = tr|A0A075KGQ7|A0A075KGQ7_9FIRM S-adenosylmethionine:tRNA ribosyltransferase-isomerase; OS = Pelosinus sp. UFO1 OX=484770 GN=queA PE=3 SV=1
MLLSEFDYFLPEELIAQHPCEPRDHSRLLVLEKNTGAISHQHFFDLPQYLKAGDTLVFNDTKVIPARLIGTKAETGGKVEIFLLNNKSGNEWEALVKPGKKARPGAIIIFSDSLSCEILESTDFGGRVVRFIFKGIFEEILDELGQTPLPPYITEQLADKERYQTVYARERGSAAAPTAGLHFTTELMKRIEDLGVQLAFVTLHVGLGTFRPVNTDDITNHVMHREYYSVSPEAAQLINNTKKQGGRVIAVGTTAIRTLETATENGILEAKSGWTEIFIYPGYSFKMVDAAVTNFHLPKSTLLMLISALAGKKNVFNAYKEAVDQRYKFFSFGDAMLII

SEQ ID NO: 70176 - protein, 345 aa, Pelotomaculum propionicicum
  REGION 1..345: note = tr|A0A4Y7RMB8|A0A4Y7RMB8_9FIRM S-adenosylmethionine:tRNA ribosyltransferase-isomerase; OS = Pelotomaculum propionicicum OX=258475 GN=queA PE=3 SV=1
MTIQMKTSDFDYALPAELIAQEPAAQRSASRLMVVRTDREQFEHRRFTDLVDYLKPGDTLVINDTKVIPARLLGVKEGTGARVEALLLKQLDNRRWEALVRPGKKIVVGTRLVFKEGLLSCEVLDSTGYGGRVLQFAWDGQFEEVLDQVGLMPVPPYIRKPLLDRDRYQTVYARLSGSAAAPTAGLHFSDELLSRIKDKGIAVAPVLLHVGLGTFRPVKVEDITRHRMHAEFYEVSAEAAEIISKTRERGGRVIAVGTTTTRCLESAAAADGRVCQGSGWTEIFIYPGYRFKAIDGMVTNFHLPRSTLLMMVAALAGREKILAAYQEAVEMRYRFFSFGDAMLII

SEQ ID NO: 70177 - protein, 341 aa, Pelotomaculum schinkii
  REGION 1..341: note = tr|A0A4Y7RBZ2|A0A4Y7RBZ2_9FIRM S-adenosylmethionine:tRNA ribosyltransferase-isomerase; OS = Pelotomaculum schinkii OX=78350 GN=queA PE=3 SV=1
MNLSDFDYDLPEELIAQDPCGLRDRSRLMVVPLDRDEFEHRCFRDLLKYLRPGDNLVVNDTKVIPARLLGEKKVTGAKMEVLLLKKLEKDRWEALVRPGKRAPAGTEITFNHGLLEGRILEDTAYGGRIVEFYYNGSFDEVLDRVGLMPVPPYIKKPLSDRHRYQTVYAREAGSAAAPTAGLHFSPELLSSIRAMGVTITPVLLHVGLGTFRPVEVQDISLHHMHAENYEISGESAAAINLTKQQGGRVIAVGTTTTRCLESVAQEYGQIRPCSGWTEIFIYPGYRFQVIDGLVTNFHLPKSTLLMMVSALAGRDRILSAYEEAVRQKYRFFSFGDAMLIV

SEQ ID NO: 70178 - protein, 341 aa, Pelotomaculum sp.
  REGION 1..341: note = tr|A0A4Y7RVQ1|A0A4Y7RVQ1_9FIRM S-adenosylmethionine:tRNA ribosyltransferase-isomerase; OS = Pelotomaculum sp. FP OX=261474 GN=queA PE=3 SV=1
MDLSDFYYDLPEELIAQDPCGLRDRSRLMVVPLDRDEFEHRWFRDLLKYLRPGDNLVVNDTKVIPARLLGEKKVTGAKMEVLLLKKLEKDRWEALVRPGKRAPVGTEITFNGGLLEGRILDDTAYGGRIVEFYYNGSFDEVLDRVGLMPVPPYIKKPLSDRHRYQTVYAREAGSAAAPTAGLHFSPELLNSIRAMGVTITPVLLHVGLGTFRPVEVQDISLHHMHAEYYEISGESAAAINLTKQQGGRVIAVGTTTTRCLESVAQEYGQIRPCSGWTEIFIYPGYRFQVIDGLVTNFHLPKSTLLMMVSALAGRDRILSAYEEAVRQKYRFFSFGDAMLIV

SEQ ID NO: 70179 - protein, 341 aa, Pelotomaculum sp.
  REGION 1..341: note = tr|A0A1V5BV23|A0A1V5BV23_9FIRM S-adenosylmethionine:tRNA ribosyltransferase-isomerase; OS = Pelotomaculum sp. PtaU1.Bin065 OX=1811696 GN=queA PE=3; SV = 1
MKLSDFDYFLPEGMIAQEPVSRRDASRLMVLHLNGAPLEHRRFTDLVDYLRPGDTLVINDTKVMPARLYGIKDITGAKVEVLILRQLDKNRWEALVRPGKRLAAGTKIIFGDGLLEALILEHTDFGGRVLEFSYNGIFEEILDQVGVMPVPPYIKKPLSDKQRYQTIYARQAGSAAAPTAGLHFSRELLERISNMGVVVVPVLLHVGLGTFRPVQVKDVREHHMHAEYYEISEKAAGTINETKQRKGRLIAVGTTTTRCLESAAGEKGEICPGSGWTDIFIYPGYRFKLVEGLITNFHLPRSTLLMMVSAFAGKDKIMAAYNEAVRLKYRFFSFGDAMLII

SEQ ID NO: 70180 - protein, 341 aa, Pelotomaculum thermopropionicum
  REGION 1..341: note = sp|A5D3G5|QUEA_PELTS S-adenosylmethionine:tRNA ribosyltransferase-isomerase OS=Pelotomaculum thermopropionicum (strain DSM 13744 / JCM 10971 / SI); OX = 370438 GN=queAPE=3 SV=1
MNLSDFDYFLPDELIAQEPLPERDMSRLMVVRLDGKEFEHRLFKDIVDYLNPGDALVINETKVIPARLVGRKEGTGARIELLLLRRLDSSRWEALVRPGKKAPKGTAVVFGEGLLACRILDSTAYGGRVVEFSFEGLFEEVLERVGVMPLPPYIKKPLLDQQRYQTIYARQAGSAAAPTAGLHFSPGLLSRIREMGVAVIPVLLHVGLGTFRPVRTEDIRRHRMHAEYYEITEEASRAIAETRARGGRVIAVGTTTTRCLESAAEEGGRVRPGSGWTEIFIYPGYRFKVIDGLVTNFHLPKSTLIMMVAALAGRERILAAYREAVGLRYRFFSFGDAMLII

SEQ ID NO: 70181 - protein, 341 aa, unidentified
  source 1..341: note = Peptoanaerobacter stomatis
  REGION 1..341: note = tr|J5UFA7|J5UFA7_9FIRM S-adenosylmethionine:tRNA ribosyltransferase-isomerase OS=Peptoanaerobacter stomatis; OX = 796937 GN=queA PE=3 SV=1
MKTNDFYYDLPEELIAQVPLEDRSASRLMVLDRNTGNVQHKIFKNIIDYVGKDDVLVFNNTRVLPARLFGKKKDTNANIEILLLKRIELNKWQILVKPAKRVKIGTQIYFGNGEMIADVLQEYDEGIRIVEFSYNGVFEDIISKYGFMPLPPYIKEKLSDKERYQTVYSKINGSSAAPTAGLHFTKDLIESLKNKGVQVEYITLHVGLGTFRPVKSDNLEEHQMHSEYYNIAEETKNRLNDAKKSGKRIIAVGTTTVRTLESSANDYGYIQKTQDDTNIFIYPPYDFKFVDCVITNFHLPKSTLIMMISAFAGKDNVFRAYEEAVKEKYRFFSFGDAMFIQ

SEQ ID NO: 70182 - protein, 341 aa, unidentified
  source 1..341: note = Peptoanaerobacter stomatis
  REGION 1..341: note = tr|V9HU68|V9HU68_9FIRM S-adenosylmethionine:tRNA ribosyltransferase-isomerase OS=Peptoanaerobacter stomatis; OX = 796937 GN=queA PE=3 SV=1
MKTNDFYYDLPEELIAQVPLEDRSASRLMVLDRNTGNVQHKIFKNIIDYVGKDDVLVFNNTRVLPARLFGKKKDTNANIEILLLKRIELNKWQILVKPAKRVKIGTQIYFGNGEMTADVLQEYDEGIRIVEISYNGVFEDIISKYGFMPLPPYIKEKLSDKERYQTVYSKINGSSAAPTAGLHFTKDLIESLKNKGVQVEYITLHVGLGTFRPVKSDNLEEHQMHSEYYNISEETKNRLNDAKKSGKRIIAVGTTTVRTLESSANGYGYIEKTQDDTNIFIYPPYDFKFVDSVITNFHLPKSTLIMMISAFAGKDNVFRAYAEAVKEKYRFFSFGDAMFIQ

SEQ ID NO: 70183 - protein, 341 aa, unidentified
  source 1..341: note = Peptoclostridium acidaminophilum
  REGION 1..341: note = tr|W8T3C5|W8T3C5_PEPAC S-adenosylmethionine:tRNA ribosyltransferase-isomerase OS=Peptoclostridium acidaminophilum DSM 3953 OX=1286171 GN=queA PE=3 SV=1
MKTSDFYFELPEELIAQTPIKKRDESRLMVVSKQTGEIEHRKFRDIAGYLRKGDVLVLNDTRVLPARLIGEKIPTGAKMEFLLLKRIDMDTWQVMVKPGKRAKPGSEFSFGDGRLRARVEDISDEGTRIVRFEYEGVFESVLDELGSMPLPPYIKETLQDKERYQTVYSRHVGSAAAPTAGLHFTPELLEEIRAIGVEIAYITLHVGLGTFRPVKMERIEEHQMHSEFYTIEQSEADKINLAKSSGNRVIAVGTTSCRTLETAADSTGRLHASSGWTDIFIYPGYKFKIIDAIITNFHLPESTLIMLVSAFSTRERVIGAYNEAVKEGYRFFSFGDSMFIY

SEQ ID NO: 70184 - protein, 341 aa, unidentified
  source 1..341: note = Peptoclostridium litorale
  REGION 1..341: note = tr|A0A069RPI9|A0A069RPI9_PEPLI S-adenosylmethionine:tRNA ribosyltransferase-isomerase; OS = Peptoclostridium litorale DSM 5388 OX=1121324 GN=queA; PE = 3 SV=1
MKTSDFYFDLPQERIAQEPLENRDESRLLVMDKESGQTQHKIFKDIVSYLKEGDVLVLNNTRVLPARIIGEKIPTGGKIEFLLLKRVEMDTWQVMVKPGKRAKIGSSFSFGDGRLKAYVIDISDEGTRIVRFEYEGVFETVLEELGSMPLPPYITHKLEDGERYQTVFSKHTGSAAAPTAGLHFTKELLEKIKGMGVQIAYVTLHVGLGTFRPVKVDDINDHKMHSEFYTVEKETADTINAAKKEGRRIIGVGTTSCRTLESACSEDGLIKEGSGWTDIFIYPGYSFKLVNGIITNFHLPESTLIMLVSAFSSRENVLNAYNEAVKMEYRFFSFGDAMLII

SEQ ID NO: 70185 - protein, 341 aa, unidentified; identical to SEQ ID NO: 62528
  source 1..341: note = Peptoclostridium sp.
  REGION 1..341: note = tr|A0A416Q4D2|A0A416Q4D2_9FIRM S-adenosylmethionine:tRNA ribosyltransferase-isomerase; OS = Peptoclostridium sp. AF21-18 OX=2292243 GN=queA PE=3; SV = 1

SEQ ID NO: 70186 - protein, 342 aa, unidentified
  source 1..342: note = Peptococcaceae bacterium
  REGION 1..342: note = tr|A0A419G153|A0A419G153_9FIRM S-adenosylmethionine:tRNA ribosyltransferase-isomerase; OS = Peptococcaceae bacterium OX=2052179 GN=queA PE=3 SV=1
MRLSDFDYHLPEELIAQEPAEQRDKSRLMVLYRNREKLEHRTFKDLLEYLNPGDALVLNDTKVIPARLLGTKEGGAAPVEVLLLSPAGHCRWEALVRPGRRVPVGARLEFGGGLLNCRVVDKTRFGGRVLDFGCGGILFDEILEQVGVVPLPPYIKKLLADKNRYQTVYARQAGSVAAPTAGLHFTPELLAEIVKKKVTVVPVLLHVGLGTFRPVRVDNIREHHMHAEYYRIAGETAEALARCRCAGGRVIAVGTTTSRCLESAADADGKIRAGEGCTDLFIYPGYRFKAVDVLLTNFHLPRSTLLMMVSAFAGREKILNAYREAVDKRYRFFSFGDAMLII

SEQ ID NO: 70187 - protein, 341 aa, unidentified
  source 1..341: note = Peptococcaceae bacterium
  REGION 1..341: note = tr|A0A0J1F5M8|A0A0J1F5M8_9FIRM S-adenosylmethionine:tRNA ribosyltransferase-isomerase; OS = Peptococcaceae bacterium CEB3 OX=999898 GN=queA PE=3; SV = 1
MKVSDFDFHLPQELIAQTPVEPRDASRLMVVRRDTGELEHRHFRDLAELLHPGDVLVVNNTRVIPARLIGEKAGGGARIETLLLKRRDRDVWEALVRPGKRWHVGQKVVFAEGILVGELLDVLANGNRLVRFEYEGVFEEILDRLGRMPLPPYITAELADGGRYQTVYAKESGSAAAPTAGLHFTPELLQGLRQRGVEILEILLHVGLGTFRPVQVENVRDHVMHSEYFSLDRETAQRINQARKEQRRIIAVGTTVTRTLESCAGEDGMLAAGDGWTDIFIYPGYRFKTVDALITNFHFPKSTLLMLVSAFAGRELILRAYETAVGLGYRFYSFGDAMLIL

SEQ ID NO: 70188 - protein, 341 aa, Peptococcus niger
  REGION 1..341: note = tr|A0A1G6S2A4|A0A1G6S2A4_PEPNI S-adenosylmethionine:tRNA ribosyltransferase-isomerase; OS = Peptococcus niger OX=2741 GN=queA PE=3 SV=1
MKTSDFDYTLPEALIAQHPLDRRSASRLMLVNKENGEVTHRHFYDIIDELNAGDVLVLNTTRVIPARLIGEKVGGSATAEVLLLKPSADKKDRWECLVRPGKRLKAGAQISFGDGRLTAEIVDMTESGRLVDFSYDGIFEEVLAELGTMPLPPYIHEKLDNPDRYQTVYAKQSGSAAAPTAGLHMTQDLLTQIREKGVEICEVLLHVGLGTFQPVKEEDALEHHMHSEFYEVTPEAAACLNRAKEEGRRIICLGTTSVRTVESAAHEGKVCAGSGWTDIFIYPSYQFQVTDALITNFHLPKSTLLMLVSALAGREEILAAYHEAVERKYRFFSFGDAMFIR

SEQ ID NO: 70189 - protein, 338 aa, Peptoniphilus asaccharolyticus
  REGION 1..338: note = tr|A0A1W1USI0|A0A1W1USI0_PEPAS S-adenosylmethionine:tRNA ribosyltransferase-isomerase; OS = Peptoniphilus asaccharolyticus DSM 20463 OX=573058; GN = queA PE=3 SV=1
MKTSDFNYDLPKELIAQHPLEDRTNSRLLKLNRKNGNIEHEHFYNIIDELNAGDVLVINNTRVIPARIYGHRKDKEELIEFLLLNHKNDTWECLVKPGKKAKLDTEIIFSDELKGKIVDITEEGNRFIKLEYDGIFENILDKLGEMPLPPYIVERLEDKDRYQTVYSKYNGSSAAPTAGLHFTKELLEKISKKGVEIVEVTLHVGLGTFRPVKVDDVNEHKMHSEHYNVTREAADKINKAKSENRRIIAVGTTSIRTLESACVDGKVVPGSGDTDIFIYPGYEFKIVDALITNFHLPESTLIMLVAAFTSKDIILNAYEEAVKERYRFFSFGDAMFIR

SEQ ID NO: 70190 - protein, 343 aa, unidentified
  source 1..343: note = Peptoniphilus coxii
  REGION 1..343: note = tr|A0A134ABC7|A0A134ABC7_9FIRM S-adenosylmethionine:tRNA ribosyltransferase-isomerase; OS = Peptoniphilus coxii OX=755172 GN=queA PE=3 SV=1
MKTNDFYYDLPEELIAQHPAEKRDESRLLHLKSDGSFEDLHFRDIVNFIKPEDVLVINNTKVLPARIFGSRPGKDEHIEVLLVKELDKDLWQCMVRPGRKMKQDTIIEFPHGLSGKVVDISEDGLRLIQFHYNGVFLEILEKLGEMPLPPYIHEKLEDKNRYQTVYAKYEGSAAAPTAGLHFTQDLLQKIREQGTEIAEITLHVGLGTFRPVKTDTIEDHHMHSEYYRIDEEAARKINKAKARGGRVIAVGTTSIRTLESAMAAMGEIKPIAKETDIFIYPGYQFKIVDAIITNFHLPESTLIMLVSAFAGRDVILNAYRHAVEEKYRFFSFGDAMFIESRKE

SEQ ID NO: 70191 - protein, 342 aa, unidentified
  source 1..342: note = Peptoniphilus duerdenii
  REGION 1..342: note = tr|E0NMT1|E0NMT1_9FIRM S-adenosylmethionine:tRNA ribosyltransferase-isomerase OS=Peptoniphilus duerdenii ATCC BAA-1640 OX=862517 GN=queA PE=3 SV=1
MSLKTSDFYYDLPHELIAQHPLKDRASSRLLIVNRNSKDLEECHFYNIIDYLNEGDVLVVNNSRVIPARLFGHRKDKEEKIEILLLKREEDTWQCLVKPGKKAKVGSEIIFSDKLKCEVKRVDEEGNRYIKFHCDGIFEEILDELGNMPLPPYITEKLEDKERYQTVYSKIDGSAAAPTAGLHFTEDLLDRIKEKGIKVVPITLHVGLGTFRPVKVDDVEKHHMHSEFYMMDKETAKIINDAKENGKRIIAVGTTSMRTLETIGRNGRVKETSGWTDIFIYPGFEFKIVDALITNFHLPESTLMMLVSAFASKDIIFNAYEYAIKNKFRFFSFGDAMFIKGN

SEQ ID NO: 70192 - protein, 339 aa, unidentified
  source 1..339: note = Peptoniphilus grossensis
  REGION 1..339: note = tr|A0A1U7LYQ2|A0A1U7LYQ2_9FIRM S-adenosylmethionine:tRNA ribosyltransferase-isomerase; OS = Peptoniphilus grossensis OX=1465756 GN=queA PE=3 SV=1
MKTKDFYYDLPKELIAQHPVEKRDHSRLLVLDKKTGKMEHKHFYDIVDYLNEGDVLVLNDTKVMPARIYGHRENKEEKIEFLLLNRKGDIWECLSKPGKKAQIGTKIIFSDKLSAEVVDISHDGSRFLKFQYDGVFEEILDELGEMPLPPYITEKLKDKNRYQTVYAREEGSAAAPTAGLHFTKELLQKVKDKKVEICYITLHVGLGTFRPVKVENIDEHEMHSEFYIMNKEVADKINAAKKRGNRVIAVGTTSVRTVESIADESGKVCEKSGFTNIFIYPPYKFKCIDALITNFHLPESTLLMLVSSLSTREIILKAYKEAVKERYRFFSFGDAMFIR

SEQ ID NO: 70193 - protein, 339 aa, Peptoniphilus harei
  REGION 1..339: note = tr|A0A2X1YMJ7|A0A2X1YMJ7_9FIRM S-adenosylmethionine:tRNA ribosyltransferase-isomerase; OS = Peptoniphilus harei OX=54005 GN=queA PE=3 SV=1
MKTKDFYYDLPKELIAQYPEEKRDHSRLLVLDKESGKMEHKHFYDIIDYLNEGDLLVLNDTKVMPARIYGHREGKEEKIEFLLLNRKDDVWECLSKPGKKAKLGTKIIFSDKLSAEVVDISEDGSRFLKFEYDGIFEEILDELGEMPLPPYITEKLEDKNRYQTVYAREEGSAAAPTAGLHFTKDLLQKIKDKGIEICYITLHVGLGTFRPVKVENVDEHEMHSEFYVMTKEVADKINAAKDRGNRVIAVGTTSVRTVESIADDNGRVCEKSGFTNIFIYPPYKFKCVDALITNFHLPESTLLMLVSSLSSREIILKAYEEAVKERYRFFSFGDAMFIR

SEQ ID NO: 70194 - protein, 339 aa, Peptoniphilus harei
  REGION 1..339: note = tr|E4KZ34|E4KZ34_9FIRM S-adenosylmethionine:tRNA ribosyltransferase-isomerase OS=Peptoniphilus harei ACS-146-V-Sch2b OX=908338 GN=queA PE=3 SV=1
MKTKDFYYDLPKELIAQHPEEKRDHSRLLVLDKESGEMEHKHFYDIIDYLKKGDLLVLNDTKVMPARIYGHREGKEEKIEFLLLNRKDDIWECLSKPGKKAKIGSKIIFSDKLSAEVVDISEDGSRFLKFEYDGIFEEILDELGEMPLPPYITEKLEDKNRYQTVYAREEGSAAAPTAGLHFTKELLEKLKDKGVEICYITLHVGLGTFRPVKVENVDEHEMHSEFYVMTKEVADKINAAKDRGSRVIAVGTTSVRTVESIANEDGRVCEKSGFTNIFIYPPYKFKCVDALITNFHLPESTLLMLVSSLSSREIILKAYEEAVKERYRFFSFGDAMFIR

SEQ ID NO: 70195 - protein, 338 aa, Peptoniphilus indolicus
  REGION 1..338: note = tr|A0A379DFU5|A0A379DFU5_9FIRM S-adenosylmethionine:tRNA ribosyltransferase-isomerase; OS = Peptoniphilus indolicus OX=33030 GN=queA PE=3 SV=1
MKTSDFNYYLPKELIAQHPLEDRTNSRLLKLNRENGNIEHDHFYNIIDELNSGDVLVINNTRVIPARIYGHRKDKEELIEFLLLNHKNDTWECLVKPGKKAKIGTEIIFSDKLKGEIVNISEDGNRFIKLEYEGIFENILDKLGEMPLPPYITERLEDKDRYQTVYSKYNGSSAAPTAGLHFTKKLLEKLKEKGIEIVEVTLHVGLGTFRPVKVDNVDEHKMHSEHYVVTKEAAEKINNAKKEGRRIIAVGTTSIRTLESACDGEMLVSGSGDTDIFIYPGYEFKIVDALITNFHLPESTLIMLVAAFTSKEIILNAYKEAVKEKYRFFSFGDAMFIR

SEQ ID NO: 70196 - protein, 338 aa, Peptoniphilus indolicus; identical to SEQ ID NO: 70195
  REGION 1..338: note = tr|G4D5T7|G4D5T7_9FIRM S-adenosylmethionine:tRNA ribosyltransferase-isomerase OS=Peptoniphilus indolicus ATCC 29427 OX=997350 GN=queA PE=3 SV=1

SEQ ID NO: 70197 - protein, 343 aa, Peptoniphilus ivorii
  REGION 1..343: note = tr|A0A3S5C2H5|A0A3S5C2H5_9FIRM S-adenosylmethionine:tRNA ribosyltransferase-isomerase; OS = Peptoniphilus ivorii OX=54006 GN=queA PE=3 SV=1
MKTRDFYYDLPEELIAQHPADRRDGSRLLYVKADGSYKDLMFADILELLHPEDVLVLNNTKVLPARIFGARPGREERIEVLLVKDLGADLWQCMVRPGKKLKLGGEIVFPEGLRGVVEAITEDGLRHIRFCYEGVFYEILEKLGQMPLPPYIHETPEDPDRYQTVYAKYLGSAAAPTAGLHFTEDLFKRIREKGVAVAEVTLHVGLGTFRPVKVENIEEHHMHSERYRIDEAAAETIRRAQAVGGRVIAVGTTSIRTLESCMQKHGAIVADAGDTDIFIYPGYEFHCVDAIVTNFHLPESTLLMLVSAFAGKDVILDAYRHAVEARYRFFSFGDAMFLERGAR

SEQ ID NO: 70198 - protein, 339 aa, Peptoniphilus lacrimalis
  REGION 1..339: note = tr|D1VUV9|D1VUV9_9FIRM S-adenosylmethionine:tRNA ribosyltransferase-isomerase OS=Peptoniphilus lacrimalis 315-B OX=596330 GN=queA PE=3 SV=1
MKTSDFSYDLPSELIAQHPAQKRDQSRLMLLNKKTGEINHKKFYNIIDYLNNGDVLVLNDTRVMPARIFGHRPEKDESIEILLLNHKGDTWETLAKPGKKLKIGTEIIFSDELKAQVVDISEDGSRFLKFIYSGIFEEILDRLGEMPLPPYIQEKLEDKERYQTVYSKEIGSAAAPTAGLHFTKELLKKIEEKGIEICFITLHVGLGTFRPVKVEDVTKHKMHSEFYIIRDDVAKKINKAKDEGRRIVAVGTTSIRTLESASDDKGYVEAKSGWTDIFIYPPYKFKCVDALITNFHLPESTLIMLVSSLSTREIILNAYNVAVKEKYRFFSFGDAMFIY

SEQ ID NO: 70199 - protein, 339 aa, Peptoniphilus lacrimalis
  REGION 1..339: note = tr|A0A379C4Q3|A0A379C4Q3_9FIRM S-adenosylmethionine:tRNA ribosyltransferase-isomerase; OS = Peptoniphilus lacrimalis OX=33031 GN=queA PE=3 SV=1
MKTSDFSYDLPSELIAQHPAQKRDQSRLMLLNKKTGEINHKKFYNIIDYLNNGDVLVLNDTRVMPARIFGHRPEKDESIEILLLNHKGDTWETLAKPGKKLKIGTEIIFSDELKAEVVDISEDGSRFLKFIYSGIFEEILDRLGEMPLPPYIQEKLEDKERYQTVYSKEIGSAAAPTAGLHFTKELLKKIEEKGIEICFITLHVGLGTFRPVKVEDVTKHKMHSEFYIIRDDVAQKINKAKDEGRRIVAVGTTSIRTLESAADDKGYVKAKSGWTDIFIYPPYKFKCVDALITNFHLPESTLIMLVSSLSTREIILNAYNVAVKEKYRFFSFGDAMFIY

SEQ ID NO: 70200 - protein, 340 aa, Peptoniphilus sp.
  REGION 1..340: note = tr|A0A090JNM0|A0A090JNM0_9FIRM S-adenosylmethionine:tRNA ribosyltransferase-isomerase; OS = Peptoniphilus sp. ING2-D1G OX=1912856 GN=queA PE=3 SV=1
MKTEEFKYYLPEDLIAQYPLNNRSESKLLILGRKDGLIEHKHFYDIVDYLQRGDVLVLNDTKVIPARIFGHRKNKEEKIEILLLKQKEDDIWECLTRPGKKTKTGCEVIISDKLSGKIVSVSDDGSRFIKFHYHGIFNEILDELGEMPLPPYIKTKLGDKDRYQTVYSREQGSAAAPTAGLHFTEKLLEEIKNKGVEIAYVTLHIGLGTFRPVKAEDIENHHMHSEYYTVNSETVDIVNKAKSEGRRVIAVGTTSVRTIESIANERGLINEKSGWTDIFIYPGYEFKCIDGLITNFHLPESTLLMLVSAFTTKEIIFRAYEEAIKEKYRFFSFGDAMFIH

SEQ ID NO: 70201 - protein, 339 aa, Peptoniphilus sp.
  REGION 1..339: note = tr|D8FGI5|D8FGI5_9FIRM S-adenosylmethionine:tRNA ribosyltransferase-isomerase OS=Peptoniphilus sp. oral taxon 836 str. F0141 OX=768724 GN=queA PE=3 SV=1
MKTSDFSYDLPSELIAQHPAQKRDQSRLMLLNKKTGEINHKKFYNIIDYLNNGDVLVLNDTRVMPARIFGHRPEKDESIEILLLNHKGDTWETLAKPGKKLKIGTEIIFSDELKAEVVDISEDGSRFLKFIYSGIFEEILDRLGEMPLPPYIQEKLEDKERYQTVYSKEIGSAAAPTAGLHFTKELLKKIEEKGIEICFITLHVGLGTFRPVKVEDVTKHKMHSEFYIIRDDVAQKINKAKDEGRRIVAVGTTSIRTLESAADDKGYVKAKSGWTDIFIYPPYKFKCVDALITNFHLPESTLIMLVSSLSTREIILNAYNVAVKDKYRFFSFGDAMFIY

SEQ ID NO: 70202 - protein, 342 aa, unidentified; identical to SEQ ID NO: 63359
  source 1..342: note = Peptostreptococcaceae bacterium
  REGION 1..342: note = tr|A0A2P1G2U2|A0A2P1G2U2_9FIRM S-adenosylmethionine:tRNA ribosyltransferase-isomerase; OS = Peptostreptococcaceae bacterium oral taxon 929; OX = 2081703 GN=queA PE=3 SV=1

SEQ ID NO: 70203 - protein, 349 aa, unidentified
  source 1..349: note = Peptostreptococcaceae bacterium
  REGION 1..349: note = tr|A0A1I2A6K2|A0A1I2A6K2_9FIRM S-adenosylmethionine:tRNA ribosyltransferase-isomerase; OS = Peptostreptococcaceae bacterium pGA-8 OX=1520829; GN = queA PE=3 SV=1
MRLDDFDYNLPENLIAQHPTKERDKCRLMVLNRASHTVDNKKFCDIIDHINPGDCLVMNNSKVLPARLYGIKEGTGAKIEFLLIKRIEGDLWETMVKPGKRLKPGDSVLFGEENQLKAVVKDYGEDGTRLVEFFYDGIFIEQLEKIGTMPLPPYIDRKSDDDDRKMYQTVYCKEEGSVASPTAGLHFTKELLSKLSDKGVDLVYVTLHVGIGTFRPVKCENVEDHHMHFEEYYIDRENADIINKAVREGRRIVSVGTTSTRTLESAAFYSEEDGKYLVKAGEDSTDIFIYPGYKFKIINSLITNFHLPKSTLLMLISALYDREHILTAYNRAVADGYRFFSYGDAMFIE

SEQ ID NO: 70204 - protein, 340 aa, Peptostreptococcus anaerobius
  REGION 1..340: note = tr|R5JCB9|R5JCB9_9FIRM S-adenosylmethionine:tRNA ribosyltransferase-isomerase OS=Peptostreptococcus anaerobius CAG:621 OX=1263100 GN=queA PE=3 SV=1
MKTSDFKYYLPEELIAQVPVKDRSSSRLMVLDKATGEIEHRIFKDIIDYLEEGDCLVLNDTRVIPARLIGEKESSGGRVEFLLLKRDGELWETLVKPGKRAKIGSRISFGGGKLVAEVVDIVEDGSRMVKFIYDGIFEEVLDELGNMPLPPYITAKLDDKERYQTVYSKHKGSAAAPTAGLHFTECLLEEIKSKGVDLAFVTLHVGLGTFRPVKVDDVESHKMHSEFYVVSEEAAEKINRAKENGKRIICVGTTSCRTIESVASEDGKMHAKTGWTDIFIYPGYKFKVVDNLITNFHLPESTLVMLVSALSKKEYVLSAYEEAVKEKYRFFSFGDAMFFK

SEQ ID NO: 70205 - protein, 340 aa, Peptostreptococcus anaerobius
  REGION 1..340: note = tr|D3MPV6|D3MPV6_9FIRM S-adenosylmethionine:tRNA ribosyltransferase-isomerase OS=Peptostreptococcus anaerobius 653-L OX=596329 GN=queA PE=3 SV=1
MKTSDFKYYLPEELIAQVPIKDRSSSRLMVLDKATGEIEHRIFKDIIDYLEEGDCLVLNDTRVIPARLIGEKESSGGRVEFLLLKRDGELWETLVKPGKRAKIGSRISFGGGKLVAEVVDIVEDGSRMVKFIYDGIFEEVLDELGNMPLPPYITAKLDDKERYQTVYSKHKGSAAAPTAGLHFTECLLEEIKSKGVDLAFVTLHVGLGTFRPVKVDDVESHKMHSEFYVVSEDAAEKINRAKENGKRIICVGTTSCRTIESVASEDGKMHAKTGWTDIFIYPGYKFKVVDNLITNFHLPESTLVMLVSALSKKEYVLSAYEEAVKEKYRFFSFGDAMFFK

SEQ ID NO: 70206 - protein, 341 aa, Peptostreptococcus russellii
  REGION 1..341: note = tr|A0A1H8I8C3|A0A1H8I8C3_9FIRM S-adenosylmethionine:tRNA ribosyltransferase-isomerase; OS = Peptostreptococcus russellii OX=215200 GN=queA PE=3 SV=1
MKTSDFNYDLPEELIAQFPIKDRSSSRLMVVDKKTGEIEHKVFKDIIDYLEEGDCLVLNDTRVIPARLIGSKVETGGKIEFLLLKRNEDDTWETLVKPGKRAKIGSKFSFGDGKLIAEVVGMGDDGARIVKFEYEGIFEEVLDELGNMPLPPYITEKLEDRERYQTVYSKHNGSAAAPTAGLHFTDDLLKQIRDKGVEEAFVTLHVGLGTFRPVKVDDVLEHKMHSEYYMVSQEAADKINRAKENGKRVICVGTTSCRTIESAADNNGVLKATSGWTDIFIYPGYKFKLMDNLITNFHLPESTLIMLVSALSTRENILNAYEEAVKERYRFFSFGDAMFLK

SEQ ID NO: 70207 - protein, 341 aa, Peptostreptococcus russellii
  REGION 1..341: note = tr|A0A2P7Q0S4|A0A2P7Q0S4_9FIRM S-adenosylmethionine:tRNA ribosyltransferase-isomerase; OS = Peptostreptococcus russellii OX=215200 GN=queA PE=3 SV=1
MKTSDFNYNLPEELIAQVPIADRSSSRLMVVDKKSGEVEHKIFKDIIDYLEEGDCLVLNDTRVIPARLIGSKVETGGKIEFLLLKRNEDDTWETLVKPGRKAKIGSEFTFGDDKLIAKVVGMGDDGSRIVKFKYDGIFEEILDELGNMPLPPYITEKLEDRERYQTVYSKHSGSAAAPTAGLHFTEDLLEEIRKKGVDEAFVTLHVGLGTFRPVKVDDVLEHKMHSEYFIVNQEAADKINKAKKNGKKVICVGTTSCRTIESASEEDGTLKAKSGWTEIFIYPGYDFKIMDNLITNFHLPESTLIMLVSALSSKENILNAYEEAVKERYRFFSFGDAMFLK

SEQ ID NO: 70208 - protein, 341 aa, Peptostreptococcus sp.
  REGION 1..341: note = tr|A0A1I1YLJ8|A0A1I1YLJ8_9FIRM S-adenosylmethionine:tRNA ribosyltransferase-isomerase; OS = Peptostreptococcus sp. D1 OX=72304 GN=queA PE=3 SV=1
MKTSDFYYDLPEDLIAQVPIEDRASSKLLVLNKSTGKIKHDIFKNIVSYLKEGDCLVLNDTRVIPARLIGEKKDTGGRVEFLLLKRNEDDTWETLVKPGKKARIGSEISFGNGKLIAKVVDIVEDGKRIVRFDYDGIFEEVLYELGKMPLPPYITETLQDNERYQTVYSKTSGSAAAPTAGLHFTEELLADIRRKGINIAFVTLHVGLGTFRPVKVDDVNDHKMHSEFYMVSDESAELINSVKKSGGRVICVGTTSCRTIESACDDQGNVMSGSGWTDIFIYPGYKFKIVDNLITNFHLPESTLIMLVSALSSRETILKAYKEAVKEKYRFFSFGDAMFLE

SEQ ID NO: 70209 - protein, 341 aa, Peptostreptococcus sp.
  REGION 1..341: note = tr|A0A096A323|A0A096A323_9FIRM S-adenosylmethionine:tRNA ribosyltransferase-isomerase; OS = Peptostreptococcus sp. MV1 OX=1219626 GN=queA PE=3 SV=1
MKTSDFKYDLPHELIAQVPIKDRSSSRLMVLNKETGEIEHKVFKNIIDYLEEGDCLVLNDTRVIPARLIGEKVESGGKMEFLLLKRNEDDTWETLVKPGKRAKIGSRFSFGGGKLFADVVDILADGSRLVTFDYDGIFEEILDELGNMPLPPYITEKLEDKDRYQTVYSKHNGSAAAPTAGLHFTDELLDQIRAKGVKTAFVTLHVGLGTFRPVKVDDVDKHKMHSEFYSVSQEAADMINDAKKSSKRVICVGTTSCRTIESASGPDGRLKAGSGWTDIFIYPGYEFKLCDNLITNFHLPESTLIMLVSALSSRENILNAYRVAVDEKYRFFSFGDAMFLK

SEQ ID NO: 70210 - protein, 341 aa, Peptostreptococcus stomatis
  REGION 1..341: note = tr|E0E403|E0E403_9FIRM S-adenosylmethionine:tRNA ribosyltransferase-isomerase OS=Peptostreptococcus stomatis DSM 17678 OX=596315 GN=queA PE=3 SV=1
MKTSDFKYDLPEELIAQVPIEDRSSSRLMVVDKNTGQIEHRVFKDIIDYLEEGDCLVLNDTRVIPARLIGEKVGSGGKMEFLLLKRNEDDTWETLVKPGKRAKLGARFSFGGGKLFADVVDILEDGSRLVKFDYDGIFEEILDELGNMPLPPYITEKLEDKERYQTVYSKHNGSAAAPTAGLHFTDQLLDQIRAKGVKTAFVTLHVGLGTFRPVKVDDVGQHKMHSEFYMVTQEAADMINEARVKSKRVICVGTTSCRTIESASKPDGRLEAKSGWTDIFIYPGYKFKVCDNLITNFHLPESTLIMLVSALSSKENILNAYKSAVEERYRFFSFGDAMFLK

SEQ ID NO: 70211 - protein, 347 aa, Peredibacter sp.
  REGION 1..347: note = tr|A0A2E5CAT7|A0A2E5CAT7_9PROT S-adenosylmethionine:tRNA ribosyltransferase-isomerase; OS = Peredibacter sp. OX=2024850 GN=queA PE=3 SV=1
MKREDLLTESYDYELPEELIAQRPAPERDHSKLMVYKHKSETVDHSKFHNIADYLPAGTLLVLNQSKVFPCRLMGKKPTGGKAEVLFLSLLDEGGLYPVMLKTSGKKKLGDVFLFGELKLKIERILEDGSFYVQTNLVGEDLLDYLESRAHIPIPPYIREGVADESDKKDYQTVYAKHAGSVAAPTAGLHFTNQVFDSLKEKGIEIAKVTLHVGAGTFKPVSADEITDHKMHREHFDISDEDLEKLNSAKNIFAVGTTTLRVLESCYSDGKFALPEEKSTDIFLYPGKEVKSIQGLITNFHLPKSTLLMLVSSIVGREKTLSLYKEAVEKKYRFFSYGDSMMIMRNE

SEQ ID NO: 70212 - protein, 368 aa, Perlucidibaca sp.
  REGION 1..368: note = tr|A0A2P6ASL3|A0A2P6ASL3_9GAMM S-adenosylmethionine:tRNA ribosyltransferase-isomerase; OS = Perlucidibaca sp. HR-E OX=2094561 GN=queA PE=3 SV=1
MHRSDFTFELPDALIARYPLAERSASRLLCLDGDSGGFRHAAFRDLLGLLRPGDLLVFNQSRVMPARLFARKETGGQAEILVERLPAPTRALAHVRASKSPKPGGVLHLADGSAVRMAGREGDLFLLEADEPWQALMARLGEMPLPPYFGRAAEASDSERYQTVYARDAGSVAAPTAGLHFDQPLLDALRAHGVETAFVTLHVGAGTFQPVRADDIRDHVMHAEWLTVGADVVAAVQAAKARGGRVIAVGTTSVRALESAAWAGQGVDPEGWSLAAGFPAGSGDAAATLAPFAGDTRIFIAPGYRWQLIDALITNFHLPESTLLMLVSALAGREAVLAAYAEAVSARYRFFSYGDAMFVTRPGAGRES

SEQ ID NO: 70213 - protein, 361 aa, unidentified
  source 1..361: note = Permianibacter aggregans
  REGION 1..361: note = tr|A0A4R6UXN9|A0A4R6UXN9_9GAMM S-adenosylmethionine:tRNA ribosyltransferase-isomerase; OS = Permianibacter aggregans OX=1510150 GN=queA PE=3 SV=1
MEMSRPNRYPSDPRFVPADMKLSDFDYTLPEQLIARYPLPERSASRLLCLDGATGALAHRQFTDIVDLLSERDLLVFNNTRVLAARLFAQKSTGGKVEVLIERVVDPQHAIAQVRASKSPKAGTVLQLEAGGEVTVTGRLGEFYQLQTDNDWFALMAEQGHMPLPPYFERDDEKADEERYQTVYAKQPGAVAAPTAGLHFDQPLLQCLRDKGVRMAEVTLHVGAGTFQPVRVEDIREHQMHSEWYQLNDEVVQAVAETKASGGRVIAVGTTSVRTLESASRSGHLESGASDTNIFIYPGYRFRIVDAMITNFHLPQSTLLMLVSAFSGRDHILNAYHEAIAREYRFFSYGDAMFLTPGANA

SEQ ID NO: 70214 - protein, 337 aa, Persephonella hydrogeniphila
  REGION 1..337: note = tr|A0A285NFY8|A0A285NFY8_9AQUI S-adenosylmethionine:tRNA ribosyltransferase-isomerase; OS = Persephonella hydrogeniphila OX=198703 GN=queA PE=3 SV=1
MIRLSDYDYKLPKELIAKYPVEPRDACRLMVLDRKNKSIKHRMFRDIIEYTEEEDLLVLNDTKVIPARLIGKKETGAKIEIFLLRPFSDNEWEVLIKNIKRLKAGQKVIIGEGFYAELIEKYDEGKAKVRLYGEDINSLIKKYGHIPLPPYIEREDEEKDKELYQTVFAKKEGAVASPTAGLHFTEELLKKLEEKGVKKAFCTLHVGLGTFRPIQTEDITKHRMHEEFYQIPEETINLIQETKRKGKRVIAVGTTVVRTLETYAKTGKKEGFSNIFIYPPYRFEIVDALVTNFHLPKSTLILLVSAFAGREFILKAYEEAVQKKYRFFSYGDAMLIL

SEQ ID NO: 70215 - protein, 337 aa, Persephonella marina
  REGION 1..337: note = tr|C0QR80|C0QR80_PERMH S-adenosylmethionine:tRNA ribosyltransferase-isomerase OS=Persephonella marina (strain DSM 14350 / EX-H1) OX=123214 GN=queA PE=3 SV=1
MHRLSDYDYRLPKELIAKYPVEPRDSCRLMVLNRKERTIEHRIFRDIGDYLKEGDLLVLNDTKVIPARLIGRKETGAKIEIFLLKPVTENVWEALIKNIKRLKEGQVVIISEDFRVKLLEKLDEGKAVVQLVGEDIKYLIEKYGHIPLPPYIEREDEDKDRDYYQTVFAKKEGAVASPTAGLHFTEELLEKLKEKGIKTAFVTLHVGLGTFRPITVEDITKHKMHEEFYQIPEETLDLIRETKERGRSVVAVGTTVVRTLETYAQTGKKEGFSDIFIYPPYDFKIVDSMITNFHLPKSTLLLLVSAFAGRDFILEAYREAVEKRYRFFSYGDAMLIL

SEQ ID NO: 70216 - protein, 411 aa, unidentified
  source 1..411: note = Petrimonas mucosa
  REGION 1..411: note = tr|A0A1G4G832|A0A1G4G832_9PORP S-adenosylmethionine:tRNA ribosyltransferase-isomerase; OS = Petrimonas mucosa OX=1642646 GN=queA 1 PE=3 SV=1
MKKCDAEKVRIADYNYTLPQEKIAKYPLPKRDASKLLLFCNNQISTLAFSSIAEEIPEGSLMIFNDTRVIHARLIFEKGSGALIEVFCLSPHSPRDYSENFQQRRGCSWHCMIGNAKRWKDEVLQMRIVMEGSELLLSARKIAKNGNDTVVEFSWDRPEVTFSELLEVAGKLPIPPYLNRNSEASDDETYQTVYSEVEGSVAAPTAGLHFTPEVMASLEKRGIRIARVTLHVGAGTFKPVKSETIGDHDMHTEFISVSRETVQALYENRNKLIVVGTTSMRTVESLYYLGKRVLLHPDIKPDELLVSQWEPYEEETPVSPQLALKAIIDYLDRNSADQLIAHTQVMIVPGYRFHYPQAIVTNFHQPQSTLLLLIAACIGERWRDLYQYALQNNYRFLSYGDSSLLWLTASH

SEQ ID NO: 70217 - protein, 349 aa, unidentified
  source 1..349: note = Petrimonas mucosa
  REGION 1..349: note = tr|A0A1G4G863|A0A1G4G863_9PORP S-adenosylmethionine:tRNA ribosyltransferase-isomerase; OS = Petrimonas mucosa OX=1642646 GN=queA 3 PE=3 SV=1
MKLSQFKFNLPEELIAKFPSKHRDESRLMVVHRNSDKVEHLIFKDILNYFDAHDFFIFNDTKVFPARLFGNKEKTGAKIEVFLLRELNPAQHLWDVLVNPARKIRIGNKLYFGDNEELVAEVIDNTTSRGRTLRFLYDGPYEEFKDLLFSIGETPIPEYMERPAVPEDAERYQNIFASNEGAVVVPAAGLHFSRELIKRMEIKNIDYGFLTLHHGLGAYRDIDVEDLTKHKIDSEQMIISQELCDRVNTAKDNGHKICAVGTSVLRAIETTISTDGHIKPREGWTNKFIFPPYDFTLPDALITNFHLPLSTLLMVTAAFGGYERIMDVYQIAIKEKYEFGAYGDAMLII

SEQ ID NO: 70218 - protein, 413 aa, Petrimonas sp.
  REGION 1..413: note = tr|A0A3G9E2A4|A0A3G9E2A4_9PORP S-adenosylmethionine:tRNA ribosyltransferase-isomerase; OS = Petrimonas sp. IBARAKI OX=1978337 GN=PEIBARAKI_5829; PE = 3 SV=1
MKKCDAEKIRIADYSYTLPPEKIARYPLEKRDSSKLLLFRNNTISTRPFSGIGAEIPEGSLLVFNDTRVIHARLIFEKSTGAVIEIFCLSPHAPRDYSVNFQQRTSCSWHCMIGNAKRWKDDVLQMKVSVNNENVLLSARKIESNADDVIVEFSWNNPGFTFSELLEIAGKLPIPPYLNRASEARDDETYQTVYSAVEGSVAAPTAGLHFTSEVMRSFRKKGIQSARVTLHVGAGTFKPVKSETIGDHDMHMEFISVSRETVQALYENENNLIVVGTTSMRTVESLYYLGKKILLQPDIQPEELVVFQWEPYGEENPVSPKLALKSIIDYLIRNNADQLLAFTQVMIVPGYTFHYPQALITNFHQPQSTLLLLIASGIGKYWRDVYDYALQNDYRFLSYGDSSLLWLTANQAI

SEQ ID NO: 70219 - protein, 349 aa, Petrimonas sp.
  REGION 1..349: note = tr|A0A3G9EPL0|A0A3G9EPL0_9PORP S-adenosylmethionine:tRNA ribosyltransferase-isomerase; OS = Petrimonas sp. IBARAKI OX=1978337 GN=queA PE=3 SV=1
MKLSQFKFNLPEELIAKHPSKHRDESRLLVVHRNSDKIEHLVFKDILNYFDAHDFFVFNDTKVFPARLFGNKEKTGAKIEVFLLRELNPAQHLWDVLVNPARKIRIGNKLYFGENEELVAEVIDNTTSRGRTLRFLYDGPYEEFKDLLFSIGETPIPEYMERSVVPEDAERYQNIFANNEGAVVVPAAGLHFSRELIKRMEIKNIDYGFLTLHHGLGAYRDIDVEDLTKHKVDSEQMIITQELCDKVNTAKDNGHKICAVGTSVLRAIETTISTDGHIKPREGWTNKFIFPPYDFTLPDALVTNFHLPFSTLLMVTTAFGGYERIMDVYQTAIKEKYEFGAYGDAMLII

SEQ ID NO: 70220 - protein, 341 aa, unidentified
  source 1..341: note = Petrocella atlantisensis
  REGION 1..341: note = tr|A0A3P7PFJ6|A0A3P7PFJ6_9FIRM S-adenosylmethionine:tRNA ribosyltransferase-isomerase; OS = Petrocella atlantisensis OX=2173034 GN=queA PE=3 SV=1
MKLSDFTFKLPQELIAQEPLEDRSDSRLMVLNRSDRSIEHKKFTDLLDELHPGDCLVLNNTRVMPARLIGEKPETHGKVEFLLLSRKQQNQWEVMVKPGKKAKVGDIIEFGNGMIKAEVLEIMDGGNRLVALEYEGIFEEVLDQLGQMPLPPYITKQLEDKERYQTVYSKHTGSAAAPTAGLHFTHDLMKKITEKGVAIAYITLHVGLGTFRPVKVENVLEHDMHSEYYFIEEEEAEKINTAKKKGGRIIAVGTTSSRTLESVADEDGFIKKSSGWTDIFIYPGYSFKIVDALITNFHLPESTLIMLVSALAGRDFILEAYEAAIESSYRFFSFGDAMLIK

SEQ ID NO: 70221 - protein, 341 aa, Petrotoga halophila
  REGION 1..341: note = tr|A0A2S5EFY6|A0A2S5EFY6_9BACT S-adenosylmethionine:tRNA ribosyltransferase-isomerase; OS = Petrotoga halophila DSM 16923 OX=1122953 GN=queA PE=3; SV = 1
MSEQSFDLEQYNYELPEELIAQEPVEPRDSCKLMVLNRRVKSIEHKVFRDIKNYLRPGDLLVLNNTRVIPARLYGKKETGAKVEVLLLEKNGNDKTWKALVKPGGKIKKGNKLIFEDNLVCTVVEHLEDGSRILEFDDPNFFSKLPRIGEVPLPPYIKKQIDDPEKYQTTYAKNNGAVAAPTAGLHFTQELIDELTDYGVNFTEVTLHVGLGTFRPVKEPDIRNHQIHEEYYTVSKSVLRDIVRAKANGKRVIATGTTVVRTLETIARNPDELAGRTDLYIYPPFEFKIIDAMITNFHLPRSSLLFLVSAFAGRDFIMNSYEIAKEKKYRFFSFGDAMFIM

SEQ ID NO: 70222 - protein, 341 aa, Petrotoga mexicana
  REGION 1..341: note = tr|A0A2K1PBL1|A0A2K1PBL1_9BACT S-adenosylmethionine:tRNA ribosyltransferase-isomerase; OS = Petrotoga mexicana DSM 14811 OX=1122954 GN=queA PE=3; SV = 1
MSEQSFDLEQYNYELPEELIAQEPVEPRDSCKLMVLNRRVKSIEHKVFRDIKNYLRPGDLLVLNNTRVIPARLYGKKETGAKVEVLLLEKNGNDKTWKALVKPGGKIKKGNKLIFEDNLVCSVVEHLEDGSRILEFDDPNFFSKLPRIGEVPLPPYIKKQIDDPEKYQTTYAKNNGAVAAPTAGLHFTQELIKELTDYGVNFTEVTLHVGLGTFRPVKEPDIRNHQIHEEYYTVSKSVLRDIVRAKANGKRVIATGTTVVRTLETIARNPDKLAGRTDLYIYPPFEFKIIDAIITNFHLPRSSLLFLVSAFAGRDFIMNSYEIAKEKKYRFFSFGDAMFIM

SEQ ID NO: 70223 - protein, 341 aa, Petrotoga miotherma
  REGION 1..341: note = tr|A0A2K1PCI5|A0A2K1PCI5_9BACT S-adenosylmethionine:tRNA ribosyltransferase-isomerase; OS = Petrotoga miotherma DSM 10691 OX=1434326 GN=queA PE=3; SV = 1
MSEQSFNLEQYDYELPEELIAQEPVEPRDSCKLMVLNRRVKSIEHKVFRDIKNYLRPGDLLVLNNTRVIPARLYGKKETGAKVEVLLLEKDGNDKTWKALVKPGGKIKKGNKLIFEDDLVCTVVEHLEDGSRILEFDDPNFFSKLPKIGEVPLPPYIKKQIDDPEKYQTTYAKNNGAVAAPTAGLHFTQELIDELTDYGVNFTEVTLHVGLGTFRPVKEPDIRNHLIHEEYYTVPKSVLHDIVRAKADGKRVIATGTTVVRTLETIARNPDKLAGRTDLYIYPPFEFKIIDALITNFHLPKSSLLFLVSAFAGHDFIMNSYEIAKEKKYRFFSFGDAMFIM

SEQ ID NO: 70224 - protein, 358 aa, Petrotoga mobilis
  REGION 1..358: note = tr|A0A101HR15|A0A101HR15_9BACT S-adenosylmethionine:tRNA ribosyltransferase-isomerase; OS = Petrotoga mobilis OX=69499 GN=queA PE=3 SV=1
MNISLIKTNYWNCGGLWMSEQSFDLEQYDYELPEDLIAQEPLEPRDSCKLMVLNRKTKSIEHKVFRDIKNYLRPGDLLVLNNTRVIPARLYGKKETGAKVEVLLLEKNGNDKTWKALVKPGGKIKKGNKLIFEDNLTCTVEEHLEDGSRILKFDDPNFFSKLPRIGEVPLPPYIKKQIDDPEKYQTTYAKYDGAVAAPTAGLHFTKELIEELTDYGVRFAEITLHVGLGTFRPVKEADIRNHQIHEEYYTVPKSVLRDIVRAKAEGKRVIATGTTVVRTLESIARNPDKLAGKTDLYIYPPFEFKIIDAMITNFHLPKSSLLFLVSAFAGQDFIMNSYQIAKEKKYRFFSFGDAMFII

SEQ ID NO: 70225 - protein, 358 aa, Petrotoga mobilis
  REGION 1..358: note = tr|A0A117L096|A0A117L096_9BACT S-adenosylmethionine:tRNA ribosyltransferase-isomerase; OS = Petrotoga mobilis OX=69499 GN=queA PE=3 SV=1
MNISLIKTNYWNFGGFLMSELSFDLEKYDYELPEELIAQEPVEPRDSCKLMVLNRKTKSIEHKVFRDIKSYLQPGDLLVLNNTRVIPARLYGKKETGAKVEVLLLEKNGNDKTWKALVKPGGKIKKGNKLIFEDNLTCTVEEHLEDGSRILEFDDPNFFSKLEKIGEVPLPPYIKKQIDDPEKYQTTYAKYDGAVAAPTAGLHFTKELIEELSDYGVNFTEITLHVGLGTFRPVSEADIRNHQIHEEYYTVSKSVLRDIVRAKAEGKRVIATGTTVVRTLESIARNPDKLAGKTDLYIYPPFEFKIIDALITNFHLPRSSLLFLVSAFAGQDFVMNSYQIAKEKKYRFFSFGDAMFII

SEQ ID NO: 70226 - protein, 341 aa, Petrotoga olearia
  REGION 1..341: note = tr|A0A2K1NZU9|A0A2K1NZU9_9BACT S-adenosylmethionine:tRNA ribosyltransferase-isomerase; OS = Petrotoga olearia DSM 13574 OX=1122955 GN=queA PE=3 SV=1
MSELSFDLEKYDYELPEELIAQEPVEPRDSCKLMVLNRKTKSIEHKVFRDIKSYLQPGDLLVLNNTRVIPARLYGKKETGAKVEVLLLEKDGNDKTWKALVKPGGKIKKGNKLIFEDNLTCTVEEHLEDGSRILEFDDPNFFSKLEKIGEVPLPPYIKKKIDDPEKYQTTYAKYDGAVAAPTAGLHFTKELIEELTDYGVRFAEITLHVGLGTFRPVSEADIRNHQIHEEYYTVSKSVLRDIVRAKAEGKRVIATGTTVVRTLESIARNPDKLAGKTDLYIYPPFEFKIIDALITNFHLPRSSLLFLVSAFAGQDFIMNSYQIAKEKKYRFFSFGDAMFII

SEQ ID NO: 70227 - protein, 341 aa, Petrotoga sibirica
  REGION 1..341: note = tr|A0A4R8EUW9|A0A4R8EUW9_9BACT S-adenosylmethionine:tRNA ribosyltransferase-isomerase; OS = Petrotoga sibirica OX=156202 GN=queA PE=3 SV=1
MSEQSFDLEQYDYELPEDLIAQEPLEPRDSCKLMVLNRKTKSIEHKVFRDIKNYLRPGDLLVLNNTRVIPARLYGKKETGAKVEVLLLEKNGNDKTWKALVKPGGKIKKGNKLIFEDNLTCTVEEHLEDGSRILKFDDPNFFSKLPRIGEVPLPPYIKKQIDDPEKYQTTYAKYDGAVAAPTAGLHFTKELIEELTDYGVRFAEITLHVGLGTFRPVKEADIRNHQIHEEYYTVPKSVLRDIVRAKAEGKRVIATGTTVVRTLESIARNPDKLAGKTDLYIYPPFEFKIIDAMITNFHLPKSSLLFLVSAFAGQDFIMNSYQIAKEKKYRFFSFGDAMFII

SEQ ID NO: 70228 - protein, 341 aa, Petrotoga sp.
  REGION 1..341: note = tr|A0A328PUP2|A0A328PUP2_9BACT S-adenosylmethionine:tRNA ribosyltransferase-isomerase; OS = Petrotoga sp. 9PW.55.5.1 OX=1308979 GN=queA PE=3 SV=1
MSEELFDLERYDYNLPDELIAQEPAEPRDSCKLMVINRRTKSIEHKIFKDIGDYLEPGDLLVLNNTKVIPARLYGRKETGAHVEVLLLEKDGSEKRWKALVKPGGKIKTGNKLYFKNNLSCSVVEHLDDGSRILEFQEPQFYSKLEQIGEIPLPPYIKKELDDPNKYQTEYAKFDGAVAAPTAGLHFTKELMDELKVRGIKFAEITLHVGLDTFRPVKEQDIRNHQIHEEYFNVSKDVLHEIARTKAQGKRVIAVGTTVVRTLESISRNPNKLVDKTSLYIYPPFEFKIVDALITNFHLPKSSLLFLVSAFSDYKFIMDAYEIAKEKEYRFFSFGDAMFII

SEQ ID NO: 70229 - protein, 341 aa, Petrotoga sp.
  REGION 1..341: note = tr|A0A421CNC9|A0A421CNC9_9BACT S-adenosylmethionine:tRNA ribosyltransferase-isomerase; OS = Petrotoga sp. HKA.pet.4.5 OX=1473155 GN=queA PE=3 SV=1
MSEQSFDLEQYDYELPEELIAQEPFEPRDSCKLMVLNRRVKSIEHKVFRDIKNYLRPGDLLVLNNTRVIPARLYGKKETGAKVEVLLLEKNGNDKTWKALVKPGGKIKKGNKLIFEDDLVCTVVEHLEDGSRILEFDDPNFFSKLPRIGEVPLPPYIKKQIDDPEKYQTTYAKNNGAVAAPTAGLHFTQELIDELTDYGVNFTEVTLHVGLGTFRPVKEPDIRNHQIHEEYYTVSKSVLHDIVRAKANGKRVIATGTTVVRTLESIARNPDKLAGKTDLYIYPPFEFKIIDAMITNFHLPRSSLLFLVSAFADRDFIMNSYEIAKENKYRFFSFGDAMFIM

SEQ ID NO: 70230 - protein, 356 aa, Phaeobacter gallaeciensis
  REGION 1..356: note = tr|V9WGP0|V9WGP0_9RHOB S-adenosylmethionine:tRNA ribosyltransferase-isomerase OS=Phaeobacter gallaeciensis DSM 26640 OX=1423144 GN=queA PE=3 SV=1
MKLSDFDFDLPDDRIATRPAVPRSSARLLVAEGDHISDARVANLGQWLRPGDRLVLNDTKVIPARLSGLRHRDTAQGPMAAKVEVTLLDPGADGSWAALLKPLKKVKLGEEIIFSDALSATLERIEDGQGHLKFNLSGTDFDAALAEAGAMPLPPYIAAKRPADEQDKTDYQTVWARNSGAVAAPTASLHFDDALLAELQAKGVEISYVTLHVGAGTFLPVKVEDVTTHRMHAEWGRVSAEAAAEIAATKAAGGRVIPVGTTALRLIESAGQSGAIQPWEGDTDIFIYPGFTFHVADALMTNFHLPKSTLLMLVSALMGQDRIRAIYDHALAEDYRFFSYGDASLLIPPMAEMSQT

SEQ ID NO: 70231 - protein, 349 aa, Phaeobacter gallaeciensis
  REGION 1..349: note = tr|A0A366WR11|A0A366WR11_9RHOB S-adenosylmethionine:tRNA ribosyltransferase-isomerase; OS = Phaeobacter gallaeciensis OX=60890 GN=queA PE=3 SV=1
MKLSDFDFDLPEDLIATRPASPRSSARLLVADAGQITDAHVFDLTEWLRPGDRLILNDTKVLPARLSGKRHRDSAQGPVSAAIEVTLLDPKASGTWTALLKPLKKIKIGESIIFTDQFSAVLEDVIEGQGVLRFNLTGSDFDGALSEAGAMPLPPYIAAKRKADAQDKTDYQTVWARHAGAVAAPTASLHFDDTLLAKLTSKGVGFTHVTLHVGAGTFLPVKVEDVTTHKMHAEWGHVSEQAAAEINETKAAGGRVIPVGTTALRLIESAARSGRIQAWDGETDIFIYPGFEFHVADALMTNFHLPKSTLLMLVSALMGKGQMDEIYAHAVNSRYRFFSYGDASLLFPS

SEQ ID NO: 70232 - protein, 356 aa, Phaeobacter inhibens
  REGION 1..356: note = tr|A0A2I7K988|A0A2I7K988_9RHOB S-adenosylmethionine:tRNA ribosyltransferase-isomerase; OS = Phaeobacter inhibens OX=221822 GN=queA PE=3 SV=1
MKLSDFDFDLPDDRIATRPAVPRSSARLLVAEGDRIRDARVANLGQWLRSGDRLVLNDTKVIPARLSGLRHRDTAQGPMAAKVEVTLLDPGADGSWAALLKPLKKVKPGEEIVFSDALSATLERIEDGQGHLKFNLSGTDFDAALAEAGAMPLPPYIAAKRPADEQDKTDYQTVWARNSGAVAAPTASLHFDDALLAELQAKGVEISYVTLHVGAGTFLPVKVEDVTTHRMHAEWGRVSAEAATEIAATKAAGGRVIPVGTTALRLIESAGQSGAIQPWEGDTDIFIYPGFTFHVADALMTNFHLPKSTLLMLVSALMGQDRIRAIYDHALAEEYRFFSYGDASLLIPPTAEMSQT

SEQ ID NO: 70233 - protein, 356 aa, Phaeobacter inhibens
  REGION 1..356: note = tr|A0A135IJK8|A0A135IJK8_9RHOB S-adenosylmethionine:tRNA ribosyltransferase-isomerase; OS = Phaeobacter inhibens OX=221822 GN=queA PE=3 SV=1
MKLSDFDFDLPDDRIATRPAVPRSSARLLVAEGDRIRDARVANLGQWLRSGDRLVLNDTKVIPARLSGLRHRDTAQGPMAAKVEVTLLDPGADGSWAALLKPLKKVKLGEEIIFSDALSATLERIEDGQGHLKFNLSGTDFDAALAEAGAMPLPPYIAAKRPADEQDKTDYQTVWARNSGAVAAPTASLHFDDALLAELQAKGVEISYVTLHVGAGTFLPVKVEDVTTHRMHAEWGRVSAEAATEIAATKAAGGRVIPVGTTALRLIESAGQSGAIQPWEGDTDIFIYPGFTFHVADALMTNFHLPKSTLLMLVSALMGQDRIRAIYDHALAEEYRFFSYGDASLLIPPTAEMSQT

SEQ ID NO: 70234 - protein, 353 aa, unidentified
  source 1..353: note = Phaeobacter italicus
  REGION 1..353: note = tr|A0A0H5CXK4|A0A0H5CXK4_9RHOB S-adenosylmethionine:tRNA ribosyltransferase-isomerase; OS = Phaeobacter italicus OX=481446 GN=queA PE=3 SV=1
MKLSDFDFDLPDDLIATRPAVPRTSARLLVAEADQISDATVADLGQWLRPGDRLVLNDTKVIPARLSGQRHRDTAQGPMAAKVEVTLLEPGADGCWSALLKPLKKVKLGEEIIFSDQLSARLDRVEDGQGYLAFNLSGDDFDTALAEAGAMPLPPYIAAKRAADEQDKTDYQTVWARNSGAVAAPTASLHFDETLLAQLREMGVSFSYVTLHVGAGTFLPVKVEDVTTHKMHSEWGRVSAEAAEEIAATKAAGGRVIPVGTTALRLIESAARSGAIEPWEGDTDIFIYPGFTFNVADALMTNFHLPKSTLMMLVSALMGQERIREIYEHAVSQRYRFFSYGDASLLIPAKTRV

SEQ ID NO: 70235 - protein, 356 aa, unidentified
  source 1..356: note = Phaeobacter piscinae
  REGION 1..356: note = tr|A0A291FNY1|A0A291FNY1_9RHOB S-adenosylmethionine:tRNA ribosyltransferase-isomerase; OS = Phaeobacter piscinae OX=1580596 GN=queA PE=3 SV=1
MKLSDFDFDLPDDRIATRPAVPRSSARLLVAEGDRISDARVANLGQWLRPGDRLVLNDTKVIPARLSGLRHRDTAQGPMAAKVEVTLLDPGADGSWAALLKPLKKVKLGEEIIFSDALSATLERIEDGQGHLSFNLSGTDFDAALAEAGAMPLPPYIAAKRPADEQDKTDYQTVWARNSGAVAAPTASLHFDDALLAELQAKGVEISYVTLHVGAGTFLPVKVEDVTTHRMHAEWGRVSAEAAAEIAATKAAGGRVIPVGTTALRLIESAAQSGAIQPWEGDTDIFIYPGFTFHVADALMTNFHLPKSTLLMLVSALMGQDRIRAIYDHALAEEYRFFSYGDASLLIPPMAELSQT

SEQ ID NO: 70236 - protein, 356 aa, unidentified
  source 1..356: note = Phaeobacter piscinae
  REGION 1..356: note = tr|A0A291G006|A0A291G006_9RHOB S-adenosylmethionine:tRNA ribosyltransferase-isomerase; OS = Phaeobacter piscinae OX=1580596 GN=queA PE=3 SV=1
MKLSDFDFDLPDDRIATRPAVPRSSARLLVAEGDRISDARVANLGQWLRSGDRLVLNDTKVIPARLSGVRHRDTAQGPMAAKVEVTLLDPGADGSWAALLKPLKKVKLGEEIIFSDALSATLERIEDGQGHLKFNLSGTDFDAALAEAGAMPLPPYIAAKRPADEQDKTDYQTVWARNSGAVAAPTASLHFDDALLAELQAKGVEISYVTLHVGAGTFLPVKVEDVTTHRMHAEWGRVSAEAAAEIAATKAAGGRVIPVGTTALRLIESAAQSGAIQPWEGDTDIFIYPGFTFHVADALMTNFHLPKSTLLMLVSALMGQDRIRVIYDHALAEEYRFFSYGDASLLIPPMAELSQT

SEQ ID NO: 70237 - protein, 356 aa, unidentified
  source 1..356: note = Phaeobacter porticola
  REGION 1..356: note = tr|A0A1L3I4Z9|A0A1L3I4Z9_9RHOB S-adenosylmethionine:tRNA ribosyltransferase-isomerase; OS = Phaeobacter porticola OX=1844006 GN=queA PE=3 SV=1
MKLSDFDFDLPDDRIATRPAVPRSSARLLVAEGDHISDARVANLGQWLRPGDRLVLNDTKVIPARLSGLRHRDTVQGPMAAKVEVTLLDPGADGSWAALLKPLKKVKLGEEIIFSDALSATLERIEDGQGHLKFNLSGTDFDAALAEAGAMPLPPYIAAKRPADEQDKTDYQTVWARNSGAVAAPTASLHFDDALLAELQAKGVEISYVTLHVGAGTFLPVKVEDVTTHRMHAEWGRVSTETAAEIAATKAAGWRVIPVGTTALRLIESAAQSGAIQPWEGDTDIFIYPGFTFHVADALMTNFHLPKSTLLMLVSALMGQDRIRAIYDHALAEEYRFFSYGDASLLIPPTAEMSQT

SEQ ID NO: 70238 - protein, 356 aa, Phaeobacter sp.
  REGION 1..356: note = tr|A0A384GXX8|A0A384GXX8_9RHOB S-adenosylmethionine:tRNA ribosyltransferase-isomerase; OS = Phaeobacter sp. S60 OX=1569353 GN=queA PE=3 SV=1
MKLSDFDFDLPDDRIATRPAVPRSSARLLVAEGDRISDARVANLGQWLRPGDRLVLNDTKVIPARLSGLRHRDTAQGPMAAKVEVTLLDPGADGSWAALLKPLKKVKLGEEIIFSDALSATLERIEDGQGHLAFNLSGTDFDAALAEAGAMPLPPYIAAKRPADEQDKTDYQTVWARNSGAVAAPTASLHFDDALLAELQAKGVEISYVTLHVGAGTFLPVKVEDVTTHRMHAEWGRVSAEAAAEIAATKAAGGRVIPVGTTALRLIESAAQSGAIQPWEGDTDIFIYPGFTFHVADALMTNFHLPKSTLLMLVSALMGQDRIRAIYDHALAEEYRFFSYGDASLLIPPMAELSQT

SEQ ID NO: 70239 - protein, 349 aa, Phaeobacter sp.
  REGION 1..349: note = tr|A0A254R488|A0A254R488_9RHOB S-adenosylmethionine:tRNA ribosyltransferase-isomerase; OS = Phaeobacter sp. 22II1-1F12B OX=1317111 GN=queA PE=3 SV=1
MKLSDFDFDLPDDRIALRPAVPRSSARLLVADRGIINDAHVHDLPDWLRPGDRLVLNDTQVIPARLTGQRRRSGAQGDTAARIELTLLEPRADGCWTGLIKPLKKIRPGEMIHFTDALSAELIGVEDGQGIVRFNLAGDDFDAALEEAGQMPLPPYIASQRPADAQDKTDYQTVFARVPGAVAAPTASLHFDDALLAQLKERGVEFTHVTLHVGAGTFLPVKVEDVTTHKMHAEWGEVSEQAAAEIAATRASGGRVIPVGTTALRLIESAARGGKIAPWRGETDIFIYPGFKFHVTDALMTNFHLPKSTLLMLVSALIGYEEMRVIYDHAVKTGYRFFSYGDSSLLIPR

SEQ ID NO: 70240 - protein, 409 aa, unidentified
  source 1..409: note = Phaeodactylibacter luteus
  REGION 1..409: note = tr|A0A5C6RJ47|A0A5C6RJ47_9BACT S-adenosylmethionine:tRNA ribosyltransferase-isomerase; OS = Phaeodactylibacter luteus OX=1564516 GN=queA PE=3 SV=1
MRPQEIDINEYNYDLPEERIAKFPLEQRDASKLLIYKNGHLSHGVFRELPGLLPEQALLVFNNTRVIHARLHFALPNGKPLEILCLEPLSPAEHQQSFSSTQAVHWKCMVGGNRRWKSGEIAKTVAGPSGEVNLSATRIGRTADAFEIRFEWDDPTLAFGELLAAAGIIPLPPYLNRENTPEDEDRYQTVYAEEEGSVAAPTAGLHFTDEVLRELEKQGAQRAFVTLHVGAGTFKPVTADRLEGHHMHEESIFIHPDTLQQLAAHLEAGHPVIPVGTTSTRLLESLYWHGRKVLDGGAAPFASVGQWEPYEGKPDVAPAEALRATVEHLKVNGQEHLQGFTRLIIAPGYTFRICSGMITNFHQPRSTLLLLIAALIGKDWKAAYQYALDNSFRFLSYGDSSLLLGQGVR

SEQ ID NO: 70241 - protein, 354 aa, unidentified
  source 1..354: note = Phaeodactylibacter luteus
  REGION 1..354: note = tr|A0A5C6S372|A0A5C6S372_9BACT S-adenosylmethionine:tRNA ribosyltransferase-isomerase; OS = Phaeodactylibacter luteus OX=1564516 GN=queA PE=3 SV=1
MRTKLSQFDFDLPSDRIAKHPEKNRHDSKLMVIHRDSGKIEHRQFKDILEYFDEGDTMIFNNTKVFPARLYGQKEKTGADIEVFLLRELNSDSRLWDVLVDPARKIRVGNKLYFCDEHGNEVLVAEVVDNTTSRGRTIRFIYEDSDEAFQRDLNRLGTTPLPKEIGRKAEPADRDRFQTVFAKELGAVAAPTAGLHYSEELMKRLEIKGVEFAELTLHIGLGTFRSIDVEDLSKHKMDAEYFRITDRAVDTVNRSKTEGHRVCAVGTTTMRSIESAVSAEGLLKEAEGWTNLFIYPPYEFSIADAMVTNFHLPKSSLMIMVCAFGGYDLIMEAYKQALKEGYRFFSYGDAMLIL

SEQ ID NO: 70242 - protein, 417 aa, unidentified
  source 1..417: note = Phaeodactylibacter xiamenensis
  REGION 1..417: note = tr|A0A098S0H6|A0A098S0H6_9BACT S-adenosylmethionine:tRNA ribosyltransferase-isomerase; OS = Phaeodactylibacter xiamenensis OX=1524460 GN=IX84_26530; PE = 3 SV=1
MRTNYQSLVDPKSINIKNFSYELPESRIAKFPLEERDASKLLYYNGGKIDAHSFRALPELLPEGALLVFNNTKVIHARLHFTLPNDKRLEILCLEPLAPAEYQQNFSSAQKVRWKCLVGGNRKWKTGVIEKTITTELGDVQLQATRIGRMENAFEVEFEWNDDRIAFGSLLAAAGIIPLPPYLNRENVPEDEDRYQTVYAKTKGSVAAPTAGLHFTDRVFDDLKEKGISTLEVTLHVGAGTFKPVSAEALADHHMHEESIYINLATLNTLIAHLEQGKPIIPVGTTSMRLLESLYWHGQSLCSGQPASFIDVQQWTPYEEGKRPSTLESFQAVRQAMEAQQQETVQGYTQLIIAPGYTFRVCNGIITNFHQPQSTLLLLIAALIGEDWKKVYDFALSEGFRFLSYGDSSLLLPGSQN

SEQ ID NO: 70243 - protein, 354 aa, unidentified
  source 1..354: note = Phaeodactylibacter xiamenensis
  REGION 1..354: note = tr|A0A098RZ29|A0A098RZ29_9BACT S-adenosylmethionine:tRNA ribosyltransferase-isomerase; OS = Phaeodactylibacter xiamenensis OX=1524460 GN=queA PE=3; SV = 1
MRTKLSQFDFTLPPELIAKYPADNRHDSRLMVVHRDSGKIEHRTFKDILEYFDEGDAMIFNNTKVFPARLYGKKEKTGADIEVFLLRELNSESRLWDVLVDPARKIRVGNKLYFSDEHDNDVLVAEVVDNTTSRGRTIRFIYDDSDENFQKDLHRLGTTPLPKEIGRKAETLDRDRYQTLFAKEMGAVAAPTAGLHYSDELLKRLEIKGVEFAELTLHIGLGTFRSIDVEDLSKHKMDAEYFKIDNNAVETVNKAKAGEHRVCAVGTTSMRAIESAVSAENMLKEAEGWTNLFIYPPYEFSIPDAMVTNFHLPKSSLMIMVCAFGGYDLIMEAYKQAVKEKYRFFAYGDAMLII

SEQ ID NO: 70244 - protein, 347 aa, Phaeospirillum fulvum
  REGION 1..347: note = tr|A0A1H6HG22|A0A1H6HG22_PHAFV S-adenosylmethionine:tRNA ribosyltransferase-isomerase; OS = Phaeospirillum fulvum OX=1082 GN=queA PE=3 SV=1
MKVDIFDFDLPRELIAERPARPRDSARMLRVGADGIADGGVRDLPALLCPGDVMVFNDTRVIPARLDGKRGTASVELTLHLRKDESCWRAFARPAKKLRPGDRIDFAADFSATVETKGEAGEVTLRFDRGGPALMAALEAHGRLPLPPYIRHGEADATDRADYQTTFARADGAVAAPTAGLHFTPELLAALDQRGVVRTTVTLHVGAGTFLPVKVDDTDDHKMHAEIGIVTEDSARTINAARAAGGRVIAVGTTALRLLESAAGEDGQVRPFAAATDIFIVPGYRFRAVDRLMTNFHLPRSTLFMLVSAFAGLERMRAAYAHAMASGYRFYSYGDSCLLDRNDDDQL

SEQ ID NO: 70245 - protein, 345 aa, Phaeospirillum fulvum
  REGION 1..345: note = tr|S9TYG4|S9TYG4_PHAFV S-adenosylmethionine:tRNA ribosyltransferase-isomerase OS=Phaeospirillum fulvum MGU-K5 OX=1316936 GN=queA PE=3 SV=1
MDIFDFDLPRELIAERPARPRDSARMLRVAADGIGDGGVRDLPDLLCPGDVLVFNDTRVIPARLDGKRGTASVELTLHLREDESCWRAFARPAKKLRPGDRIDFAADFSASVEEKGEAGEVLLRFDRGGPALMAALEAHGRLPLPPYIRHGEADETDRADYQTTFARTDGAVAAPTAGLHFTPELLAALDQRGVKRVAVTLHVGAGTFLPVKAEDTDDHKMHAEIGVVSDEAARAINVARAAGGRVIAVGTTALRLLESAAGEDGQVRPFAAATDIFIVPGYRFRVVDRLMTNFHLPRSTLFMLVSAFAGLDRMRAAYAHAMASGYRFYSYGDSSLLDRNDDDQL

SEQ ID NO: 70246 - protein, 343 aa, Phaeospirillum molischianum
  REGION 1..343: note = tr|H8FU19|H8FU19_PHAMO S-adenosylmethionine:tRNA ribosyltransferase-isomerase OS=Phaeospirillum molischianum DSM 120 OX=1150626 GN=queA PE=3 SV=1
MFDFDLPRALIAERPARPRDSARMLRVSADGVKDRGVRDLPSQLCPGDVMVFNDTRVIPARLNGKRGTASVELTLHLREDDSCWRAFARPAKKLRPGDRIAFAEDFSAIVEEKGEAGEVTVRFDRGGVALMAALETHGRLPLPPYIRHGEADETDRADYQTTFARTDGAVAAPTAGLHFTPELLEALDRRGVKRVAVTLHVGAGTFLPVKVDDTDDHRMHAEIGVVSADSAQAINEARAAGGRVVAVGTTALRLLESAAGEDGLVRPYAAATDIFIVPGYRFRAVDLLMTNFHLPRSTLFMLVSAFAGLDRMRAAYAHAMASGYRFYSYGDSCLLDRNDDDQL

SEQ ID NO: 70247 - protein, 342 aa, Phascolarctobacterium faecium
  REGION 1..342: note = tr|A0A3G9GT33|A0A3G9GT33_9FIRM S-adenosylmethionine:tRNA ribosyltransferase-isomerase; OS = Phascolarctobacterium faecium OX=33025 GN=queA PE=3 SV=1
MQVKDFTYELPQELIAQYPLEPRDHSRLLVLDKNTGAIEHRYFYDLCEYLRHDDLLVFNDTRVIPARLHGVKDTGARVEVFLLTRLNSTDWEVLVKPGRKLRVGAKIKFSDELSCDIIADTDFGGRIARFYYNGVFEEILDRLGETPLPPYITAPLEDKERYQTVYSRENGSAAAPTAGLHFTKELLQKIRDIGCEEVFVTLHVGLGTFRPVSVDDIKDHVMHREFYSVSPEAAEAINKAKAEGRRIVAVGTTAVRTLEAAGESGVIKAGGNWTNIFIYPGYRFRLVNSLITNFHLPQSTLLMLVSALSTREIMLSTYAEAVREHYRFFSFGDAMFITDLNK

SEQ ID NO: 70248 - protein, 342 aa, Phascolarctobacterium sp.
  REGION 1..342: note = tr|R6I8F7|R6I8F7_9FIRM S-adenosylmethionine:tRNA ribosyltransferase-isomerase OS=Phascolarctobacterium sp. CAG:207 OX=1262914 GN=queA PE=3 SV=1
MQVKDFTYELPQELIAQYPLEPRDHSRLLVVDKNTGAIEHRYFYDLCEYLRHDDLLVFNDTRVIPARLHGVKDTGARVEVFLLTRLNSTDWEVLVKPGRKLRVGAKIKFSDDLSCDIIADTDFGGRIARFYYNGAFEEILDRLGETPLPPYITAPLEDKERYQTVYSRENGSAAAPTAGLHFTKELLQKIRDIGCEEVFVTLHVGLGTFRPVSVDDIKDHVMHREFYSVSPEAAEAINKAKAEGRRIVAVGTTAVRTLEAAGESGVIKAGGNWTNIFIYPGYRFRLVNSLITNFHLPQSTLLMLVSALSTREIMLSTYAEAVREHYRFFSFGDAMFITDLNK

SEQ ID NO: 70249 - protein, 343 aa, Phascolarctobacterium sp.
  REGION 1..343: note = tr|A0A316S430|A0A316S430_9FIRM S-adenosylmethionine:tRNA ribosyltransferase-isomerase; OS = Phascolarctobacterium sp. OX=2049039 GN=queA PE=3 SV=1
MQVSDFNYDLPQELIAQTPMEPRDHSRLLVVDKDTGKIEHRHFYDLPNYLRPDDLLVFNDTRVIPARLHGVKDTGAKAEVFLLTRLNATDWEVLVRPGKRLRTGANIKFSDDLSCEIIDNTEFGGRIARFKFDGVFEEILDRLGETPLPPYITKQLEDKERYQTVYSRDKGSAAAPTAGLHFTKELLQKVKDMGCEEVFVTLNIGLGTFRPVSVENIEDHIMHKEFYTITPEAADAINKAKAAGRRIVSVGTTAVRTLEAAATANNGVIKPGAAWTDIFIYPGYKFKMVDALVTNFHLPQSTLLMLVSTLSTREIMLKTYEEAVREKYRFFSFGDAMFITDHL

SEQ ID NO: 70250 - protein, 342 aa, Phascolarctobacterium succinatutens
  REGION 1..342: note = tr|E8LGA7|E8LGA7_9FIRM S-adenosylmethionine:tRNA ribosyltransferase-isomerase OS=Phascolarctobacterium succinatutens YIT 12067 OX=626939 GN=queA PE=3 SV=1
MLVTDFDYDLPQELIAQHPMEPRDHSRLLVVDKKTGEIEHKHFYDLVNYLKPGDVLVFNDTRVIPARLHGTKDTGAHVEVFLLTRRDATDWEVLVRPGKKLQVGAKINFSDELSCEVIEHTDFGGRVVRFKYDGIFEEILDRLGETPLPPYITAPLEDKERYQTVYNRERGSAAAPTAGLHFTKELLQKIKEIGCEEVFVTLHVGLGTFRPVSEAKIEDHKMHKEFYTVSQEAADAVNKAKAEGRRIIAVGTTAVRTLEAAGADGQLHAGSSWTNIFIYPGYKFRLVDDLVTNFHLPQSTLLMLVSTLSTREIMLQTYKKAVEEKYRFFSFGDAMFITDLNK

SEQ ID NO: 70251 - protein, 342 aa, Phascolarctobacterium succinatutens
  REGION 1..342: note = tr|A0A3C1IMA9|A0A3C1IMA9_9FIRM S-adenosylmethionine:tRNA ribosyltransferase-isomerase; OS = Phascolarctobacterium succinatutens OX=626940 GN=queA; PE = 3 SV=1
MLVTDFDYDLPQELIAQHPMEPRDHSRLLVVDKKTGEIEHKHFYDLVNYLKPGDVLVFNDTRVIPARLHGTKDTGAHVEVFLLTRRDATDWEVLVRPGKKLQVGAKINFSDELSCEVIEHTDFGGRVVRFKYDGIFEEILDRLGETPLPPYITAPLEDKERYQTVYNRERGSAAAPTAGLHFTKELLQKIKEIGCEEVFVTLHVGLGTFRPVSEAKIEDHKMHKEFYTVSQEAADAVNKAKAEGRRIIAVGTTAVRTLEAAGADGQLHAGSSWTNIFIYPGYKFRLVDDLVTNFHLPQSTLLMLVSTLSTREIMLQTYKKAVEEKYRFFSFGDAMFITELNK

SEQ ID NO: 70252 - protein, 357 aa, unidentified
  source 1..357: note = Phenylobacterium deserti
  REGION 1..357: note = tr|A0A328ABZ9|A0A328ABZ9_9CAUL S-adenosylmethionine:tRNA ribosyltransferase-isomerase; OS = Phenylobacterium deserti OX=1914756 GN=queA PE=3 SV=1
MRLADFDFILPEESIALRPANPRDSARLLLVEPGAPLQDLRVYDLPGLLRSGDILVLNDTRVIPARLKGVRLRGESRVACEATLHKRLSAHVWTAFMRPGKKLSPGDRIAFGATSDAACLLSALDATVKEKGEGGEVTLAFDLSGPDLDVAISERGAMPLPPYIAAKRGEDEKDRADYQTVYAQEDGSVAAPTAGLHFTPQLFAGLEAAGVQTAFVTLHVGAGTFLPVKSEDLSEHRMHAEWGEVDEATADRLNAVRAAGGRIICVGTTSLRLLESAAGEDGVIRPFMDETSIFITPGYRFRAADGLMTNFHLPKSTLFMLVSAFAGYETMRAAYAHAIESGYRFYSYGDSSLLWRA

SEQ ID NO: 70253 - protein, 358 aa, unidentified
  source 1..358: note = Phenylobacterium hankyongense
  REGION 1..358: note = tr|A0A328B1K6|A0A328B1K6_9CAUL S-adenosylmethionine:tRNA ribosyltransferase-isomerase; OS = Phenylobacterium hankyongense OX=1813876 GN=queA PE=3; SV = 1
MQLADFDFDLPEDRIALRPASPRDSARLLVVEPGQALRDLQVRDLPGLLRAGDILVLNDTRVIPARLKGVRRREATSMRVEATLHKRLSPHAWTAFMRPGKRLAVGDRVSFGETDDRACLLGALDATVKAKGEGGEVTLAFDLSGPDLDAAIAERGAMPLPPYIAAKRGEDAQDRTDYQTVYAEEDGSVAAPTAGLHFTPELFARLAEAGVETAFVTLHVGAGTFLPVKTENLAEHRMHAEWGEVDAATAERLNAVRRAGGRIVCVGTTSLRLLESATGEDGVVRPFMDETAIFITPGYRFRAADGLVTNFHLPKSTLFMLVSAFAGLETMRAAYAHAIATGYRFYSYGDGSLLWRAA

SEQ ID NO: 70254 - protein, 358 aa, unidentified
  source 1..358: note = Phenylobacterium kunshanense
  REGION 1..358: note = tr|A0A328BNJ7|A0A328BNJ7_9CAUL S-adenosylmethionine:tRNA ribosyltransferase-isomerase; OS = Phenylobacterium kunshanense OX=1445034 GN=queA PE=3; SV = 1
MKLADFDFHLPEERIALRPAIPRDSARLLLVEPGAALRDLHVRDLPGLLRAGDVLVVNDTRVIPARLKGVRLRGESRVAVEATLHRQLSGHVWTAFMRPGKKLAPGDRISFGEPSDRACLLGALDATVREKGEGGEVTLAFDLSGPDLMAAIAERGMMPLPPYIAAKRGEDAQDRADYQTIYAAEDGSVAAPTAGLHFTPELLGRLEAMGVGFERVTLHVGAGTFLPVKTDELADHRMHAEWGEIDAATADRLNAARAAGGRVICVGTTSLRLLESAADETGAIRPFAAETAIFITPGYRFRAVDGLMTNFHLPKSTLFMLVCAFAGFETMKAAYAHAIADGYRFYSYGDASLLWREV

SEQ ID NO: 70255 - protein, 358 aa, Phenylobacterium sp.
  REGION 1..358: note = tr|A0A525JAW7|A0A525JAW7_9CAUL S-adenosylmethionine:tRNA ribosyltransferase-isomerase; OS = Phenylobacterium sp. OX=1871053 GN=queA PE=3 SV=1
MQLSDFDFDLPDSLIALRPATPRDAARLLVVTPGEGLADLAVRDLPGRLRRGDILVLNDTRVIPARLKGVRHRGESRVAVEATLHRRLSPASWTAFMRPGKRLAEGDRVVFGEAADRACFLGALDATITAKGDGGEVTLAFDLSGPDLDAAIAERGEMPLPPYIAAKRAEDEQDRRDYQTVYADEDGSVAAPTAGLHFTPELFAALAAAGVETAFVTLHVGAGTFLPVKTEDVSEHRMHPEWGEVDAGTAERLNAARAAGGRIVCVGTTSLRLLESATGEDGVIRPFMDETAIFITPGYRFRAADGLMTNFHLPKSTLFMLVSAFAGLDTMRAAYAHAIAEGYRFYSYGDASLLWRAA

SEQ ID NO: 70256 - protein, 359 aa, Phenylobacterium sp.
  REGION 1..359: note = tr|A0A1E4GV90|A0A1E4GV90_9CAUL S-adenosylmethionine:tRNA ribosyltransferase-isomerase; OS = Phenylobacterium sp. SCN 70-31 OX=1660129 GN=queA PE=3; SV = 1
MKLADFDFHLPDNRIALRPADPRDSARLLVVEPALPLRDETVRDLPGELRSGDVLVVNDTRVIPARLKGVRLRGDSRVVVEATLHRQTGPAAWTAFMRPGKRLAEGDRVVFGEPGDRACLLGSLEATVTGKGDGGEVFLAFDLAGPDLMAAIAERGVMPLPPYIAAKRPEDERDRADYQTVYAEADGSVAAPTAGLHFTPELLARLTAMGVGFERVTLHVGAGTFLPVKTEDLADHRMHAEWGEVPEEVADRLNAARDAGGRIVCVGTTSLRLLESAADESGRIRPFSAETAIFITPGYRFRAADGLMTNFHLPKSTLFMLVSAFAGLDAMRAAYAHAIGTGYRFYSYGDSSLLWRAGR

SEQ ID NO: 70257 - protein, 348 aa, unidentified
  source 1..348: note = Phenylobacterium zucineum
  REGION 1..348: note = tr|A0A227JQE2|A0A227JQE2_9CAUL S-adenosylmethionine:tRNA ribosyltransferase-isomerase; OS = Phenylobacterium zucineum OX=284016 GN=queA PE=3 SV=1
MQLSDFDFDLPETAIALRPAEPRDSARMLLVRPGARWADLRVSDLPSQLRAGDVLVLNDTRVIPARMSATRIRGASEIRTEATLHQRLAPDTWSAFMRPGKRLSPGDDLVFGGCLTASVVEKREGGEVVLNFSLSGLALDLAVAEIGVMPLPPYIAAKRPQDQRDKADYQTVYAAADGSVAAPTAGLHFTPSLLAQIEALGVHLAFVRLHVGAGTFLPVKVDDIATHKMHAEYGEVTSATADTINAARAAGGRVVCVGTTSLRLIESAADQDGRVHPFADETAIFITPGYRFRAVDGLMTNFHLPKSTLFMLVSAFAGLEVMREAYRRAIDTGYRFYSYGDSSLLWRA

SEQ ID NO: 70258 - protein, 357 aa, unidentified
  source 1..357: note = Phenylobacterium zucineum
  REGION 1..357: note = sp|B4R9Q3|QUEA_PHEZH S-adenosylmethionine:tRNA ribosyltransferase-isomerase OS=Phenylobacterium zucineum (strain HLK1) OX=450851 GN=queA PE=3 SV=1
MKLADFDFDLPEEAIALRPANPRDAARLLLVEPGQDFRDLAVRDLPGLLRAGDVLVLNDTRVIPARLKGVRTREGSRVAVEATLHQRKAGHVWTAFMRPGKRLAPGDRVSFGETDDRACFLGALDATVKEKGEGGEVTLAFDLSGPDLDAAIAERGAMPLPPYIAAKRAEDEQDRADYQTVYAEEDGSVAAPTAGLHFTPELLARLAQAGVTTERVTLHVGAGTFLPVKTEDISEHRMHAEWGEVDAATADRLNAARAAGGRIVCVGTTSLRLLESAAGEDGVVRPFRDETAIFITPGYRFRAADGLMTNFHLPKSTLFMLVCAFAGTDTMRAAYRHAIETGYRFYSYGDSSLLWRA

SEQ ID NO: 70259 - protein, 363 aa, Phocoenobacter uteri
  REGION 1..363: note = tr|A0A379CB03|A0A379CB03_9PAST S-adenosylmethionine:tRNA ribosyltransferase-isomerase; OS = Phocoenobacter uteri OX=146806 GN=queA PE=3 SV=1
MLLSDFHFDLPNELIARYPTKQRSASRLLYVNGETGQYQDQQFTHILEHINEGDLLIFNNTRVIPARLYGKKLSGGKLEVLVERVLDEHRCLAHIRCSKSPKEGATIILGEDKLGEGNGFKATMVTRHETLFELRFEEQQPLFELLERAGHMPLPPYIDRPDEDTDQERYQTVYSKELGAVAAPTAGLHFDDEMLQKLAEKGVQTAFVTLHVGAGTFQPVRVETIEDHKMHAEYAQVSQEVVDKILATKANGKRVIAVGTTSVRSVESAAQQAELGEQLIAPFFSDTSIFIYPGKSFRVIDALLTNFHLPESTLIMLVSAFAGYSNCMQAYQHAVAEKYRFFSYGDAMFIDKNPNALNDVPSK

SEQ ID NO: 70260 - protein, 343 aa, unidentified
  source 1..343: note = Phorcysia thermohydrogeniphila
  REGION 1..343: note = tr|A0A4R1GB91|A0A4R1GB91_9BACT S-adenosylmethionine:tRNA ribosyltransferase-isomerase; OS = Phorcysia thermohydrogeniphila OX=936138 GN=queA PE=3; SV = 1
MKVSDFDYELPKELIAKFPVEPRDSARLMVLHRDSGKLEHRIFRDIVEYLKEGDVLVLNDTKVIPARLFGRLETGGKVELLLVRQPLPNLWEVMAKPARKLKEGKRIIFDEELEGIVKGYAGEGRRLVEFKVKGNKDFMEKLEKVGHIPLPPYIEREERPEDREKYQTVFAQKPGAVAAPTAGLHFTEELLEKLRDKGVIIKTVTLHVGPGTFKPVKVENVEEHQMDYETYNVPEETAKEVNRAKDEGRRVIAVGTTVVRTLESAADESGRVKSGEGSTNLFIYPGYRFKVIDALITNFHLPRSTLLMLVSAFAGRERILNAYREAVKEGYRFYSYGDAMLIL

SEQ ID NO: 70261 - protein, 457 aa, unidentified
  source 1..457: note = Phormidesmis priestleyi
  REGION 1..457: note = tr|A0A0P7YU20|A0A0P7YU20_9CYAN S-adenosylmethionine:tRNA ribosyltransferase-isomerase; OS = Phormidesmis priestleyi Ana OX=1666911 GN=queA PE=3 SV=1
MLQSNSFVYCSVDHKTLNSIMAQCSPTSRDRQLSAYNYHLPAALIAQNPVTPRDSSRLLVVKEAVAEKAVAEKAVAEKAVAEKAQNYQHRHFRDLAELLLPGDLLVLNNTRVIPARLFGRKQIDTFRSNTSPADDLLNETRSGAQSTYSVGSAVVEVLLIEPIDADRWLALVKPGRRLQPGATIVFGEPESPMMHALVESRDESTNGRVLRLIPQGDRTIEEIIYQLGQIPLPPYITQSNSLPEQYQTIYARKQSQRTGTSLGEKSAENPSTASLVGSVAAPTAGLHFTDRLLTELAEKNIQTAEVTLHVGIGTFRPVEVSDIETHQMHQERIEVPAATVEKIQQTKANGGRVIAVGTTSTRALEGAAAISGKLQPYNGKTELFIYPGYQWRVIDGLITNFHLPGSSLMMMVSALIGRERLLALYEVAIQSEYRFYSFGDAMLILPEATLNRQTTAQ

SEQ ID NO: 70262 - protein, 370 aa, unidentified
  source 1..370: note = Phormidesmis priestleyi
  REGION 1..370: note = tr|A0A2T1D7H0|A0A2T1D7H0_9CYAN S-adenosylmethionine:tRNA ribosyltransferase-isomerase; OS = Phormidesmis priestleyi ULC007 OX=1920490 GN=queA PE=3; SV = 1
MLDRVDADFLLSAYDYELPKEQIAQTAAIPRDSAQLLVVDDQTQHSHHIFRELPDLLKSGDLLVLNNTRVLPARLYGQKPGGTEVEVLLLEEQQKDQWLALVKPGRRLKPGSKILFTPLRSDCSISLSAIVIASDEATRGRIIEFEISGNHSLLDVLDQFGQLPLPPYITDRDSQPEQYQTVYADRLGAVAAPTAGLHFTPELLDRLQQKGIDQAFVTLHVGVGTFRPVETEDITHHQMHGEWVEVSPEAVEQIRQTKNRGGRVIAVGTTSVRSLEAAAQTGEIQPYYGKTSLFIYPGYRWRVVEGLITNFHLPKSSLLMLVSALIGRERLLKLYQDAIEQHYRFYSFGDAMLILPEAKIDLTRECGDRL

SEQ ID NO: 70263 - protein, 377 aa, Phormidium ambiguum
  REGION 1..377: note = tr|A0A1U7I6Z5|A0A1U7I6Z5_9CYAN S-adenosylmethionine:tRNA ribosyltransferase-isomerase; OS = Phormidium ambiguum IAM M-71 OX=454136 GN=queA PE=3 SV=1
MNQPKSASLSSPSLIGKSEEDLLLSAYDYELPDDRIAQNPVTPRDSSRLLVISSPTQHSHQIFRDLVELLKPGDLLVMNNTRVIPARLYGRKNTGTPVEILLLQEQKNNCWLALVKPGRRLQPGTEIYFQSKNSSENGGEFRLSAKVLAKDEATGGRILEFNIPEGKSLIPLLDEFGHVPLPPYIKDSESLPKQYQTIYAQTPGSVAAPTAGLHFTPELLEKLTAKGVEQTFVTLHIGVGTFRPVEAQKITEHQMHGEWVEISEATVAKIQETKARGGRVIAVGTTAVRSLEGASQNGELRPFCGQTELFIYPGYQWRVVEGLITNFHLPRSSLMMLVSALVGRKRLLSLYEEAIAQNYRFYSFGDAMLILPEARIN

SEQ ID NO: 70264 - protein, 366 aa, Phormidium sp.
  REGION 1..366: note = tr|A0A522XFV0|A0A522XFV0_9CYAN S-adenosylmethionine:tRNA ribosyltransferase-isomerase; OS = Phormidium sp. SL48-SHIP OX=2518363 GN=queA PE=3 SV=1
MIPTSEDDLQLDSYDYHLPEERIAQNPVTPRDHSRLLVVHSPQDHSHQVFWQLPNWLKAGDLLVLNDTRVLPARLHGHKSSGAKVEVLLLEEQTEDRWLALVKPGKRLKPGAEIRFDAPNGSPTEDFGTFRAKVLTTDEATGGRVLQLIPPSGQTVLETLEDYGEVPFPPYVTQSQADSSQYQTVYAREARSAAAPTAGLHFTPDLLQRLHEQGISQAFVTLHVGVGTFRPVETSDIRRHVMHQEWLDVPATTVEAIRQTRSRGGRVIAVGTTAVRSLESAAGQQPSGEIAPFSGKTDLFIYPGYRWRVVDGLITNFHLPKSSLMMMVSALLGRQRLLGLYEEAIAENYRFFSFGDAMLIMPEARS

SEQ ID NO: 70265 - protein, 372 aa, Phormidium sp.
  REGION 1..372: note = tr|A0A0P8DAC9|A0A0P8DAC9_9CYAN S-adenosylmethionine:tRNA ribosyltransferase-isomerase; OS = Phormidium sp. OSCR OX=1666905 GN=queA PE=3 SV=1
MIPTSEDDLQLDSYDYHLPEERIAQNPVTPRDHSRLLVVHSPQDHSHQVFWQLPNWLKAGDLLVLNDTRVLPARLYGHKPSGAKVEVLLLEEQAENRWLALVKPGKRLKPGAEIRFDASQRFDASQKSSAAGLGAFQAKVLTTDEATGGRVLQLIPPSGRTVLDTLEDYGEVPFPPYVTQSQADSSQYQTVYAREARSAAAPTAGLHFTPDLLHQLHEQGVSQAFVTLHVGVGTFRPVETSDIRKHVMHQEWLDVPATTVEAIRQTRARGGRVIAVGTTAVRSLEAAAGQQPSGEITPFSGKTDLFIYPGYRWRVVDGLITNFHLPKSSLMMMVSALLGRQRLLELYEEAIAENYRFFSFGDAMLIMPEARS

SEQ ID NO: 70266 - protein, 377 aa, unidentified
  source 1..377: note = Phormidium tenue
  REGION 1..377: note = tr|A0A1U7J1V5|A0A1U7J1V5_9CYAN S-adenosylmethionine:tRNA ribosyltransferase-isomerase; OS = Phormidium tenue NIES-30 OX=549789 GN=queA PE=3 SV=1
MRDSSQLAPETDSRAQLPSDEYSLAAYQYSLPSEKIAQTPVTPRDSSRLLVVDGPTTHGHYHFRDLPALLHPGDLLVLNDTRVIPARLPGYKPSGAQVEVFLLEDRGDNQWLALVRPGRRLKPGATVHFGPNPNQPDLVAQVLATDPETNGRLLKFAPQGSESLLALFERLGEVPLPPYITDTAASAEQYQTVYAETPGAVAAPTAGLHFTPELFERLEEKGIGRSHITLHVGVGTFRPVEAENILDHKMHGEWIDVSAETVAQINATRARGRRVIAVGTTVVRALEGAAQGGELQPYQGKVNLFIYPGYEYRAIDGLITNFHLPGSSLLMLVSALIGRERLLGLYETAIQHDYRFYSFGDAMLILPEAVQGENIER

SEQ ID NO: 70267 - protein, 366 aa, unidentified
  source 1..366: note = Phormidium willei
  REGION 1..366: note = tr|A0A168SYC5|A0A168SYC5_9CYAN S-adenosylmethionine:tRNA ribosyltransferase-isomerase; OS = Phormidium willei BDU 130791 OX=399101 GN=queA PE=3 SV=1
MIPTSEDDLQLDSYDYHLPKERIAQNPVTPRDHSRLLVVHSPQDHSHQVFWQLPNWLKAGDLLVLNDTRVLPARLHGHKPSGAKVEVLLLEEQAEDRWLALVKPGKRLKPGAEIRFDAPQGSSAADLGSFQAQVLTTDEATGGRVLQLIPPSGRTVLETLEVYGEVPFPPYVTQSQADSSQYQTVYAREARSAAAPTAGLHFTPDLLQRLHEQGVSQTFVTLDVGVGTFRPVETSDIRKHVMHQEWLNVPATTVEAIRQTRSRGGRVIAVGTTAVRSLEAAANQQPSGEIRPFSGKTDLFIYPGYRWRVVDGLITNFHLPKSSLMMMVSALLGRQRLLGLYEEAIAENYRFFSFGDAMLIMPEARS

SEQ ID NO: 70268 - protein, 350 aa, Photobacterium angustum
  REGION 1..350: note = tr|Q1ZRC6|Q1ZRC6_PHOAS S-adenosylmethionine:tRNA ribosyltransferase-isomerase OS=Photobacterium angustum (strain S14 / CCUG 15956) OX=314292 GN=queA PE=3 SV=1
MQVSDFDFDLPDELIARYPQPERTASRLLQMTGNTGELAHKGFKDVLDLVQAGDLLVFNNTRVIPARMFGHKASGGKIEVLVERMLDDKSILAHVRASKPPKPGNELLLGENGEFSAEMVARHDALFEIRFNSDKTVLEILDAVGHMPLPPYIDRPDEDADKERYQTVYNAKPGAVAAPTAGLHFDDKLMADLKAKGVNFAFVTLHVGAGTFQPVRVDDINDHHMHSEYVEVPEEVVTAVNETRANGGRIIAVGTTSVRSLESAAQDALKNGTEFKPFFGDTEIFIYPGYQFQLVDVLITNFHLPESTLIMLVSAFAGYENTMNAYHEAVANKYRFFSYGDSMFITRKDV

SEQ ID NO: 70269 - protein, 350 aa, Photobacterium angustum; identical to SEQ ID NO: 70268
  REGION 1..350: note = tr|A0A2T3QG50|A0A2T3QG50_PHOAN S-adenosylmethionine:tRNA ribosyltransferase-isomerase; OS = Photobacterium angustum OX=661 GN=queA PE=3 SV=1

SEQ ID NO: 70270 - protein, 350 aa, Photobacterium aphoticum
  REGION 1..350: note = tr|A0A090R0F0|A0A090R0F0_9GAMM S-adenosylmethionine:tRNA ribosyltransferase-isomerase; OS = Photobacterium aphoticum OX=754436 GN=queA PE=3 SV=1
MQVSDFHFDLPDELIARYPQPERTASRLLQLTGNTGELAHKSFKDVLDLVQAGDLLVFNNTRVIPARLFGQKASGGKIEVLVERMVDDKTILAHVRASKAPKPGNELLLGEQGEYQAEMVARHDALFEIRFNSDKTVLEILEDVGHMPLPPYIDRPDEDADKERYQTVYNAKPGAVAAPTAGLHFDDALMAALKEKGVNFAFVTLHVGAGTFQPVRVDNIHDHHMHAEYVEVPAEVVEAINTTKANGGRVVAVGTTSVRSLESAAQDALKKGTELKPFFGDTEIFIFPGYQFQLVDVLITNFHLPESTLIMLVSAFAGYDHTMNAYLQAVENQYRFFSYGDSMFITRQTN

SEQ ID NO: 70271 - protein, 350 aa, unidentified
  source 1..350: note = Photobacterium aquae
  REGION 1..350: note = tr|A0A0J1H2P2|A0A0J1H2P2_9GAMM S-adenosylmethionine:tRNA ribosyltransferase-isomerase; OS = Photobacterium aquae OX=1195763 GN=queA PE=3 SV=1
MQVSDFHFDLPDELIARYPQPERTASRLLQLDGNTGELTHKGFKDVLDLVMPGDLLVFNNTRVIPARLFGRKASGGKIEVLVERMLDDKSILAHVRASKAPKPGNELLLGENDDYKAEMVARHDALFEIRFDSEKTVLEILEEVGHMPLPPYIDRPDEDADKERYQTVYNAKPGAVAAPTAGLHFDDELLAAIKAKGASFAFVTLHVGAGTFQPVRVDNILDHHMHAEYVEVPADVVAAVNETKANGGRVIAVGTTSVRSLESAAQDAVKNGTELKPFFGDTEIFIYPGYEFQLIDVLITNFHLPESTLIMLVSAFAGYEHTMNAYQQAVENKYRFFSYGDSMFVTRQVK

SEQ ID NO: 70272 - protein, 350 aa, Photobacterium aquimaris
  REGION 1..350: note = tr|A0A1Y6L1J8|A0A1Y6L1J8_9GAMM S-adenosylmethionine:tRNA ribosyltransferase-isomerase; OS = Photobacterium aquimaris OX=512643 GN=queA PE=3 SV=1
MQVSDFDFELPDELIARYPQPERTASRLLHMTGNSGELAHKGFKDVLDLVEAGDLLVFNNTRVIPARMYGHKASGGKIEVLVERMLDDKSILAHVRASKPPKPGNELLLGEHGEFSAEMVARHDALFEIRFNSDKTVLEILDQVGHMPLPPYIDRPDEDADKERYQTVYNAKPGAVAAPTAGLHFDDKLMADLKAKGVNFAFVTLHVGAGTFQPVRVDDINDHHMHSEYVEVPQEVVTAVNQTRANGGRIIAVGTTSVRSLESAAQDAVKNGTELKPFFGDTEIFIYPGYQFQLVDVLITNFHLPESTLIMLVSAFAGYEHTMNAYHQAVANQYRFFSYGDSMFITRKNM

SEQ ID NO: 70273 - protein, 350 aa, Photobacterium aquimaris
  REGION 1..350: note = tr|A0A2T3IJH6|A0A2T3IJH6_9GAMM S-adenosylmethionine:tRNA ribosyltransferase-isomerase; OS = Photobacterium aquimaris OX=512643 GN=queA PE=3 SV=1
MQVSDFDFELPDELIARYPQPERTASRLLHMTGNSGELAHKGFKDVLDLVEAGDLLVFNNTRVIPARMYGHKASGGKIEVLVERMLDDKSILAHVRASKPPKPGNELLLGEHGEFSAEMVARHDTLFEIRFNSDKTVLEILEQVGHMPLPPYIDRPDEDADKERYQTVYNAKPGAVAAPTAGLHFDDKLMADLKAKGVNFAFVTLHVGAGTFQPVRVDDINDHHMHSEYVEVPPEVVTAVNQTRANGGRIIAVGTTSVRSLESAAQDALKNGTELKPFFGDTEIFIYPGYQFQLVDVLITNFHLPESTLIMLVSAFAGYEHTMNAYHQAVANQYRFFSYGDSMFITRKNM

SEQ ID NO: 70274 - protein, 350 aa, unidentified
  source 1..350: note = Photobacterium carnosum
  REGION 1..350: note = tr|A0A2N4UMT6|A0A2N4UMT6_9GAMM S-adenosylmethionine:tRNA ribosyltransferase-isomerase; OS = Photobacterium carnosum OX=2023717 GN=queA PE=3 SV=1
MQVSDFDFELPDELIARYPQPERTASRLLHMTGNTGELAHKGFKDVLDLVEAGDLLVFNNTRVIPARMYGHKASGGKIEVLVERMLDDKSILAHVRASKPPKPGMELLLGEHGEFSAVMVARHDTLFEIHFNSDKTVLEILDQVGHMPLPPYIDRPDEDADKERYQTVYNAKPGAVAAPTAGLHFDEKLMADLKAKGVNFAFVTLHVGAGTFQPVRVDDINDHHMHSEYVEVPEEVVTAVNETRANGGRIIAVGTTSVRSLESAAQDAIQKGTELKPFFGDTEIFIFPGYQFQLVDVLITNFHLPESTLIMLVSAFASYEYTMNAYHQAVANQYRFFSYGDSMFITRKNV

SEQ ID NO: 70275 - protein, 351 aa, unidentified
  source 1..351: note = Photobacterium damsela
  REGION 1..351: note = tr|A0A1V1V902|A0A1V1V902_PHODP S-adenosylmethionine:tRNA ribosyltransferase-isomerase; OS = Photobacterium damsela subsp. piscicida OX=38294; GN = queA PE=3 SV=1
MMQVSDFDFDLPDELIARYPQPERTSSRLLQLDGNSGDIAHKTFKDVLDLVNLGDLMIFNNTRVIPARMFGRKASGGKLEVLVERMLDEKSILAHVRASKSPKPGTELLLGENDEYSAEMVARHDALFEIRFNSDKTVLEILDEVGHMPLPPYIDRPDEDADKERYQTVYNAKPGAVAAPTAGLHFDDALLAALKEKGVNFAFVTLHVGAGTFQPVRVDNIDDHHMHSEYVEVPEEVVTAINETKANGGRVVAVGTTSVRSLESAAQDAVKNGTELKPFFGDTEIFIFPGYQFQLVDVLITNFHLPESTLIMLVSAFAGYEHTMNAYKDAVANQFRFFSYGDSMFVTRKTL

SEQ ID NO: 70276 - protein, 350 aa, unidentified
  source 1..350: note = Photobacterium damsela
  REGION 1..350: note = tr|A0A1Q9H799|A0A1Q9H799_PHODP S-adenosylmethionine:tRNA ribosyltransferase-isomerase; OS = Photobacterium damsela subsp. piscicida OX=38294; GN = queA PE=3 SV=1
MQVSDFDFDLPDELIARYPQPERTSSRLLQLDGNSGDIAHKTFKDVLDLVNLGDLMIFNNTRVIPARMFGRKASGGKLEVLVERMLDEKSILAHVRASKSPKPGTELLLGENDEYSAEMVARHDALFEIRFNSDKTVLEILDEVGHMPLPPYIDRPDEDADKERYQTVYNAKPGAVAAPTAGLHFDDALLAALKEKGVNFAFVTLHVGAGTFQPVRVDNIDDHHMHSEYVEVPEEVVTAINETKANGGRVVAVGTTSVRSLESAAQDAVKNGTELKPFFGDTEIFIFPGYQFQLVDVLITNFHLPESTLIMLVSAFAGYEHTMNAYKDAVANQFRFFSYGDSMFVTRKTL

SEQ ID NO: 70277 - protein, 351 aa, Photobacterium damselae
  REGION 1..351: note = tr|A0A2X1W8L8|A0A2X1W8L8_9GAMM S-adenosylmethionine:tRNA ribosyltransferase-isomerase; OS = Photobacterium damselae OX=38293 GN=queA PE=3 SV=1
MMQVSDFDFDLPDELIARYPQPERTSSRLLQLDGNSGDIAHKTFKDVLDLVNPGDLMIFNNTRVIPARMFGRKASGGKLEVLVERMLDEKSILAHVRASKSPKPGTELLLGENDEYSAEMVARHDALFEIRFNSDKTVLEILDEVGHMPLPPYIDRPDEDADKERYQTVYNAKPGAVAAPTAGLHFDDALLAALKEKGVNFAFVTLHVGAGTFQPVRVDNIDDHHMHSEYVEVPEEVVTAINETKANGGRVVAVGTTSVRSLESAAQDAVKNGTELKPFFGDTEIFIFPGYQFQLVDVLITNFHLPESTLIMLVSAFAGYEHTMNAYKDAVANQFRFFSYGDSMFVTRKTL

SEQ ID NO: 70278 - protein, 350 aa, Photobacterium damselae
  REGION 1..350: note = tr|A0A2T3QQQ8|A0A2T3QQQ8_9GAMM S-adenosylmethionine:tRNA ribosyltransferase-isomerase; OS = Photobacterium damselae OX=38293 GN=queA PE=3 SV=1
MQVSDFDFDLPDELIARYPQPERTSSRLLQLDGNSGDIAHKTFKDVLDLVNPGDLMIFNNTRVIPARMFGRKASGGKLEVLVERMLDEKSILAHVRASKSPKPGTELLLGENDEYSAEMVARHDALFEIRFNSDKTVLEILDEVGHMPLPPYIDRPDEDADKERYQTVYNAKPGAVAAPTAGLHFDDALLAALKEKGVNFAFVTLHVGAGTFQPVRVDNIDDHHMHSEYVEVPEEVVTAINETKANGGRVVAVGTTSVRSLESAAQDAVKNGTELKPFFGDTEIFIFPGYQFQLVDVLITNFHLPESTLIMLVSAFAGYEHTMNAYKDAVANQFRFFSYGDSMFVTRKTL

SEQ ID NO: 70279 - protein, 351 aa, Photobacterium frigidiphilum
  REGION 1..351: note = tr|A0A2T3JF69|A0A2T3JF69_9GAMM S-adenosylmethionine:tRNA ribosyltransferase-isomerase; OS = Photobacterium frigidiphilum OX=264736 GN=queA PE=3 SV=1
MQVSDFHFDLPNELIARYPQPERTASRLLQLTGETGNIQHKGFKDVLDLAESGDLFVFNNTRVIPARIFGRKASGGKIEVLVERMLDDKSILAHVRASKSPKPGNELLLGENDDYQAEMIARHDTLFEIRFNSDKTVLEILEEVGHMPLPPYIDRPDEDADKERYQTVYNAKPGAVAAPTAGLHFDDELMAALKAKGVNFAFVTLHVGAGTFQPVRVDNIDDHHMHSEYVEVPQDVVDAVNATKANGGRIIAVGTTSVRSLESAAQDAVKKGTELVPFFGDTEIFIFPGYEFQLVDVLVTNFHLPESTLIMLVSAFAGYEHTMNAYLQAVDNQYRFFSYGDSMFITRRNNV

SEQ ID NO: 70280 - protein, 350 aa, Photobacterium gaetbulicola
  REGION 1..350: note = tr|A0A0B9FRQ4|A0A0B9FRQ4_9GAMM S-adenosylmethionine:tRNA ribosyltransferase-isomerase; OS = Photobacterium gaetbulicola OX=1295392 GN=queA PE=3 SV=1
MQVSDFDFDLPDELIARYPQPQRTASRLLQLTGNTGELAHKGFKDVLDLVEPGDLLVFNNTRVIPARLFGRKASGGKLEVLVERMLDDKSILAHVRASKSPKPGNELFLGDNDEYQAEMVARHDALFEIRFNSDKTVLEILEEVGHMPLPPYIDRPDEDADKERYQTVYNAKPGAVAAPTAGLHFDDELMAALKAKGVNFAFVTLHVGAGTFQPVRVDNINDHHMHAEYVEVPEDVVAAINETKANGKRVVAVGTTSVRSLESAAQDAKQKGTELKPFFGDTEIFIYPGYEYQLIDVLITNFHLPESTLIMLVSAFAGYEHTMNAYKQAVENKYRFFSYGDSMFITRKTV

SEQ ID NO: 70281 - protein, 351 aa, Photobacterium gaetbulicola
  REGION 1..351: note = tr|A0A0C5WTM6|A0A0C5WTM6_9GAMM S-adenosylmethionine:tRNA ribosyltransferase-isomerase; OS = Photobacterium gaetbulicola Gung47 OX=658445 GN=queA; PE = 3 SV=1
MMQVSDFDFDLPDELIARYPQPQRTASRLLQLTGNTGELAHKGFKDVLDLVEPGDLLVFNNTRVIPARLFGRKASGGKLEVLVERMLDDKSILAHVRASKSPKPGNELFLGDNDEYQAEMVARHDALFEIRFNSDKTVLEILEEVGHMPLPPYIDRPDEDADKERYQTVYNAKPGAVAAPTAGLHFDDELMAALKAKGVNFAFVTLHVGAGTFQPVRVDNINDHHMHAEYVEVPEEVVAAINATKANGKRVVAVGTTSVRSLESAAQDAKQKGTELKPFFGDTEIFIYPGYEYQLIDVLITNFHLPESTLIMLVSAFAGYEHTMNAYKQAVENKYRFFSYGDSMFITRKTV

SEQ ID NO: 70282 - protein, 350 aa, unidentified
  source 1..350: note = Photobacterium galatheae
  REGION 1..350: note = tr|A0A066RW39|A0A066RW39_9GAMM S-adenosylmethionine:tRNA ribosyltransferase-isomerase; OS = Photobacterium galatheae OX=1654360 GN=queA PE=3 SV=1
MQVSDFHFDLPDELIARYPQPERSASRLLQLNGNSGDVQHQSFKNVLDLVQPGDLLVFNNTRVIPARMFGRKASGGKLEVLVERLLDDKSILAHVRASKAPKPGTQLLLGENDEFEAEMVARHDALFEIRFNSALTVLEILETVGHMPLPPYIDRPDEEADKERYQTVYNAKPGAVAAPTAGLHFDDQLLADIKAKGVEFAFVTLHVGAGTFQPVRVDDIHDHHMHAEYVEVPQDVVDAIKATRERGGRVIAVGTTSVRSLESAAQDALKQGTELVPFFGDTDIFIFPGYEFQLVDVLITNFHLPESTLIMLVSAFAGYEHTMNAYQQAVAQKYRFFSYGDSMFIHRRQA

SEQ ID NO: 70283 - protein, 350 aa, Photobacterium ganghwense
  REGION 1..350: note = tr|A0A0J1H7Q7|A0A0J1H7Q7_9GAMM S-adenosylmethionine:tRNA ribosyltransferase-isomerase; OS = Photobacterium ganghwense OX=320778 GN=queA PE=3 SV=1
MQVSDFHFDLPDELIARYPQPERTASRLLQLTGNNGELAHKGFKDVLDLVQPGDLLVFNNTRVIPARLFGRKASGGKLEVLVERMLDDKSILAHVRASKPPKPGNELLLGENDEYQAEMVARHDALFEIRFNSDKTVLEILEDVGHMPLPPYIDRPDEEADKERYQTVYNAKPGAVAAPTAGLHFDEMLLSAIKEKGVNLAFVTLHVGAGTFQPVRVDSIHDHHMHAEYVEVPQEVVTAIAETKANGGRVIAVGTTSVRSLESAAQDAVKNGTELKPFFGDTDIFIFPGYEFQLVDVLITNFHLPESTLIMLVSAFAGYEHTMNAYKEAVENRYRFFSYGDSMFITRKTA

SEQ ID NO: 70284 - protein, 350 aa, Photobacterium halotolerans
  REGION 1..350: note = tr|A0A0F5VHN3|A0A0F5VHN3_9GAMM S-adenosylmethionine:tRNA ribosyltransferase-isomerase; OS = Photobacterium halotolerans OX=265726 GN=queA PE=3 SV=1
MQVSDFHFDLPDELIARYPQPERSSSRLLQLDGNSGDVWHKSFRDVLDLVRPGDLLVFNNTRVIPARLFGRKASGGKLEVLVERLLDDKSILAHVRASKAPKPGTQLLLGENDEFEAEMVARHDALFEIRFNSALTVLEILEQVGHMPLPPYIDRPDEEADKERYQTVYNAKPGAVAAPTAGLHFDEQLLADIRAKGAELAFVTLHVGAGTFQPVRVDNIHDHHMHAEYVEVPQEVVDAIHATRARGGRVIAVGTTSVRSLESAAQDALKNGTDLVPFFGDTDIFIFPGYEFQLVDVLITNFHLPESTLIMLVSAFAGYENTMGAYQQAVEHSYRFFSYGDSMFITRRQD

SEQ ID NO: 70285 - protein, 350 aa, Photobacterium iliopiscarium
  REGION 1..350: note = tr|A0A2T3MB71|A0A2T3MB71_9GAMM S-adenosylmethionine:tRNA ribosyltransferase-isomerase; OS = Photobacterium iliopiscarium OX=56192 GN=queA PE=3 SV=1
MQVSDFDFELPDELIARYPQPERTASRLLHMTGNTGELAHKGFKDVLDLVEAGDLLVFNNTRVIPARMYGHKASGGKIEVLVERMLDDKSILAHVRASKPPKPGMELLLGEHGEFSAVMVARHDTLFEIRFNSDKTVLEILDQVGHMPLPPYIDRPDEDADKERYQTVYNAKPGAVAAPTAGLHFDEKLMADLKAKGVNFAFVTLHVGAGTFQPVRVDDINDHHMHSEYVEVPEEVVTAVNETRANGGRVIAVGTTSVRSLESAAQDAIKKGTELKPFFGDTEIFIFPGYQFQLVDVLITNFHLPESTLIMLVSAFASYEYTMNAYHQAVVNQYRFFSYGDSMFITRKNV

SEQ ID NO: 70286 - protein, 351 aa, Photobacterium indicum
  REGION 1..351: note = tr|A0A2T3LC58|A0A2T3LC58_9GAMM S-adenosylmethionine:tRNA ribosyltransferase-isomerase; OS = Photobacterium indicum OX=81447 GN=queA PE=3 SV=1
MQVSDFHFDLPDELIARYPQPERTASRLLQLTGETGNIQHKGFKDVLDLAEPGDLFVFNNTRVIPARIFGRKASGGKIEVLVERMLDDKSILAHVRASKSPKPGNELLLGENDDYQAEMIARHDTLFEIRFNSDKTVLEILEEVGHMPLPPYIDRPDEDADKERYQTVYNAKPGAVAAPTAGLHFDDELMAALKAKGVNFAFVTLHVGAGTFQPVRVDNIDDHHMHSEYVEVPQDVVDAVNATKANGGRVIAVGTTSVRSLESAAQDAVKKGTELVPFFGDTEIFIFPGYEFQLVDVLVTNFHLPESTLIMLVSAFAGYEHTMNAYLQAVDNQYRFFSYGDSMFITRRNNV

SEQ ID NO: 70287 - protein, 352 aa, Photobacterium jeanii
  REGION 1..352: note = tr|A0A178KAB9|A0A178KAB9_9GAMM S-adenosylmethionine:tRNA ribosyltransferase-isomerase; OS = Photobacterium jeanii OX=858640 GN=queA PE=3 SV=1
MQVSDFHFDLPDELIARYPQPERTASRLLQLTGNTGELQHKGFKDMLDAVEPGDLLVFNNTRVIPARVFGRKESGGKIEVLVERMLDDKSILAHVRASKSPKPGNVLFLGDGDEHQAEMVARHDTLFEIRFTGDKTVLEVLEEVGHMPLPPYIDRPDEDADKERYQTVYNEKPGAVAAPTAGLHFDETLLEAIKAKGVNLAFVTLHVGAGTFQPVRVDDINDHHMHSEYVEVTQEVVDAINETKANGGRVIAVGTTSVRSLESAAQDALKKGTPLAPFFGDTDIFIYPGGYEFQVIDALVTNFHLPESTLIMLVSAFAGYEHTMNAYKVAVEEKYRFFSYGDAMFITRRTAD

SEQ ID NO: 70288 - protein, 350 aa, Photobacterium kishitanii
  REGION 1..350: note = tr|A0A2T3QU93|A0A2T3QU93_9GAMM S-adenosylmethionine:tRNA ribosyltransferase-isomerase; OS = Photobacterium kishitanii OX=318456 GN=queA PE=3 SV=1
MQVSDFDFELPDELIARYPQPERTASRLLHMTGNTGELAHKGFKDVLDLVEAGDLLVFNNTRVIPARMYGHKASGGKIEVLVERMLDDKSILAHVRASKPPKPGNELLLGENGEFSAEMVARHDALFEIRFNSDKTVLEILDQVGHMPLPPYIDRPDEDADKERYQTVYNAKPGAVAAPTAGLHFDDKLMADLKAKGVNFAFVTLHVGAGTFQPVRVDDINDHHMHSEYVEVPQEVVTAVNETRANGGRIIAVGTTSVRSLESAAQDAVKNGTELKPFFGDTEIFIFPGYQFQLVDVLITNFHLPESTLIMLVSAFAGYDHTMNAYHQAVANQYRFFSYGDSMFITRKNV

SEQ ID NO: 70289 - protein, 350 aa, Photobacterium leiognathi
  REGION 1..350: note = tr|A0A0M9FCG5|A0A0M9FCG5_PHOLD S-adenosylmethionine:tRNA ribosyltransferase-isomerase; OS = Photobacterium leiognathi subsp. mandapamensis OX=48408; GN = queA PE=3 SV=1
MQVSDFDFELPDELIARYPQPERTASRLLQMTGNTGELAHKCFKDVLDLVQPGDLLVFNNTRVIPARMFGHKASGGKIEVLVERMLDDKSILAHVRASKPPKPGNELLLGENGEFSAEMVARHDALFEIRFNSDKTVLEILDIVGHMPLPPYIDRPDEDADKERYQTVYNAKPGAVAAPTAGLHFDDKLMADLKAKGVNFAFVTLHVGAGTFQPVRVDDINDHHMHSEYVEVPEEVVAAVNETRANGGRVIAVGTTSVRSLESAAQDALKKGTEFKPFFGDTDIFIFPGYQFQLVDVLITNFHLPESTLIMLVSAFAGYENTMNAYHEAVANKYRFFSYGDSMFITRKDA

SEQ ID NO: 70290 - protein, 350 aa, Photobacterium leiognathi
  REGION 1..350: note = tr|X0NLL4|X0NLL4_PHOLE S-adenosylmethionine:tRNA ribosyltransferase-isomerase OS=Photobacterium leiognathi lrivu.4.1 OX=1248232 GN=queA PE=3 SV=1
MQVSDFDFELPDELIARYPQPERTASRLLQMTGNTGELAHKCFKDVLDLVQPGDLLVFNNTRVIPARMFGHKASGGKIEVLVERMLDDKSILAHVRASKPPKPGNELLLGENGEFSAEMVARHDALFEIRFNSDKTVLEILDIVGHMPLPPYIDRPDEDADKERYQTVYNAKPGAVAAPTAGLHFDDKLMADLKAKGVNFAFVTLHVGAGTFQPVRVDDINDHHMHSEYVEVPEEVVAAVNETRANGGRVIAVGTTSVRSLESAAQDALKKGTEFKPFFGDTDIFIFPGYQFQLVDALITNFHLPESTLIMLVSAFAGYENTMNAYHEAVANKYRFFSYGDSMFITRKDA

SEQ ID NO: 70291 - protein, 350 aa, Photobacterium lipolyticum
  REGION 1..350: note = tr|A0A2T3MS51|A0A2T3MS51_9GAMM S-adenosylmethionine:tRNA ribosyltransferase-isomerase; OS = Photobacterium lipolyticum OX=266810 GN=queA PE=3 SV=1
MQVSDFHFDLPDELIARYPQPERTASRLLQLTGDTGEIQHKGFKDVLDLVQPGDLLVFNNTRVIPARIFGRKASGGKLEVLVERMLDDKSILAHVRASKSPKPGNELLLGENDEYQAEMVARHDALFEIRFNSDKTVLEILEDVGHMPLPPYIDRPDEDADKERYQTVYNTKPGAVAAPTAGLHFDDTLMDALRAKGVNFAFVTLHVGAGTFQPVRVDNIDDHHMHAEYVEVPQEVVDAINATKANGGRVVAVGTTSVRSLESAAQDAVKKGTELKPFFGDTDIFIFPGYEFQLVDVLVTNFHLPESTLIMLVSAFAGYEHTMNAYLQAVENKYRFFSYGDSMFITRKNK

SEQ ID NO: 70292 - protein, 350 aa, Photobacterium lutimaris
  REGION 1..350: note = tr|A0A2T3IUS9|A0A2T3IUS9_9GAMM S-adenosylmethionine:tRNA ribosyltransferase-isomerase; OS = Photobacterium lutimaris OX=388278 GN=queA PE=3 SV=1
MQVSDFDFDLPDELIARYPQPQRTASRLLQLTGNTGELAHKGFKDVLDLVEPGDLLVFNNTRVIPARLFGRKASGGKMEVLVERMLDDKSILAHVRASKSPKPGNELFLGENDEYQAEMVARHDALFEIRFNSDKTVLEILEEVGHMPLPPYIDRPDEEADKERYQTVYNAKPGAVAAPTAGLHFDDELMAALKAKGVNFAFVTLHVGAGTFQPVRVDNINDHHMHAEYVEVPEAVVAAIHATKANGKRVIAVGTTSVRSLESAAQDAKQKGTELKPFFGDTEIFIYPGYEYQLIDVLITNFHLPESTLIMLVSAFAGYDNTMNAYRQAVENKYRFFSYGDSMFITRKTA

SEQ ID NO: 70293 - protein, 350 aa, unidentified
  source 1..350: note = Photobacterium marinum
  REGION 1..350: note = tr|L8JCP7|L8JCP7_9GAMM S-adenosylmethionine:tRNA ribosyltransferase-isomerase OS=Photobacterium marinum; OX = 1056511 GN=queA PE=3 SV=1
MQVSDFHFDLPDELIARYPQPERTASRLLQLTGDTGEVQHKGFKDILDLVQPGDLLVFNNTRVIPARIFGRKASGGKLEVLVERMLDDKSILAHVRCSKSPKPGTELLLGENDEYQAEMVARHDALFEIRFNSDKTVLEILEDVGHMPLPPYIDRPDEDADKERYQTVYNAKPGAVAAPTAGLHFDEEILAAIKAKGASFAFVTLHVGAGTFQPVRVDSIEDHHMHAEYVEVPEEVVAAINETKSSGGRVIAVGTTSVRSLESAAQDAVKKGTELKPFFGDTDIFIFPGYEFQLVDVLVTNFHLPESTLIMLVSAFAGYEHTMNAYRQAVENKYRFFSYGDSMFVTRKTK

SEQ ID NO: 70294 - protein, 350 aa, Photobacterium phosphoreum
  REGION 1..350: note = tr|A0A2T3K5G1|A0A2T3K5G1_PHOPO S-adenosylmethionine:tRNA ribosyltransferase-isomerase; OS = Photobacterium phosphoreum OX=659 GN=queA PE=3 SV=1
MQVSDFDFELPDELIARYPQPERTASRLLHMTGNTGELAHKGFKDVLDLVEAGDLLVFNNTRVIPARMYGHKASGGKIEVLVERMLDDKSILAHVRASKPPKPGMELLLGEQGEFSAVMVARHDALFEIRFNSDKTVLEILDQVGHMPLPPYIDRPDEDADKERYQTVYNAKPGAVAAPTAGLHFDEKLMADLKAKGVNFAFVTLHVGAGTFQPVRVDDINDHHMHSEYVEVPQEVVTAVNETRANGGRIIAVGTTSVRSLESAAQDAIKNGTELKPFFGDTEIFIFPGYQFQLVDVLITNFHLPESTLIMLVSAFASYEHTMNAYHQAVANQYRFFSYGDSMFITRKNV

SEQ ID NO: 70295 - protein, 361 aa, Photobacterium phosphoreum
  REGION 1..361: note = tr|A0A0B7JAD7|A0A0B7JAD7_PHOPO S-adenosylmethionine:tRNA ribosyltransferase-isomerase; OS = Photobacterium phosphoreum ANT-2200 OX=1454202 GN=queA; PE = 3 SV=1
MPACCYLRRITMQVSDFDFELPDELIARYPQPERTASRLLHMTGNTGELAHKGFKDVLDLVEAGDLLVFNNTRVIPARMYGHKASGGKIEVLVERMLDDKSILAHVRASKPPKPGNELLLGENGEFSAEMVARHDALFEIRFNSDKTVLEILEQVGHMPLPPYIDRPDEDADKERYQTVYNAKPGAVAAPTAGLHFDDKLMADLKAKGVNFAFVTLHVGAGTFQPVRVDDINDHHMHSEYVEVPQEVVTAVNETRANGGRIIAVGTTSVRSLESAAQDAVKNGTELKPFFGDTEIFIFPGYQFQLVDVLITNFHLPESTLIMLVSAFAGYDHTMNAYHQAVANQYRFFSYGDSMFITRKNV

SEQ ID NO: 70296 - protein, 361 aa, unidentified
  source 1..361: note = Photobacterium piscicola
  REGION 1..361: note = tr|A0A1T5I540|A0A1T5I540_9GAMM S-adenosylmethionine:tRNA ribosyltransferase-isomerase; OS = Photobacterium piscicola OX=1378299 GN=queA PE=3 SV=1
MLACCYLRRITMQVSDFDFELPDELIARYPQPERTASRLLHMTGNTGELTHKGFKDVLDLVEAGDLLVFNNTRVIPARMYGHKASGGKIEVLVERMLDDKSILAHVRASKPPKPGNELLLGENGEFSAEMVARHDALFEIRFNSDKTVLEILDAVGHMPLPPYIDRPDEDADKERYQTVYNAKPGAVAAPTAGLHFDDKLMADLKAKGVNFAFVTLHVGAGTFQPVRVDDINDHHMHSEYVEVPQEVVTAVNETRANGGRVIAVGTTSVRSLESAAQDAIKNGTELKPFFGDTEIFIFPGYQFQLVDVLITNFHLPESTLIMLVSAFASYEYTMNAYHQAVANQYRFFSYGDSMFITRKNV

SEQ ID NO: 70297 - protein, 351 aa, Photobacterium profundum
  REGION 1..351: note = sp|Q6LU70|QUEA_PHOPR S-adenosylmethionine:tRNA ribosyltransferase-isomerase OS=Photobacterium profundum (strain SS9) OX=298386 GN=queA PE=3 SV=2
MQVSDFHFDLPNELIARYPQPERTASRLLQLTGETGNIQHKGFKDVLDLAESGDLFVFNNTRVIPARIFGRKASGGKIEVLVERILDDKSILAHVRASKSPKPGNELLLGENDDYQAEMIARHDTLFEIRFNSDKTVLEILEEVGHMPLPPYIDRPDEDADKERYQTVYNAKPGAVAAPTAGLHFDDKLMAALKAKGVNFAFVTLHVGAGTFQPVRVDNIDDHHMHSEYVEVPQDVVDAVNATKANGGRIIAVGTTSVRSLESAAQDAVKKGTELVPFFGDTEIFIFPGYEFQLVDVLVTNFHLPESTLIMLVSAFAGYEHTMNAYLQAVDNKYRFFSYGDSMFITRRNNV

SEQ ID NO: 70298 - protein, 351 aa, Photobacterium profundum
  REGION 1..351: note = tr|Q1YX65|Q1YX65_9GAMM S-adenosylmethionine:tRNA ribosyltransferase-isomerase OS=Photobacterium profundum 3TCK OX=314280 GN=queA PE=3 SV=1
MQVSDFHFDLPDELIARYPQPERTASRLLQLTGETGNIQHKGFKDVLELAEPGDLFVFNNTRVIPARIFGRKASGGKIEVLVERMLDDKSILAHVRASKSPKPGNELLLGENDDYQAEMIARHDTLFEIRFNSDKTVLEILEEVGHMPLPPYIDRPDEDADKERYQTVYNAKPGAVAAPTAGLHFDDELMAALKAKGVNFAFVTLHVGAGTFQPVRVDNIDDHHMHSEYVEVPQDVVDAVNATKANGGRIIAVGTTSVRSLESAAQDAVKKGTELVPFFGDTEIFIFPGYEFQLVDVLVTNFHLPESTLIMLVSAFAGYEHTMNAYLQAVDNQYRFFSYGDSMFITRRNNV

SEQ ID NO: 70299 - protein, 350 aa, unidentified
  source 1..350: note = Photobacterium proteolyticum
  REGION 1..350: note = tr|A0A1Q9GMR7|A0A1Q9GMR7_9GAMM S-adenosylmethionine:tRNA ribosyltransferase-isomerase; OS = Photobacterium proteolyticum OX=1903952 GN=queA PE=3; SV = 1
MQVSDFHFDLPDELIARYPQPERTASRLLQLTGDTGEVQHKGFKDVLDLVQPGDLLVFNNTRVIPARLFGRKASGGKLEVLVERMLDDKRILAHVRASKSPKPGTELLLGENDDYQAEMVARHDALFEIRFDSDKTVLEILEEVGHMPLPPYIDRPDEDADKERYQTVYNAKPGAVAAPTAGLHFDDEILEAIKAKGANFAFVTLHVGAGTFQPVRVDNINDHHMHAEYVEVPEEVVAAINETKANGGRVVAIGTTSVRSLESAAQDAVKNGTELKPFFGDTDIFIFPGYEFQLVDVLVTNFHLPESTLIMLVSAFAGYEHTMNAYQQAVENKYRFFSYGDSMFITRKNK

SEQ ID NO: 70300 - protein, 350 aa, Photobacterium rosenbergii
  REGION 1..350: note = tr|A0A2T3N297|A0A2T3N297_9GAMM S-adenosylmethionine:tRNA ribosyltransferase-isomerase; OS = Photobacterium rosenbergii OX=294936 GN=queA PE=3 SV=1
MQVSDFDFDLPDELIARYPQPQRTASRLLQLTGNTGELAHKGFKDVLDLVEPGDLLVFNNTRVIPARLFGRKASGGKLEVLVERMLDDKSILAHVRASKSPKPGNELFLGDNDEYQAEMVARHDALFEIRFNSDKTVLEILEEVGHMPLPPYIDRPDEDADKERYQTVYNAKPGAVAAPTAGLHFDDELMAALKAKGVNFAFVTLHVGAGTFQPVRVDNINDHHMHAEYVEVPEDVVKAINETKANGKRVVAVGTTSVRSLESAAQDAKQKGTELKPFFGDTEIFIYPGYEYQLIDVLITNFHLPESTLIMLVSAFAGYEHTMNAYKQAVENKYRFFSYGDSMFITRKTV

SEQ ID NO: 70301 - protein, 350 aa, unidentified
  source 1..350: note = Photobacterium sanctipauli
  REGION 1..350: note = tr|A0A2T3NB29|A0A2T3NB29_9GAMM S-adenosylmethionine:tRNA ribosyltransferase-isomerase; OS = Photobacterium sanctipauli OX=1342794 GN=queA PE=3 SV=1
MQVSDFDFDLPDELIARYPQPERTASRLLQLTGNTGELAHKGFKDVLDLVEPGDLLVFNNTRVIPARLFGRKASGGKLEVLVERMLDDKSILAHVRASKSPKPGNELFLGDNDDYQAEMVARHDALFEIRFNSDKTVLEILEEVGHMPLPPYIDRPDEDSDKERYQTVYNAKPGAVAAPTAGLHFDDELLAAIKDKGANFAFVTLHVGAGTFQPVRVDNINDHHMHAEYVEVPEDVVDTINETKANGGRVIAVGTTSVRSLESAAQDAVKKGTELKPFFGDTDIFIFPGYEFQLVDVLITNFHLPESTLIMLVSAFAGYEHTMNAYRQAVENKYRFFSYGDSMFITKKDK

SEQ ID NO: 70302 - protein, 352 aa, unidentified
  source 1..352: note = Photobacterium sanguinicancri
  REGION 1..352: note = tr|A0A135ZME8|A0A135ZME8_9GAMM S-adenosylmethionine:tRNA ribosyltransferase-isomerase; OS = Photobacterium sanguinicancri OX=875932 GN=queA PE=3; SV = 1
MQVSDFHFELPDELIARYPQPERTASRLLQLTGNTGELQHKGFKDVLDLVEPGDLLVFNNTRVIPARVFGRKESGGKIEVLVERMLDDKSILAHVRASKSPKPGNVLFLGDNDEHQAEMVARHDTLFEIRFTGDQTVLEVLEDVGHMPLPPYIDRPDEEADKERYQTVYNAKPGAVAAPTAGLHFDDELLAAIKAKGADFAFVTLHVGAGTFQPVRVDDINDHHMHSEYVEVPQDVVDAVLTTKANGGRVIAVGTTSVRSLESAAQDALKKGTELVPFFGDTDIFIYPGGYEFQLVDALVTNFHLPESTLIMLVSTFAGYDHTMKAYQVAVENQYRFFSYGDAMFITRRTKD

SEQ ID NO: 70303 - protein, 350 aa, Photobacterium sp.
  REGION 1..350: note = tr|Q2C7I5|Q2C7I5_9GAMM S-adenosylmethionine:tRNA ribosyltransferase-isomerase OS=Photobacterium sp. SKA34; OX = 121723 GN=queA PE=3 SV=1
MQVSDFDFDLPDELIARYPQPERTASRLLQMTGNTGELAHKGFKDVLDLVQAGDLLVFNNTRVIPARMFGHKASGGKIEVLVERMLDDKSILAHVRASKPPKPGNELLLGENGEFSAEMVARHDALFEIRFNSDKTVLEILDAVGHMPLPPYIDRPDEDTDKERYQTVYNTKPGAVAAPTAGLHFDDKLMANLKAKGVNFAFVTLHVGAGTFQPVRVDDINDHHMHSEYVEVPEEVVTAVNETRANGGRIIAVGTTSVRSLESAAQDAIKNCTEFKPFFGDTEIFIYPGYQFQLVDALITNFHLPESTLIMLVSAFAGYENTMNAYHEAVANRYRFFSYGDSMFITRKDV

SEQ ID NO: 70304 - protein, 361 aa, Photobacterium sp.
  REGION 1..361: note = tr|A0A1Y6MR21|A0A1Y6MR21_9GAMM S-adenosylmethionine:tRNA ribosyltransferase-isomerase; OS = Photobacterium sp. CECT 9190 OX=2006084 GN=queA PE=3; SV = 1
MPACCYLRRITMQVSDFDFELPDELIARYPQPERTASRLLHMTGNSGELAHKGFKDVLDLVEAGDLLVFNNTRVIPARMYGHKASGGKIEVLVERMLDDKSILAHVRASKPPKPGNELLLGEHGEFSAEMVARHDALFEIRFNSDKTVLEILEQVGHMPLPPYIDRPDEDADKERYQTVYNAKPGAVAAPTAGLHFDDKLMADLKAKGVNFAFVTLHVGAGTFQPVRVDDINDHHMHSEYVEVPPEVVTAVNQTRANGGRIIAVGTTSVRSLESAAQDALKNGTELKPFFGDTEIFIYPGYQFQLVDVLITNFHLPESTLIMLVSAFAGYEHTMNAYHQAVANQYRFFSYGDSMFITRKNM

SEQ ID NO: 70305 - protein, 352 aa, Photobacterium swingsii
  REGION 1..352: note = tr|A0A0J8VCQ7|A0A0J8VCQ7_9GAMM S-adenosylmethionine:tRNA ribosyltransferase-isomerase; OS = Photobacterium swingsii OX=680026 GN=queA PE=3 SV=1
MQVSDFHFDLPDELIARYPQPERTASRLLQLTGNTGELQHKGFKDMLDLVEPGDLLVFNNTRVIPARVFGRKESGGKIEVLVERMLDEKSILAHVRASKSPKPGNVLFLGDNDEHQAEMVARHDTLFEIRFTGDKTVLEVLEEVGHMPLPPYIDRPDEDADKERYQTVYNAKPGAVAAPTAGLHFDDELLAAIKAKGANFAFVTLHVGAGTFQPVRVDDINDHHMHSEYVEVPQDVVDAVLTTKANGGRVIAVGTTSVRSLESAAQDALKNGTELVPFFGDTDIFIYPGGYEFQLVDALVTNFHLPESTLIMLVSTFAGYDHTMHAYQVAVENQYRFFSYGDAMFITRRTQG

SEQ ID NO: 70306 - protein, 361 aa, unidentified
  source 1..361: note = Photobacterium toruni
  REGION 1..361: note = tr|A0A1T4UBT3|A0A1T4UBT3_9GAMM S-adenosylmethionine:tRNA ribosyltransferase-isomerase; OS = Photobacterium toruni OX=1935446 GN=queA PE=3 SV=1
MLACCYLRRITMQVSDFDFELPDELIARYPQPERTASRLLHMTGNTGELAHKGFKDVLDLVEAGDLLVFNNTRVIPARMYGHKASGGKIEVLVERMLDDKSILAHVRASKPPKPGMELLLGEHGEFSAVMVARHDALFEIRFNSDKTVLEILDTVGHMPLPPYIDRPDEDADKERYQTVYNAKPGAVAAPTAGLHFDNKLMADLKAKGVNFAFVTLHVGAGTFQPVRVDDINDHHMHSEYVEVPQEVVTAVNETRANGGRVIAVGTTSVRSLESAAQDAIKNGTELKPFFGDTEIFIFPGYQFQLVDVLITNFHLPESTLIMLVSAFASYEYTMNAYHQAVANQYRFFSYGDSMFITRKDV

SEQ ID NO: 70307 - protein, 355 aa, Photorhabdus asymbiotica
  REGION 1..355: note = tr|C7BK82|C7BK82_PHOAA S-adenosylmethionine:tRNA ribosyltransferase-isomerase OS=Photorhabdus asymbiotica subsp. asymbiotica (strain ATCC 43949 / 3105-77); OX = 553480GN=queA PE=3 SV=1
MRVSDFTFELPDEMIARYPQPQRSSCRLLSLDGATGALTHGVFTDVLNKLNAGDLLVFNNTRVIPARIFGRKVTGGKLEVLVERILDDKRVLAHVRASKAPKEGTELLLGDNESIKATMLARHDTLFEIRFDDERDVLSILDDVGHMPLPPYIDRPDEEADRELYQTVYSERPGAVAAPTAGLHFDEPLLNALREKGVEMVFVTLHVGAGTFQPVRVETIEDHVMHSEYAEVPQNVVDAVLACKARGNKVVAVGTTSVRSLESAAAACKDGLIAPFFDDTRIFIYPGFEYQIVDALITNFHLPESTLIMLVSAFAGYKNTMNAYKEAVAEKYRFFSYGDAMFIHRNPFAFEEIIS

SEQ ID NO: 70308 - protein, 355 aa, unidentified
  source 1..355: note = Photorhabdus australis
  REGION 1..355: note = tr|A0A1C0U4Q3|A0A1C0U4Q3_9GAMM S-adenosylmethionine:tRNA ribosyltransferase-isomerase; OS = Photorhabdus australis OX=286156 GN=queA PE=3 SV=1
MRVSDFTFELPDEMIARYPQPQRSGCRLLSLDGETGALTHGVFTDVINKLNTGDLLVFNNTRVIPARIFGRKSTGGKLEILVERILDDKRVLAHVRASKAPKEGTELLLGDNESIKATMLARHDTLFEIRFDDERDVLSILDDVGHMPLPPYIDRPDEEEDRELYQTVYSERPGAVAAPTAGLHFDEPLLEALREKGVEMVFVTLHVGAGTFQPVRVETIEDHVMHAEYAEVPQNVVDAVLACKARGNKVVAVGTTSVRSLESAAKACKDGLIAPFFDDTRIFIYPGFEYQIVDALITNFHLPESTLIMLVSAFAGYKNTMNAYKEAVAEKYRFFSYGDAMFIHRNSLAFEEIIS

SEQ ID NO: 70309 - protein, 355 aa, unidentified
  source 1..355: note = Photorhabdus bodei
  REGION 1..355: note = tr|A0A329XCD4|A0A329XCD4_9GAMM S-adenosylmethionine:tRNA ribosyltransferase-isomerase; OS = Photorhabdus bodei OX=2029681 GN=queA PE=3 SV=1
MRVSDFTFELPDEMIAHYPQPQRSGCRLLSLDGETGKLTHGIFTDVLDKLNAGDLLVFNNTRVIPARIFGRKVTGGKLEVLVERVLDDKRVLAHVRASKAPKVGTELLLGDNESLKATMLARHDTLFEIRFDDERDVLSILDDIGHMPLPPYINRPDEEADRELYQTVYSERPGAVAAPTAGLHFDEPLLEALRKKGVEMVFVTLHVGAGTFQPVRVETIEDHIMHAEYAEVPQDVVDAVLACKARGNKVVAVGTTSVRSLESAAKACQDGLIAPFFNDTQIFIYPGFEYQVVDALITNFHLPESTLIMLVSAFAGYKNTMNAYKEAVAEKYRFFSYGDAMFIRRNPFACKEKIS

SEQ ID NO: 70310 - protein, 355 aa, unidentified
  source 1..355: note = Photorhabdus heterorhabditis
  REGION 1..355: note = tr|A0A0M9CWY2|A0A0M9CWY2_9GAMM S-adenosylmethionine:tRNA ribosyltransferase-isomerase; OS = Photorhabdus heterorhabditis OX=880156 GN=queA PE=3 SV=1
MRVSDFTFELPDEMIARYPQPQRSSCRLLSLDGETGALTHGVFTDVLNKLNTGDLLVFNNTRVIPARIFGRKATGGKLEVLVERILDDKRVLAHVRASKAPKEGTELLLGDNESIKATMLARHDTLFEIRFEDERDVLSILDNVGHMPLPPYIDRPDEEADRELYQTVYSERPGAVAAPTAGLHFDEPLLEALREKGVEMVFVTLHVGAGTFQPVRVETIEDHVMHSEYAEVPQHVVDAVLACKARGNKVVAVGTTSVRSLESAAKACKDELIAPFFGDTRIFIYPGFEYQIVDALITNFHLPESTLIMLVSAFAGYKNTMNAYKEAVAEKYRFFSYGDAMFIRRNPLAFEEKIS

SEQ ID NO: 70311 - protein, 355 aa, unidentified
  source 1..355: note = Photorhabdus khanii
  REGION 1..355: note = tr|W3VDB5|W3VDB5_9GAMM S-adenosylmethionine:tRNA ribosyltransferase-isomerase OS=Photorhabdus khanii NC19; OX = 1004151 GN=queA PE=3 SV=1
MRVSDFTFELPDEMIAHYPQPQRSGCRLLSLDGETGGLTHGVFTDVLDKLNAGDLLVFNNTRVIPARIFGRKATGGKLEVLVERVLDDKRVLAHVRASKAPKEGAELLLGDSENVKATMLARHDTLFEIRFDDPRDVLSILDDVGHMPLPPYIDRPDEEADRELYQTVYSERPGAVAAPTAGLHFDEPLLEALREKGVAMVFVTLHVGAGTFQPVRVETIEDHIMHAEYAEVPQDVVDAVLACKARGNKVVAVGTTSVRSLESAARACQDGLIAPFFNDTQIFIYPGFEYQVVDALITNFHLPESTLIMLVSAFAGYKNTMSAYKEAVAEKYRFFSYGDAMFIRRNPLACKEKVS

SEQ ID NO: 70312 - protein, 355 aa, unidentified
  source 1..355: note = Photorhabdus laumondii
  REGION 1..355: note = sp|Q7N0I3|QUEA_PHOLL S-adenosylmethionine:tRNA ribosyltransferase-isomerase OS=Photorhabdus laumondii subsp. laumondii (strain DSM 15139 / CIP 105565 / TT01); OX = 2432 65 GN=queA PE=3 SV=1
MRVSDFTFELPDEMIAHYPQPQRSGCRLLSLDGETGALTHGIFTDVLDKLNAGDLLVFNNTRVIPARIFGRKATGGKLEVLVERVLDDKRVLAHVRASKAPKEGTELLLGDNESLKATMLARHDTLFEIRFDDERDVLSILDDIGHMPLPPYINRPDEEADRELYQTVYSERPGAVAAPTAGLHFDEPLLEALRKKGVEMVFVTLHVGAGTFQPVRVETIEDHIMHAEYAEVPQDVVDAVLACKARGNKVVAVGTTSVRSLESAAKACQDELIAPFFNDTQIFIYPGFEYQVVDALITNFHLPESTLIMLVSAFAGYKNTMNAYQEAVAEKYRFFSYGDAMFIRRNPFACKEKIS

SEQ ID NO: 70313 - protein, 355 aa, unidentified
  source 1..355: note = Photorhabdus laumondii
  REGION 1..355: note = tr|A0A329VM93|A0A329VM93_9GAMM S-adenosylmethionine:tRNA ribosyltransferase-isomerase; OS = Photorhabdus laumondii subsp. clarkei OX=2029685; GN = queA PE=3 SV=1
MRVSDFTFELPDEMIAHYPQSQRSGCRLLSLDGETGALTHGIFTDVLDKLNAGDLLVFNNTRVIPARIFGRKSTGGKLEVLVERVLDDKRVLAHVRASKAPKEGTELLLGDSESLKATMLARHDTLFEIRFDDERDVLSILDDIGHMPLPPYINRPDEEADRELYQTVYSERPGAVAAPTAGLHFDEPLLEALRKKGVEMVFVTLHVGAGTFQPVRVETIEDHIMHAEYAEVPQDVVDAVLACKARGNKVVAVGTTSVRSLESAARACQDELIAPFFNDTQIFIYPGFEYQVVDALITNFHLPESTLIMLVSAFAGYKNTMNAYQEAVAEKYRFFSYGDAMFIRRNPFACKEKIS

SEQ ID NO: 70314 - protein, 355 aa, Photorhabdus luminescens
  REGION 1..355: note = tr|A0A5C4REY0|A0A5C4REY0_PHOLU S-adenosylmethionine:tRNA ribosyltransferase-isomerase; OS = Photorhabdus luminescens subsp. sonorensis OX=1173677; GN = queA PE=3 SV=1
MRVSDFTFELPDEMIAHYPQPQRSGCRLLSLDGETGALTHGIFTDVLDKLNAGDLLVFNNTRVIPARIFGRKATGGKLEVLVERVLDDKRVLAHVRASKAPKEGTELLLGDNESLKATMLARHDSLFEIRFDDKRDVLSILDDIGHMPLPPYINRPDEEADRELYQTVYSERPGAVAAPTAGLHFDEPLLEALRKKGVEVVFVTLHVGAGTFQPVRVETIEDHIMHAEYAEVPQDVVDAVLACKARGNKVVAVGTTSVRSLESAAKACQDGLIAPFFNDTQIFIYPGFEYQVVDALITNFHLPESTLIMLVSAFAGYKNTMNAYKEAVAEKYRFFSYGDAMFIRRNPLACKEKIS

SEQ ID NO: 70315 - protein, 355 aa, Photorhabdus luminescens
  REGION 1..355: note = tr|A0A1G5PWH0|A0A1G5PWH0_PHOLU S-adenosylmethionine:tRNA ribosyltransferase-isomerase; OS = Photorhabdus luminescens OX=29488 GN=queA PE=3 SV=1
MRVSDFTFELPDEMIAHYPQPQRSGCRLLSLDGETGALTHGIFTDVLDKLNAGDLLVFNNTRVIPARIFGRKATGGKLEVLVERVLDDKRVLAHVRASKAPKEGTELLLGDNESLKATMLARHDSLFEIRFDDKRDVLSILDDIGHMPLPPYINRPDEEADRELYQTVYSERPGAVAAPTAGLHFDEPLLEALRKKGVEMVFVTLHVGAGTFQPVRVETIEDHIMHAEYAEVPQDVVDAVLACKARGNNVVAVGTTSVRSLESAAKACQDGLIAPFFNDTQIFIYPGFEYQVVDALITNFHLPESTLIMLVSAFAGYKNTMNAYKEAVAEKYRFFSYGDAMFIRRNSLACKEKIS

SEQ ID NO: 70316 - protein, 355 aa, unidentified
  source 1..355: note = Photorhabdus namnaonensis
  REGION 1..355: note = tr|A0A1B8YMR6|A0A1B8YMR6_9GAMM S-adenosylmethionine:tRNA ribosyltransferase-isomerase; OS = Photorhabdus namnaonensis OX=1851568 GN=queA PE=3 SV=1
MRVSDFTFELPDEMIAHYPQPQRSGCRLLSLDGDTGALTHGIFTDVIDKLNAGDLLVFNNTRVIPARIFGRKATGGKLEVLVERVLDDKRVLAHVRASKAPKEGTELLLGDNESLKATMLARHDSLFEIRFDDERDVLSILDDIGHMPLPPYINRPDEEADRELYQTVYSERPGAVAAPTAGLHFDEPLLEALRKKGVEMVFVTLHVGAGTFQPVRVETIEDHIMHAEYAEVPQDVVDAVLACKARGNKVVAVGTTSVRSLESAAKVCQDGLIAPFFNDTQIFIYPGFEYQVVDALITNFHLPESTLIMLVSAFAGYKNTMNAYKEAVAEKYRFFSYGDAMFIRRNPLACKEKIS

SEQ ID NO: 70317 - protein, 355 aa, Photorhabdus sp.
  REGION 1..355: note = tr|A0A4R4IWH3|A0A4R4IWH3_9GAMM S-adenosylmethionine:tRNA ribosyltransferase-isomerase; OS = Photorhabdus sp. MEX47-22 OX=2100167 GN=queA PE=3 SV=1
MRVSDFTFELPDEMIAHYPQPQRSGCRLLSLDGETGALTHGIFTDVLDKLNAGDLLVFNNTRVIPARIFGRKATGGKLEVLVERVLDDKRVLAHVRASKAPKEGTELLLGDNESLKATMLARHDSLFEIRFDDKRDVLSILDDIGHMPLPPYINRPDEEADRELYQTVYSERPGAVAAPTAGLHFDEPLLEALRKKGVEMVFVTLHVGAGTFQPVRVETIEDHIMHAEYAEVPQDVVDAVLACKARGNKVVAVGTTSVRSLESAAKACQDGLIAPFFNDTQIFIYPGFEYQVVDALITNFHLPESTLIMLVSAFAGYKNTMNAYKEAVAEKYRFFSYGDAMFICRNPLACKEKIF

SEQ ID NO: 70318 - protein, 355 aa, Photorhabdus sp.
  REGION 1..355: note = tr|A0A329VRG2|A0A329VRG2_9GAMM S-adenosylmethionine:tRNA ribosyltransferase-isomerase; OS = Photorhabdus sp. S10-54 OX=2029684 GN=queA PE=3 SV=1
MRVSDFTFELPDEMIAHYPQPQRSGCRLLSLDGETGKLTHGIFTDVLDKLNAGDLLVFNNTRVIPARIFGRKATGGKLEVLVERVLDDKRVLAHVRASKAPKVGTELLLGDNESLKATMLARHDTLFEIRFDDERDVLSILDDIGHMPLPPYINRPDEEADRELYQTVYSERPGAVAAPTAGLHFDEPLLEALRKKGVEMVFVTLHVGAGTFQPVRVETIEDHIMHAEYAEVPQDVVDAVLACKARGNKVVAVGTTSVRSLESAAKACQDGLIAPFFNDTQIFIYPGFEYQVVDALITNFHLPESTLIMLVSAFAGYKNTMNAYKEAVAEKYRFFSYGDAMFIRRNPFACKEKIS

SEQ ID NO: 70319 - protein, 355 aa, Photorhabdus temperata
  REGION 1..355: note = tr|A0A081S264|A0A081S264_PHOTE S-adenosylmethionine:tRNA ribosyltransferase-isomerase; OS = Photorhabdus temperata subsp. temperata Meg1 OX=1393735; GN = queA PE=3 SV=1
MRVSDFTFELPDEMIAHYPQPQRSGCRLLSLDGETGALTHGVFTDVLDKLNAGDLLVFNNTRVISARIFGRKATGGKLEVLVERVLDDKRVLAHVRASKAPKEGSELLLGDSENVKATMLARHDTLFEIRFDDQRDVLSILDDVGHMPLPPYIDRPDEAADRELYQTVYSERPGAVAAPTAGLHFDEPLLEALREKGVEMVFVTLHVGAGTFQPVRVETIEDHIMHAEYAEVPQDVADAVLACKARGNKVVAVGTTSVRSLESAARACQNGLIAPFFNDTQIFIYPGFEYQVVDALITNFHLPESTLIMLVSAFAGYKNTMSAYKEAIAEKYRFFSYGDAMFIRRNPLAFKEKVS

SEQ ID NO: 70320 - protein, 355 aa, Photorhabdus temperata
  REGION 1..355: note = tr|T0P309|T0P309_PHOTE S-adenosylmethionine:tRNA ribosyltransferase-isomerase OS=Photorhabdus temperata subsp. temperata M1021 OX=1221520 GN=queA PE=3 SV=1
MRVSDFTFELPDEMIAHYPQPQRSGCRLLSLDGETGALTHGVFTDVLDKLNAGDLLVFNNTRVIPARIFGRKATGGKLEVLVERVLDDKRVLAHVRASKAPKEGAELLLGDNENVKATMLARHDTLFEIRFDDQRDVLSILDDVGHMPLPPYIDRPDEEADRELYQTVYSERPGAVAAPTAGLHFDEPLLEALREKGVEMVFVTLHVGAGTFQPVRVETIEDHIMHAEYAEVSQDVVDAVLACKARGNKVVAVGTTSVRSLESAAKAYQNGLIAPFFNDTQIFIYPGFEYQVVDALITNFHLPESTLIMLVSAFAGYKNTMSAYKEAVAEKYRFFSYGDAMFIHRNLLACKEKIS

SEQ ID NO: 70321 - protein, 355 aa, unidentified
  source 1..355: note = Photorhabdus thracensis
  REGION 1..355: note = tr|A0A0F7LKK8|A0A0F7LKK8_9GAMM S-adenosylmethionine:tRNA ribosyltransferase-isomerase; OS = Photorhabdus thracensis OX=230089 GN=queA PE=3 SV=1
MRVSDFTFELPDEMIAHYPQPQRSGCRLLSLDGETGALTHGVFTDVLDKLNAGDLLVFNNTRVIPARIFGRKATGGKLEVLVERVLDDKRVLAHVRASKAPKEGAELLLGDSENVKATMLARHDTLFEIRFDDQRDVLSILDDVGHMPLPPYIDRPDEEADRELYQTVYSERPGAVAAPTAGLHFDEPLLEALREKGVEMVFVTLHVGAGTFQPVRVETIEDHIMHAEYAEVPQDVADAVLACKARGNKVVAVGTTSVRSLESAARACQNGLIAPFFNDTQIFIYPGFEYQVVDALITNFHLPESTLIMLVSAFAGYKNTMSAYKEAIAEKYRFFSYGDAMFILRNPLACKEKIS

SEQ ID NO: 70322 - protein, 358 aa, unidentified
  source 1..358: note = Phreatobacter cathodiphilus
  REGION 1..358: note = tr|A0A2S0N9V1|A0A2S0N9V1_9PROT S-adenosylmethionine:tRNA ribosyltransferase-isomerase; OS = Phreatobacter cathodiphilus OX=1868589 GN=queA PE=3 SV=1
MRVDLFDFDLPADRIALRPASPRDAARLMVVRPGAEIGDRVVRDLPEILRPGDALVFNDTRVIPAQLEGVRERAGQVASISATLHRRLAPDRWLAFVRGAKKLRPGDLVRFGETPEACLLSGLHATIVSKDDDGVVLEFEFAGAYLDEAVARVGHIPLPPYIASKRREDAQDRADYQTVYARDEGSVAAPTAGLHFTPDLLDRLKARGVSLHFLTLHVGAGTFLPVKSDDTADHRMHPEYGLVTAETATALNTVRAAGGRIVAVGTTSLRLLESAASEDGTIRPFAAETSIFITPGYRFRAVDVLMTNFHLPRSTLFMLVSAFAGLDTMRAAYARAIATGYRFYSYGDGSLLFREDAR

SEQ ID NO: 70323 - protein, 358 aa, unidentified
  source 1..358: note = Phreatobacter oligotrophus
  REGION 1..358: note = tr|A0A2T4Z557|A0A2T4Z557_9PROT S-adenosylmethionine:tRNA ribosyltransferase-isomerase; OS = Phreatobacter oligotrophus OX=1122261 GN=queA PE=3 SV=1
MRVDLFDFDLPNDRIALRPANPRDSARFMVVRPGEGIEDRIVRDLPDLLAPGDALVFNDTRVIPAQLEGIRERAGQTASVSATLHKRLSDNRWLAFVKGAKKLQPGDLVRFGETPEACLLAGVHASVIAKDDDGVTFEFEFAGAYLDEAIARIGHIPLPPYIASKRPEDAQDRADYQTVYAKDEGSVAAPTAGLHFTPDLLDRLKARGIELHFVTLHVGAGTFLPVKADDTTAHRMHAEYGQVTPEIAASLNAVRARGGRIVAVGTTSLRLLESAAAEDGTIHPFAAETDIFITPGYRFRAVDALMTNFHLPRSTLFMLVSAFAGLETMKAAYARAIAEGYRFYSYGDSSLLFRAEAP

SEQ ID NO: 70324 - protein, 356 aa, unidentified
  source 1..356: note = Phreatobacter sp.
  REGION 1..356: note = tr|A0A4D7QTJ3|A0A4D7QTJ3_9PROT S-adenosylmethionine:tRNA ribosyltransferase-isomerase; OS = Phreatobacter sp. NMCR1094 OX=2570229 GN=queA PE=3 SV=1
MRVDLFDFDLPPDRIALRPANPRDSARMMVVGEQGIDDRIMRDLPDLLQPGDALVLNDTRVIPAQLEGIRERDGQTATISATLHKRLAPDRWLAFVRGAKKLHPGDRVEFGAKAEACLLGALPATVISKDDDGVVFAFDLSGIHLDEAIGRVGHVPLPPYIASKRPEDAQDRLDYQTVFARDEGSVAAPTAGLHLTPDLMERLKARGVELHFVTLHVGAGTFLPVKADDTADHRMHAEFGEVTAATAAALNAVHARGNRIIAVGTTSLRLIESAAAEDGTIHPFAAETAIFITPGYRFRAVDRLVTNFHLPRSTLFMLVSAFAGLDRMRAAYARAIETGYRFYSYGDGSLLTRAEA

SEQ ID NO: 70325 - protein, 373 aa, unidentified
  source 1..373: note = Phreatobacter stygius
  REGION 1..373: note = tr|A0A4D7B4I2|A0A4D7B4I2_9PROT S-adenosylmethionine:tRNA ribosyltransferase-isomerase; OS = Phreatobacter stygius OX=1940610 GN=queA PE=3 SV=1
MRVDLFDFDLPPDRIALRPISPRDDARLMVVRPGTAPGQAIADAHIRDAHVRDLADLLAPGDALVFNDTRVIPAQLEGLRNRDGAMASISATLHRRLADDRWLAFVRGAKKVQPGDRIHFGETAQTCLLGALDATVVSKDDDGVVFAFDLSGVILDEAVARVGHVPLPPYIASKRPEDAADRADYQTVYARDEGSVAAPTAGLHFTAGLMDRLRARGIDLHFLTLHVGAGTFLPVKSDDTADHKMHPEFGLVTPEVADALNRTRARGGRIVAVGTTSLRLLESATAEDGVIRPFAAETAIFITPGYRFRAVDALMTNFHLPRSTLFMLVSAFAGLATMQAAYGRAIETGYRFYSYGDGSLLFRQPAAAPGEAS

SEQ ID NO: 70326 - protein, 367 aa, Phycicoccus bigeumensis
  REGION 1..367: note = tr|A0A502CVC5|A0A502CVC5_9MICO S-adenosylmethionine:tRNA ribosyltransferase-isomerase; OS = Phycicoccus bigeumensis OX=433644 GN=EAH86_10570 PE=3; SV = 1
MTRLSVAPLTHFASPDDTTAPAPPEERGVARDEVRMMVATDEGVAHARFRDLPAYLAPGDLVVVNNSATLAAEFDAVLRGRGPVLVHAATRLDDGTWVVELRTAPDASRGILDAQAGEELELPASGRITLLAPYPRADSSPTGNGNRLWRAAVRGPRTLGQHLVRYGRPIAYGYLDRSYPLAAYQTVFATRPGSAEMPSAARPFSQELVTRLVATGIGISAVTLHTGVSSQEAGEAPQSEWFEVSATVARLVNATRAEGGRVVAVGTTVTRALESAVDGGDGHGAAQLTARSGWTSRVVSRDDPPRVVTGLVTGWHNPGASHLLLVEAVAGQGLTQRAYDEAARGGYLWHEFGDSALLLPTGPGRTG

SEQ ID NO: 70327 - protein, 364 aa, Phycicoccus sp.
  REGION 1..364: note = tr|A0A0Q9S649|A0A0Q9S649_9MICO S-adenosylmethionine:tRNA ribosyltransferase-isomerase; OS = Phycicoccus sp. Soil803 OX=1736415 GN=ASG95_01090 PE=3; SV = 1
MSRLSVVPSTRFASPGDTTAPAPPEERGVARDGVRMLVATDEGVAHAHFRDLAAYLTPGDLVVVNNSATLAAEFDAVLRGRGPVVVHAATRLDDGTWVVELRSAPDAARSVLDADSGAELDLPGGGRLTLVAPYPRPLSSPTGRGNRLWRAAVSGPRPLEQHLVRYGRPIAYGYLDRAYPLSAYQTVFASRPGSAEIPSAARPFTHELVTDLVSHGIGVAVVTLHTGVSSQEAGEAPQPEWFEVSALTARLVNATRAEGGRVVAVGTTVTRALESAVQLSPADEPGVVPRTGWTARVVSRDDPPRVVTGLVTGWHDPQASHLLLVEAVAGPDLTQRAYDGAARGGYLWHEFGDSALLLPGPDPR

SEQ ID NO: 70328 - protein, 364 aa, Phycicoccus sp.
  REGION 1..364: note = tr|A0A0Q9SWM9|A0A0Q9SWM9_9MICO S-adenosylmethionine:tRNA ribosyltransferase-isomerase; OS = Phycicoccus sp. Soil802 OX=1736414 GN=ASG91_03750 PE=3; SV = 1
MTRLSVVPSTRFASPGDTTAPAPPEERGLARDGVRMLVATDEGVAHAHFRDLAAYLTPGDLVVVNNSATLAAEFDAVLRGRAPVVVHAATRLDDGTWVVELRSAPDAARSVLDADSGAELDLPGGGRLTLVAPYPRPLSSPTGRGNRLWRAAVSGPRPLEQHLVRYGRPIAYGYLDRAYPLSAYQTVFASRPGSAEMPSAARPFTHELVTDLVSHGIGLAVVTLHTGVSSQEAGEAPQPEWFEVSALTARLVNATRAEGGRVVAVGTTVTRALESAVQLSPSDEPVVVPRTGWTARVVSRDDPPRVVTGLVTGWHDPQASHLLLVEAVAGRDLTQRAYDGAARGGYLWHEFGDSALLLPGPAPR

SEQ ID NO: 70329 - protein, 370 aa, Phycisphaera mikurensis
  REGION 1..370: note = tr|I0IDY4|I0IDY4_PHYMF S-adenosylmethionine:tRNA ribosyltransferase-isomerase OS=Phycisphaera mikurensis (strain NBRC 102666 / KCTC 22515 / FYK2301M01) OX=1142394; GN = queA PE=3 SV=1
MRTDELDFHLPERLIATTAAEPRDSARLMVCDRATGSVHHRRVSDLPGLGLVGDGDLMVVNRTAVLPARFEATRAGTGGRVTGLYLGHDDAGLWTAMLKSGGRPRIGERLQLGDACELELLSPRGGGRWRLRPRDLAGEPMPIDASLEVLRRVGLPPLPPYLLRARERAGGPADLPGDAERYQTVFADRSAASQRSVAAPTAGLHLTEAVLAGLRAAGVRTEAVTLEVGPGTFLPVRADELAEHPMHAERWHAPAATLDALRASRAAGGRVLAIGTTSVRTLESLPFPLPEPAPTAGLAGETDLFIRPDAGFAFRNTDLLLTNFHLPRSTLLALVAALPGVGLDRLLGWYEEAIGEAYRFYSFGDAMVVV

SEQ ID NO: 70330 - protein, 347 aa, Phycisphaera sp.
  REGION 1..347: note = tr|A0A3R7RF95|A0A3R7RF95_9BACT S-adenosylmethionine:tRNA ribosyltransferase-isomerase; OS = Phycisphaera sp. TMED24 OX=1986832 GN=CBB84_008360 PE=3; SV = 1
MTDLRTEELDFVIPDSCIATQPATPRDSARLMVVPLDGSAVQHRVVRDLPDILHHDDTLVLNHTRVLPARFHTKRHDSGGAVEGLFLQEVNGRWQCFLKAGGRLTPGLKLDWFDGQHLVLDEPAAEGWWVRPEPAGSPEGLLAAGGATPLPPYIRKARKDRAESFTDATDRDWYQTVFGDGRAASVAAPTASLHLTPELVQQFNSLRVELEVGAGTFKPVATDRLADHPMHTERCHVPRATLKALPQATRRIAVGTTALRTLESLPSPLPTEDWSAETDLLIMPGHRFRWADGLLTNFHLARSTLLALVAAFTGIDRLRDLYDEAVQEGYRFHSYGDAMLLLPGDHA

SEQ ID NO: 70331 - protein, 250 aa, Phycisphaera sp.
  REGION 1..250: note = tr|A0A1Z9HAU2|A0A1Z9HAU2_9BACT S-adenosylmethionine:tRNA ribosyltransferase-isomerase; OS = Phycisphaera sp. TMED151 OX=1986610 GN=CBD11_03735 PE=3; SV = 1
MKAGGRLTPGLKLDWFEGQHLVLDEPADEGWWVRPEPAGSPEGLLAAGGATPLPPYIRKARKDRAESFADATDRDWYQTVFGDGRAASVAAPTASLHLTPELLQQFNTLRVELEVGAGTFKPVTTDRLADHPMHTERCHVSRATLEALPQATRRIAVGTTALRTLESLPSPLPTEDWSAETDLLIMPGHTFRWADGLLTNFHLARSTLLALVASFTGIDRLRALYDEAVQEGYRFHSYGDAMLLLPGDHA

SEQ ID NO: 70332 - protein, 393 aa, unidentified
  source 1..393: note = Phycisphaeraceae bacterium
  REGION 1..393: note = tr|A0A1Z9Q7F3|A0A1Z9Q7F3_9BACT S-adenosylmethionine:tRNA ribosyltransferase-isomerase; OS = Phycisphaeraceae bacterium TMED231 OX=1986831 GN=queA; PE = 3 SV=1
MGLRTDQLDFELDPALVATAPVSPRDSARMLVVTLPPAELEDGASFDLEHRRIADLPEYLGAGDRLVLNETKVVPARIRGRRIDTGGGLEGLLAESAGLGRWWAMLRKSRRLRPGHEIDVLDRHGDSTGFRLRVEDTDDVGRVLVGLVDLRTGTAADAPIDEATVEAFRADAGEIPLPPYILHARRDRGLPESDPHDPDWYQTTFAAASDPTASVAAPTAGLHLTDELRRRLGDRGVEEIRISLEVGAGTFKPVEVEELDRHPMHEERCLVTPEAAAAIGRAEVDRAAGRGRVVAVGTTAVRTLESMAPVDRLPALVDGRHAWRTDLLIQPGHRFRRVDAMLTNFHLPRSTLLALVAAMTGLDRTRAIYAAAIEARYRFFSYGDAMFVRRGIA

SEQ ID NO: 70333 - protein, 347 aa, unidentified
  source 1..347: note = Phycisphaeraceae bacterium
  REGION 1..347: note = tr|A0A520QDQ8|A0A520QDQ8_9BACT S-adenosylmethionine:tRNA ribosyltransferase-isomerase; OS = Phycisphaeraceae bacterium OX=2026777 GN=EVA77_02405; PE = 3 SV=1
MTDLRTEELDFVIPDSCIATQPASPRDSARLMVVPLDGSAVQHRVVRDLPDILFPNDTLVLNHTRVLPARFHTTRHDSGGGVEGLFLQEVNGRWQCFLKAGGRLTPGLKLDWFEGQHLVLDEPADEGWWVRPEPAGSPEGLLAAGGATPLPPYIRKARKDRAESFADATDRDWYQTVFGDGRAASVAAPTASLHLTPELLQQFNTLRVELEVGAGTFKPVTTDRLADHPMHTERCHVPRATLEALPQATRRIAVGTTALRTLESLPSPLPTEDWSAETDLLIMPGHTFRWADGLLTNFHLARSTLLALVASFTGIDRLRALYDEAVQEGYRFHSYGDAMLLLPGDHA

SEQ ID NO: 70334 - protein, 353 aa, unidentified
  source 1..353: note = Phycisphaerae bacterium
  REGION 1..353: note = tr|A0A0S8GYY8|A0A0S8GYY8_9BACT S-adenosylmethionine:tRNA ribosyltransferase-isomerase; OS = Phycisphaerae bacterium SM23_30 OX=1703411 GN=queA PE=3; SV = 1
MDVSDLDYELPQELIAQQALPMRSQSRLLILHRKDGQIEHRRFMDVIDFLQPGNCLVVNDSKVIPARFFTRRATGGKIEGLFLRLTKNGAWQVLLKNASRLCVKETIFLYPPNQSDQKKPTIAMTVLEREGRGVWQLQVESKQSPLDILQHHGVTPLPPYIHRHSTLVNEDIDRQRYQTVYAEAPGSVAAPTAGLHFDENLLERIQTKEVSIARLCLHIGLGTFEPIATDKVEEHPMHAEQYLLDQTNADMINHNIQNRGRIVAVGTTSVRTLETLAEDKRVRAGGGWTNLLITPGHKFKVVDALITNFHLPRTTLLALVCAFGGAEQVLAAYREAIGQQYRFYSYGDAMLII

SEQ ID NO: 70335 - protein, 351 aa, unidentified
  source 1..351: note = Phycisphaerae bacterium
  REGION 1..351: note = tr|A0A0S8KGI7|A0A0S8KGI7_9BACT S-adenosylmethionine:tRNA ribosyltransferase-isomerase; OS = Phycisphaerae bacterium SM1_79 OX=1703410 GN=queA PE=3; SV = 1
MKTEELNYDLPSELIAQHPAPVRSDSRLLILNRSGGDILDSRFSNLGDYLSPGDCLVLNDTKVLPARFFARRSSGAKLEGLFLAQTGAGIWNVMIKGTRKLKLGEQLYLKDKQNRDACEAVLLEKTEQGRCRLKPKTDASARAVLEQIGFPPLPPYIKRGDDPTVAAEDKLRYQTVYARHTGAVAAPTAGLHFTEGLIAQLKRSGISLAYVTLHVGPGTFKPISAKNLEDHHLHEERFSIDAENARIINAARKRGGRIISVGTTSTRVLETVAVGSQIEAASGTTNLFIKPGYQFKITDALITNFHLPKSSLLALVAAFAGLDNILTAYHHAIERRYRFYSYGDAMLIRED

SEQ ID NO: 70336 - protein, 364 aa, unidentified
  source 1..364: note = Phycisphaerales bacterium
  REGION 1..364: note = tr|A0A3A4PME7|A0A3A4PME7_9BACT S-adenosylmethionine:tRNA ribosyltransferase-isomerase; OS = Phycisphaerales bacterium OX=2052180 GN=queA PE=3 SV=1
MTRPIASCSAPPGFDVRLLDYDLPERLIAQTPAERREDARMMVVDRAREALHHARVRDLPSHLTAGDLLVLNDTRVLPARLCLRRATGGRVEGLFIEEQEPGRWTVMLRSAKRCKAGEVLEFVAPERVPWHIVLASKANGGLWEVRLSPATEAQTVLLRVGAAPLPPYIRRPMAGDESTRRADIERYQTVYARAAGAVAAPTAGLHLTEALLAQLGERGVQTAFVTLHVGLGTFKPIETGLLADHRTHAERFELPGETAAAIDACRSRGGRVVAVGTTTVRVLEHCAQADGTVRPQSGATDVFIYPPYTPRVVNALLTNFHLPRSTLLALVMAFAGIELTRRAYASAVESDYRFYSYGDAMLLL

SEQ ID NO: 70337 - protein, 270 aa, unidentified
  source 1..270: note = Phycisphaerales bacterium
  REGION 1..270: note = tr|A0A349UIZ3|A0A349UIZ3_9BACT S-adenosylmethionine:tRNA ribosyltransferase-isomerase (Fragment) OS=Phycisphaerales bacterium OX=2052180; GN = DCX07_00890 PE=3 SV=1
MPMTGQVDEFDYPLDPQLIAQQPLTGRDESRLFVLRRRDEWYQHLRFRDLPTALHKGDLLVLNDTRVVPAKFFCRRETGGRVEGLFLSERADGAWEVLLKNAGKCHPGEQLAFQPEDATRLSLRENLGEGRWFVAAEPPTPAETVLHRVGVTPLPPYIHRADAARDAADRARYQTVYAARPGAVAAPTAGLHFTPELLASLEDAGIATTRLTLHVGMGTFAPVKSETVAQHRMHAEWYELPPAAAEAVNAARRDGRRVVAVGTTSVRVLE

SEQ ID NO: 70338 - protein, 357 aa, unidentified
  source 1..357: note = Phyllobacteriaceae bacterium
  REGION 1..357: note = tr|A0A2E1XTT5|A0A2E1XTT5_9RHIZ S-adenosylmethionine:tRNA ribosyltransferase-isomerase; OS = Phyllobacteriaceae bacterium OX=1871068 GN=queA PE=3; SV = 1
MRVDLFDFELPESAIALRPAEPRDAARMLVVRPGSGLEDRGVLDLADLLEPGDALVFNDTRVIPAQLEGVRVRDGGEARVSATLHMRTGPDRWLAFLKPGKRVKAGDRIRFGHEGNACFLGTLEATAGEKGEGGDVELVFDLSGPALDEALHAVGHVPLPPYIASKRPEDERDRSDYQTIYAREEGAVAAPTAGLHFTPRLMERLEARGIERHFVTLHVGAGTFLPVKADDTRDHRMHSEIGHVSGETASALNAVKARGGRIVSVGTTSLRLLESAADETGRLHEWSGPTDIFITPGYRFRFIDMLMTNFHLPRSTLFMLVSAFSGLETMRAAYDHAIASGYRFYSYGDSSLLFRKD

SEQ ID NO: 70339 - protein, 359 aa, Phyllobacterium bourgognense
  REGION 1..359: note = tr|A0A368Z334|A0A368Z334_9RHIZ S-adenosylmethionine:tRNA ribosyltransferase-isomerase; OS = Phyllobacterium bourgognense OX=314236 GN=queA PE=3 SV=1
MRVDLFDFDLPEESIALRPAEPRDSARLLLVRADGSEFENSSVRNLGDFLQAGDALVFNDTKVIPAQLEGFREREGVKAQIGATLHMRTGPDRWKAFLRPAKRIKEGERIDFGHGNNACLLGSLQATVTEKGDAGEALLVFDFSGADLDQAIAAVGHIPLPPYIASKRADDIRDREDYQTVYAREEGAVAAPTAGLHFTPELLDDLKKRGIEEHFVTLHVGAGTFLPVKADDTADHKMHSEIGTVDQRTADALNAVKARGGRIVSVGTTSLRLLESATGEDGVIKPWSGPTDIFITPGYKFRAVDMLMTNFHLPRSTLFMLVSAFSGFERMHAAYQYAVKNNYRFYSYGDASLLWRSAS

SEQ ID NO: 70340 - protein, 397 aa, Phyllobacterium brassicacearum
  REGION 1..397: note = tr|A0A2P7B928|A0A2P7B928_9RHIZ S-adenosylmethionine:tRNA ribosyltransferase-isomerase; OS = Phyllobacterium brassicacearum OX=314235 GN=CU102_24865; PE = 3 SV=1
MITDNRSDRRSARLFVVEADGTMRDLPRTRLATLFDPGDLIVANDAATLPASLHGTHVPSGEAIEIRLAGWLSLPDPTRFVAIAFGSGDHRTRTEDRLPPPALSTGDRLRLGPLEAVVERLLDHPRLLELYFPGIRAAVLAGMAQHGQPIQYAHAPEPLALWDVWTKIAARPFAFEAPSAGFALDWRTLQAWRRRDVGFAALTHAAGVSSTGDPALDSRLPLDEPYRIPERTAAQVARAKLRGSRIIAIGTSVVRALEAAANADGSVRAGNGTATGRIARGTLLRVVDAILTGVHQPGESHFELLRAFADDALLAEASAALSASRYRAHEFGDSVLLNCQPLLRSARTEPARGARGEASRSTVFLALGALEVKIQPMASLIRLRSRRSLKITHPDML

SEQ ID NO: 70341 - protein, 359 aa, Phyllobacterium brassicacearum
  REGION 1..359: note = tr|A0A2P7BSM0|A0A2P7BSM0_9RHIZ S-adenosylmethionine:tRNA ribosyltransferase-isomerase; OS = Phyllobacterium brassicacearum OX=314235 GN=queA PE=3; SV = 1
MRVDLFDFDLPEENIALRPAEPRDSARLLLVKADASGFEDSTVRNLADFLRPGDALVFNDTKVIPAQLEGFREREGVNAQISATLHMRAGPDRWKAFLRPAKRIKQGERIDFGHGNNACLLGSLQATVTEKGDAGEALLVFDFSGADLDQAIAAVGHIPLPPYIASKRADDIRDREDYQTVFAREEGAVAAPTAGLHFTPELLDNLKRRGIEEHFVTLHVGAGTFLPVKAEDTADHKMHAEIGTVDQTTAEALNAVRARGGRIVSVGTTSLRLLESATDEHGVIKPWSGPTDIFITPGYNFRAVDMLMTNFHLPRSTLFMLVSAFSGFERMHAAYDYAVKNHYRFYSYGDASLLWRSAS

SEQ ID NO: 70342 - protein, 359 aa, unidentified
  source 1..359: note = Phyllobacterium endophyticum
  REGION 1..359: note = tr|A0A2P7AVU3|A0A2P7AVU3_9RHIZ S-adenosylmethionine:tRNA ribosyltransferase-isomerase; OS = Phyllobacterium endophyticum OX=1149773 GN=queA PE=3; SV = 1
MRVDLFDFDLPEENIALRPAEPRDSARLLLVRADGADFKDSTVRNLGDFLRPGDALVFNDTKVIPAQLEGFRERDGVKAQISATLHMRAGPDRWKAFLRPAKRVKEGERIDFGHGNNACLLGSLQATVAEKGDAGEALLVFDFSGADLDQAIAAVGHIPLPPYIASKRADDVRDREDYQTVYAKEEGAVAAPTAGLHFTPELLDDLKKRGIEEHFVTLHVGAGTFLPVKADDTADHKMHAEIGIVDQFTADALNEVKARGGRIVSVGTTSLRLLESATDESGVIRRWSGATDIFITPGYKFRAVDMLMTNFHLPRSTLFMLVSAFSGFERMHAAYEYAVKNHYRFYSYGDASLLWRSTS

SEQ ID NO: 70343 - protein, 375 aa, Phyllobacterium leguminum
  REGION 1..375: note = tr|A0A318TEI4|A0A318TEI4_9RHIZ S-adenosylmethionine:tRNA ribosyltransferase-isomerase; OS = Phyllobacterium leguminum OX=314237 GN=queA PE=3 SV=1
MPGRVEGGVWPRTIVQRQYMRVDLFDFDLPEELIALRPAEPRDSARLLLVKPGEPFADKSVSELPDLLNPGDALVFNDTKVIPAQLEGIRERDGVTAHISATLHMRVGPDRWKAFLRPGKRVKEGERICFGHDGSSCFLGTLDATVAEKGDAGEALLVFDMSGAALDEAIAAVGHIPLPPYIASKRPEDQRDRTDYQTVYAREEGAVAAPTAGLHFTPRLLEKLKQKGIEEHFVTLHVGAGTFLPVKADDTAEHKMHAEIGHVSEATANALNRVRANGGRIVCVGTTSLRLLESAADEDGVIQPWSGATDIFITPGYRFRAVDMLMTNFHLPRSTLFMLVSAFSGMDTMRAAYEHAIRENYRFYSYGDASLLWRG

SEQ ID NO: 70344 - protein, 359 aa, Phyllobacterium myrsinacearum
  REGION 1..359: note = tr|A0A2S9JYT8|A0A2S9JYT8_9RHIZ S-adenosylmethionine:tRNA ribosyltransferase-isomerase; OS = Phyllobacterium myrsinacearum OX=28101 GN=queA PE=3 SV=1
MRVDLFDFDLPEENIALRPAEPRDSARLLLVKADSSGFDDSSVRNLGDFLRPGDALVFNDTKVIPAQLEGFREREGVKAQVSATLHMRAGPDRWKAFLRPAKRIRQGERIDFGHGNNACLLGSLQATVAEKGDAGEALLVFDFSGADLDQAIAAVGHIPLPPYIASKRAEDGRDKEDYQTVYAREEGAVAAPTAGLHFTPDLLDDLKKRGIEEHFVTLHVGAGTFLPVKADDTADHKMHAEIGHVDQKTADALNAVKARGGRIVSVGTTSLRLLESATGEDGIIRAWSGPTDIFITPGYKFRAVDLLMTNFHLPKSTLFMLVSAFSGFERMHAAYAHAIKNHYRFYSYGDASLLWRSAS

SEQ ID NO: 70345 - protein, 365 aa, unidentified
  source 1..365: note = Phyllobacterium salinisoli
  REGION 1..365: note = tr|A0A368K703|A0A368K703_9RHIZ S-adenosylmethionine:tRNA ribosyltransferase-isomerase; OS = Phyllobacterium salinisoli OX=1899321 GN=queA PE=3 SV=1
MRVDLFDFDLPEELIALRPMEPRDQARLLIVQPGSPFQDRRVDALPTMLRPGDALVFNNTKVIPAQLEGIREREGVTAHISATLHMRVGPDRWKAFLRPGKRVKEGERIRFGHEGSSCFLGTLDATVIEKGDAGEALLVFDLSGTVLDEAIAAVGHIPLPPYIASKRPEDQRDRTDYQTVYASEEGAVAAPTAGLHFTPQLLERLKQEGVEEHFVTLHVGAGTFLPVKADDTSEHKMHAEIGHVSQATADALNRVRANGGRIVCVGTTSLRLLESAADEDGTIRPWSGATDIFITPGYRFRAVDMLMTNFHLPRSTLFMLVSAFSGMDTMRQAYEHAIREGYRFYSYGDASLLERRIESNSRESA

SEQ ID NO: 70346 - protein, 359 aa, unidentified
  source 1..359: note = Phyllobacterium sophorae
  REGION 1..359: note = tr|A0A2P7BIX4|A0A2P7BIX4_9RHIZ S-adenosylmethionine:tRNA ribosyltransferase-isomerase; OS = Phyllobacterium sophorae OX=1520277 GN=queA PE=3 SV=1
MRVDLFDFDLPEENIALRPAEPRDSARLLLVKADASGFEDSCVRNLGDFLRPGDALVFNDTKVIPAQLEGFREREGVKAQISATLHMRAGPDRWKAFLRPAKRIKQGERIDFGHGNNACLLGALQATVTEKGEAGEALLVFDFSGADLDQAIAAVGHIPLPPYIASKRADDSRDREDYQTVYAREEGAVAAPTAGLHFTPGLLDDLKKRGIEEHFVTLHVGAGTFLPVKAEDTANHKMHAEIGTVDQRTAEALNAVKARGGRIVSVGTTSLRLLESATDANGVIQPWSGPTDIFITPGYKFRAVDMLMTNFHLPRSTLFMLVSAFSGFERMHAAYEYAIKNHYRFYSYGDASLLWRSAS

SEQ ID NO: 70347 - protein, 359 aa, Phyllobacterium sp.
  REGION 1..359: note = tr|A0A1H0E1W9|A0A1H0E1W9_9RHIZ S-adenosylmethionine:tRNA ribosyltransferase-isomerase; OS = Phyllobacterium sp. OV277 OX=1882772 GN=queA PE=3 SV=1
MRVDLFDFDLPEENIALRPAEPRDSARLLLVKANTSGFEDNIVRNLGDFLQAGDALVFNDTKVIPAQLEGFREREGVKAQISATLHMRTGPDRWKAFLRPAKRIKQGERIDFGHGNNACLLGSLQATVAEKGEAGEALLVFDFSGADLDQAIAAVGHIPLPPYIASKRAEDGRDKEDYQTIYAREEGAVAAPTAGLHFTPALLEDLKKRGIEEHFVTLHVGAGTFLPVKADDTADHKMHAEIGHVDQATADALNAVKARGGRIVSVGTTSLRLLESATTPDGVVKAWSGPTDIFITPGYQFRAVDLLMTNFHLPKSTLFMLVSAFSGFERMHEAYAYAIKNHYRFYSYGDASLLWRSAS

SEQ ID NO: 70348 - protein, 359 aa, Phyllobacterium sp.
  REGION 1..359: note = tr|J2VFW3|J2VFW3_9RHIZ S-adenosylmethionine:tRNA ribosyltransferase-isomerase OS=Phyllobacterium sp. YR531; OX = 1144343 GN=queA PE=3 SV=1
MRVDLFDFDLPEDNIALRPAEPRDSARLLLVKNDGSDFQDSTVRNLGDFLQEGDALVFNDTKVIPAQLEGFREREGVKAQISATLHMRAGPDRWKAFLRPAKRIKEGERIDFGDGNNACLLGSLHATVAEKGDAGEALLVFDFSGPDLDQAIAAVGHIPLPPYIASKRAEDERDQADYQTVYAREEGAVAAPTAGLHFTPELLADLKKRGIEEHFVTLHVGAGTFLPVKADDTADHKMHAEIGTVDATTAGALNAVKARGGRIVSVGTTSLRLLESATAEDGVIRPWSGPTDIFITPGYQFRAVDMLMTNFHLPRSTLFMLVSAFSGFERMHAAYDYAIKNRYRFYSYGDSSLLWRSAS

SEQ ID NO: 70349 - protein, 359 aa, unidentified
  source 1..359: note = Phyllobacterium zundukense
  REGION 1..359: note = tr|A0A2N9W4S5|A0A2N9W4S5_9RHIZ S-adenosylmethionine:tRNA ribosyltransferase-isomerase; OS = Phyllobacterium zundukense OX=1867719 GN=queA PE=3 SV=1
MRVDLFDFDLPEENIALRPAEPRDSARLLLVKANTSEFDDSSVRNLGDFLRPGDALVFNDTKVIPAQLEGIREREGVKAQISATLHMRAGPDRWKAFLRPAKRIKQGERIDFGHGNNACLLGSLQATVAEKGEAGEALLVFDFSGADLDQAIAAVGHIPLPPYIASKRADDSRDREDYQTVYAREEGAVAAPTAGLHFTPELLEDLRERGIEEHFVTLHVGAGTFLPVKADDTADHKMHAEIGTVDQPTAEALNAVKARGGRIVSVGTTSLRLLESATDENGVIQPWSGPTDIFITPGYKFRAVDMLMTNFHLPRSTLFMLVSAFSGFERMHAAYEHAIKNHYRFYSYGDASLLWRSAS

SEQ ID NO: 70350 - protein, 356 aa, unidentified; identical to SEQ ID NO: 67067
  source 1..356: note = Phytobacter diazotrophicus
  REGION 1..356: note = tr|A0A4R4B265|A0A4R4B265_9GAMM S-adenosylmethionine:tRNA ribosyltransferase-isomerase; OS = Phytobacter diazotrophicus OX=395631 GN=queA PE=3 SV=1

SEQ ID NO: 70351 - protein, 356 aa, unidentified
  source 1..356: note = Phytobacter ursingii
  REGION 1..356: note = tr|A0A0G3QDU1|A0A0G3QDU1_9GAMM S-adenosylmethionine:tRNA ribosyltransferase-isomerase; OS = Phytobacter ursingii OX=1972431 GN=queA PE=3 SV=1
MRVADFSFELPESLIAHYPQPERSSCRLLSLDGPTGALAHGTFTDLLDKLNPGDLLVFNNTRVIPARLFGRKASGGKIEVLVERMLDDKRILAHIRASKAPKPGAELLLGDDESIHATMVARHDALFEVEFNDERPVLDILNAIGHMPLPPYIDRPDEEADRELYQTVYSQKPGAVAAPTAGLHFDEPLLARLREKGIEMAFVTLHVGAGTFQPVRVDSIEDHIMHSEYAEVPQEVVDAVLAAKARGNRVIAVGTTSVRSLESAAQAAKEALIEPFFGDTQIFIFPGYQYQVIDALVTNFHLPESTLIMLVSAFAGYQHTMRAYQEAVAHKYRFFSYGDAMFITYNPQAINERPGE

SEQ ID NO: 70352 - protein, 356 aa, unidentified; identical to SEQ ID NO: 67688
  source 1..356: note = Phytobacter ursingii
  REGION 1..356: note = tr|A0A508UD17|A0A508UD17_9GAMM S-adenosylmethionine:tRNA ribosyltransferase-isomerase; OS = Phytobacter ursingii OX=1972431 GN=queA PE=3 SV=1

SEQ ID NO: 70353 - protein, 379 aa, unidentified
  source 1..379: note = Pigmentiphaga aceris
  REGION 1..379: note = tr|A0A5C0B0H6|A0A5C0B0H6_9BURK S-adenosylmethionine:tRNA ribosyltransferase-isomerase; OS = Pigmentiphaga aceris OX=1940612 GN=queA PE=3 SV=1
MPGLTVDDFDYVLPPELIAQAPAVERRASRLLHLDPASLLHDRQFADLPSLLRPNDLLVFNDTRVIKARLFGEKSSGGKVEILVERIVETDRALVHMRASKSPKAGARLRLSNAFDATVLGRAGDGGDLFDLRFAGPVLELLEKHGQTPLPPYITHTPDQGDDARYQTVYAREPGAIAAPTAGLHFDADMLATLKAQGVNTAFVTLHVGAGTFLPVRVQNLTEHVMHSELYTVTQETVDAINAARAAGGRVIAVGTTSVRALESAATATAKTRASVAAHPALDGTSTLPRPPATLDAQSGDTRLFITPGFTFHVIDAMVTNFHLPKSTLMMLISALAGTDAVKAAYAHAVAERYRFFSYGDAMLIERPLIAPQTSAGQA

SEQ ID NO: 70354 - protein, 350 aa, Pigmentiphaga kullae
  REGION 1..350: note = tr|A0A4Q7NN23|A0A4Q7NN23_9BURK S-adenosylmethionine:tRNA ribosyltransferase-isomerase; OS = Pigmentiphaga kullae OX=151784 GN=queA PE=3 SV=1
MRFPNPVLPVPDLTLDDFDYELPPELIAQTPAADRTASRLLHLDAQGGLHDRRFADLPGLLRPHDLLVFNDTRVIKARLFGEKSSGGKVEVLVERITEPDRALVHLRASKSPKSGAVIRLAGAFDVTMLGRQGDLFDLRFPGPVLELLAEHGQTPLPPYITHTPDTGDDARYQTVYAREPGAVAAPTAGLHFDDALLATLRAQGVRTAFVTLHVGAGTFLPVRVDKLSEHVMHSELYTLPQATVDAIAQARAAGGRVVAVGTTSVRALESAAATHWPLRETRGDTRLFITPGFEFRAVDALVTNFHLPKSTLMMLISAFAGMDPIRRAYAHAVAQRYRFFSYGDAMFIER

SEQ ID NO: 70355 - protein, 411 aa, Pigmentiphaga sp.
  REGION 1..411: note = tr|A0A208XMI8|A0A208XMI8_9BURK S-adenosylmethionine:tRNA ribosyltransferase-isomerase; OS = Pigmentiphaga sp. NML080357 OX=2008675 GN=queA PE=3 SV=1
MSSRGRSRPSSAITWWKSPAGRTEGNRAGPPRHRGGAVPLTKGPAEFPRIGQPRGGLSWLVFRRFFKPLAVPELTLDDFDYDLPPELIAQAPAADRTASRLLHLDAQGGLHDRQFADLPGLLRPNDLLVFNDTRVIKARLFGEKRSGGKVEVLVERITEPDRALVHLRASKSPKAGAVMRLAGAFEVTMLGREGDLFDLRFPGPVLELLAEHGQTPLPPYITHAPDAGDDSRYQTVYAREPGAVAAPTAGLHFDEPLLDTLRTQGIHTAFVTLHVGAGTFLPVRVDKLSEHVMHSELYTLPQATVEAIARARAAGGRVIAVGTTSVRALESAAAAHWPLRETRGDTRLFITPGFEFRVVDALITNFHLPKSTLMMLISAFAGMEPIRRAYAHAVARRYRFFSYGDAMFIER

SEQ ID NO: 70356 - protein, 341 aa, Pigmentiphaga sp.
  REGION 1..341: note = tr|A0A3G8GK38|A0A3G8GK38_9BURK S-adenosylmethionine:tRNA ribosyltransferase-isomerase; OS = Pigmentiphaga sp. H8 OX=2488560 GN=queA PE=3 SV=1
MPDLTLDDFDYELPPELIAQTPAADRTASRLLHLDAQGGLHDRRFADLPGLLRPNDLLVFNDTRVIKARLFGEKSSGGKVEVLVERITEPDRALVHLRASKSPKAGATIRLAGAFDVAMLGREGDLFDLRFPGPVLELLAEHGQTPLPPYITHTPDTGDDARYQTVYAREPGAVAAPTAGLHFDDALLATLRAQGVRTAFVTLHVGAGTFLPVRVDNLSEHVMHSELYTLPQATVDAIAQARAAGGRVVAVGTTSVRALESAAATHWPLRETRGDTRLFITPGYEFRAVDALVTNFHLPKSTLMMLISAFAGMVPIRRAYAHAVAQRYRFFSYGDAMFIER

SEQ ID NO: 70357 - protein, 343 aa, Pilibacter termitis
  REGION 1..343: note = tr|A0A1T4RHA8|A0A1T4RHA8_9ENTE S-adenosylmethionine:tRNA ribosyltransferase-isomerase; OS = Pilibacter termitis OX=263852 GN=queA PE=3 SV=1
MMSTNDFDFHLPEELIAQTPLKEREKSRLLVIDRETKNIQDKHFEDILEELNAGDALVMNDTKVLPARLFGVKVATGGMIEVLLLNNTQGDDWEVLMKPAKRAKVGTELSFGDGRLKATVVEEREHGGRIVRFSYEGIFLEVLDSLGEMPLPPYIHEKLEDKERYQTVYAENPGSAAAPTAGLHFTKELLKKIEEKGVKLVYLTLHVGLGTFRPVSVEDVNNHQMHSEFYSLSAEAARTIQEVKKNGGRIIAVGTTSIRTLETIAQKFEGNIQADSGWTDIFIYPGYQFKIVDAFSTNFHLPKSTLVMLVSAFAGKDFVLNAYQHAIDEQYRFFSFGDAMFVK

SEQ ID NO: 70358 - protein, 352 aa, Pirellula sp.
  REGION 1..352: note = tr|A0A142XZT7|A0A142XZT7_9PLAN S-adenosylmethionine:tRNA ribosyltransferase-isomerase; OS = Pirellula sp. SH-Sr6A OX=1632865 GN=queA PE=3 SV=1
MQEPNELDLYDFDLPRELIAQDPPAQRTDSRMMLVDRASGRIEHASIRDLPSVLRAGDVMVVNDSKVIPARLVGYREKTGGRWEGLFLREENGVAELLSSTRGFLNPGESIVLRDPEGRENQRLVLASRTDQGNFLFTPSPNRPWLELLEECGRVPLPPYIRDGQMTSADRERYQTVYARSPGSVAAPTAGLHLTQELIGKVRASGVALVAVTLHVGLGTFRPIQTTRLADHKMHSEFAQISEPVVKRLQSARAEGGRIIAIGTTSVRTLETAASHGNGTLIPWSGSTDIFIQPGHAFRGVDGLLTNFHLPKSSLIVLVSTFAGRELIQEAYRKAIENRYRFYSYGDCMLIL

SEQ ID NO: 70359 - protein, 349 aa, Pirellula staleyi
  REGION 1..349: note = tr|D2R8T4|D2R8T4_PIRSD S-adenosylmethionine:tRNA ribosyltransferase-isomerase OS=Pirellula staleyi (strain ATCC 27377 / DSM 6068 / ICPB 4128) OX=530564 GN=queA; PE = 3SV=1
MNELDAYDFELPRDLVAQHPLPHRTDARLLVVDRAKQSIDHHHIRDLPGLLRYGDHLVMNDTRVIPARLVGRREQTGARWSGLFLSADDQGNWQVLGKTRGKLLPGEAILVLSWDLRQSIKLRLLTKLEGGVWVVRPEPLGDPWELLDSVGRVPLPPYIRDGEMIEADSTNYQTVFAKTRGAVAAPTAGLHFTPELLEKVKVAGVLSSHVTLHVGLGTFRPVTAEKLAEHVMHSEFCDVSQPAVETILKTKSRGGRVIAVGTTVARSLESAAAPTGKLEPFSGPTNLFIRPPFTFCVLDGLLTNFHLPRSTLLVLVRTFGGDELIQQAYREAIEERYRFYSYGDAMLIL

SEQ ID NO: 70360 - protein, 342 aa, Piscibacillus halophilus
  REGION 1..342: note = tr|A0A1H9BVS5|A0A1H9BVS5_9BACI S-adenosylmethionine:tRNA ribosyltransferase-isomerase; OS = Piscibacillus halophilus OX=571933 GN=queA PE=3 SV=1
MNIEDFDFELPEELIAQTPLVDRSSSRLMVLNREQETINHRYFYNIVDYLNPGDCLVLNNTKVMPARLFGEKEDTGGKIELLLLNQLEGDEWEVLVKPAKKVKEGTRLSFGDGLLKAVCTGQKEHGGRLIRFEYDGIFLEVLDQLGEMPLPPYIKEQLDDRDRYQTVYAEEVGSAAAPTAGLHFTEELLEQIKAKGVHIAYITLHVGLGTFRPVQVENIEEHDMHAEFYQMNQQTADLLNDVKQRDNKIVAVGTTSVRTLETIARDEDGKFKEANGWTDIFIYPPYQFKAIDAMITNFHLPKSTLIMLVSAFANKEFILNAYNEAVKERYRFFSFGDAMLIL

SEQ ID NO: 70361 - protein, 343 aa, Pisciglobus halotolerans
  REGION 1..343: note = tr|A0A1I3CSE1|A0A1I3CSE1_9LACT S-adenosylmethionine:tRNA ribosyltransferase-isomerase; OS = Pisciglobus halotolerans OX=745365 GN=queA PE=3 SV=1
MLTTEDFDFDLPEELIAQTPLKDRSSSRLMILDSQTGKVEDKHFTEIIDELNQGDALVMNDTRVLPARLYGTKPETGAHLEVLLLKNTQEDQWETLVKPAKRAKVGTMIEFGDGRLKAEVKEELDHGGRIIEFSYEGIFLEVLESLGEMPLPPYIKEKLEDQERYQTVYAKENGSAAAPTAGLHFTKELLEKIEEKGIHLVFLTLHVGLGTFRPVSVDNIENHKMHAEFYRLTEEAAATLNQVRQSGGRIVAVGTTSIRTLETIGTKFNGEIKADSGWTDIFIAPGYEFKVVDAFSTNFHLPKSTLVMLVSAFAGREHVLSAYQHAVEERYRFFSFGDAMFVK

SEQ ID NO: 70362 - protein, 342 aa, unidentified
  source 1..342: note = Piscirickettsia litoralis
  REGION 1..342: note = tr|A0A1E3G851|A0A1E3G851_9GAMM S-adenosylmethionine:tRNA ribosyltransferase-isomerase; OS = Piscirickettsia litoralis OX=1891921 GN=queA PE=3 SV=1
MHIDAFDFELPEQLIAQYPQEKRRSSRLLHLDHQGQCQHRCFSDVVDLLNPGDLLVLNNTQVIAARLYGKKPTGGKIEILVERLISETEVLAHVKSSKAPKEGTSILLDEEGAEVIVLGRQESLFHLKFSQPVLPLLDRIGHMPLPPYMVRLDEDADRRRYQTVYAKHPGAVAAPTAGLHFDDELLAELKEKGIDVAFVTLHVGAGTFQPVRVENIHDHVMHAEWLQVSDEVVAKVNKTKQSGGRVIAVGSTSLRSLETAAESGELKAFEGESRLFVTPGFKFNVADVMITNFHLPKSTLMMLVSAFAGYDEVMTAYHIAIEEKYRFFSYGDAMFIEKKVTS

SEQ ID NO: 70363 - protein, 346 aa, Piscirickettsia salmonis
  REGION 1..346: note = tr|A0A0K2DXX7|A0A0K2DXX7_PISSA S-adenosylmethionine:tRNA ribosyltransferase-isomerase; OS = Piscirickettsia salmonis OX=1238 GN=queA PE=3 SV=1
MHIDAFDFELPEHLIAQYPQTERRASRLLHVNRQGQCLHRGFSEVIDLLNPGDVLVLNNTEVIAARLYGKKPTGGKIEILVERLISEYEVLAHVKASKAPQAGTQVILSEAGAEVMVLGRDESLFQLKFNQAVLPLLARIGHMPLPPYMVRPDEETDRTRYQTVYARHPGAVAAPTAGLHFDDELLAEIKDKGVEIAFVTLHVGAGTFQPVRVENIQDHVMHAEWLQVSDDVVAKVNQAQQSGGRVIAVGSTSLRSLETAAAQAEEELKAFEGESRLFITPGFNFKVVDCMITNFHLPKSTLMMLVSAFAGYDEIMTAYYRAIEEKYRFFSYGDAMFLEKKEPMKV

SEQ ID NO: 70364 - protein, 346 aa, Piscirickettsia salmonis
  REGION 1..346: note = tr|A0A0K2L2P3|A0A0K2L2P3_PISSA S-adenosylmethionine:tRNA ribosyltransferase-isomerase; OS = Piscirickettsia salmonis OX=1238 GN=queA PE=3 SV=1
MHIDAFDFELPEHLIAQYPQTERRASRLLHVNRQGQCLHRGFSEIIDLLNPSDVLVLNNTEVIAARLYGKKLTGGKIEILVERLISEYEVLAHVKASKAPQAGTQIILSEVGAEVMVLGRDESLFRLKFNQAVLPLLARIGHMPLPPYMVRPDEETDRTRYQTVYARHPGAVAAPTAGLHFDDELLAEIKGKGVEIAFVTLHVGAGTFQPVRVENIQDHVMHAEWLQVSDDVVAKVNQAQRSGGRVIAVGSTSLRSLETAAAQAEEELKAFEGESRLFITPGFNFKVVDCMITNFHLPKSTLMMLVSAFAGYDEIMTAYYLAIEEKYRFFSYGDAMFLEKKEPMKV

SEQ ID NO: 70365 - protein, 341 aa, unidentified
  source 1..341: note = Piscirickettsiaceae bacterium
  REGION 1..341: note = tr|A0A2A4WHH0|A0A2A4WHH0_9GAMM S-adenosylmethionine:tRNA ribosyltransferase-isomerase; OS = Piscirickettsiaceae bacterium OX=2030828 GN=queA PE=3; SV = 1
MKKSDFNYQLPNELIARYPLDKRTDSRLLVVNEKKLTDDCFTDLTSLLKAGDLLVFNNTRVIPARLFGQKTTGGKLEVLIERVIDDTHALAHIRCSKSPKAGATILLTGGHECMVEGRDDDLFKLKFAESITVVLEDIGHMPLPPYIDREDESLDVERYQTVFSKTPGAVAAPTAGLHFDLDILNKIRSLGIDFAYVTLHVGSGTFQPVREENLDDHIMHKEWLTVNKAVVDKVNETKQKGGRVVAVGTTAMRSLESAAKDGILKPYTGDTDLFITPGYHFNVVDAMVTNFHLPESTLLMLVSAFSGYQRIKDVYQHAIEQKYRFFSYGDAMFLSRMNDKG

SEQ ID NO: 70366 - protein, 350 aa, unidentified
  source 1..350: note = Piscirickettsiaceae bacterium
  REGION 1..350: note = tr|A0A2M7M5Y5|A0A2M7M5Y5_9GAMM S-adenosylmethionine:tRNA ribosyltransferase-isomerase; OS = Piscirickettsiaceae bacterium CG_4_10_14_3_um_filter_44_349 OX=1974075 GN=qu eA PE=3 SV=1
MQRQDFHFNLPDALIAQKPPESRTDSRLLVLEADGRLSDCHFPDILEYLQPNDCLIFNNTRVIPARLFGQKQSGGKVELLIERVLDANRVLTHIRASNAPKPGDALTIAEAFQAVVIGREGALFELQFQQEDGPDLTALDLIERYGHIPLPPYISREDAVEDKTRYQTVYSQIPGAVAAPTAGLHFDEPLLKKIAEKGVKIGFVTLHVGAGTFKPVQVDDIARHKMHSEVIEVLPETVALIEQTRQKGGRVIAVGTTSVRCLESAARFSKTGELAPYQGETDIFITPGVDFKVVEVLLTNFHLPESTLIMLVSAFAGHKRTLSAYEHAVAQSYRFFSYGDAMLVFPQNKT

SEQ ID NO: 70367 - protein, 342 aa, unidentified
  source 1..342: note = Pistricoccus aurantiacus
  REGION 1..342: note = tr|A0A5B8SKZ3|A0A5B8SKZ3_9GAMM S-adenosylmethionine:tRNA ribosyltransferase-isomerase; OS = Pistricoccus aurantiacus OX=1883414 GN=queA PE=3 SV=1
MQRADFHYDLPEELIARYPSERRSDCRLLCVAGESGTLSHRHFTDLLDLLEPGDLLVFNDTRVIPARLHGVKASGGRVEMLLERPLDAWRGLAHLRSSKSPKPGTELVFEGDIHAVVEGRRGALFELRFLGDTPLIELLERHGHMPLPPYITREDELSDRERYQTVYARQDGAVAAPTAGLHFDEAMLAALEEKAVESAFVTLHVGAGTFQPVRAEDIRDHQMHSEWIDVSETVCRQVRTAKARGKRVIAVGTTSVRCLETASATGEIAPYQGDTDIFIYPGYEWRCVDGLITNFHLPESTLLMLVASFAGFETVMGAYQEAVAQRYAFFSYGDAMLLTRRV

SEQ ID NO: 70368 - protein, 355 aa, unidentified
  source 1..355: note = Planctomicrobium piriforme
  REGION 1..355: note = tr|A0A1I3G850|A0A1I3G850_9PLAN S-adenosylmethionine:tRNA ribosyltransferase-isomerase; OS = Planctomicrobium piriforme OX=1576369 GN=queA PE=3 SV=1
MLSLDQINAYDYSLPEELIAQVPAERRDESRLLVVNRQSGSISHHRFRDLPELLRPHDLLVLNDTRVVPARLIGHRAATGGKWEGLFLRLEDDGAWRLIGQTRGTLRAGERLTLSPADPNAASPASQLDLILEARNGDGTWRVRPDSEVPAMTLLEQFGTLPLPHYMQRDAEIADRDRYQTTYAEKPGAVAAPTAGLHFTPEVFAACQTRQIETAHVTLHVGLGTFRPVSVDNLSEHRMHSEWCELSVKSAQQIADTKATGGRIVAVGTTSVRTLESVAQQGQLRAWQGETNLFIRPPFQFQIVDALITNFHLPRSTLLVLVCTFAGRELMLAAYEEAIRERYRFFSYGDAMLIV

SEQ ID NO: 70369 - protein, 138 aa, Planctomyces bekefii
  REGION 1..138: note = tr|A0A5C6M2F2|A0A5C6M2F2_9PLAN S-adenosylmethionine:tRNA ribosyltransferase-isomerase (Fragment) OS=Planctomyces bekefii OX=1653850; GN = E3A20_25370 PE=3 SV=1
MATPDPDLLSTWQFELPEHLIASRPAASRDDSRLMILNRRLGTIEHAWIRDLPDRLNSEDLLVFNNTQVIPARLFGYRQQTGGRWEGLYVESDASGNWILLCETRGKLQPGERIQVVPADCWQRDDLHPQSAGSYSRL

SEQ ID NO: 70370 - protein, 357 aa, Planctomyces sp.
  REGION 1..357: note = tr|A0A2E0SKJ3|A0A2E0SKJ3_9PLAN S-adenosylmethionine:tRNA ribosyltransferase-isomerase; OS = Planctomyces sp. OX=37635 GN=queA PE=3 SV=1
METISDYDYTLPERLIAAAPPEDRTAARLMVIRRETGAIEHRGIRDLPQLLTPGDCLVLNNTRVIPAKLHGYRTSTGGKWEGLYLGQAEGGDWRVIGQTRGKLQPGETISLVPGDIEGVDDTTAIPPLELELIERRPEEGSWVMRPRSDRGFLELLDEYGSVPLPPYIKRDEEKSFDRERYQTTYAKQPGSVAAPTAGLHFTPELLEECRACGIAVGWVTLHVGLGTFRPVKVEQLSDHQMHAEWCEVPEETVSMIRRTKESDGNVVAIGTTTVRTLESASQSGSLQPWAGETDLFIRPPYRFKTVDQLVTNFHLPKSTLLVLVSTLAGHELIRRAYAQAMEQEYRFFSYGDAMLIL

SEQ ID NO: 70371 - protein, 352 aa, Planctomyces sp.
  REGION 1..352: note = tr|A0A2E8F3P7|A0A2E8F3P7_9PLAN S-adenosylmethionine:tRNA ribosyltransferase-isomerase; OS = Planctomyces sp. OX=37635 GN=queA PE=3 SV=1
MLTSDFDYHLPQDLIAQTPIEPRDSSRLLVLDRAFGLLQHKHFHQIFEYLKPGDVMVFNESRVIAARLRGRRTDTGGKVEFLLLRRESQGVWQALAKPGRRLKAGATVTLETPGHDQSESTRATVDVEVLDSGQDGVKTIRLLREDDIDRFGVMPLPPYIHDRLEDPERYQTVYSRQLGSAAAPTAGLHFTQELMAGLTQIGVEQTFVTLHVGLDTFRPVQDDDPNQHRIHTEYYELSQETADLLNRAKSNGQRIIAVGTTSVRVLEHTAQEMERQGRDRLVECQGQADIFILPGYRFRLVDAMVTNFHLPRSTLLMLVSAFAGRETMLAAYQEAIRERYRFYSFGDAMLML

SEQ ID NO: 70372 - protein, 348 aa, unidentified
  source 1..348: note = Planctomycetaceae bacterium
  REGION 1..348: note = tr|A0A1Z8MM32|A0A1Z8MM32_9PLAN S-adenosylmethionine:tRNA ribosyltransferase-isomerase; OS = Planctomycetaceae bacterium TMED10 OX=1986833 GN=queA; PE = 3 SV=1
MSELNAYDYTLPKERIAQQPLAHRSDARLMVVDRKSDSIEHRYVRDLPQLLAAGDSLVLNDTRVVAARLVGKRTATGGRWEGLFLESDAGGLWKVLGRTRGKIGAGESVQLIDREGRPATTLTLIAQEDDSSWIVHTDSEQEPYQLLEQVGRTPLPPYIRGGEMLPEDESRYQTVYARHPGSVAAPTAGLHFTDALLEQLSAAKIQRQEVTLHVGTGTFRPIASDSLSEHPMHSEWAQLSPATASALTRVRNEGHRVVAVGTTSMRVIETAAHGGTLGAFEGPTDLFIHPPYTFQGVDALLTNFHLPRTTLLVLVRTFGGDRLIRRAYELAVEEEYRFYSYGDAMLIL

SEQ ID NO: 70373 - protein, 358 aa, unidentified
  source 1..358: note = Planctomycetaceae bacterium
  REGION 1..358: note = tr|A0A3D1DEK0|A0A3D1DEK0_9PLAN S-adenosylmethionine:tRNA ribosyltransferase-isomerase; OS = Planctomycetaceae bacterium OX=2026779 GN=queA PE=3 SV=1
MSKPESTDQLSVFDYHLPDELIAREPLERRDASRLLVVDRERQHIESRLIQDLPDLVDPGDCLVVNDTRVLPAKLAGHRVATGGAWEGLFLGSEEDGRWRIIGQTRGRLQPGETISLVPVHPPAFPVPDQELRLLEQIAGGIWRAAPFPPGQPMELLERFGTMPLPPYIQRHIATDLDRQRYQTVFARHPGAVAAPTAGLHLSEDLIDRCRQNGLGFEHLTLHVGLGTFRPISSETLDDHVMHSEWCRISHATCQALNKIKQSRRRVVAVGTTVVRTLESASAGGTLEKFDDTTDLFIRPGHQFRSIDALLTNFHLPRSTLFVLVCAFCGTDLAQEAYRMAIANRYRFYSYGDAMLIL

SEQ ID NO: 70374 - protein, 349 aa, unidentified
  source 1..349: note = Planctomycetales bacterium
  REGION 1..349: note = tr|A0A1W9TBM6|A0A1W9TBM6_9BACT S-adenosylmethionine:tRNA ribosyltransferase-isomerase; OS = Planctomycetales bacterium 4572_13 OX=1971638 GN=queA; PE = 3 SV=1
MKTEDLNYSLPQELIAQHPSEKRRQSRLLVLDRAAKTRADRRFSDLGGYLQAGDCLVLNNTKVVPARFYGRKQTGAQLEGLFIHEEPDGEWQVLLKNARKVKSGEEIELLDRTGSVWGRAVTNRSEVKGQWRLRPNEPIDAFSALEQIGLPPLPPYIKRGREDTSTPEDLQRYQTVYATQPGAVAAPTAGLHFDEPTLEKIKNLGVELAYITLHVGIGTFRPVQTETLDEHPMHEERYEVGKGAAATINDTVDVGGRIIAVGTTSVRTLESVAKNHHIQPAQGQTKLFIQPGYNFKIVDAILTNFHLPKSTLLALVGAFAGIDTVLNAYQHAIKQKYRFYSYGDAMFIY

SEQ ID NO: 70375 - protein, 365 aa, unidentified
  source 1..365: note = Planctomycetales bacterium
  REGION 1..365: note = tr|A0A1V4QY76|A0A1V4QY76_9BACT S-adenosylmethionine:tRNA ribosyltransferase-isomerase; OS = Planctomycetales bacterium 4484_113 OX=1956161 GN=queA; PE = 3 SV=1
MLHYDLPPELVPQQPLADRDASRLMVVHRQTADIEHRAFRELPDILEPMDFLVLNDGRVMHSRFRCLRARTGGKVEVLITRVLPGSRAECLTESRGHLQAGDELTLDSQTSFILERPTTHENPGIVHILRNGVPAPEQEIRDLLQRGELPLPPYLKERLQDEERYQTTYAASFGSAAAPTAGLHFTPRIFSRLKERGVDWAMVTLHIGTATFLPIRTDDVTDHRLSPEGYSMKPTELRRILKAKLSGRRIVAVGTTSVRVLEGVLTDWRRRLQVHGIKTTRDLEAMNDDQLAEAFPLRGDTRLFILPGYRFGVIDHMLTNFHLPRTTLLALVYAFGGRELIRRAYESAIARRYRFYSLGDSMLIL

SEQ ID NO: 70376 - protein, 361 aa, unidentified
  source 1..361: note = Planctomycetes bacterium
  REGION 1..361: note = tr|A0A5C6EEJ9|A0A5C6EEJ9_9BACT S-adenosylmethionine:tRNA ribosyltransferase-isomerase; OS = Planctomycetes bacterium Poly59 OX=2528013 GN=queA PE=3; SV = 1
MNEIDQYDYDLPKELIAQEPLATRSDSRLMLVDRATGSIAHHYVRDLPELLSAGDTLVMNNSRVVPARLVGQRANTGGRWQGLFLQADRETGIWEVLTKTRGTLREGEAITIKDRDARDGMELIVVARTGDGKLLVKPRLTADMAVVMGDKLKEPADWLDRFGRIPLPPYIRDGQMVDADLQNYQTVFAKDRGSVAAPTAGLHFTKTLLEKVRAAGVDTAEVTLHVGIGTFRPIQTEQLDDHVMHTEWGSIDASTVDNIRSRRARGRCIAVGTTSVRVLESSAAKNGGKLTPWTGETDLFIRPPYQFNVIDGMMTNFHLPKSSLLVLVSAFAGRELAMKAYRTAIENEYRFYSYGDAMLIL

SEQ ID NO: 70377 - protein, 351 aa, unidentified
  source 1..351: note = Planctomycetes bacterium
  REGION 1..351: note = tr|A0A517X9U0|A0A517X9U0_9BACT S-adenosylmethionine:tRNA ribosyltransferase-isomerase; OS = Planctomycetes bacterium CA11 OX=2527988 GN=queA PE=3; SV = 1
MTDLNAFDYQLPLELIATEPTQQRDQSRLLILDRKSQSITHGSISDLPRYLNPDDCLVLNNTRVLSARLFGTRQSTGGKWEGLYLGSNSLGEWKLMSKTRGKLNPGDIIELRPAHQRSLEKQVTLKLLSKDTEGYWTALVKSDEDHHSLLAHFGTMPLPPYMKRNLATEEDWERYQTVYAAQPGAVAAPTAGLHFTPELLERCTAQGTRIANVTLHVGIGTFKPISVETLEAHKMHSEWCELPAESAELLNQSRRQGGRIVCVGTTSVRTLESVAQQGPLQAWQGETDIFIYPPYQFQAVDCLLTNFHLPKSTLLVLVSAFAGAEFIREAYKKAVEAEYRFYSYGDAMLIL

SEQ ID NO: 70378 - protein, 154 aa, unidentified
  source 1..154: note = Planctomycetia bacterium
  REGION 1..154: note = tr|A0A3D3KPR2|A0A3D3KPR2_9BACT S-adenosylmethionine:tRNA ribosyltransferase-isomerase (Fragment) OS=Planctomycetia bacterium OX=2052181; GN = DIS73_06270 PE=3 SV=1
  VARIANT 153: note = Xaa can be any naturally occurring amino acid
QPLLEEIRCMGVEIIRVTLHVGLGTFMPIRSDVITHHRMEKEYFELDTDAARRLNEVRNRGGKIVAVGSTCCRVLETLAQGGGIKASKGWTDLFIHPPYKFKMVNTLLTNFHLPKTTLLVLVATFAGRTKILDAYAEAVEKGYRFYSYGDAMXE

SEQ ID NO: 70379 - protein, 353 aa, unidentified
  source 1..353: note = Planctomycetia bacterium
  REGION 1..353: note = tr|A0A1Z8SU96|A0A1Z8SU96_9BACT S-adenosylmethionine:tRNA ribosyltransferase-isomerase; OS = Planctomycetia bacterium TMED53 OX=1986839 GN=queA PE=3; SV = 1
MEIESGENHHSLSRYDFDLPESLIAQEPASNRSGSRCIFAERGLPGHQSGHFTDLIQQLNGDELLVYNDTRVIPARIHGNRSTGGKVEIFILRPARDGHSWIAWISPSKRIKPGEVIFGPDVEITVHEREGSSWRIEWPSDISLEEIGEVPLPPYIRRDVDQPDRSELDRERYQTVFAKTPGAVAAPTAGLHFDETLLDQLKARGVERCPVTLHVGPGTFKPIESEDLRDHKVDPEWFSISRESRQTLHEAQQQGRPIIAVGTTSLRVLETLEDLSPGEEIVGETDLTILPGYQFRHVDGLLTNFHLPGSSLLVLVSCFHGVENTLEIYRYAIENEFRFYSYGDCMLIKPGSH

SEQ ID NO: 70380 - protein, 364 aa, unidentified
  source 1..364: note = Planctopirus ephydatiae
  REGION 1..364: note = tr|A0A518GQ11|A0A518GQ11_9PLAN S-adenosylmethionine:tRNA ribosyltransferase-isomerase; OS = Planctopirus ephydatiae OX=2528019 GN=queA PE=3 SV=1
MSSSPDFESLSTYDYELPPELIAQHPLPERDASRMLVIHRSKGMIEHRFIKELPLFLKPHDLIVVNNSKVVPARLQGVRASTSGKWEGLFLGVTTSGEWQIIGQTRGRLQSGEWITIPVPATHVESTESRQHPDLQLQLIERGEGGIWKACPQSQVSTWDLLEQYGSMPLPPYIHRDDEEVEDRVRYQTIFSGPQGSVAAPTAGLHFTPALRDRCAASGAKFAEVTLHVGMGTFRPVSSERIAEHKMHTETCELSEDVARKIQSTRSQGGKVLAIGTTSARTLESAARKVGVGLPWQGETNLFLRPPCEFLQVEALLTNFHVPKSTLLMLVCAMAGYDLTMQAYQEAVEQRYRFLSYGDCMLIL

SEQ ID NO: 70381 - protein, 364 aa, unidentified
  source 1..364: note = Planctopirus hydrillae
  REGION 1..364: note = tr|A0A1C3EHD2|A0A1C3EHD2_9PLAN S-adenosylmethionine:tRNA ribosyltransferase-isomerase; OS = Planctopirus hydrillae OX=1841610 GN=queA PE=3 SV=1
MSSSPDFESLSTYDYELPPELIAQHPLPERDASRMLVIHRSKGTIEHRFIKELPLFLKPNDLIVVNNSKVVPARLQGVRASTGGKWEGLFLGVTTSGEWQIIGQTRGRLVAGEWITIPVPATHIENAASRQNSDLQLQLIERGEGGIWKASPQSEISTWDLLEQYGSMPLPPYIHRDDEEAEDRVRYQTIFSGPQGSVAAPTAGLHFTPALRDRCAASGAKFAEVTLHVGMGTFRPVSSERIAEHQMHTETCELSEDVAQKIRSTKSEGGRVLVIGTTSARTLESAARKVGVGLPWQGETNLFLRPPCEFLQVEALLTNFHVPKSTLLMLVCAMAGYDLTMQAYKEAVEQRYRFLSYGDCMLIL

SEQ ID NO: 70382 - protein, 364 aa, unidentified
  source 1..364: note = Planctopirus limnophila
  REGION 1..364: note = tr|D5SXQ5|D5SXQ5_PLAL2 S-adenosylmethionine:tRNA ribosyltransferase-isomerase OS=Planctopirus limnophila (strain ATCC 43296 / DSM 3776 / IFAM 1008 / 290) OX=521674 G N=queA PE=3 SV=1
MSSSPDFESLSTYDYELPPELIAQHPLPERDASRMLVIHRSTGMIEHRFIKELPLFLKPHDLIVVNNSKVVPARLQGVRASTGGKWEGLFLGVTTSGEWQIIGQTRGRLVAGEWITIPVPATHIENAASRQNSDLQLQLIERGEGGIWKASPQSEISTWDLLEQYGSMPLPPYIHRDDEEAEDRVRYQTIFSGPQGSVAAPTAGLHFTPALRDRCAASGAKFAEVTLHVGMGTFRPVSSERIAEHQMHTETCELSEDVAQKIRSTKSEGGRVLAIGTTSARTLESAARKVGVGLPWQGETNLFLRPPCEFLQVEALLTNFHVPKSTLLMLVCAMAGYDLTMQAYKEAVEQRYRFLSYGDCMLIL

SEQ ID NO: 70383 - protein, 343 aa, Planifilum fimeticola
  REGION 1..343: note = tr|A0A2T0LBX9|A0A2T0LBX9_9BACL S-adenosylmethionine:tRNA ribosyltransferase-isomerase; OS = Planifilum fimeticola OX=201975 GN=queA PE=3 SV=1
MDVSEFDFHLPEELIAQSPPPRRADSRLMVLDRETGELEHRRFSDLTEYLRPGDVLVINDTRVRPARLIGMKKETGGRVEILLLKPLGEDRWEVLAKPARRLKPGSTILFGNGELQAVVEGESGVAGGRIVRLAYEAEDLEALLERLGEMPLPPYIRKRLEDPERYQTVYARAVGSAAAPTAGLHFTPELLEEIRDKGVDIASVTLHVGLGTFRPVTAERVEEHRMHAEYYEVGEAAAERIRSARKRGGRVVAVGTTSVRTLETVAGLHGEIVPAKGWTDIFIYPGYRFRAVDALITNFHLPRSTLLMLVSAFASRRQILAAYEEAVNQRYRFFSFGDAMLIL

SEQ ID NO: 70384 - protein, 343 aa, Planifilum fulgidum
  REGION 1..343: note = tr|A0A1I2QVE5|A0A1I2QVE5_9BACL S-adenosylmethionine:tRNA ribosyltransferase-isomerase; OS = Planifilum fulgidum OX=201973 GN=queA PE=3 SV=1
MDVSEFDFHLPEELIAQSPPPRRTDSRLMVLHRETGELEHRRFSDLTEYLRPGDVLVINDTRVRPARLIGMKKETGGRVEILLLKPLGEDRWEVLAKPARRLKPGSTLLFGNGELQAVVEGESGVAGGRIVRLRYEGKDLEALLDRLGEMPLPPYIRKRLDDPERYQTVYARAVGSAAAPTAGLHFTTELLEEIRGKGVDIASITLHVGLGTFRPVTAERVEDHRMHAEYYEVGEKAAEKIRAARKRGGRVVAVGTTSVRTLETVAGLHGRIVPAKGWTDIFIYPGYRFRVVDALITNFHLPRSTLLMLVSAFASRRRILAAYEEAVKLRYRFFSFGDAMLIL

SEQ ID NO: 70385 - protein, 348 aa, unidentified
  source 1..348: note = Planktomarina sp.
  REGION 1..348: note = tr|A0A2E0AFF7|A0A2E0AFF7_9RHOB S-adenosylmethionine:tRNA ribosyltransferase-isomerase; OS = Planktomarina sp. OX=2024851 GN=queA PE=3 SV=1
MYLSDFDFELPKKLIATRPTSPRGNAKLLVSSSGRLHDSRVGNICNFLRPGDRLVLNNTKVIPARLDGVRFRQSAQGPVQAKIAITLVKPLPNGNWEALIKPLRKVKVGEKIIFKKGLIATCIKKLDGKGLLAFSVKGDELDEVLDKIGDMPLPPYIASRRPADAQDHLDYQTVWAKHPGAVAAPTASLHLDEHVLSALSNHGVDITFVTLHVGAGTFLPVTVDDIRKHKMHAEWGYVGSKAAQEIKSTKSKGGRIIPVGTTALRLIETASLTGMIKPFDGDTEIFIHPGFKFKVTDGLLTNFHLPKSTLLMLVSAFVGKSELDNIYQHAIDMSYQFFSYGDASLLFP

SEQ ID NO: 70386 - protein, 352 aa, unidentified
  source 1..352: note = Planktotalea frisia
  REGION 1..352: note = tr|A0A1L9NZ24|A0A1L9NZ24_9RHOB S-adenosylmethionine:tRNA ribosyltransferase-isomerase; OS = Planktotalea frisia OX=696762 GN=queA PE=3 SV=1
MKLSDFDFDLPDRLIATRPVSPRSSARLLLAQAGSIQDWHVYDLPEIFLPGDVLVLNNTKVIPARLFGLRRRESEHGSGEAKIEVTLLEPSADQGSWRALIKPLRKVKEGEVIVFSDVLSATLTGKEVGQGVLKFNLQGDDFDAALADAGAMPLPPYIAAKRAADEQDKDDYQTVFAEHSGAVAAPTASLHFDEDLLENLRGRGVEFAHVTLHVGAGTFLPVKVDDVTTHKMHAEWGQVSATAADQILRAKKEGRRVIPVGTTALRLIESAAAASGEIAPWEGETDIFIYPGFKFNVADALMTNFHLPKSTLMMLVAALMGKARMDEIYAHAIAENYRFFSYGDSSLLVPSK

SEQ ID NO: 70387 - protein, 372 aa, unidentified
  source 1..372: note = Planktothricoides sp.
  REGION 1..372: note = tr|A0A0M1JKB8|A0A0M1JKB8_9CYAN S-adenosylmethionine:tRNA ribosyltransferase-isomerase; OS = Planktothricoides sp. SR001 OX=1705388 GN=queA PE=3 SV=1
MSESQNFDLMLTAYDYKLPEERIAQNPVVPRDASRLLVVKSPTEHSHHIFRELPELLQPGDLLILNNTRVIQARLYGRKSTGAPVEVLLLEESQANIWLALVKPGRRLKPGAQIEFEPASEALQSEALQNGAIPAPFTAKVLATEESTGGRFIELFLPTGATLAQVLQVYGHVPLPPYITKSSALPSQYQTVYAEKPGSVAAPTAGLHFTEELLTRLEQRRIQRAFVTLNVGVGTFRPVEVENVTQHEMHSEWALVPESTVAKIRETKAQGGRVIAVGTTAVRSLEGAAAGGELQPLCGKTDLFIYPGYQWQVVDGLITNFHLPKSSLLMLVSALVGRQRLLDLYQEAIAHQYRFYSFGDAMLILPTAKAHG

SEQ ID NO: 70388 - protein, 378 aa, Planktothrix agardhii
  REGION 1..378: note = tr|A0A2Z6CDQ1|A0A2Z6CDQ1_PLAAG S-adenosylmethionine:tRNA ribosyltransferase-isomerase; OS = Planktothrix agardhii NIES-204 OX=282423 GN=queA PE=3; SV = 1
MDQLDYQLESYNYELPEERIAQNPVVPRDNSRLLVVDSPDSHRHCLFKDLPEFLRPGDLLVLNNTRVLPARLYGHKSSGAEVEVLLLEEKQHHCWLALVKPGKKFKPGSVIEFELNPTSKNNFNCERLQATVLETDEETGGRLLKFEIPPGKSLIPFLEAFGNIPFPPYLTETEALPEQYQTIYAERSGAVAAPTAGLHFTEELFQRLQLKGIDQVFLTLHVGVGTFRPVEVDNIIDHQMHGEWIEVPAETFEKIAKTKASGGRVIAVGTTSARALEGAAVALANATETPQKSTFTGYCGKTDIFIYPGYQWQIINGLITNFHLPKSSLLMLVSALIGRKRLLNLYQQVLEEPANEFGQQYRFYSFGDAMFIAPESVL

SEQ ID NO: 70389 - protein, 378 aa, Planktothrix agardhii
  REGION 1..378: note = tr|A0A073CDP5|A0A073CDP5_PLAAG S-adenosylmethionine:tRNA ribosyltransferase-isomerase; OS = Planktothrix agardhii NIVA-CYA 126/8 OX=388467 GN=queA; PE = 3 SV=1
MDQLDYQLESYNYELPEERIAQNPVVPRDNSRLLVVDSPDSHRHCLFKDLPEFLRPGDLLVLNNTRVLPARLYGHKSSGAEVEVLLLEEKQHHCWLALVKPGKKFKPGSVIEFELNPTSKNNFNCERLQATVLETDEETGGRLLKFEIPPGKSLIPFLEAFGNIPFPPYLTETEALPEQYQTIYAERSGAVAAPTAGLHFTEELFQRLQLKGIDQVFLTLHVGVGTFRPVEVDNIIDHQMHGEWIEVPAETFEKIAKTKASGGRVIAVGTTSARALEGAAIALANATETPQESTFTGYCGKTDIFIYPGYQWQIINGLITNFHLPKSSLLMLVSALIGRKRLLNLYQQVLEEPANEFGQQYRFYSFGDAMFIAPESVL

SEQ ID NO: 70390 - protein, 378 aa, unidentified
  source 1..378: note = Planktothrix rubescens
  REGION 1..378: note = tr|A0A1J1L4P4|A0A1J1L4P4_PLARU S-adenosylmethionine:tRNA ribosyltransferase-isomerase; OS = Planktothrix rubescens OX=59512 GN=queA PE=3 SV=1
MDQLDYQLESYNYELPEERIAQNPVVPRDNSRLLVVDSPDSHRHCLFKDLPEFLRPGDLLVLNNTRVLPARLYGHKSSGAEVEVLLLEEKQHHCWLALVKPGKKFKPGSVIEFELNPTSKNNFNCERLQATVLETDEETGGRLLKFEIPPGKSLIPFLEAFGNIPFPPYLTETEALPEQYQTIYAERSGAVAAPTAGLHFTEELFQRLQLKGIDQVFLTLHVGVGTFRPVEVDNIIDHQMHGEWIEVPAETFEKIAKTKASGGRVIAVGTTSARALEGAAVALANATETPQESTFTGYCGKTDIFIYPGYQWQIINGLITNFHLPKSSLLMLVSALIGRKRLLNLYQQVLEEPANEFGQQYRFYSFGDAMFIAPESVL

SEQ ID NO: 70391 - protein, 381 aa, Planktothrix sp.
  REGION 1..381: note = tr|A0A3C1RVH0|A0A3C1RVH0_9CYAN S-adenosylmethionine:tRNA ribosyltransferase-isomerase; OS = Planktothrix sp. UBA8407 OX=2055758 GN=queA PE=3 SV=1
MDQLDYQLESYNYELPEERIAQNPVVPRDNSRLLVVDSLISHRHCLFKDLPEFLRPGDLLVLNNTRVLPARLYGHKSSGAAVEVLLLEEKQHNCWLALVKPGKKFKPGSVIEFELNPLSKNKFNCQNLRATVLETNGETGGRLLKFDLAPGKSLIPFLEMFGNIPFPPYVTKTEALPEQYQTIYAERSGAVAAPTAGLHFTEELFQRLQSKGIDQTCLTLHVGVGTFRPVEVDNIIEHQMHGEWINVSAETFEKIEKTKASGGRVIAVGTTSVRALEGAAIALSEKSISTENHKESAFTGYCGKTSIFIYPGYKWQIIDGLITNFHLPKSSLLMLVSALIGRERLLNLYQQVLEEPANQFGQQYRFYSFGDAMFILPESVL

SEQ ID NO: 70392 - protein, 381 aa, Planktothrix sp.; identical to SEQ ID NO: 70391
  REGION 1..381: note = tr|A0A354WKE0|A0A354WKE0_9CYAN S-adenosylmethionine:tRNA ribosyltransferase-isomerase; OS = Planktothrix sp. UBA10369 OX=2055760 GN=queA PE=3 SV=1

SEQ ID NO: 70393 - protein, 385 aa, unidentified
  source 1..385: note = Planktothrix tepida
  REGION 1..385: note = tr|A0A1J1LDL9|A0A1J1LDL9_9CYAN S-adenosylmethionine:tRNA ribosyltransferase-isomerase; OS = Planktothrix tepida PCC 9214 OX=671072 GN=queA PE=3 SV=1
MDQLDYWLESYNYQLPEERIAQNPVVPRDHSRLLVVDSPNSHRHCLFKDLPEFLRPGDLLVLNNTRVLPARLYGRKSSGAVVEVLLLEEKSHQTWLALVKPGKRFKSGSVIEFESISDSTTNFNPKLLRAIVLETDEETGGRLLKFEIPEEQSLIPLLEQFGNIPFPPYVTETEALPEQYQTIYAKHSGAVAAPTAGLHFTEELFQRLEQQGIDKTFLTLHVGVGTFRPVEVNQITEHQMHGEWIEVPAETIEKIEKTKASGGRIIAVGTTVVRALEGAAIAHSSNSGTSTENSKESALKSYCGKTNIFIYPGYQWRVIDGLITNFHLPKSSLLMLVSALIGRERLLSLYQAVLEEPANDFGRQYRFYSFGDAMFILPEATLKRE

SEQ ID NO: 70394 - protein, 350 aa, Planococcus antarcticus
  REGION 1..350: note = tr|A0A1C7DKZ3|A0A1C7DKZ3_9BACL S-adenosylmethionine:tRNA ribosyltransferase-isomerase; OS = Planococcus antarcticus DSM 14505 OX=1185653 GN=queA; PE = 3 SV=1
MNIQDYDFRLPEELIAQTPLLDRTSSRLLVMNKVTGDTAHRHFRDITDYLHEGDTLVLNDTRVLPARLMGVKEDTGANIELLLLKQVEDGVWETLAKPAKKVKIGTIVSFGEGLLRAECTGILDHGGRHFKMIYDGIFYEILDQLGEMPLPPYIREKLEDQDRYQTVFAKERGSAAAPTAGLHFTDELLEEIRKKGVNIAFITLHVGLGTFRPVSVDSIEDHEMHSEFYRITQETADLINQTRQQGGRIVSVGTTSTRTLESVAQKFDGELQEDSGWTDIFIFPGYKFKAIDGLITNFHLPKSTLVMLVSALSNRDHILNAYQQAVDERYRFFSFGDAMFIEPQKKETHQ

SEQ ID NO: 70395 - protein, 359 aa, Planococcus citreus
  REGION 1..359: note = tr|A0A497YFN5|A0A497YFN5_9BACL S-adenosylmethionine:tRNA ribosyltransferase-isomerase; OS = Planococcus citreus OX=1373 GN=queA PE=3 SV=1
MTKLTNEQQLNVNDFDFELPEELIAQTPLLDRTSSRLLVMDKETGAVEHKHFRDILGHLHTGDTLVLNDTRVLPARLMGTKEETGANIEVLLLKQTEEDVWETLVKPAKKVKIGTVVSFGDGLLRAECTGVLDHGGRHFKFIYDGIFYEILDQLGEMPLPPYIREKLEDQDRYQTVFAKERGSAAAPTAGLHFTDELLGEIRNKGVNIVFITLHVGLGTFRPVSVESIEDHEMHAEFYRITKETADLINDTKQKGGRVISVGTTSTRTLESVAKKFGGKLQEDNGWTDIFIYPGYRFEAVDGLITNFHLPKSTLVMLVSAMSNRDAILNAYNEAVQERYRFFSFGDAMFIEPQKKETES

SEQ ID NO: 70396 - protein, 359 aa, Planococcus donghaensis
  REGION 1..359: note = tr|A0A1C7EIT4|A0A1C7EIT4_9BACL S-adenosylmethionine:tRNA ribosyltransferase-isomerase; OS = Planococcus donghaensis OX=414778 GN=queA PE=3 SV=1
MTKLTENKSLTIQDYDFDLPEDLIAQTPLLDRTSSRLLVMNKETGETSHRHFRDIIDYLHKGDTLVLNDTRVLPARLMGVKEDTGANIELLLLKQIEDDVWETLVKPAKKVKIGTVVSFGEGLLRAECTAILDHGGRHFKMIYDGIFYEILDQLGEMPLPPYIREKLEDQDRYQTVFAKERGSAAAPTAGLHFTDELLEKIRNKGVNITFITLHVGLGTFRPVSVESIEDHEMHSEFYRISKETAELINETKKNGGRIVSVGTTSTRTLESVAQKFDGELQEDSGWTDIFIFPGYEFKAVDGLITNFHLPKSTLVMLVSALSSRDHILNAYKQAVDERYRFFSFGDAMFIEPQKKETHQ

SEQ ID NO: 70397 - protein, 359 aa, Planococcus donghaensis
  REGION 1..359: note = tr|E7RIL4|E7RIL4_9BACL S-adenosylmethionine:tRNA ribosyltransferase-isomerase OS=Planococcus donghaensis MPA1U2 OX=933115 GN=queA PE=3 SV=1
MTKLTEKKSLNILDYDFDLPEELIAQTPLLDRTSSRLLVMNKESGETSHRHFRDITDYLHKGDTLVLNDTRVLPARLMGVKEDTGANIELLLLKQIEDDVWETLVKPAKKVKIGTVVSFGEGLLRAECTGILDHGGRHFKMIYDGIFYEILDQLGEMPLPPYIREKLEDQDRYQTVFAKERGSAAAPTAGLHFTDELLEKIRNKGVNITFITLHVGLGTFRPVSVESIEDHEMHSEFYRITKESAELINETKKNGGRIVSVGTTSTRTLESVAQKFDGKLQEDSGWTDIFIFPGYEFKAVDGLITNFHLPKSTLVMLVSALSSRDHILNAYKQAVDERYRFFSFGDAMFIEPQKKETHQ

SEQ ID NO: 70398 - protein, 359 aa, unidentified
  source 1..359: note = Planococcus halocryophilus
  REGION 1..359: note = tr|A0A1C7DN58|A0A1C7DN58_9BACL S-adenosylmethionine:tRNA ribosyltransferase-isomerase; OS = Planococcus halocryophilus OX=1215089 GN=queA PE=3 SV=1
MTKLTVKTSLNIQDYDFDLPEELIAQTPLLDRTSSRLLVMNKESGATSHRHFRDIIDYLHKGDTLVLNDTRVLPARLMGVKEDTGANIELLLLKQIEDDVWETLVKPAKKVKIGTVVSFGEGLLRAECTGILDHGGRHFKMIYAGIFYEILDQLGEMPLPPYIREKLEDQDRYQTVFAKERGSAAAPTAGLHFTDELLEKIRNKGVNITFITLHVGLGTFRPVSVDSIEDHEMHSEFYRITKETAELINETKRKGGRIVSVGTTSTRTLESVAQKFDGELQEDSGWTDIFIFPGYEFKAVDGLITNFHLPKSTLVMLVSALSSRDHILNAYNQAVDERYRFFSFGDAMFIEPQKKETHQ

SEQ ID NO: 70399 - protein, 361 aa, unidentified
  source 1..361: note = Planococcus halotolerans
  REGION 1..361: note = tr|A0A365KTS1|A0A365KTS1_9BACL S-adenosylmethionine:tRNA ribosyltransferase-isomerase; OS = Planococcus halotolerans OX=2233542 GN=queA PE=3 SV=1
MMKTTQQPNTLNVNDFDFELPEELIAQTPLLDRTSSRLLVMNKESGKTEHKHFRDIIDYLHEGDTLVLNDTRVLPARLMGVKEDTGANIELLLLKQIEDDVWETLVKPAKKVKVGTVVSFGEGLLRAECTGILDHGGRHFKMIYDGIFYEILDQLGEMPLPPYIREKLEDQDRYQTVFAKERGSAAAPTAGLHFTDELLKKIEEKGVNIAFITLHVGLGTFRPVSVESIEDHEMHAEFYRINKETAELINNTKAQGGRVISVGTTSTRTLESVANKFGGELKEDSGWTDIFIFPGYDFKAIDGLITNFHLPKSTLVMLVSALSNRDNILNAYNEAVNERYRFFSFGDAMFIEPQKKETHHD

SEQ ID NO: 70400 - protein, 360 aa, Planococcus kocurii
  REGION 1..360: note = tr|A0A0U2ZNX1|A0A0U2ZNX1_9BACL S-adenosylmethionine:tRNA ribosyltransferase-isomerase; OS = Planococcus kocurii OX=1374 GN=queA PE=3 SV=1
MTKLTTPNTTLNIQDYDFDLPEELIAQTPLLDRTSSRLLVMNKETGQTSHRHFRDIIDYLHKGDTLVLNDTRVLPARLMGVKEDTGANIELLLLKQVEDDVWETLTKPAKKVKVGTVVSFGDGLLRAECTGILDHGGRHFKMIYDGIFYEILDQLGEMPLPPYIREKLEDQDRYQTVFAKERGSAAAPTAGLHFTDELLEQIRDKGVNIAFITLHVGLGTFRPVSVDSIEDHEMHSEFYRIPKETADLINKTKQNGGRIVSVGTTSTRTLESVAQKFDGRLQEDSGWTDIFIFPGYEFKAVDGLITNFHLPKSTLVMLVSALSSRDYILNAYNQAVDERYRFFSFGDAMFIEPQKKETHP

SEQ ID NO: 70401 - protein, 359 aa, Planococcus maitriensis
  REGION 1..359: note = tr|A0A365K8V5|A0A365K8V5_9BACL S-adenosylmethionine:tRNA ribosyltransferase-isomerase; OS = Planococcus maitriensis OX=221799 GN=queA PE=3 SV=1
MTKLTNEQQLNVNDFDFDLPEELIAQTPLLDRTSSRLLVMDKETGAVEHKHFRDILGHLHEGDTLVLNDTRVLPARLMGTKEETGANIEVLLLKQTEEDVWETLVKPAKKVKVGTVVSFGDGLLRAECTGVLDHGGRYFKFIYDGIFYEILDQLGEMPLPPYIREKLEDQDRYQTVFAKERGSAAAPTAGLHFTDELLEEIRKKGVNIAFITLHVGLGTFRPVSVESIEDHEMHAEFYRITKETADLINETKQQGGRVISVGTTSTRTLESVAKKFGGQLQEDNGWTDIFIYPGYEFEAVDGLITNFHLPKSTLVMLVSAMSNRDAILNAYHEAVEERYRFFSFGDAMFIEPQKKETES

SEQ ID NO: 70402 - protein, 359 aa, Planococcus maritimus
  REGION 1..359: note = tr|A0A150W553|A0A150W553_PLAMR S-adenosylmethionine:tRNA ribosyltransferase-isomerase; OS = Planococcus maritimus OX=192421 GN=queA PE=3 SV=1
MTKLTNEQQLNVNDFDFELPEELIAQTPLLDRTSSRLLVMGKETGAVEHKHFRDILDHLHEGDTLVLNDTRVLPARLMGTKEETGANIEVLLLKQTEEDVWETLVKPAKKVKIGTVVSFGDGLLRAECTGVLDHGGRYFKFIYDGIFYEILDQLGEMPLPPYIREKLEDQDRYQTVFAKERGSAAAPTAGLHFTDELLSDIRNKGVNIAFITLHVGLGTFRPVSVESIEDHEMHAEFYRITQQTADLINATKQRGGRVISVGTTSTRTLESVAKKFGGTLQEDNGWTDIFIYPGYRFEAVDGLITNFHLPKSTLVMLVSAMSNRDAILNAYNEAVKERYRFFSFGDAMFIEPQKKETES

SEQ ID NO: 70403 - protein, 359 aa, Planococcus maritimus
  REGION 1..359: note = tr|A0A1C7DZJ5|A0A1C7DZJ5_PLAMR S-adenosylmethionine:tRNA ribosyltransferase-isomerase; OS = Planococcus maritimus OX=192421 GN=queA PE=3 SV=1
MTKLTNEQQLNVNDFDFELPEELIAQTPLLDRTSSRLLVMGKETGAVEHKHFRDILDHLHEGDTLVLNDTRVLPARLMGTKEETGANIEVLLLKQTEEDVWETLVKPAKKVKIGTVVSFGDGLLRAECTGILDHGGRYFKFIYDGIFYEILDQLGEMPLPPYIREKLEDQDRYQTVFAKERGSAAAPTAGLHFTDELLNDIRNKGVNIAFITLHVGLGTFRPVSVESIEDHEMHAEFYRITQQTAELINETKQRGGRVISVGTTSTRTLESVAKKFGGTLQEDNGWTDIFIYPGYRFEAVDGLITNFHLPKSTLVMLVSAMSNRDAILNAYNEAVKERYRFFSFGDAMFIEPQKKETES

SEQ ID NO: 70404 - protein, 350 aa, unidentified
  source 1..350: note = Planococcus massiliensis
  REGION 1..350: note = tr|A0A098EMM0|A0A098EMM0_9BACL S-adenosylmethionine:tRNA ribosyltransferase-isomerase; OS = Planococcus massiliensis OX=1499687 GN=queA PE=3 SV=1
MNVNDFDFHLPEELIAQTPLLDRTSSRLLVMDKETGAITHRHFRDITEHLEAGDTLVLNDTRVLPARLMGVKEETGAHIELLLLKQIEDNVWETLVKPAKKVKIGTVISFGDGLLKAECTGILDHGGRHFKMIYDGIFYEILEQLGEMPLPPYIREKLEDQERYQTVFAKERGSAAAPTAGLHFTDELLDEIRAKGVNIAFITLHVGLGTFRPVSVDSIKDHTMHAEFYRINQETADLINDTKKRGNRVISVGTTSTRTLETVASKFGGELKEDSGWTDIFIFPGFEFKAIDGLITNFHLPKSTLVMLVSALSNRDNILNAYNEAVNERYRFFSFGDAMFIEPQKKETHQ

SEQ ID NO: 70405 - protein, 350 aa, Planococcus plakortidis
  REGION 1..350: note = tr|A0A1C7ECA9|A0A1C7ECA9_9BACL S-adenosylmethionine:tRNA ribosyltransferase-isomerase; OS = Planococcus plakortidis OX=1038856 GN=queA PE=3 SV=1
MNVNDFDFELPEELIAQTPLLDRTSSRLLVMGKETGAVEHKHFRDILGHLHAGDTLVLNDTRVLPARLMGTKEETGANIEVLLLKQAEEDVWETLVKPAKKVKVGTVVSFGDGLLRAECTGVLDHGGRYFKFIYDGIFYEILDQLGEMPLPPYIREKLEDQDRYQTVFAKERGSAAAPTAGLHFTDELLQEIRNKGVNIAFITLHVGLGTFRPVSVESIEDHEMHAEFYRITKETAELINETKQRGGRVISVGTTSTRTLESVAKKFGGKLQEDNGWTDIFIYPGYQFEAVDGLITNFHLPKSTLVMLVSAMSNRDAILNAYNEAVKERYRFFSFGDAMFIEPQKKETES

SEQ ID NO: 70406 - protein, 350 aa, Planococcus rifietoensis
  REGION 1..350: note = tr|A0A0U2XL59|A0A0U2XL59_9BACL S-adenosylmethionine:tRNA ribosyltransferase-isomerase; OS = Planococcus rifietoensis OX=200991 GN=queA PE=3 SV=1
MNVNDFDFELPEELIAQTPLLDRTSSRLLVMDKETGAVEHKHFRDILGHLHTGDTLVLNDTRVLPARLMGTKEETGANIEVLLLKQTEEDVWETLVKPAKKVKIGTVVSFGDGLLRAECTGVLDHGGRHFKFIYDGIFYEILDQLGEMPLPPYIREKLEDQDRYQTVFAKERGSAAAPTAGLHFTDELLEEIRNKGVNIAFITLHVGLGTFRPVSVESIEDHEMHAEFYRITQETADMINETKQQGGRVISVGTTSTRTLESVAKKFGGNLQEDNGWTDIFIYPGYEFEAVDGLITNFHLPKSTLVMLVSAMSNRDAILNAYNEAVKERYRFFSFGDAMFIEPQKKETES

SEQ ID NO: 70407 - protein, 350 aa, unidentified
  source 1..350: note = Planococcus salinus
  REGION 1..350: note = tr|A0A3M8PC41|A0A3M8PC41_9BACL S-adenosylmethionine:tRNA ribosyltransferase-isomerase; OS = Planococcus salinus OX=1848460 GN=queA PE=3 SV=1
MNVTDFDFELPEELIAQTPLLDRTASRLLVLDKETGAVEHRHFRDIIDHLHKGDTLVLNDTRVLPARLMGTKEDTGANIEVLLLKQIEDDVWETLVKPAKKVKVGTVVSFGGGLLRAECTGILEHGGRHFKMIYDGIFYEILDALGEMPLPPYIREKLEDQDRYQTVFAKERGSAAAPTAGLHFTDELLDRIRAKGVEIAFITLHVGLGTFRPVSVDSIEDHEMHAEFYRISQQTADLINQTRQQGGRVISVGTTSTRTLESVARKFDGDLQEDSGWTDIFIYPGYRFQAIDGLITNFHLPKSTLVMLVSALSSRDHILNAYEEAVKERYRFFSFGDAMFIEPQKKETHE

SEQ ID NO: 70408 - protein, 360 aa, Planococcus sp.
  REGION 1..360: note = tr|A0A5C5T1Y7|A0A5C5T1Y7_9BACL S-adenosylmethionine:tRNA ribosyltransferase-isomerase; OS = Planococcus sp. CPCC 101016 OX=2599617 GN=queA PE=3 SV=1
MTKLTTPPTTLNVQDFDFELPEELIAQTPLLDRTSSRLLVMNKSTGDTEHRHFRDITDHLHKGDTLVLNDTRVLPARLMGVKEDTGANIEVLLLKQIEDDVWETLVKPAKKVKVGTIVSFGEGLLRAECTGILDHGGRHFKMIYDGIFYEILDQLGEMPLPPYIREKLEDQDRYQTVFAKERGSAAAPTAGLHFTDELLEEIRAKGVNIAFITLHVGLGTFRPVSVDSIEDHEMHAEFYRITQETADLINQTKEQGGRIISVGTTSTRTLESVAQKFDGQLQEDSGWTDIFIFPGYEFKAIDGLITNFHLPKSTLVMLVSALSNRDHILNAYQQAVNERYRFFSFGDAMFIEPQKKETHQ

SEQ ID NO: 70409 - protein, 360 aa, Planococcus sp.
  REGION 1..360: note = tr|A0A5B0CTL5|A0A5B0CTL5_9BACL S-adenosylmethionine:tRNA ribosyltransferase-isomerase; OS = Planococcus sp. ANT_H30 OX=2597347 GN=queA PE=3 SV=1
MTKLITPNTTLNIQDYDFDLPEELIAQTPLLDRTSSRLLVMNKETGQTSHRHFRDIIDYLHKGDTLVLNDTRVLPARLMGVKEDTGANIELLLLKQVEDDVWETLTKPAKKVKVGTVVSFGDGLLRAECTGILDHGGRHFKMIYDGIFYEILDQLGEMPLPPYIREKLEDQDRYQTVFAKERGSAAAPTAGLHFTDELLEQIRDKGVNIAFITLHVGLGTFRPVSVDSIEDHEMHSEFYRIPKETADMINKTKQNGGRIVSVGTTSTRTLESVAQKFDGKLQEDSGWTDIFIFPGYEFKAVDGLITNFHLPKSTLVMLVSALSSRDYILNAYNQAVDERYRFFSFGDAMFIEPQKKETHP

SEQ ID NO: 70410 - protein, 360 aa, unidentified
  source 1..360: note = Planococcus versutus
  REGION 1..360: note = tr|A0A1B1RXG2|A0A1B1RXG2_9BACL S-adenosylmethionine:tRNA ribosyltransferase-isomerase; OS = Planococcus versutus OX=1302659 GN=queA PE=3 SV=1
MTKQTTPNTTLNIQDYDFDLPEELIAQTPLLDRTSSRLLVMNKETGETSHRHFRDIIDYLHKGDTLVLNDTRVLPARLMGVKEDTGANIELLLLKQVEDDVWETLAKPAKKVKVGTIVSFGDGLLRAECTGILDHGGRHFKMIYDGIFYELLDQLGEMPLPPYIRGKLEDQNRYQTVFAKERGSAAAPTAGLHFTDELLTQIRDKGVNIAFITLHVGLGTFRPVSVESIEDHDMHSEFYRITQETAELINGTKQNGGRIVSVGTTSTRTLESVAQKFNGKLQEDSGWTDIFIFPGYEFKAVDGLITNFHLPKSTLVMLVSALSSRERILNAYTQAVDEQYRFFSFGDAMFIEPQKKETHP

SEQ ID NO: 70411 - protein, 350 aa, Planomicrobium glaciei
  REGION 1..350: note = tr|A0A1G8IP92|A0A1G8IP92_9BACL S-adenosylmethionine:tRNA ribosyltransferase-isomerase; OS = Planomicrobium glaciei OX=459472 GN=queA PE=3 SV=1
MNVNDFDFHLPEELIAQTPLLDRTSSRLLVMNKETGDVDHRHFRDITDYLHEGDTLVLNDTRVLPARLMGVKEETGAHIELLLLKQVEDDVWETLVKPAKKVKVGTVISFGDGLLKAECTALLDHGGRHFKMIYDGIFYEILDQLGEMPLPPYIREKLEDQERYQTVFAKERGSAAAPTAGLHFTEELLDEIRAKGINIAFITLHVGLGTFRPVSVDSIDDHKMHAEFYRITQETADLINNTKKQGGRVISVGTTSTRTLESVAEKFGGELKEDSGWTDIFIFPGFEFQAIDGLITNFHLPKSTLVMLVSALSNRENILNAYNEAVNERYRFFSFGDAMFIEPQKKETHQ

SEQ ID NO: 70412 - protein, 356 aa, unidentified
  source 1..356: note = Planomicrobium soli
  REGION 1..356: note = tr|A0A2P8GMC6|A0A2P8GMC6_9BACL S-adenosylmethionine:tRNA ribosyltransferase-isomerase; OS = Planomicrobium soli OX=1176648 GN=queA PE=3 SV=1
MNVNDFDFDLPEELIAQTPLLDRTSSRLLVMDKETGRVEHRYFRDIIGHLHAGDVLVLNDTRVLPARLMGVKEDTGANIELLLLKQIEDDVWETLVKPAKKVKVGTVVSFGEGLLRAECTAILDHGGRHFKMIYDGIFYEILDQLGEMPLPPYIREKLDDQDRYQTVFAKERGSAAAPTAGLHFTEELLDEIRAKGVEIAFITLHVGLGTFRPVSVDSIEEHAMHAEFYRITQETADLINKTKERGGRIISVGTTSTRTLESVANKFGGQLQEDSGWTDIFIFPGYKFKAVDGLITNFHLPKSTLVMLVSALSDRDHILNAYNEAINEQYRFFSFGDAMFIEPEKKETTHDTSSNV

SEQ ID NO: 70413 - protein, 356 aa, Planomicrobium sp.
  REGION 1..356: note = tr|A0A5C5UJI3|A0A5C5UJI3_9BACL S-adenosylmethionine:tRNA ribosyltransferase-isomerase; OS = Planomicrobium sp. CPCC 101110 OX=2599619 GN=queA PE=3; SV = 1
MNVNDFDFDLPEELIAQTPLLDRTSSRLLVMDKETGAVAHRYFRDILGHLHAGDVLVLNDTRVLPARLMGVKEDTGANIELLLLKQIEDDVWETLVKPAKKVKVGTVVSFGEGLLRAECTAILDHGGRHFRMIYDGIFYEILDALGEMPLPPYIREKLDDQDRYQTVFAKERGSAAAPTAGLHFTEELLAEIRAKGVQIAFITLHVGLGTFRPVSVDSIEDHAMHAEFYRITQETADVINAAKRRGGRIISVGTTSTRTLESVANKFGGKLKEDSGWTDIFIFPGYEFKAVDGLITNFHLPKSTLVMLVSALSNRDNILNAYNEAISEQYRFFSFGDAMFIEPQKKETSHDTSSNV

SEQ ID NO: 70414 - protein, 361 aa, Planomicrobium sp.
  REGION 1..361: note = tr|A0A3L7JMG2|A0A3L7JMG2_9BACL S-adenosylmethionine:tRNA ribosyltransferase-isomerase; OS = Planomicrobium sp. Y74 OX=2478977 GN=queA PE=3 SV=1
MTKTTQQPNTLNVNDFDFELPEELIAQTPLLDRTSSRLLVMNKETGKTEHKHFRDIIDYLHEGDTLVLNDTRVLPARLMGVKEDTGANIELLLLKQIEDDIWETLVKPAKKVKVGTVVSFGEGLLRAECTGILDHGGRHFKMIYDGIFYEILDQLGEMPLPPYIREKLEDQDRYQTVFAKERGSAAAPTAGLHFTDELLKKIEEKGVNIAFITLHVGLGTFRPVSVESIEDHEMHAEFYRINKETAELINNTKAQGGRVISVGTTSTRTLESVASKFGGELKEDSGWTDIFIFPGYGFKAIDGLITNFHLPKSTLVMLVSALSNRDNILNAYNEAVNERYRFFSFGDAMFIEPQKKETHHD

SEQ ID NO: 70415 - protein, 345 aa, Plasticicumulans acidivorans
  REGION 1..345: note = tr|A0A317N130|A0A317N130_9GAMM S-adenosylmethionine:tRNA ribosyltransferase-isomerase; OS = Plasticicumulans acidivorans OX=886464 GN=queA PE=3 SV=1
MLRSDFHFDLPEELIAQQPPAQRGDSRLLVLDGASGALSDQRFTELPDWLRPGDLMVFNDTRVIPARLHGVKEGSGGKVEVLVERVLDSRRVLAHVRASKAPKPGTRLWLEQAVHARMLGRHEDLFELAFEDERGAFEVLERHGHIPLPPYIERADAAEDAERYQTVYARSPGAVAAPTAGLHFTPALLEQLAAGGIETAFVTLHVGAGTFLPVRSERIEDHRMHSEWLQVGEEVVAAVARTRARGGRVIAVGTTAVRSLESAAADGELRPFTGETAIFITPGYRFRVVDALVTNFHLPESTLLMLVSALAGHAEIMAAYRHAVAQRYRFFSYGDAMFITGKNTR

SEQ ID NO: 70416 - protein, 345 aa, unidentified
  source 1..345: note = Plasticicumulans lactativorans
  REGION 1..345: note = tr|A0A4R2LNS5|A0A4R2LNS5_9GAMM S-adenosylmethionine:tRNA ribosyltransferase-isomerase; OS = Plasticicumulans lactativorans OX=1133106 GN=queA PE=3; SV = 1
MPMLRADFHFDLPPELIAQHPPAQRGASRLLVLDGPSGALADAAFADLPRWLRAGDLLVFNDTRVIPARLFGAKDSGGRVEALVERLLDAHRVLAHVRASKAPRPGSGIVFAGGLRASVRQRHEDLFELAFEDPRPVLELLDAYGHVPLPPYIDRPDAAGDADRYQTVYARAPGAVAAPTAGLHFTEALLEQLAAAGVERTFVTLHVGAGTFQPVRAERIADHHMHAEQVEVGPEVVAAVAATRARGGRVVAVGTTAVRSLEAAAAAGALAPFSGDTRIFITPGYRFRVVDALVTNFHLPESTLLMLVSAFAGHASVLAAYRHAVAARYRFFSYGDAMFLTRAPV

SEQ ID NO: 70417 - protein, 356 aa, Plautia stali
  REGION 1..356: note = tr|U3U5K4|U3U5K4_9ENTR S-adenosylmethionine:tRNA ribosyltransferase-isomerase OS=Plautia stali symbiont; OX = 891974 GN=queA PE=3 SV=1
MRVADFAFELPESLIAHYPQAQRSGCRLLSLDGPSGALNHGVFTDVLDKLNPGDLLVFNNTRVIPARVYGRKASGGKIEMLVERMLDDKRVLAHVRASKAPKPGAELLLGDDESVKATMVARHDALFEIEFADDRAVLDILNSVGHMPLPPYIDRPDEEADRELYQTVYSARPGAVAAPTAGLHFDEPLLAALKAKGVEMAFVTLHVGASTFQPVRVENINDHIMHSEYAEVPQDVVDAVQACKARGNKVVAVGTTSVRSLESAAQACQDGLIAPFFDDTQIFIYPGYHYQVIDALITNFHLPESTLIMLVSAFAGYQHTMAAYQSAVAEQYRFFSYGDAMYITRNPQAPDEIVGG

SEQ ID NO: 70418 - protein, 354 aa, unidentified
  source 1..354: note = Pleionea mediterranea
  REGION 1..354: note = tr|A0A316FTK0|A0A316FTK0_9GAMM S-adenosylmethionine:tRNA ribosyltransferase-isomerase; OS = Pleionea mediterranea OX=523701 GN=queA PE=3 SV=1
MRLSDFKFELPDELIARYPAEQRDASRLLHLNAAAEICDRQFSDIVDLVGSDDCLIFNNTKVIPARLLGSRESGGKVEILIERVLDECEFIAMVKASNSPKPGSLINVADYQFEVTGREGQFFKLSTLDRSVPVMTVLEQHGHMPLPPYIDRGDTAFDAERYQTVYAKESGAVAAPTAGLHFTGQVFEQLKRKGVAWDFVTLHVGSGTFAPVRVDKIDEHQMHSERFSVPESVVELVKATRQRGGRVIAVGTTSVRCLESASLNGELQATSGDTDIFIYPGYRFKTIDALITNFHLPESTLIMLVSALCGKDNILKAYQHAVDNRYRFFSYGDAMFLEPQFLDSQPESTADDSL

SEQ ID NO: 70419 - protein, 364 aa, unidentified
  source 1..364: note = Pleomorphomonas carboxyditropha
  REGION 1..364: note = tr|A0A2G9WV52|A0A2G9WV52_9RHIZ S-adenosylmethionine:tRNA ribosyltransferase-isomerase; OS = Pleomorphomonas carboxyditropha OX=2023338 GN=queA PE=3; SV = 1
MQVSAFDFDLPPERIALRPAVPRDASRLLVVKPGQPFEDRQALDLADLLSPGDALVFNDTKVIPAQLEGRRDRYGAEPVRFSATLHMREAPDRWRAFVKGARKLRAGDRVRFSGADPAAAALGAVVAEKGEDGEIVLAFDRAGPDLDVALMTVGHIPLPPYIAARRAEDEHDRADYQTVYARESGAVAAPTAGLHFTPELFERLDARGIGRHFVTLHVGAGTFLPMKVDDTEAHKMHAEIGHVSPETAEALNAVRARGGRVVAVGTTSLRLLESAAGEDGLVRPFAGATDIFITPGYRFRAVDLLMTNFHLPKSTLFMLVSAFSGLDTMRAAYAHAIAGGYRFYSYGDTSLLHPSEESRLTKNS

SEQ ID NO: 70420 - protein, 365 aa, unidentified
  source 1..365: note = Pleomorphomonas diazotrophica
  REGION 1..365: note = tr|A0A1I4QQ98|A0A1I4QQ98_9RHIZ S-adenosylmethionine:tRNA ribosyltransferase-isomerase; OS = Pleomorphomonas diazotrophica OX=1166257 GN=queA PE=3; SV = 1
MQVSAFDFDLPSDRIALRPAVPRDASRLLVVRPGEPLEDRHARDLADLLRPGDALVFNDTKVIPAHLEGRRDREGAEPARFSATLHMREAPDRWRAFVKGARKLRAGDRVAFAGADPSVAPLGAVVTEKGEDGEITLAFDRAGPDLDLALMAVGHIPLPPYIAARRPEDEHDRADYQTVYARESGAVAAPTAGLHFTPELFGRLEARGIDRHFVTLHVGAGTFLPMKVDDTEDHKMHSEIGSVSSETAEALNTVRARGGRVVAVGTTSLRLLESAAGEDGLVRPFAGPTDIFITPGYRFRAVDLLMTNFHLPKSTLFMLVSAFSGLDTMRAAYAHAIASGYRFYSYGDTSLLHPSPESRLTAQAS

SEQ ID NO: 70421 - protein, 361 aa, Pleomorphomonas sp.
  REGION 1..361: note = tr|A0A4R8FID7|A0A4R8FID7_9RHIZ S-adenosylmethionine:tRNA ribosyltransferase-isomerase; OS = Pleomorphomonas sp. CF100 OX=2135722 GN=queA PE=3 SV=1
MLVSAFDFELPPERIALRPAVPRDASRLLVVRPGQPLEDRHARDLADLLSPGDALVFNDTKVIPAQLEGRRDREGAEPVRFSATLHMREAPDLWRAFVKGARKLRTGDRVLFAGVDPTATLSAVVAEKGEDGEITLVFDRAGPDLDVALMSVGHIPLPPYIAARRAEDEHDRADYQTVYARESGAVAAPTAGLHFTPELFDRLDARGIGRHFVTLHVGAGTFLPMKADDTEDHKMHSEVGHVASETADALNTVRARGGRVVAVGTTSLRLLESAAGEDGLIKSFAGATDIFITPGYRFRAVDLLMTNFHLPKSTLFMLVSAFSGLETMRAAYAHAIASDYRFYSYGDTSLLHPSEESRLAK

SEQ ID NO: 70422 - protein, 370 aa, Pleomorphomonas sp.; identical to SEQ ID NO: 69576
  REGION 1..370: note = tr|A0A2Z6HW59|A0A2Z6HW59_9RHIZ S-adenosylmethionine:tRNA ribosyltransferase-isomerase; OS = Pleomorphomonas sp. SM30 OX=1885025 GN=queA PE=3 SV=1

SEQ ID NO: 70423 - protein, 304 aa, Plesiocystis pacifica
  REGION 1..304: note = tr|A6G499|A6G499_9DELT S-adenosylmethionine:tRNA ribosyltransferase-isomerase OS=Plesiocystis pacifica SIR-1 OX=391625 GN=PPSIR1_03703 PE=3 SV=1
MVNDAATLPASLPGHAWIEGRAEAIELRLLGPVGVDEDRWRAVVFGGGDWREDTDERPAPPRLELGTNLVLAGGLGARVLERASASPRLIELAFDRAGASLYAALYSAGRPIQYSHLEQPEELWSFQTVFAGRPWAAEMPSAGRALSASLLGKLRAKGVLVERLTHAAGLSATGDPELDAQLPLPERYDIPARTVAAITAARARGARIIAVGTTVVRALEGAALEHGDGVLRPGPGETALVVTAATQLRVVDALLTGMHAPSESHYRLLRAFLPEALLERAWDAALGAGYRSHEFGDLALLVPG

SEQ ID NO: 70424 - protein, 365 aa, Plesiocystis pacifica
  REGION 1..365: note = tr|A6G9V5|A6G9V5_9DELT S-adenosylmethionine:tRNA ribosyltransferase-isomerase OS=Plesiocystis pacifica SIR-1 OX=391625 GN=queA PE=3 SV=1
MFSPDDYDFELPTEQIAQAPASERSAARMFVLAEAGAAVSTHSRVGALEAVLDGVAEARGQRPLIVVNDSRVVPARIHVFRATGGRVELLVVDPAALGPGARVRAWARGARRLREGEVLRLPGAHGETALLELRYLGAEGEGEAADSRARVFEIVRGQLLDALEAVGELPLPPYIARPEGPDAADRERYQTLYARHRGSVAAPTAGLHFDAAMLERLEVAPITLHVGPGTFLPMDTEDVRAHRVGSERYSISEASAARIEAARAEGRPILAVGTTATRTLESVALANGGAIVPGSGRTELVITPGYRFSVVDLLLTNFHLPRSSLLMLVCCLGGRERVLAAYAEAVAAGYRFYSYGDCMLVERSG

SEQ ID NO: 70425 - protein, 348 aa, Plesiomonas shigelloides
  REGION 1..348: note = tr|A0A379CKB1|A0A379CKB1_PLESH S-adenosylmethionine:tRNA ribosyltransferase-isomerase; OS = Plesiomonas shigelloides OX=703 GN=queA PE=3 SV=1
MRVADFSFSLPETLIARYPQPERTSSRLLSLDGNSGALTHGTFADVVDKIQPGDLVVFNNTRVIPARMFGRKVSGGKLEVLVERVLDDKRILAHVRASKAPKPGTELLLGEDESVRATMLARHDALFEIGFDDERNVFAILDAIGHMPLPPYIDRPDEDSDKERYQTVYNKKPGAVAAPTAGLHFDEPLLEKLRAKGVEFAFVTLHVGAGTFQPVRVDTIEEHHMHSEYAEVPQEVVDAVLACKARGNRVIAVGTTSVRSLESAARAAGESAIIAPFHRDTDIFIYPGYQFKVVDALITNFHLPESTLIMLVSAFAGYEHVMHAYQEAVANQYRFFSYGDAMFITRQA

SEQ ID NO: 70426 - protein, 348 aa, Plesiomonas shigelloides
  REGION 1..348: note = tr|R8ATQ7|R8ATQ7_PLESH S-adenosylmethionine:tRNA ribosyltransferase-isomerase OS=Plesiomonas shigelloides 302-73 OX=1315976 GN=queA PE=3 SV=1
MRVADFSFSLPETLIARYPQPERTSSRLLSLDGNSGVLTHGTFADVVDKIQPGDLVVFNNTRVIPARMFGRKVSGGKLEVLVERVLDDKRILAHVRASKAPKPGTELLLGEDESVRATMLARHDALFEIGFDDERNVFAILDAIGHMPLPPYIDRPDEDSDKERYQTVYNKKPGAVAAPTAGLHFDEPLLEKLRAKGVEFAFVTLHVGAGTFQPVRVDTIEEHHMHSEYAEVPQEVVDAVLACKARGNRVIAVGTTSVRSLESAARAAGESAIIAPFHRDTDIFIYPGYQFKVVDALITNFHLPESTLIMLVSAFAGYEHVMHAYQEAVANQYRFFSYGDAMFITRQA

SEQ ID NO: 70427 - protein, 336 aa, Pleurocapsa sp.
  REGION 1..336: note = tr|A0A2T1CBH7|A0A2T1CBH7_9CYAN S-adenosylmethionine:tRNA ribosyltransferase-isomerase (Fragment) OS=Pleurocapsa sp. CCALA 161 OX=2107688; GN = C7B62_24850 PE=3 SV=1
SPADPRDSSRLLIVDSRRESTHATFRDLPHWLKPGDLLVLNNTRVIPARLYGHKISGSKLEILLIEERSPNCWLALVKPGKRFTLGATINFDAIGNSDSSNHTLQATVIDKDQATGGRILRFELPTGQSLWERLDDYGQLPLPPYIVNSDAPDERYQTVYANQPGAIAAPTAGLHFTPELLAKLQRLGIEQTQITLHVGIGTFRPVETEEIKNHAMHQEWIEVSAETVSKIKQTKARGGRVIAVGTTATRALEGAAREAKSDFIDPFRGKTDLFIYPGYQWQVVDGLITNFHLPGSSLLMLVSAMIGREQLLSLYQQAIALEYRFYSFGDAMLILP

SEQ ID NO: 70428 - protein, 373 aa, Pleurocapsa sp.
  REGION 1..373: note = tr|K9T806|K9T806_9CYAN S-adenosylmethionine:tRNA ribosyltransferase-isomerase OS=Pleurocapsa sp. PCC 7327; OX = 118163 GN=queA PE=3 SV=1
MTDPTEQTANQLLSDYDYELPTELIAQNPVVPRDNSRLLVVNSPTTHVHSIFRDLPDWLQPRDLLVLNNTRVIPARLYGHKSTGSPVEILLLEETQKNCWLALVKPGKRFKIGTKILFHPASGELPEGVFLKAKVIARDEATSGRLLEFELPPGQSLWDLLDKFGQIPFPPYVTHSQALPDQYQTIYAQQAGSVAAPTAGLHFTEELFQRLEEKGIQKAYITLHVGVGTFRPIEVEDITQHVMHQEWLEVPEATVEKIKETKAKGGRIIAVGTTVARALEGAAQETEKAGGEFLRPFCGKTDLFIYPGYRWRIVEGMITNFHLPRSSLLILLSALIGRDRVLALYREAVQERYRFYSFGDAMLILPAATISNQ

SEQ ID NO: 70429 - protein, 363 aa, unidentified
  source 1..363: note = Pluralibacter gergoviae
  REGION 1..363: note = tr|A0A0J5LXI6|A0A0J5LXI6_PLUGE S-adenosylmethionine:tRNA ribosyltransferase-isomerase; OS = Pluralibacter gergoviae OX=61647 GN=queA PE=3 SV=1
MRVADFSFELPESLIAHYPQPERSSCRLLSLDGPTGALTHGTFTDLLDKLNPGDLLVFNNTRVIPARLFGRKASGGKIEVLVERMLDDKRILAHIRASKAPKPGAELLLGDDESINATMVARHDALFEVQFNDERSVLDILNAIGHMPLPPYIDRPDEDADRELYQTVYSEKPGAVAAPTAGLHFDDPLLARLREKGIEMAFVTLHVGAGTFQPVRVDSIEDHIMHSEYAEVPQEVVDAVLAAKARGNRVIAVGTTSVRSLESAAQAAKNALIAPFFGDTQIFIYPGYKYQVIDCLVTNFHLPESTLIMLVSAFAGYQHTMNAYKSAVEQKYRFFSYGDAMFITYNPAAICERVGELVRGAGF

SEQ ID NO: 70430 - protein, 356 aa, unidentified
  source 1..356: note = Pluralibacter gergoviae
  REGION 1..356: note = tr|A0A1S2BLG6|A0A1S2BLG6_PLUGE S-adenosylmethionine:tRNA ribosyltransferase-isomerase; OS = Pluralibacter gergoviae OX=61647 GN=queA PE=3 SV=1
MRVADFSFELPESLIAHYPQPERSSCRLLSLDGPTGALTHGTFTDLLDKLNPGDLLVFNNTRVIPARLFGRKASGGKIEVLVERMLDDKRILAHIRASKAPKPGAELLLGDDESINATMVARHDALFEVQFNDERSVLDILNAIGHMPLPPYIDRPDEDADRELYQTVYSEKPGAVAAPTAGLHFDDPLLARLREKGIEMAFVTLHVGAGTFQPVRVDSIEDHIMHSEYAEVPQEVVDAVLAAKARGNRVIAVGTTSVRSLESAAQAAKNALIAPFFGDTQIFIYPGYKYQVIDCLVTNFHLPESTLIMLVSAFAGYQHTMNAYKSAVEQKYRFFSYGDAMFITYNPAAICERVGE

SEQ ID NO: 70431 - protein, 348 aa, unidentified
  source 1..348: note = Pokkaliibacter plantistimulans
  REGION 1..348: note = tr|A0A318C0I7|A0A318C0I7_9GAMM S-adenosylmethionine:tRNA ribosyltransferase-isomerase; OS = Pokkaliibacter plantistimulans OX=1635171 GN=queA PE=3; SV = 1
MQVKDFHFELPDELIARYPMAERSASRLLCLDGQSGDINFKVFRDIAGMISDKDLLVFNNTRVIPARLFGQKDSGGKVEVLVERIVDDKRVLAHIRSSKSPKPGTRLLLEGQVEAEMLARHDALFELAFLGDESVLSVLERVGHMPLPPYISREDELEDRERYQTVYNEKPGAVAAPTAGLHFDEPLLKVLQDKGVEFAFVTLHVGAGTFQPVRVDRIEDHHMHSEYLEVSAEVCEAVRRTRARGGRVIAVGTTSVRSLESASRSGHIEPYVGETDIFIYPGYVFRSVDALITNFHLPESTLLMLVSALAGYEHIMSAYQRAIAERMRFFSYGDAMFISCPQSGAKGE

SEQ ID NO: 70432 - protein, 349 aa, unidentified
  source 1..349: note = Polaribacter atrinae
  REGION 1..349: note = tr|A0A176TD36|A0A176TD36_9FLAO S-adenosylmethionine:tRNA ribosyltransferase-isomerase; OS = Polaribacter atrinae OX=1333662 GN=queA PE=3 SV=1
MKLSHFEFDLPEELLATYPAEHRDESRLMVLNRKEQTIEHKVFKDVIDYFDEGDVMMLNNTKVFPARMYGNKEKTGARIEVFLLRELNSENRLWDVLVDPARKIRIGNKLFFGDDDSLVAEVIDNTTSRGRTLRFLFDGSYEEFRAKLLELGQTPLPKAIGRDVEPLDDERYQTIYAKHEGAVAAPTAGLHFSKHLMKRLEIKGIEFAETTLHVGLGTFSPVEVEDLSKHKMDSEQIDISDATAEKINKAKKEKRRVCAVGTTVMRAIESSVSSKGELNGYTGWTNKFIFPPHDFSIATAMITNFHTPKSTLLMQAAAFGGYDFVMEAYKEAIKEGYKFSTYGDAMLII

SEQ ID NO: 70433 - protein, 349 aa, Polaribacter butkevichii
  REGION 1..349: note = tr|A0A2P6CAE4|A0A2P6CAE4_9FLAO S-adenosylmethionine:tRNA ribosyltransferase-isomerase; OS = Polaribacter butkevichii OX=218490 GN=queA PE=3 SV=1
MKLSHFEFDLPDELLAQYPAEHRDESRLMVLNRKDGTIEHKVFKDVINYFEEGDVMMLNNTKVFPARMFGNKEKTGARIEVFLLRELNAENRLWDVLVDPARKIRIGNKLFFGDDDSLVAEVIDNTTSRGRTLRFLFDGSYEEFRAKLLELGQTPLPKAIGRDVEPIDDERYQTIYAKHEGAVAVPTAGLHFSKHLMKRLEIKGVEFAETTLHVGLGTFSPVEVEDLSKHKMDSEQIDISEATAEKINKAKKEKRRVCAVGTTVMRTIESSVSSKGELNGFTGWTNKFIFPPHDFSIATAMITNFHTPKSTLLMQAAAFGGYDFVMEAYKEAIKEKYRFSTYGDAMLII

SEQ ID NO: 70434 - protein, 349 aa, Polaribacter dokdonensis
  REGION 1..349: note = tr|A0A0N0CFK6|A0A0N0CFK6_9FLAO S-adenosylmethionine:tRNA ribosyltransferase-isomerase; OS = Polaribacter dokdonensis DSW-5 OX=1300348 GN=queA PE=3; SV = 1
MKLSNFDFELPEELLAKYPAEHRDESRLMVLNRADQTIEHKTFKDVINYFDEGDVLMLNNTKVFPARMFGNKEKTGARIEVFLLRELNAENRLWDVLVDPARKIRIGNKLFFGEDDSLVAEVIDNTTSRGRTLRFLFDGSYEAFREKLLELGETPLPRSVNRDVEELDEERYQTIFAKNEGAVAAPTAGLHFSKHLLKRLEIKGVDFAEMTLHVGLGTFSPVEVEDLSKHKMDSEQIVIPANAADKINNAKAEKRRVCAVGTTVMRTVESSVSSNAQLNPFEGWTNKFIFPPYDFSIANTMITNFHPPKSTLMMQAAAFAGYDFLMEAYKTAVKEGYKFSTYGDAMLII

SEQ ID NO: 70435 - protein, 349 aa, Polaribacter filamentus
  REGION 1..349: note = tr|A0A2S7KZV3|A0A2S7KZV3_9FLAO S-adenosylmethionine:tRNA ribosyltransferase-isomerase; OS = Polaribacter filamentus OX=53483 GN=queA PE=3 SV=1
MKLSQFDFELPEESYAVYPAEHRDESRLMVLNRKDQTIEHKMFKDIIDYFEEGDVMMLNNTKVFPARMFGNKEKTGARIEVFLLRELNAENRLWDVLVDPARKIRIGNKLFFGDDESLVAEVIDNTTSRGRTLRFLYDGSYEAFREKLLELGQTPLPKSINREVEAIDDERYQTIYAKHEGAVAAPTAGLHFSKHLLKRLEIKGIDFAEMTLHVGLGTFSAVEVEDLSKHKVDSEQIVIPAAAVAKINQAKIDKRRICAVGTTVMRTVESSVSSKQELNAFEGWTNKFVFPPHDFSIANSMITNFHPPKSTLMMMAAAFAGYDFLMDAYKVAIKEGYKFSTYGDAMLII

SEQ ID NO: 70436 - protein, 349 aa, Polaribacter gangjinensis
  REGION 1..349: note = tr|A0A2S7WEH4|A0A2S7WEH4_9FLAO S-adenosylmethionine:tRNA ribosyltransferase-isomerase; OS = Polaribacter gangjinensis OX=574710 GN=queA PE=3 SV=1
MKLSHFEFTLPDELLAEYPSEHRDESRLMVLNRKTQTIEHKLFKDIIDYFDEGDVLMLNNTKVFPARMYGNKEKTGAKIEVFLLRELNAENRLWDVLVDPARKIRIGNKLFFGDDDSLVAEVIDNTTSRGRTLRFLFDGSYEAFREKLIELGETPLPKYINRELRPEDEERYQTIYAKHEGAVAAPTAGLHFSKHLMKRLEIKGIEFAEMTLHVGLGTFSPVEVEDLSKHKMDSEQIIIPASTAQKINQAKKEKRRICAVGTTVMRTVESSVSANQLLNPYEGWTNKFIFPPYDFSIANAMVTNFHTPKSTLMMMTAAFAGYDFLMKAYKEAVKEKYRFYSYGDAMLII

SEQ ID NO: 70437 - protein, 349 aa, Polaribacter glomeratus
  REGION 1..349: note = tr|A0A2S7WI41|A0A2S7WI41_9FLAO S-adenosylmethionine:tRNA ribosyltransferase-isomerase; OS = Polaribacter glomeratus OX=102 GN=queA PE=3 SV=1
MKLSQFDFELPEELYAVYPAEHRDESRLMVLNRKDQTIEHKMFKDVIDYFEEGDVMMLNNTKVFPARMFGNKEKTGARIEVFLLRELNAENRLWDVLVDPARKIRIGNKLFFGDDDSLVAEVIDNTTSRGRTLRFLYDGSYEAFREKLLELGQTPLPKTLNREVEPIDDERYQTIYAKHEGAVAAPTAGLHFSKHLLKRLEIKGIDFAEMTLHVGLGTFSAVEVEDLSKHKVDSEQIVIPAAAVTKINQAKIDKRRICAVGTTVMRTVESSVSSKQELNAYEGWTNKFVFPPYDFSIANSMITNFHPPKSTLMMMSAAFAGYDFLMDAYKVAIKEGYKFSTYGDAMLII

SEQ ID NO: 70438 - protein, 349 aa, Polaribacter irgensii
  REGION 1..349: note = tr|A4C2J9|A4C2J9_9FLAO S-adenosylmethionine:tRNA ribosyltransferase-isomerase OS=Polaribacter irgensii 23-P; OX = 313594 GN=queA PE=3 SV=1
MKLSHFEFELPEELLAIYPAEHRDESRLMVLNKAAGTIEHKQFKDVINYFDEGDVLMLNDTKVFPARMFGNKEKTGARIEVFLLRELNAENRLWDVLVDPARKIRIGNKLFFGEDDSLVAEVIDNTTSRGRTLRFLFDGSYEAFRAKLLELGQTPLPKAIAREVEPSDTERYQTIYAKNEGAVAAPSAGLHFSKHLLKRLEIKGVDFAKMTLHVGLGTFSAVEVEDLSKHKMDSEQIVIPEKTAVMINKAKKEKRRICAVGTTVMRTVESSVSSKQELNAFEGWTNKFLFPPHEFSIANAMITNFHLPKSTLLMQAAAFGGYDFIMEAYKVAIKEGYKFSTYGDAMLII

SEQ ID NO: 70439 - protein, 349 aa, unidentified
  source 1..349: note = Polaribacter porphyrae
  REGION 1..349: note = tr|A0A2S7WPK0|A0A2S7WPK0_9FLAO S-adenosylmethionine:tRNA ribosyltransferase-isomerase; OS = Polaribacter porphyrae OX=1137780 GN=queA PE=3 SV=1
MKLSNFDFELPEELLAEYPAEHRDESRLMVLNREKQTIEHKLFKDVIDYFEEGDVMMLNNTKVFPARMFGNKEKTGARIEVFLLRELNAENRLWDVLVDPARKIRIGNKLFFGEDDSLVAEVIDNTTSRGRTLRFLYDGSYEAFREKLLELGQTPLPKYINREVEASDEERYQTIYAKHEGAVAAPTAGLHFSKHLLKRLEIKGVDFAEMTLHVGLGTFSAVEVEDLSKHKMDSEQIIIPANAADKINQAKKEKRRVCAVGTTVMRTVESSVSSNAELNPFEGWTNKFIFPPFDFSIANAMITNFHTPKSTLMMMTAAFAGYDFLMEAYKEAVKEKYRFYSYGDAMLII

SEQ ID NO: 70440 - protein, 349 aa, unidentified
  source 1..349: note = Polaribacter reichenbachii
  REGION 1..349: note = tr|A0A1B8TW13|A0A1B8TW13_9FLAO S-adenosylmethionine:tRNA ribosyltransferase-isomerase; OS = Polaribacter reichenbachii OX=996801 GN=queA PE=3 SV=1
MKLSNFDFELPEELLAIYPAEHRDESRLMVLNRKDQTIEHKTFKDVINYFDEGDILMLNNTKVFPARMFGNKEKTGARIEVFLLRELNAENRLWDVLVDPARKIRIGNKLFFGEDDSLVAEVIDNTTSRGRTLRFLFDGSYEAFREKLLELGETPLPRTIKREVEASDEERYQTIYAKHEGAVAAPTAGLHFSKHLLKRLEIKGVDFAEMTLHVGLGTFSPVEVEDLSKHKMDSEQIVIPAASADKINKAKIEKRRICAVGTTVMRTVESSVSSNAELNAYEGWTNKFIFPPYDFSIANTMITNFHTPKSTLMMQAAAFAGYDFLMEAYKEAIKEGYKFSTYGDAMLII

SEQ ID NO: 70441 - protein, 349 aa, unidentified
  source 1..349: note = Polaribacter sejongensis
  REGION 1..349: note = tr|A0A2K8VIL4|A0A2K8VIL4_9FLAO S-adenosylmethionine:tRNA ribosyltransferase-isomerase; OS = Polaribacter sejongensis OX=985043 GN=queA PE=3 SV=1
MKLSHFEFDLPEELLATYPAEHRDESRLMVLNRKEQTIEHKVFKDVIDYFDEGDVMMLNNTKVFPARMYGNKEKTGARIEVFLLRELNSENRLWDVLVDPARKIRIGNKLFFGDDDSLVAEVIDNTTSRGRTLRFLFDGSYEEFRAKLLELGQTPLPKAIGRDVEPLDDERYQTIYAKHEGAVAAPTAGLHFSKHLMKRLEIKGVEFAETTLHVGLGTFSPVEVEDLSKHKMDSEQIDISDATADKINKAKKEKRRVCAVGTTVMRAIESSVSSKGELNGYTGWTNKFIFPPHDFSIATAMITNFHTPKSTLLMQAAAFGGYDFVMDAYKEAIKEGYKFSTYGDAMLII

SEQ ID NO: 70442 - protein, 349 aa, Polaribacter sp.
  REGION 1..349: note = tr|A0A1Y0M950|A0A1Y0M950_9FLAO S-adenosylmethionine:tRNA ribosyltransferase-isomerase; OS = Polaribacter sp. SA4-10 OX=754397 GN=queA PE=3 SV=1
MKLSHFEYELPEELLAKYPAEHRDESRLMVLNRKEGTIEHKLFKDVIDYFEEGDVMMLNNTKVFPARMYGNKEKTGARIEVFLLRELNAENRLWDVLVDPARKIRIGNKLFFGEDDSLVAEVIDNTTSRGRTLRFLYDGSYEEFRAKLLELGQTPLPKKIGRDVEAIDDERYQTIFAKNEGAVAAPTAGLHFSKHLIKRLEIKGIDFAEMTLHVGLGTFSPVEVEDLSKHKMDSEQIVISEETAAKINKAKIEKRRICAVGTTVMRTIESSVSSKQELNQFTGWTNKFIFPPFEFSIANSMITNLHEPKSTLMMQAAAFAGYDFLMEAYKVAIKEGYRFSTYGDAMLII

SEQ ID NO: 70443 - protein, 349 aa, Polaribacter sp.
  REGION 1..349: note = tr|A0A2U2JEY9|A0A2U2JEY9_9FLAO S-adenosylmethionine:tRNA ribosyltransferase-isomerase; OS = Polaribacter sp. ZY113 OX=2100726 GN=queA PE=3 SV=1
MKLSNFEFDLPEELLAQYPVEHRDESRLMVLNRKEGTIEHKLFKDVINYFDEGDIMMLNNTKVFPARMYGNKEKTGARIEVFLLRELNAENRLWDVLVDPARKIRIGNKLFFGEDDSLVAEVIDNTTSRGRTLRFLFDGSYEEFRTKLVELGETPLPKAINRAVEPEDEERYQTIYAKHEGAVAAPTAGLHFSKHLLKRLEIKGVDFAETTLHVGLGTFSPVEVEDLSKHKMDSEQIIIPAASAEKINKAKAEKRKVCAVGTTVMRTIESSVSSNQQLNAYEGWTNKFIFPPYDFSIANAMITNFHLPKSTLMMQAAAFAGYDFLMEAYKVAVKEKYRFSSYGDAMLII

SEQ ID NO: 70444 - protein, 349 aa, unidentified
  source 1..349: note = Polaribacter vadi
  REGION 1..349: note = tr|A0A1B8TU64|A0A1B8TU64_9FLAO S-adenosylmethionine:tRNA ribosyltransferase-isomerase; OS = Polaribacter vadi OX=1774273 GN=queA PE=3 SV=1
MKLSQFDFELPEELLAVYPPEHRDESRLMVLNRKEQTIEHKKFKDLIDYFDEGDVMMLNNTKVFPARMYGNKEKTGARIEVFLLRELNSENRLWDVLVDPARKIRIGNKLFFGDDDSLVAEVIDNTTSRGRTLRFLFDGSYEAFREKLLELGETPLPRSINREVEASDEERYQTIYAKNEGAVAAPAAGLHFSKHLLKRLEIKGVDFAEMTLHIGLGTFSSVEVEDLSKHKMDSEQVIISAATADKINKAKKEKRRICAVGTTVMRTVESSVSSKQELNAYEGWTNKFIFPPYDFSIANAMITNFHPPKSTLMMQGAAFAGYDFLMEAYKLAIKEGYKFSTYGDALLII

SEQ ID NO: 70445 - protein, 352 aa, Polaromonas naphthalenivorans
  REGION 1..352: note = tr|A1VJ16|A1VJ16_POLNA S-adenosylmethionine:tRNA ribosyltransferase-isomerase OS=Polaromonas naphthalenivorans (strain CJ2) OX=365044 GN=queA PE=3 SV=1
MKTTFSLSDFDFTLPDELIAQHPAAERSASRLLDGRGDAIADRRFADLPDLLLPGDLLVFNDTKVVKARLFGQKLSGGRLELLIERVLSPHLDAGHEVAAHMKVSKKPLPGAMLQMDGGFTATLLGRWPEAHGPLYRFRLSSDPYALMAQHGHVPLPPYITHTDSADDEQRYQTVFAKNPGAVAAPTAALHFDEAMLEKLQARGIARASVTLHVGAGTFQPVKTETIAEHHMHFERFDVPQATHEAIAACKARGGRVVAVGTTTVRALESAAKFGPDCCDTNIFITPGFDFKVVDVLLTNFHLPKSTLMMLVSAFSGHGHIMALYRHAIEARYRFFSYGDAMLLARQAPPAL

SEQ ID NO: 70446 - protein, 349 aa, Polaromonas sp.
  REGION 1..349: note = tr|A0A1S8FKJ5|A0A1S8FKJ5_9BURK S-adenosylmethionine:tRNA ribosyltransferase-isomerase; OS = Polaromonas sp. A23 OX=1944133 GN=queA PE=3 SV=1
MKTHFSLSDFDFTLPDELIAQHPTAERSASRLLDGRGAAPVDRRFTELPDLLQPGDLLVLNDTKVVKARLFGQKSSGGRLELLIERVLSLSPDAGHEVAAHMKVSKKPLPGAVMQMDGGFTATLLGRWPNEDGPLYRFALSSDPYTLMESHGHVPLPPYITHSDSADDERRYQTVFAKNPGAVAAPTAALHFDNAVLAQLEARGIRRASVTLHVGAGTFQPVKAENIADHVMHFERFEVPETTLQAIRDCKARGGRVVAVGTTSVRALESAAKFGPACRDTNIFITPGFEFQVVDLLLTNFHLPKSTLMMLVSAFAGYEHIMALYRHAITQRYRFFSYGDAMLLQRTTP

SEQ ID NO: 70447 - protein, 370 aa, Polaromonas sp.
  REGION 1..370: note = tr|A0A1S8FPZ0|A0A1S8FPZ0_9BURK S-adenosylmethionine:tRNA ribosyltransferase-isomerase; OS = Polaromonas sp. C04 OX=1945857 GN=queA PE=3 SV=1
MHHSLPGAPRTFLLGDFDFALPPELIAQHPAPERSASRLLDGRGAAPVDRIFHDLPALLNPGDLMVFNDTQVIKARLFGEKPTGGKVELLVERVLSGNQVAAHMRVSKKPEPGTTLVLAGGGGFRATLLGRWPDEQGAMFRFVLSNDAGDDPYALMERHGHVPLPPYIKRHQGAAITHTDSEEDERRYQTVFAKNPGAVAAPTAALHFDEALLAALDARGVQRASVTLHVGAGTFQPVKTEDLAEHQMHSEWYDVPEATQRAIEQCRARGGRLIAVGTTTVRTLESMAASGQARGDTRIFITPGFDFKLVDSLITNFHLPKSTLMMLVSAFAGYEHIMALYRHAIESRYRFFSYGDAMLLTRQAPDHAAI

SEQ ID NO: 70448 - protein, 380 aa, Polyangium fumosum
  REGION 1..380: note = tr|A0A4U1JI75|A0A4U1JI75_9DELT S-adenosylmethionine:tRNA ribosyltransferase-isomerase; OS = Polyangium fumosum OX=889272 GN=queA PE=3 SV=1
MRRDLLAYDLPPELIAAHPSPDRESARLLVVDDAPGRLEHAFIRDLADRLPEGALVVVNDTRVLPARLLGRKASSGGKVEIFLVRKVADAYVDRSGERLPAERWRALGRSSKPLREGAEITIDGPASLVARIEGRDGGFGGAAPLAGAKPPSGERGLFDVVLFSPEGRSVPDAVEAAGHIPLPPYIRRDDDATDRARYQTVYAREPGAVAAPTAGLHLTEPLIERFSARGMELARVTLHVGLGTFQPVTVSDLDDHPMHAEAYRVPPETADAVARARQKGREIVAIGTTSVRALESAADPTREGHVVAREGETRLLIQPGYRFRVVDRLLTNFHLPESTLLALVGAFAGLPRVLESYRVAIEERYRFYSYGDAMLLRRQR

SEQ ID NO: 70449 - protein, 342 aa, Polyangium sp.
  REGION 1..342: note = tr|A0A4U1HSJ4|A0A4U1HSJ4_9DELT S-adenosylmethionine:tRNA ribosyltransferase-isomerase; OS = Polyangium sp. SDU3-1 OX=2567896 GN=E8A73_02285 PE=3; SV = 1
MKAAVGPRADPLAERLLGVDPRTGEMRDARVGDLGRFLRAGDLVVVNDAATLPGSLVGTSSRGEPIEARLAQPLGENRFVALLFGAGDHRQRTEDRPPPPPLAEGSVIAFGDDLEAVVERVSPVSARLVEIAFSARGAALWTALYRHGRPVQYAYVPAPLALWDVQTRYASRPIAAEMPSAGRPLAWELLFDLARRGVRFARVTHAAGLSSTGDPALDARLPLPEHFEIPEATVRAVSEARRAGGRVVAVGTTVTRALEGAARLAGGKLVAGAGVTDLVLGPEHVRAVVDGLFTGMHEPSESHFRLLGAFAPEGVLARAHAHAEAAGYLTHEFGDSMLLLAG

SEQ ID NO: 70450 - protein, 363 aa, Polyangium sp.
  REGION 1..363: note = tr|A0A4U1H1L9|A0A4U1H1L9_9DELT S-adenosylmethionine:tRNA ribosyltransferase-isomerase; OS = Polyangium sp. SDU3-1 OX=2567896 GN=queA PE=3 SV=1
MRRALLDYTLPPELVATRPADDPEGARLLVVDGEPGRLEHAFIRDLPDRLPEGALVIVNDTRVLPARLLGRKVSSGGRVEIFLVRKIGPAEVAWSGRTLPAERWRALGRSSKPLRDGAEIELDSEGLLRARAFGRDAEGLLDVVLFSPAGRSIDEALEAVGRVPLPPYIRRDDDEADRARYQTVFAREPGAVAAPTAGLHLTERLVERMQARGLTIARVTLHVGLGTFQPVTADDLDDHPMHAELFRVSEETTRAIADARARGAEVVAIGTTAVRALESAADPEREGHVVPREGETRLLIQPGYRFRVVDRLLTNFHLPQSTLLALVGAFAGLDRILEAYRVAIEHRYRFYSYGDAMLLQRAS

SEQ ID NO: 70451 - protein, 341 aa, unidentified
  source 1..341: note = Polycyclovorans sp.
  REGION 1..341: note = tr|A0A2E2JCY5|A0A2E2JCY5_9GAMM S-adenosylmethionine:tRNA ribosyltransferase-isomerase; OS = Polycyclovorans sp. OX=2024852 GN=queA PE=3 SV=1
MQLSDFDYVLPPALIAQRPLAERSQARLLVVSDRGLVDQQVRALPELLSPGDLLVVNDTRVVPARLFGNRATGGRIEVMVERVLDPRRFLAQLAFSRAPKVDEVLQVEGVPVRVVGRDGAFFELALVPDGETVLPFLERCGKLPLPPYIRHAPDAEDAVRYQTVFASTPGAVAAPTASLHFDDALLQALDDRGVRRVTVTLHVGAGTFQPVRVTDLSQHRMHAEHYAIPQATREAIARTRRDGGRVVAVGTTVCRALESAADEDGLPRVEQGDTRLFITPGYRFRVVDRLLTNFHLPQSTLLMLVSAFAGHAPIKDAYAHAIKQSYRFFSYGDAMLLSRAA

SEQ ID NO: 70452 - protein, 341 aa, unidentified
  source 1..341: note = Polymorphobacter sp.
  REGION 1..341: note = tr|A0A4Y9EPK3|A0A4Y9EPK3_9SPHN S-adenosylmethionine:tRNA ribosyltransferase-isomerase; OS = Polymorphobacter sp. DJ1R-1 OX=2511025 GN=queA PE=3 SV=1
MRVSDFDFDLPTERIALRPVSPRDASRLLMVTQGGLADKMFADLPKLLRAGDLLVFNDTRVLPAQLAGMKFNAKIRVTLHKRIEPRRWWSFVKNAKRLKPDDRVDFGHGLTGVAEARDPRDGSILWHFESALPIEEALMAAGQMPLPPYISSKRNVDAQDLDDYQTVFGDKLGAVAAPTAGLHFTPELLAALDAAGIERRTVTLHVGAGTFQPVKVDDTDQHMMHAEWGQIDAATAAAIRAAKDEGRRVIAVGTTSARLLESAWTPEGVQAFSADTRIFITPGFRFAVVDGLLTNFHLPKSTLFMLVSALMGLDTMKAAYAHAVANDYRFYSYGDASLLLP

SEQ ID NO: 70453 - protein, 365 aa, unidentified
  source 1..365: note = Polymorphum gilvum
  REGION 1..365: note = tr|F2IZS4|F2IZS4_POLGS S-adenosylmethionine:tRNA ribosyltransferase-isomerase OS=Polymorphum gilvum (strain LMG 25793 / CGMCC 1.9160 / SL003B-26A1) OX=991905; GN = queAPE=3 SV=1
MRVDVFDFDLPPERIALRPARPRDAARLLVVRPGQSPELADCGVRDLARELEPGDALVFNDTRVIPAQLEGTRTRGEAVAGIGATLHLRAGADRWWAFVRPAKKLAVGDRVRFGGEGRACLLGTLDATVADKRDSGEVLLAFDLAGPDLDQAIAAVGHIPLPPYIAARRGEDEQDRSDYQTMFADKDGAVAAPTAGLHFTPALIEALDARGIERHTVTLHVGAGTFLPVKAEDTADHRMHAEWGKVSAATAAALKAVRARGNRVVAVGTTSLRILESAAQGADGLTAFSGETSIFITPGYRFRAVDVLMTNFHLPRSTLFMLVSAFSGLQTMRRAYAHAIASGYRFYSYGDACLLFPAPQPDPDA

SEQ ID NO: 70454 - protein, 348 aa, unidentified
  source 1..348: note = Polynucleobacter aenigmaticus
  REGION 1..348: note = tr|A0A254Q1V8|A0A254Q1V8_9BURK S-adenosylmethionine:tRNA ribosyltransferase-isomerase; OS = Polynucleobacter aenigmaticus OX=1743164 GN=queA PE=3; SV = 1
MQLSDFNYDLPPQLIAQHPLANRTDSRLLEVKAEGSNAALLIDRQFRDILNLIKLGDLLVFNDTKVIPARLHGKKETGGNVELLIERISAENQAWVQIRASKAPKTGTIVHVYNKAGETFPVEMIGYDGRFYEVRFPENVFSLLERFGELPLPPYIEHQPNQEDANRYQTVVAKNPGAVAAPTAGLHFDEAILNELRELGIKQATVTLHVGAGTFTPVREEDLSKHKMHYEWFSVPAETIAAIEATHKAGGRVIAVGTTSLRALESQAQTQQDSGETNLFITPGYVFKTVDCLLTNFHLPKSTLLMLVSAFAGVDNIRNAYQHAIQNEYRFFSYGDAMLLSRLNQTNS

SEQ ID NO: 70455 - protein, 348 aa, unidentified
  source 1..348: note = Polynucleobacter asymbioticus
  REGION 1..348: note = tr|A0A1J0DSZ3|A0A1J0DSZ3_9BURK S-adenosylmethionine:tRNA ribosyltransferase-isomerase; OS = Polynucleobacter asymbioticus OX=576611 GN=queA PE=3; SV = 1
MQLSDFNYELPPELIAQHPLANRTDSRLLEVRADGMNHAHLVDRQFKDILILAQPGDLLVFNDTKVIPARLHGKKETGGNVELLIERISGEKQAWVQIRASKVPKTGSTVHIYNQSGETFSVEMIGYDGRFYEVLFPDHVFSLLERFGKLPLPPYIEHQPDGEDAQRYQTVVAKNPGAVAAPTAGLHFDEVILQKLKDVGVNQATVTLHVGAGTFTPVREEDLSKHQMHYEWFSIPKETLQAIEKTKKNGGRIIAVGTTSLRALESQANSQQSSGETNLFITPGYQFKVVDCLLTNFHLPKSTLLMLVSAFAGVDNIRSAYQHAINQQYRFFSYGDAMFLCRLENIKP

SEQ ID NO: 70456 - protein, 348 aa, unidentified; identical to SEQ ID NO: 70455
  source 1..348: note = Polynucleobacter asymbioticus
  REGION 1..348: note = sp|A4SZT7|QUEA_POLAQ S-adenosylmethionine:tRNA ribosyltransferase-isomerase OS=Polynucleobacter asymbioticus (strain DSM 18221 / CIP 109841 / QLW-P1DMWA-1) OX=312153GN=queA PE=3 SV=1

SEQ ID NO: 70457 - protein, 348 aa, unidentified
  source 1..348: note = Polynucleobacter campilacus
  REGION 1..348: note = tr|A0A254PT50|A0A254PT50_9BURK S-adenosylmethionine:tRNA ribosyltransferase-isomerase; OS = Polynucleobacter campilacus OX=1743163 GN=queA PE=3 SV=1
MQLSDFNYELPADLIAQHPLANRTDSRLLEVKAERGNHAQLIDRQFKDILNIIKPGDLLVFNDTKVIPARLHGKKETGGIVELLIERISGDMQAWVQIRASKVPKTGSIVYIHNQSGETFPVEMIGHDGRFYEVRFPENIFELLERFGELPLPPYIEHQPDGEDAQRYQTVVAKNPGAVAAPTAGLHFDEKILQQLKDLGAHLASITLHVGAGTFTPVREEDLSKHKMHHEWFSIPQETLQAIEKTKQQGGRVIAVGTTSLRALESQALNQHSSGETNLFITPGFEFKTVDCLLTNFHLPKSTLLMLVSAFAGMGNIRAAYQHAIDQKYRFFSYGDAMFLSRLENTNS

SEQ ID NO: 70458 - protein, 345 aa, Polynucleobacter cosmopolitanus
  REGION 1..345: note = tr|A0A229FUI0|A0A229FUI0_9BURK S-adenosylmethionine:tRNA ribosyltransferase-isomerase; OS = Polynucleobacter cosmopolitanus OX=351345 GN=queA PE=3; SV = 1
MRLSDFNYNLPPELIAQHPLPNRTASRLLVLENHVTDVVIKDQQFTDLIDLLNPNDLLVFNDTKVIPARLFGKKESGGAVEVFLERITGETTAVAQIRASKSPKPGNKIILGSDEEPFEIEIIGRPDDSDNRFYEIKFSSPCLSLLEKHGQLPLPPYITHEANADDLERYQTVVAKNPGAVAAPTAGLHFDQATLDKIMAKGVNYTTLTLHVGAGTFTPVRTEDLSEHKMHSEWFSIPAETQELIKKTKLAGGKVIAVGTTSLRALESSAAFNIQEGETKLFITPGYEFKVIDQLITNFHLPCSTLLMLVSAFAGVEPIRKAYDHAIQQQYRFFSYGDAMLLTRQ

SEQ ID NO: 70459 - protein, 348 aa, unidentified
  source 1..348: note = Polynucleobacter duraquae
  REGION 1..348: note = tr|A0A0E3ZNE3|A0A0E3ZNE3_9BURK S-adenosylmethionine:tRNA ribosyltransferase-isomerase; OS = Polynucleobacter duraquae OX=1835254 GN=queA PE=3 SV=1
MQLSDFNYDLPPELIAQHPLANRTDSRLLELNIEGGNVAQLIDRQFPDILKLMKTGDLLVFNDTKVIPARLHGKKETGGNVELLIERISGDKQAWVQIRASKVPKTGSIVHVHNQAGETFPVEMIGHDGRFYEVRFPENVLDLLERFGELPLPPYIEHQPDQEDANRYQTVIAKNPGAVAAPTAGLHFDETILQQLSELGVQQATVTLHVGAGTFTPVREEDLSKHKMHYEWFSIPAETLAAIKTTQQAGGRVIAVGTTSLRALESQAQTQQVTGETNLFITPGYTFKTVDCLLTNFHLPKSTLLMLVSAFAGVDNIRNAYQHAIQNKYRFFSYGDAMFLSRLNSISS

SEQ ID NO: 70460 - protein, 348 aa, unidentified
  source 1..348: note = Polynucleobacter hirudinilacicola
  REGION 1..348: note = tr|A0A210RWA8|A0A210RWA8_9BURK S-adenosylmethionine:tRNA ribosyltransferase-isomerase; OS = Polynucleobacter hirudinilacicola OX=1743166 GN=queA; PE = 3 SV=1
MQLSDFNYELPADLIAQHPLANRTDSRLLEVKADGGSHVQLIDRQFKDILSIIKPGDLLVFNDTKVIPARLHGKKETGGNVELLIERISGDRQAWVQIRASKVPKTGSIILIHNQAGETFPVEMLGYDGRFYEVRFPENVFELLERFGELPLPPYIEHQPDDEDAQRYQTVVAKNPGAVAAPTAGLHFDETILRQLNNLGIKQATITLHVGAGTFTPVREEDLTKHKMHHEWFSIPAETLQAIEETKQKGGRVIAIGTTSLRALESKAISQQSSGETNLFITPGFEFKTVDCLLTNFHLPKSTLLMLVSAFAGMDNIRAAYQHAIAQKYRFFSYGDAMVLCRLENTKS

SEQ ID NO: 70461 - protein, 348 aa, unidentified
  source 1..348: note = Polynucleobacter meluiroseus
  REGION 1..348: note = tr|A0A240DY68|A0A240DY68_9BURK S-adenosylmethionine:tRNA ribosyltransferase-isomerase; OS = Polynucleobacter meluiroseus OX=1938814 GN=queA PE=3; SV = 1
MQLSDFNYDLPNNLIAQHPLANRTDSRLLEVKLAGGNDAQLIDHAFPDFLGLVRAGDLLVFNDTKVIPARLHGKKETGGNIELLIERISGEQQAWVQLRASKVPKIGSTVHIHNHAGETFPVEMLGYDGRFYEVCFPENVFALLERFGELPLPPYIEHQPNEDDAQRYQTVVAKNPGAVAAPTAGLHFDEAILEQLSQLGVQRATITLHVGAGTFTPVREEDLSKHQMHHEWFSVPQATLDAIEATKRQCGRVIAVGTTSLRALESYALNQKLSGETNLFITPGYEFKMVDCLLTNFHLPKSTLLMLVSAFAGIENIRNAYQHAITQEYRFFSYGDAMFLSRLLEKNS

SEQ ID NO: 70462 - protein, 348 aa, Polynucleobacter necessarius
  REGION 1..348: note = sp|B1XRV8|QUEA_POLNS S-adenosylmethionine:tRNA ribosyltransferase-isomerase OS=Polynucleobacter necessarius subsp. necessarius (strain STIR1) OX=452638; GN = queA PE=3SV=1
MQLSDFNYELPAALIAQHPLANRTDSRLLEVKADGLNHALLLDRQFKDILSLVKPGDLLVFNNTKVIPARLHGKKETGGIVELLIERISGEKQTWVQIRASKVLKTGSIVHIHNHAGETFSVEIIGYDGRFYEVSFPDNVFSLLERFGELPLPPYIEHQPDGEDAQRYQTVVAKNPGAVAAPTAGLHFDEAILQKIKNLGVNQATVTLHVGAGTFTPVREEDLSKHKMHYEWFSIPNETLQAIEATKENGGRVIAVGTTSLRALESQAASGQSGGETNLFITPGYQFKTVDCLLTNFHLPKSTLLMLVSAFAGMDHIRAAYQHAIEQKYRFFSYGDAMFLCRLENTKP

SEQ ID NO: 70463 - protein, 338 aa, unidentified
  source 1..338: note = Polynucleobacter paneuropaeus
  REGION 1..338: note = tr|A0A2Z4JND2|A0A2Z4JND2_9BURK S-adenosylmethionine:tRNA ribosyltransferase-isomerase; OS = Polynucleobacter paneuropaeus OX=2527775 GN=queA PE=3; SV = 1
MQLSDFNYELPARLIAQNPLAERTASRLLEVQAGSLVDRQFKEILSLLKPGDLLIMNDTKVIPARLHGKKSTGGAIELLIERITSNQRAWVQIRASKVPKLDSIVQIHNRNGESFEAKVVAYDGRFFEIEFPEAILDLLEKFGELPLPPYIEHQPNQVDANRYQTVLAKNPGAVAAPTAGLHFDEAILTELRAMGIEHTSITLHVGAGTFSPVREEDLSLHKMHSEWYSIPETSLAAIEKTRHAGGRIIAVGTTSLRTLESFAINQQRSGDTNLFITPGFTFKIVDCLITNFHLPKSTLLMLVSAFAGMENIRQAYQHAIAQEYRFFSYGDAMFLTRL

SEQ ID NO: 70464 - protein, 323 aa, Polynucleobacter sp.
  REGION 1..323: note = tr|A0A259ESY7|A0A259ESY7_9BURK S-adenosylmethionine:tRNA ribosyltransferase-isomerase (Fragment) OS=Polynucleobacter sp. 17-46-58 OX=1970422; GN = B7X83_09490 PE=3 SV=1
SRLLELRVDGDKSAQLIDRQFRDILTLINPGDLLVFNDTKVIPARLHGKKETGGNVELLIERISAENQAWVQIRASKVPKTGSIVHIHNPAGESFPVEMIGYDGRFYEVRFPENVFSLLERFGELPLPPYIEHQPDAQDATRYQTVVAKNPGAVAAPTAGLHFDEDILGRLSQNGVRHATVTLHVGAGTFTPVREEDLSKHRMHYEWYSIPTQTLEAIAQTHGNGKRVIAVGTTSLRALESQALTQQSSGETNLFITPGFSFKAVDCLLTNFHLPKSTLLMLVSAFAGVDNIRNAYQHAIQNEYRFFSYGDAMFLSRLHHSHP

SEQ ID NO: 70465 - protein, 344 aa, Polynucleobacter sp.
  REGION 1..344: note = tr|A0A1G3CT67|A0A1G3CT67_9BURK S-adenosylmethionine:tRNA ribosyltransferase-isomerase; OS = Polynucleobacter sp. GWA2_45_21 OX=1801989 GN=queA PE=3; SV = 1
MQLSDFNYDLPPELIAQHPLANRTDSRLLELNIEGGNVAQLIDRKFPDILNLIKPGDLLVFNDTKVIPARLHGKKETGGNVELLIERISGDQQAWVQIRASKVPKTGSIVHVHNKAGETFPVEMLGYDGRFYEVRFPENVFDLLERFGELPLPPYIEHQPNQEDANRYQTVVAKNPGAVAAPTAGLHFDEVILKKLNELGVNQATVTLHVGAGTFTPVREEDLSKHKMHYEWFSVPADTIEAIKTTHKTGGRVIAVGTTSLRALESQAQSQQASGETNLFITPGYTFKAVDCLLTNFHLPKSTLLMLVSAFAGVDNIRHAYQHAIQNEYRFFSYGDAMFLSRTN

SEQ ID NO: 70466 - protein, 348 aa, unidentified
  source 1..348: note = Polynucleobacter sphagniphilus
  REGION 1..348: note = tr|A0A1R0HDF9|A0A1R0HDF9_9BURK S-adenosylmethionine:tRNA ribosyltransferase-isomerase; OS = Polynucleobacter sphagniphilus OX=1743169 GN=queA PE=3; SV = 1
MQLSDFNYTLPPHLIAQHPLEKRTDSRLLEVKAHGDSSAQFIDRTFREIVDLIRPGDLLVMNDTKVIPARLHGKKETGGIVELLIERISGDKQAWVQVRASKVPKTGSIVHIHNQAGETFPVEMIGYDGRFYEVRFPENVLGLLERFGELPLPPYIEHQPTQEDAQRYQTVVAKNPGAVAAPTAGLHFDQAILQQLSDAGVNQAGVTLHVGAGTFTPVREEDLSKHQMHYEWYSVPQATIDAIAQTKHQGGRVIAVGTTSLRALESHATTGQASGETNLFITPGYEFKAVDCLLTNFHLPKSTLLMLVSAFAGMDNIRNAYQHAIDQSYRFFSYGDAMLLTRVPNTNL

SEQ ID NO: 70467 - protein, 345 aa, unidentified
  source 1..345: note = Polynucleobacter victoriensis
  REGION 1..345: note = tr|A0A212TGC0|A0A212TGC0_9BURK S-adenosylmethionine:tRNA ribosyltransferase-isomerase; OS = Polynucleobacter victoriensis OX=2049319 GN=queA PE=3; SV = 1
MRLSDFNYNLPPELIAQHPLPDRSSSRLLVLNQTINQEPIIEDKQFTDLLELLKPNDLLIFNDTKVIPARLFGKKESGGAVEVLLERIIDTNKAVVQIRASKPPKPGNQILIGHADDGFSIKVIGRQELNSPFYEVEFSSACIPLLEKYGQLPLPPYITHQANSDDQQRYQTVVAKNPGAVAAPTAGLHFDEHLLEKIKAKGTQYATITLHVGAGTFTPVRTEDLSEHKMHSEWFSIPKETQMAIDEAKRLGGSIIAVGTTSLRALESSAELGITEGETRLFITPGYTFKVIDKLITNFHLPCSTLLMLVSAFAGVEPIRKAYDHAITQQYRFFSYGDAMFLTRQ

SEQ ID NO: 70468 - protein, 348 aa, unidentified
  source 1..348: note = Polynucleobacter wuianus
  REGION 1..348: note = tr|A0A191UHJ5|A0A191UHJ5_9BURK S-adenosylmethionine:tRNA ribosyltransferase-isomerase; OS = Polynucleobacter wuianus OX=1743168 GN=queA PE=3 SV=1
MQLSDFNYELPTELIAQHPLANRTDSRLLEVKADRDDHVQLVDRQFKDILNLMKSGDLLVFNDTKVIPARLHGKKETGGNVELLIERISGDKQAWVQIRASKVPKTGSIVHIHNQAGETFPVEMIGYDGRFYEVRFPENVFVLLERFGELPLPPYIEHQPDGEDAQRYQTVVAKNPGAVAAPTAGLHFDEPILQQLNNLGVEQATVTLHVGAGTFTPVREEDLSKHKMHYEWFSIPEATLQAIAKTKSNGGRVIAVGTTSLRALESQAATCQSSGETNLFITPGFQFKTVDCLLTNFHLPKSTLLMLVSAFAGMENIRAAYQHAIHQKYRFFSYGDAMFLCRLENTKT

SEQ ID NO: 70469 - protein, 354 aa, Pontibaca methylaminivorans
  REGION 1..354: note = tr|A0A1R3WFK1|A0A1R3WFK1_9RHOB S-adenosylmethionine:tRNA ribosyltransferase-isomerase; OS = Pontibaca methylaminivorans OX=515897 GN=queA PE=3 SV=1
MKLSDFDFDLPEELIATRPVTPRPSARLLVAADDAIRDAHVRDLPDWLRPGDRLVLNDTRVIPARLAGRRWRDGEAGRVAAQIAVTLLEPRPGGLWAALVKPLRRLRTGETIEFPGGLSARLEGVGEGQALLAFNLAGDAFDAALAEVGAMPLPPYIAARRAPDARDREDYQSVFARHRGAVAAPTASLHFDDDLLAQIRALGVDFTHVTLHVGAGTFLPVKSDDIEDHQMHAEWGRVSEAAAGEIAATRAAGGRVIPVGTTALRLIETAAQGGEIAPFEGRTDIFIYPGFRFRASDALMTNFHLPRSTLMMLVSALMGRGRIRAIYAHAIAQRYRFFSYGDASLLIPPEDRGG

SEQ ID NO: 70470 - protein, 341 aa, Pontibacillus chungwhensis
  REGION 1..341: note = tr|A0A0A2UQ66|A0A0A2UQ66_9BACI S-adenosylmethionine:tRNA ribosyltransferase-isomerase; OS = Pontibacillus chungwhensis BH030062 OX=1385513 GN=queA; PE = 3 SV=1
MNINDFDFDLPEELIAQTPLEDRTSSRLLVMDRDKETIDHKHFYNITSYLKPGDCLVLNNTRVLPARLYGVKEDTGAKVEVLLLHQRQGDEWEVLVKPAKKIKLGSKISFGDGKLVAECTELQDHGGRILTFSYEGIFLEVLESLGEMPLPPYIKEQVSDRERYQTVYSKEEGSAAAPTAGLHFTKELLQEIQDKGVEIAYITLHVGLGTFRPVSVDSVEEHDMHAEFYQMSKDTADQLNRVKESGGRVIPVGTTSTRTLETIARDHGSFKEASGWTDIFIYPPYDFKAIDGLITNFHLPKSTLIMLVSALAGKEFVMRAYKEAVDEQYRFFSFGDAMLIL

SEQ ID NO: 70471 - protein, 341 aa, Pontibacillus halophilus
  REGION 1..341: note = tr|A0A0A5ICG9|A0A0A5ICG9_9BACI S-adenosylmethionine:tRNA ribosyltransferase-isomerase; OS = Pontibacillus halophilus JSM 076056 = DSM 19796; OX = 1385510 GN=queA PE=3 SV=1
MDIEQFDFDLPERLIAQTPLKDRTSSRMMAINRSEERIEHQHFYNITSYLKSGDCLVLNDTKVLPARLYGVKEDTGAKMEVLLLHQQEGDRWETLVKPAKKVKEGTRISFGDGKLVAECIGMKEHGGRILQFHYEGIFLEVLESLGEMPLPPYIKEQLPDRDRYQTVYAKEEGSAAAPTAGLHFTHELLEELQQKGVQIAYITLHVGLGTFRPVSADTVEDHDMHAEFYTMSEETAAQLNQVRAEGGRIISVGTTSTRTLETIARDYGQFQAVSGWTDIFIYPPYEFKAIDGLITNFHLPKSTLIMLVSAFAGKELTMEAYRKAVEEEYRFFSFGDAMFIE

SEQ ID NO: 70472 - protein, 341 aa, Pontibacillus litoralis
  REGION 1..341: note = tr|A0A0A5HZJ9|A0A0A5HZJ9_9BACI S-adenosylmethionine:tRNA ribosyltransferase-isomerase; OS = Pontibacillus litoralis JSM 072002 OX=1385512 GN=queA; PE = 3 SV=1
MDIKDFDFHLPEELIAQTPLLNRTESRLMVLDREREQITHEHFYQLPQFLQPGDCLVLNNTRVLPARLFGLKEDTGGKVEVLLLHQIEGDEWEVLVKPAKKVKIGTRISFGDGALIAQCTQVKEHGGRVVTFHYEGLFLEVLESLGEMPLPPYIKEQLEDQERYQTVYAKEEGSAAAPTAGLHFTKALLAELQDKGIEIAYVTLHVGLGTFRPVSAGTVEEHEMHAEFYEMTRQTADQLKEVRKRGGRIITVGTTSTRTLETIVRDYGDFTEARGWTDIFIYPPYAFKAIDGLITNFHLPKSTLIMMISAFAGKELVMKAYEEAIEAQYRFFSFGDAMFIR

SEQ ID NO: 70473 - protein, 342 aa, Pontibacillus marinus
  REGION 1..342: note = tr|A0A0A5G4D0|A0A0A5G4D0_9BACI S-adenosylmethionine:tRNA ribosyltransferase-isomerase; OS = Pontibacillus marinus BH030004 = DSM 16465 OX=1385511; GN = N783_13185 PE=3 SV= 1
MGVPYSFDIPDSLNASVPAELRTGARDHVKLMVLDGQEITHDHFSNLERYFREGDTLILNNSRTIPPVLKAKQGHHDIEVRLSRKVSSHEWEALLIGDLIQTNTPICFQKSGVEATVSGLGSEPPLVVLSFSLEGTDLFDFIYRFATPIRYEYIDAPWPLEMYQTVYASVPGSVEMPSAGRAFSWRLLKKLKKMGVQIGYVQLHTGLSYYERNRWPNPEAHPEEFHVPEETAHLVNQTRKNGGRVIATGTTVVRAMESCVNNDGLVTPHNGITRLYVGPGYQVRSIDGLLTGFHEPEASHLDMLTSFVEKDILMNAYQDALRKGYLWHEFGDMNLILQEKHV

SEQ ID NO: 70474 - protein, 342 aa, Pontibacillus marinus
  REGION 1..342: note = tr|A0A0A5FZU5|A0A0A5FZU5_9BACI S-adenosylmethionine:tRNA ribosyltransferase-isomerase; OS = Pontibacillus marinus BH030004 = DSM 16465 OX=1385511; GN = queA PE=3 SV=1
MEIKDFDFDLPERLIAQTPLKDRTSSRMLVMHREEEKIEHKHFYDLTSYLKPGDCLVLNNTRVLPARLFGVKEDTGAKVEVLLLHQQEADEWEVLVKPAKKIKEGTRVSFGDGKLVAECTDLKEHGGRVMQFSYEGIFLEVLESLGEMPLPPYIKEQLPDRERYQTVYSKEEGSAAAPTAGLHFTNELLQEVQDMGVHIAYVTLHVGLGTFRPVSVDTVEEHDMHAEFYHMSQGTADLLTNVREAGGRILSVGTTSTRTLETIARDHDGAFTEASGWTDIFIYPPYQFKAIDGLITNFHLPKSTLIMLVSALAGKEFIMRAYKEAVQEEYRFFSFGDAMLIL

SEQ ID NO: 70475 - protein, 345 aa, Pontibacillus yanchengensis
  REGION 1..345: note = tr|A0A0A2TBN9|A0A0A2TBN9_9BACI S-adenosylmethionine:tRNA ribosyltransferase-isomerase; OS = Pontibacillus yanchengensis Y32 OX=1385514; GN = N782_18665 PE=3 SV=1
MNTLATSFHIPDSLHAEVPPEHRGLRRDDVRLMVLQKGEKNASHNRFDEIDKFLEAGDVLVVNNSRTIPPVLKGSQGKQNVEIRLSRKISTHQWEALLLGTFIQTNVPIQLSEGLEATISGLGSEPPLVTLSFSEGGSTLLDYIYRYGEPVRYEYIHHPWPLETYQTVYGAIPGSVEMPSAGRAFTWGLLSKLKAKGVRIASIQLHAGLSYYEKNRWPNPNNHPEAFAVPEETAKLINTAKQNGKRVIAVGTTVVRALESTVHEQGEVKASSGITKLYIDQHHRVTSVDGLLTGFHEPEASHLHMLRAFMPEKKLIKAYKEALNKGYLWHEFGDMNLILSERKGK

SEQ ID NO: 70476 - protein, 341 aa, Pontibacillus yanchengensis
  REGION 1..341: note = tr|A0A0A2TIK6|A0A0A2TIK6_9BACI S-adenosylmethionine:tRNA ribosyltransferase-isomerase; OS = Pontibacillus yanchengensis Y32 OX=1385514 GN=queA PE=3; SV = 1
MNIKDFDFDLPEELIAQTPLLNRTHSKMLVLDRESETIDHKHFYDLPSYLNSGDCLVLNNTRVLPARLYGVKEDTGGKVEVLLLHQQEGDEWEVLVKPAKKVKEGTRISFGDGKLIAECTALKDHGGRIVKLHYDGIFLEVLESLGEMPLPPYIKEQLPDQERYQTVYSKEEGSAAAPTAGLHFTNELLEEIQEQGVEIAYITLHVGLGTFRPVSAETVEEHEMHAEFYDMDQQTAEQLKRIKANGGRIIPVGTTSTRTLETIVRDYGGFTEARGWTDIFIYPPYTFKAVDGLITNFHLPMSTLIMMVSALAGKDVVMKAYHEAIEQRYRFFSFGDAMFIK

SEQ ID NO: 70477 - protein, 403 aa, Pontibacter actiniarum
  REGION 1..403: note = tr|A0A1X9YMT6|A0A1X9YMT6_9BACT S-adenosylmethionine:tRNA ribosyltransferase-isomerase; OS = Pontibacter actiniarum OX=323450 GN=queA PE=3 SV=1
MTNPKKLAIKDFVYELPDKRIAKFPLPERDQSKLLHYRQGQIVDRTFTDLPQLLPPHTLLVFNDTKVVQARLLMQKETGGLVEIFCLEPVAPHREVQLAMQQTGSSTWKCLVGNNKRWKSGPVKLHFEGGILEAAREAQQEGHFLIRFTWDPAELTFAEVLERCGRLPLPPYLNRDLTPDDHTRYQTIYANQQGAVAAPTAGLHFTARVMHQLQAAGMDTAYLTLHVGAGTFKPVKAEVMEEHEMHAEQLYITRTFLQRLLRQLDNPVIPVGTTSMRSLESLYWLGAKVLEQPELPMQQLHVTQWQAYESTNPPAATNALQALLAYMDRQGTDYLHASTQIIIAPGYTFRICRGLVTNFHQPESTLLLLVSALIGENWRTVYKHALDNGYRFLSYGDSSLLLP

SEQ ID NO: 70478 - protein, 348 aa, Pontibacter actiniarum
  REGION 1..348: note = tr|A0A1X9YWN0|A0A1X9YWN0_9BACT S-adenosylmethionine:tRNA ribosyltransferase-isomerase; OS = Pontibacter actiniarum OX=323450 GN=queA PE=3 SV=1
MKLSEFKFDLPESYLATHPSENRDESRMMVVHRDSGKIEHRVFKDILEYFDEGDVMVVNDTKVFPARLYGNKEKTGAKIEVFLLRELNKEIHLWDVLVDPARKIRVGNKLYFGDSDLVAEVIDNTTSRGRTIKFLFDGPDEEFYKTINDLGETPLPKYIKREAEPEDRERYQTVYAKNVGAVAAPTAGLHFTKEVMKRLEIKGVDVEPVTLHVGLGTFRPVDVEDLTKHKMDSENFMVPAATAERVNKALDSKKRVCAIGTTTMRALESSVSANSRLKANEGWTDRFIFPPYDFKIANCLLTNFHMPESTLLMMAAAFGGYELVMKAYEEAVKENYRFFSYGDVMLIL

SEQ ID NO: 70479 - protein, 348 aa, Pontibacter akesuensis
  REGION 1..348: note = tr|A0A1I7HSU2|A0A1I7HSU2_9BACT S-adenosylmethionine:tRNA ribosyltransferase-isomerase; OS = Pontibacter akesuensis OX=388950 GN=queA PE=3 SV=1
MKLSEFKFELPEELLATHPTENRDESRMMVVHRDSGKIEHRIFKDILEYFDDGDVMVVNDTKVFPARLYGNKEKTGAKIEVFLLRELNKDIHLWDVLVDPARKIRVGNKLYFGESDLVAEVIDNTTSRGRTIKFLFDGPDEEFYKTINDLGETPLPKYIKREAEPEDRERYQTVYAKNVGAVAAPTAGLHFTKEVLKRLEIKGIDMAPLTLHVGLGTFRPVDVEDLTKHKMDSENFMVPGETAELVNRALDKKKRVCAIGTTTMRALESSVSANNRLKANEGWTDRFLFPPYDFKIANSLLTNLHMPESTLLMMAAAFGGYELVMKAYEEAVKEKYRFFSYGDVMLIL

SEQ ID NO: 70480 - protein, 404 aa, Pontibacter akesuensis
  REGION 1..404: note = tr|A0A1I7J1H5|A0A1I7J1H5_9BACT S-adenosylmethionine:tRNA ribosyltransferase-isomerase; OS = Pontibacter akesuensis OX=388950 GN=queA PE=3 SV=1
MLTDPKKLAIKDFVYDLPDERIAKFPLPERDQSKLLQYHGGQISDHTFTDLSGLLPPHTLLVFNNTKVVQARLLFQKETGGVVEIFCLEPVAPHREVQLAMQQTGSCTWKCLVGNNKRWKSGPVSLYFEGGMVQAEREAQQEGHFLIRFTWDPTDLTFAEVLERCGRLPLPPYLNRELTPDDHTRYQTIYADQQGAVAAPTAGLHFTERVLTQLQEKGIDTAYLTLHVGAGTFKPVKADVMEAHEMHAEQLYITKPLLQRLVQQLAHPIIPVGTTSMRSLESIYWLGAKVLEQPDLLEQALHVTQWQPYESTNPPTPAAAIQGLLDYMERRGTDYLHASTQIIIAPGYAFRICNGLVTNFHQPESTLLLLVSALIGDDWRKLYQHALANDYRFLSYGDSSLLLP

SEQ ID NO: 70481 - protein, 403 aa, unidentified
  source 1..403: note = Pontibacter chinhatensis
  REGION 1..403: note = tr|A0A1I2YH89|A0A1I2YH89_9BACT S-adenosylmethionine:tRNA ribosyltransferase-isomerase; OS = Pontibacter chinhatensis OX=1436961 GN=queA PE=3 SV=1
MSDPKKLAIKDFVYDLPEERIAKFPLPVRDQSKLLLYRQGQFIDHTFTELPTLLPPDTLLVFNDTKVVQARLLMQKETGGLVEIFCLEPVAPHREVQLAMQQTGSCTWKCLVGNNKRWKGGLVHLYFEGGVLQAEREAQQEGHFLIHFTWRQAELTFAEVLERCGRLPLPPYLNRDLTPEDHTRYQTIYASQQGAVAAPTAGLHFTDRVMDALKAQGIDTAYLTLHVGAGTFKPVKSETMEAHEMHAEQVYISRSILERLLKQQGNPVIPVGTTSMRSLESIYWLGAKVLAQPELTQQELHVSQWQAYESINQPTAAQALEALLHYLDRQGTDHLHANTQIIIAPGYTFRMCHGLVTNFHQPESTLLLLVSALIGEDWRKVYQHALAHDYRFLSYGDSSLLLP

SEQ ID NO: 70482 - protein, 348 aa, unidentified
  source 1..348: note = Pontibacter chinhatensis
  REGION 1..348: note = tr|A0A1I2TBV6|A0A1I2TBV6_9BACT S-adenosylmethionine:tRNA ribosyltransferase-isomerase; OS = Pontibacter chinhatensis OX=1436961 GN=queA PE=3 SV=1
MKLSEFKFDLPESYLATHPAENRDESRMMVVHRDTGKIEHRVFKDILEYFDEGDVMVVNDTKVFPARLYGNKEKTGAKIEVFLLRELNKDIHLWDVLVDPARKIRVGNKLYFGDSDLVAEVIDNTTSRGRTIKFLFDGPDEEFYKTINDLGETPLPKYIKREAEPEDRERYQTVYAKNVGAVAAPTAGLHFTKEVLKRLEIKGVDVEPITLHVGLGTFRPVDVEDLTKHKMDSENFIVPATTAERVNKALDNKKRVCAIGTTTMRALESSVSASNRLKSNEGWTDRFIFPPYDFKIANALVTNFHMPESTLLMMAAAFGGYDLVMKAYEEAIKENYRFFSYGDVMLIL

SEQ ID NO: 70483 - protein, 404 aa, unidentified
  source 1..404: note = Pontibacter diazotrophicus
  REGION 1..404: note = tr|A0A3D8L6S9|A0A3D8L6S9_9BACT S-adenosylmethionine:tRNA ribosyltransferase-isomerase; OS = Pontibacter diazotrophicus OX=1400979 GN=queA PE=3 SV=1
MMIDPKKLAIKDFVYELPEERIAKFPLPERDQSKLLLYRQGQIVDHTFTDLPQLLPPNTLLVFNDTKVVQARLLFQKETGGFVEIFCLEPVAPYREVQLAMQQTGNCVWKCLVGNNKRWKSGKISLRFDGGMLQAEREAQQEGHFLIRFTWEPAELPFAEVLERCGKLPLPPYLNRDLTPEDHTRYQTIYANQQGAVAAPTAGLHFTDRVMASLQEQNIAAAYLTLHVGAGTFRPVKADVMEEHEMHAEQLYLTKPLLQRLLKQLGKPIIPVGTTSMRSLESLYWLGAKVLQQPALPMQELQVSQWQAYETKEPPAAAEALNALLQYMERQGTNYLHASTQIIIAPGYTFRICGGLITNFHQPESTLLLLVSALIGEDWRKVYQHALQNNYRFLSYGDSSLLLP

SEQ ID NO: 70484 - protein, 348 aa, unidentified
  source 1..348: note = Pontibacter diazotrophicus
  REGION 1..348: note = tr|A0A3D8L961|A0A3D8L961_9BACT S-adenosylmethionine:tRNA ribosyltransferase-isomerase; OS = Pontibacter diazotrophicus OX=1400979 GN=queA PE=3 SV=1
MKLSEFKFDLPEEYLATHPSANRDESRMMVVHRDSGKIEHRVFKDILEYFDEGDVMVVNDTKVFPARLYGNKEKTGAKIEVFLLRELNKDIHLWDVLVDPARKIRVGNKLYFGESDLVAEVIDNTTSRGRTIKFLFDGSDEEFYKAINDLGETPLPKYIKREAEPEDRERYQTVYAKNVGAVAAPTAGLHFTKEVLKRLEIKGVDVTPLTLHVGLGTFRPVDVEDLTKHKMDSENFMVPAETVSMVNNALDNKKRVVAIGTTTMRALESSVSANNRLKANEGWTDRFIFPPYDFKIANSLVTNFHMPESTLLMMTAAFGGYELIMEAYQQAIKEKYRFFSYGDVMLVL

SEQ ID NO: 70485 - protein, 404 aa, unidentified
  source 1..404: note = Pontibacter indicus
  REGION 1..404: note = tr|A0A1R3XLR9|A0A1R3XLR9_9BACT S-adenosylmethionine:tRNA ribosyltransferase-isomerase; OS = Pontibacter indicus OX=1317125 GN=queA PE=3 SV=1
MNANPKNLAIKDFVYELPEERIAKFPLPERDQSKLLYYKQQGIADHTFTDLPELLPAGSLLVFNNTKVVQARLIFRKPTGGAVEVFCLEPVKPHREVQLAMQQTRSCTWKCLVGNNKRWKEGPLKIFFEGGVVTAEREAQQEGHFLIRFTWTPAELTFAEVLERCGKLPLPPYLNRELIPEDRSRYQTIYARNEGAVAAPTAGLHFTDKVMAQLQAKGIDSTYLTLHVGAGTFKPVKADTMETHEMHAEQLMVSREVVAQLLEHLGRPLIPVGTTSMRSLESLYWLGTLLWRQPDLRPEDLHVTQWLPYEAETPPAAAEALQTLLNYMDRHQTQYLHASTQIIIAPGYTFRLCKGLVTNFHQPESTLLLLVAALIGEDWKQVYRHALDNDYRFLSYGDSSLLLP

SEQ ID NO: 70486 - protein, 348 aa, unidentified
  source 1..348: note = Pontibacter indicus
  REGION 1..348: note = tr|A0A1R3XF11|A0A1R3XF11_9BACT S-adenosylmethionine:tRNA ribosyltransferase-isomerase; OS = Pontibacter indicus OX=1317125 GN=queA PE=3 SV=1
MKLSEFKFELPENLLATHPSANRDESRMMVLHRDTGKIEHRIFKDILEYFDEGDVMVVNDTKVFPARLYGNKEKTGAKIEVFLLRELNKDIHLWDVLVDPARKIRVGNKLYFGESDLVAEVIDNTTSRGRTIKFLFDGPDEEFYKTINELGETPLPKYIKREAEPEDKERYQTVYAKNVGAVAAPTAGLHFTREVLKRLEIKGVDVTPLTLHVGLGTFRPVDVEDLTKHKMDSENFMVPSETAEMVNKALDNKKRVCAIGTTTMRALESSVSASNRLKPNEGWTDRFIFPPYDFKIANALVTNFHMPESTLLMMTAAFGGYDLVMKAYEEAVKEKYRFFSYGDVMLIL

SEQ ID NO: 70487 - protein, 403 aa, Pontibacter korlensis
  REGION 1..403: note = tr|A0A0E3ZGN5|A0A0E3ZGN5_9BACT S-adenosylmethionine:tRNA ribosyltransferase-isomerase; OS = Pontibacter korlensis OX=400092 GN=queA PE=3 SV=1
MNDPKKLAIKDFVYELPDERIAKFPLPERDQSKLLLYRQGNIADHTFTELTQLLPQDTLLVFNDTKVVQARLLMQKETGGLVEIFCLEPVAPHREVQLAMQQTGGSTWKCLVGNNKRWKSGPVRLDFEGGVLKAEREAQQEGHFLIRFTWEPAELPFAEVLERCGRLPLPPYLNRDLTPDDHTRYQTIYANQKGAVAAPTAGLHFTDRVMAALQAQGIGTAYLTLHVGAGTFKPVKAETMETHEMHAEQLYITRSILERLLHQVGKPVIPVGTTSMRSLESIYWLGAKVLEQPELSVQELHVSQWQAYESINPPSAETALQALLRYLDHLGTDHLHASTQIIIAPGYTFRMCHGLVTNFHQPESTLLLLVSALIGENWRKVYQHAMENDYRFLSYGDSSLLLP

SEQ ID NO: 70488 - protein, 348 aa, Pontibacter korlensis
  REGION 1..348: note = tr|A0A0E3ZD95|A0A0E3ZD95_9BACT S-adenosylmethionine:tRNA ribosyltransferase-isomerase; OS = Pontibacter korlensis OX=400092 GN=queA PE=3 SV=1
MKLSEFKFELPESHLATHPTENRDESRMMVVHRDTGKIEHRIFKDILEYFDEGDVMVVNDTKVFPARLYGNKEKTGAKIEVFLLRELNKDIHLWDVLVDPARKIRVGNKLYFGDSDLVAEVIDNTTSRGRTIKFLFDGTDEEFYKTINDLGETPLPKYIKREAEPEDRERYQTVYAQNVGAVAAPTAGLHFTKEVLKRLEIKGVDVEPITLHVGLGTFRPVDVEDLTKHKMDSENFMVPAATADRVNKALDSKKRVCAIGTTTMRALESSVSANSRLKANEGWTDRFIFPPYDFKIANALLTNFHMPESTLLMMAAAFGGYDLIMKAYEEAVKEKYRFFSYGDVMLIL

SEQ ID NO: 70489 - protein, 348 aa, unidentified
  source 1..348: note = Pontibacter lucknowensis
  REGION 1..348: note = tr|A0A1N6UCT2|A0A1N6UCT2_9BACT S-adenosylmethionine:tRNA ribosyltransferase-isomerase; OS = Pontibacter lucknowensis OX=1077936 GN=queA PE=3 SV=1
MKLSEFKFELPESLLATHPSANRDESRMMVVHRDTGKIEHRVFKDILEYFDEGDVMVVNDTKVFPARLYGNKEKTGAKIEVFLLRELNKDIHLWDVLVDPARKIRVGNKLYFGDSDLVAEVIDNTTSRGRTIKFLFDGPDEEFYKTINELGETPLPKYIKREAEPEDKERYQTVYAKNVGAVAAPTAGLHFTKEVLKRLEIKGVDVTPLTLHVGLGTFRPVDVEDLTKHKMDSENFKVPNETAELVNKALDNKKRVVAIGTTTMRALESSVSASNRLKPNEGWTDRFIFPPYDFKIANALVTNFHMPESTLLMMTAAFGGYELVMKAYEEAVKEKYRFFSYGDVMLIL

SEQ ID NO: 70490 - protein, 404 aa, unidentified
  source 1..404: note = Pontibacter lucknowensis
  REGION 1..404: note = tr|A0A1N6T0H4|A0A1N6T0H4_9BACT S-adenosylmethionine:tRNA ribosyltransferase-isomerase; OS = Pontibacter lucknowensis OX=1077936 GN=queA PE=3 SV=1
MNTNPKHLAIKDFVYELPDERIAKYPLPERDQSKLLLYHNHTIADHTFTSLPDLLPAGSLLVFNNTKVVQARLIFHKPTGGAVEIFCLEPVKPHREVQLAMQHTRSCTWKCLVGNNKRWKEGVLKLFFEGGVVTAERDAQQEGHFLIRFTWTPAELTFAEVLERCGRLPLPPYLNRELTPEDRTRYQTIYARNEGAVAAPTAGLHFTDQVMASLQAKGIESTYLTLHVGAGTFKPVKADTMEDHEMHAEQLMVSKQVVKQLLQHLGQPIIPVGTTSMRSLESLYWLGTLLQQQPGLKPEELHVTQWLPYDISTPPATTEALQTLLGYMELYQVEHLHASTQIIIAPGYTFRICSGLVTNFHQPESTLLLLVSALIGGDWKQVYQHALDNDYRFLSYGDSSLLLP

SEQ ID NO: 70491 - protein, 403 aa, unidentified
  source 1..403: note = Pontibacter mucosus
  REGION 1..403: note = tr|A0A2T5YJ36|A0A2T5YJ36_9BACT S-adenosylmethionine:tRNA ribosyltransferase-isomerase; OS = Pontibacter mucosus OX=1649266 GN=queA PE=3 SV=1
MSDPKKLAIKDFVYDLPEERIAKFPLPVRDQSKLLLYRQGQIIDHTFTELPALLPPNTLLVFNDTKVVQARLLMQKETGGLVEIFCLEPVAPHREVQLAMQQTGSCTWKCLVGNNKRWKGGPVHLYFEGGVLQAEREAQQEGHFLIRFTWQPAELTFAEVLEHCGRLPLPPYLNRDLTPEDHTRYQTIYASQQGAVAAPTAGLHFTDRVMDALKAQRIDMAYLTLHVGAGTFKPVKSETMEAHEMHAEQVYISRSILERLLKQQGNPVIPVGTTSMRSLESIYWLGAKVLAQPELPQQELHVSQWQAYESINPPTATQALESMLHYLDRQGTDHLHASTQIIIAPGYTFRMCHGLVTNFHQPESTLLLLVSALIGEDWRKVYQHALAHDYRFLSYGDSSLLLP

SEQ ID NO: 70492 - protein, 348 aa, unidentified
  source 1..348: note = Pontibacter mucosus
  REGION 1..348: note = tr|A0A2T5YSG2|A0A2T5YSG2_9BACT S-adenosylmethionine:tRNA ribosyltransferase-isomerase; OS = Pontibacter mucosus OX=1649266 GN=queA PE=3 SV=1
MKLSEFKFDLPESYLATHPAENRDESRMMVVHRDTGKIEHRVFKDILEYFDEGDVMVVNDTKVFPARLYGNKEKTGAKIEVFLLRELNKDIHLWDVLVDPARKIRVGNKLYFGDSDLVAEVIDNTTSRGRTIKFLFDGPDEEFYKTINDLGETPLPKYIKREAEPEDRERYQTVYAKNVGAVAAPTAGLHFTKEVLKRLEIKGVDVEPITLHVGLGTFRPVDVEDLTKHKMDSENFIVPATTAERVNKALDNKKRVCAIGTTTMRALESSVSASNRLKSNEGWTDRFIFPPYDFKIANALVTNFHMPESTLLMMAAAFGGYDLIMKAYEEAIKENYRFFSYGDVMLIL

SEQ ID NO: 70493 - protein, 348 aa, unidentified
  source 1..348: note = Pontibacter ramchanderi
  REGION 1..348: note = tr|A0A2N3UCD5|A0A2N3UCD5_9BACT S-adenosylmethionine:tRNA ribosyltransferase-isomerase; OS = Pontibacter ramchanderi OX=1179743 GN=queA PE=3 SV=1
MKLSEFKFELPESLLATHPSANRDESRMMVVHRDSGKIEHRIFKDILEYFDEGDVMVVNDTKVFPARLYGNKEKTGAKIEVFLLRELNKDIHLWDVLVDPARKIRVGNKLYFGESDLVAEVIDNTTSRGRTIKFLFDGPDEEFYKTINELGETPLPKYIKREAEPEDKERYQTVYAKNVGAVAAPTAGLHFTREVLKRLEIKGVDVTPLTLHVGLGTFRPVDVEDLTKHKMDSENFMVPAETAEMVNKALDNKKRVCAIGTTTMRALESSVSASNRLKPNEGWTDRFIFPPYDFKIANALVTNFHMPESTLLMMTAAFGGYELVMKAYEEAVKEKYRFFSYGDVMLIL

SEQ ID NO: 70494 - protein, 422 aa, unidentified
  source 1..422: note = Pontibacter ramchanderi
  REGION 1..422: note = tr|A0A2N3UAD0|A0A2N3UAD0_9BACT S-adenosylmethionine:tRNA ribosyltransferase-isomerase; OS = Pontibacter ramchanderi OX=1179743 GN=queA PE=3 SV=1
MRNLFTDSYLYILTYLNFMHTNPKNLAIKDFVYELPDERIAKFPLPERDQSKLLYYQHHTISDHTFTELPELLPTGSLLVFNNTKVVQARLIFHKPTGGAVEIFCLEPVAPHREVQLAMQQTGSCTWKCLVGNNKRWKEGPLSLHFEGGTVTAERETQQDGHFLIRFAWTPAQLTFAEVLERCGRLPLPPYLNRELTPEDRTRYQTIYARNEGAVAAPTAGLHFTDNVMADLQAKGIDSTYLTLHVGAGTFKPVKADTMEAHEMHAEQLMVSRHVVDQLLSHLGRPLIPVGTTSMRSLESLYWLGTLLLQQPELKPEELHVTQWLPYETSTPPATKDALHALLDYMARHQTEHLHASTQIIIAPGYSFKVCNGLVTNFHQPESTLLLLVAALIGEDWKQVYRHALDNGYRFLSYGDSSLLLP

SEQ ID NO: 70495 - protein, 348 aa, Pontibacter sp.
  REGION 1..348: note = tr|A0A4P8RMV6|A0A4P8RMV6_9BACT S-adenosylmethionine:tRNA ribosyltransferase-isomerase; OS = Pontibacter sp. SGAir0037 OX=2571030 GN=queA PE=3 SV=1
MKLSEFKFDLPADLLATHPTENRDESRMMVVNRATGKIEHRIFKDILEYFDDGDIMVVNDTKVFPARLYGNKEKTGAKIEVFLLRELNKDIHLWDVLVDPARKIRVGNKLYFGESDLVAEVIDNTTSRGRTIKFLFDGPDEEFYKTINDLGETPLPKYIKREAEPEDRERYQTVYAKNIGAVAAPTAGLHFTKEVLKRLELQGVEVAPLTLHVGLGTFRPVDVEDLTKHKMDSENFMVPSATADMVNKALDNKKRVCSVGTTTMRALESSVSANSRLKPNEGWTDRFIFPPYDFKIANSLITNFHMPESTLLMMTAAFGGYELIMEAYELALKEKYRFFSYGDVMLII

SEQ ID NO: 70496 - protein, 348 aa, Pontibacter sp.
  REGION 1..348: note = tr|A0A501W305|A0A501W305_9BACT S-adenosylmethionine:tRNA ribosyltransferase-isomerase; OS = Pontibacter sp. HB172049 OX=2589816 GN=queA PE=3 SV=1
MKLSEFKFELPESYLATHPSENRDESRMMVVHRDTGKIEHRIFKDILEYFDEGDVMVVNDTKVFPARLYGNKEKTGAKIEVFLLRELNKEIHLWDVLVDPARKIRVGNKLYFGDSDLVAEVIDNTTSRGRTIKFLFDGTDEEFYKTINDLGETPLPKYIKREAEPEDRERYQTVYAKNVGAVAAPTAGLHFTKEVMKRLEIKGVDVEPITLHVGLGTFRPVDVEDLTKHKMDSENFMVPAGTADRVNQALDSKRRVCAIGTTTMRALESSVSASSRLKANEGWTDRFIFPPYEFKIANSLLTNFHMPESTLLMMAAAFGGYELIMKAYEEAVKENYRFFSYGDVMLIL

SEQ ID NO: 70497 - protein, 348 aa, unidentified
  source 1..348: note = Pontibacter ummariensis
  REGION 1..348: note = tr|A0A239GZD5|A0A239GZD5_9BACT S-adenosylmethionine:tRNA ribosyltransferase-isomerase; OS = Pontibacter ummariensis OX=1610492 GN=queA PE=3 SV=1
MKLSEFKFDLPENLLATHPTENRDESRMMVLHRDSGKIEHRIFKDVLEYFDDGDVMVVNDTKVFPARLYGNKEKTGAKIEVFLLRELNKDIHLWDVLVDPARKIRVGNKLYFGESDLVAEVIDNTTSRGRTIKFLFDGPDEEFYKMINDLGETPLPKYIKREAEPEDRERYQTVYAKNVGAVAAPTAGLHFTKEVLKRLEIKGVDVAPLTLHVGLGTFRPVDVEDLTKHKMDSENFMVPSTTAEMVNKALDSKKRVCAIGTTTMRALESSVSASSRLKPNEGWTDRFIFPPYDFKIANSLITNFHMPESTLLMMAAAFGGYDLVMKAYEEAVKEKYRFFSYGDVMLIL

SEQ ID NO: 70498 - protein, 403 aa, unidentified
  source 1..403: note = Pontibacter ummariensis
  REGION 1..403: note = tr|A0A239K745|A0A239K745_9BACT S-adenosylmethionine:tRNA ribosyltransferase-isomerase; OS = Pontibacter ummariensis OX=1610492 GN=queA PE=3 SV=1
MTDPKKLAIKDFVYELPEERIAKFPLPERDQSKLLLYRQGQMADHTFTDLPQLLPPRSLLVFNDTKVVQARLLFQKETGGTVEIFCLEPVAPYQEVQLAMQQTGNCVWKCLVGNNKRWKSGSVKLRFDGGMLTAERKAQQEGHFLIRFTWEPAELTFAEVLERCGKLPLPPYLNRDLTPDDHTRYQTIYANQQGAVAAPTAGLHFTERVMEKLREQQIATAYLTLHVGAGTFKPVKAEVMEEHEMHAEQLYITKPLLQRLLLQEEKPIIPVGTTSMRSLESLYWLGAKVLEQPELPLKDLSVSQWQAYETVAPPTATDALSALLAYMERQHANYLHASTQIIIAPGYTFRICKGLVTNFHQPESTLLLLVSALIGEDWRKVYQHALENDYRFLSYGDSSLLLP

SEQ ID NO: 70499 - protein, 404 aa, unidentified
  source 1..404: note = Pontibacter virosus
  REGION 1..404: note = tr|A0A2U1AZ34|A0A2U1AZ34_9BACT S-adenosylmethionine:tRNA ribosyltransferase-isomerase; OS = Pontibacter virosus OX=1765052 GN=queA PE=3 SV=1
MHTNPKHLAIKDFVYELPDERIAKFPLPERDQSKLLYYKSHHIADHTFTDLPDLLPAGSLLVFNNTKVVQARLIFRKPTGGAVEIFCLEPVKPHREVQLAMQQTRSCTWKCLVGNNKRWKEGSLKIFFEGGVVTAEREAQQDGHFLIRFTWTPAELTFAEVLERCGRLPLPPYLNRELTPEDRTRYQTIYARNEGAVAAPTAGLHFTDKVMKQLQAKGIESNYLTLHVGAGTFKPVKADTMETHEMHAEQLMVSKQVVKQLLQHYGRPLIPVGTTSMRSLESLFWLGTLLLQQPDLRPEELHVTQWLPYETSTPPAAAEALQTLLDYMERHQTEHLHTSTQIIIAPGYTFRVCSGLVTNFHQPESTLLLLVAALIGEDWKQVYRHALSNGYRFLSYGDSSLLLP

SEQ ID NO: 70500 - protein, 348 aa, unidentified
  source 1..348: note = Pontibacter virosus
  REGION 1..348: note = tr|A0A2U1B6B6|A0A2U1B6B6_9BACT S-adenosylmethionine:tRNA ribosyltransferase-isomerase; OS = Pontibacter virosus OX=1765052 GN=queA PE=3 SV=1
MKLSEFKFELPESLLATHPSANRDESRMMVLHRDSGKIEHRVFKDILEYFDEGDVMVVNDTKVFPARLYGNKEKTGAKIEVFLLRELNKDIHLWDVLVDPARKIRVGNKLYFGDSDLVAEVIDNTTSRGRTIKFLFDGPDEEFYKTINELGETPLPKYIKREAEPEDKERYQTVYAKNVGAVAAPTAGLHFTKEVLKRLEIKGVDVTPLTLHVGLGTFRPVDVEDLTKHKMDSENFMVPSETSEMVNKALDNKKRVCAIGTTTMRALESSVSASNRLKPNEGWTDRFIFPPYDFKIANALVTNFHMPESTLLMMTAAFGGYELVMKAYEEAVKEKYRFFSYGDVMLIL

SEQ ID NO: 70501 - protein, 352 aa, Ponticaulis sp.
  REGION 1..352: note = tr|A0A2E0U4V9|A0A2E0U4V9_9RHOB S-adenosylmethionine:tRNA ribosyltransferase-isomerase; OS = Ponticaulis sp. OX=2020902 GN=queA PE=3 SV=1
  VARIANT 204: note = Xaa can be any naturally occurring amino acid
  VARIANT 252..253: note = Xaa can be any naturally occurring amino acid
  VARIANT 273: note = Xaa can be any naturally occurring amino acid
MDLSEFDFHLPDERIALRPAEPRDASRLLVKIGNQPIKDAVFRDIGDFLKPGDLLIANNTRVFPALLFGQRLARDLNGQDIDVQVNLLEKDECGTWVCLARPGKRLKEGDRIRFSESLSAVLVEKRMLGEIRLDFDMPEPDFWAAIHEIGRMPIPPYIAKKRASDAQDHADYQTVYADQAGSVAAPTAGLHFTAPLIESLKKQXINMKFVTLHVGAGTFAPLTDEALSRGSLHSEWCEVSPETVAAVRAAKXXGNRVIAVGTTALRTLEARSXQTGQLEAGAGETDIFIQPGYEFKTVDGLVTNFHLPKSSLFMLVSALMGTDIMQSCYAHAIKSGYGFYSYGDASLLIPND

SEQ ID NO: 70502 - protein, 353 aa, Ponticaulis sp.
  REGION 1..353: note = tr|A0A2D7J2C7|A0A2D7J2C7_9RHOB S-adenosylmethionine:tRNA ribosyltransferase-isomerase; OS = Ponticaulis sp. OX=2020902 GN=queA PE=3 SV=1
MNLDPYDFDLPDTCIATRPTEPRDACKLLVQQGGDAPSDYVFRDIVDLLQPGDLLIANDTRVIPALLFGERPARDEQGQTVHVQLNLLEDKGEGEWLCLCKPGRRVKPGDTVEFGAGLSASLVEKYENGEMRFKFRPLGEAFWAALNELGRMPIPPYIQKLRASDRKDDEDYQTVFADKAGSVAAPTAGLHFTDGLMAKLKEKNIGLEYVTLHVGAGTFAGLSDDAFETGKLHSEWCEISESVKRKIDEARSLGGRVIAVGTTSLRTLESRADKQRSVISGAGDTDIFIQPGYQFQVVDGLITNFHLPRSSLFMLVSALMGTDVMQVAYNHAINSGYKFYSYGDACLLLPAHD

SEQ ID NO: 70503 - protein, 348 aa, unidentified
  source 1..348: note = Ponticoccus gilvus
  REGION 1..348: note = tr|A0A4R6LQT7|A0A4R6LQT7_9ACTN S-adenosylmethionine:tRNA ribosyltransferase-isomerase; OS = Ponticoccus gilvus OX=519423 GN=C8D81_2699 PE=3 SV=1
MSRLALRPSTTFGGRTPGFADRPIEADARSRDAVRLLVAAGPFIRHRRFGDLVDELRPGDVLVVNTSATVNGEVDASWRGMPIVLHATEGPFGDWVVELRSAPDAGRSILDAAPGDHVAITEGPGLRLLAPHPHRSSPTGEGNRLWRAEAEGGLRTLLDAVGRPIAYGYLAGRWPLAAYQTVFGQVPGSAEMASAGRPFTDALVQALLRRGVLIAPVLLHTGFSSQEAGEGPQPERFEVGPATARTLNLARRSGGRVVAVGTTATRAVESAVVGGRVVASRGWTDRVVTPAEPPQIVNGLITGWHDAGASHLLLVEAIAGAEKTQRAYDAALAEGYAWHEFGNSCLIL

SEQ ID NO: 70504 - protein, 352 aa, unidentified
  source 1..352: note = Ponticoccus marisrubri
  REGION 1..352: note = tr|A0A0W7WLH1|A0A0W7WLH1_9RHOB S-adenosylmethionine:tRNA ribosyltransferase-isomerase; OS = Ponticoccus marisrubri OX=1685382 GN=queA PE=3 SV=1
MQLSDFDFDLPEDLIATRPARPRTAARLLVAGPDSIEDARVFDLPRMLRKGDRLVLNDTRVIPARLSGVRRRNSAEGETEARIEVTLLEPGADGCWSALIKPLKKVRDGEEIIFSNDLRGTLEARDEGQGRIRFNCSGDDFDAALNAAGAMPLPPYIAAKRPADARDREDYQTVWARRQGAVAAPTASLHFDADLLKTLEDQGVALTYVTLHVGAGTFLPVKVDDVTTHRMHGEWGQVTPEAAQAIRATKAEGGRVIPVGTTALRLIETAAQGGEIQPFEGVTEIFIYPGFTFRVTDALMTNFHLPKSTLMMLVSALMGPERIRQIYAHAIAERYRFFSYGDASLLLPQGMG

SEQ ID NO: 70505 - protein, 360 aa, unidentified
  source 1..360: note = Pontivivens insulae
  REGION 1..360: note = tr|A0A2R8AAG9|A0A2R8AAG9_9RHOB S-adenosylmethionine:tRNA ribosyltransferase-isomerase; OS = Pontivivens insulae OX=1639689 GN=queA PE=3 SV=1
MALGDISGCMKLSDFDFELPEELIALRPVKPRPASRMLLAQGAQLSDHHVYDLPSLLRAGDLLVFNDTQVIPARLFGTRSRATQHGSGIAKVEATLLSQEGPESWAALARPGRKLALGDVLDFDGVSAELVEKRDDGQVLLRFDQSGEALDRAILQAGEMPLPPYIAGKRAADAADREDYQTVFAQKPGAVAAPTASLHFDADLLGRIQDAGINSTRVTLHVGAGTFLPVKVDDIEKHKMHSEWGEVSEEAAEAMQRTRANGGRVIPVGTTALRLIETAAADGAIGPWVGDTDIFIRPGHRFQIADGLMTNFHLPKSTLMMLVSALLGVDEIRAVYAHAIAQRYRFFSYGDSSLLLPDRG

SEQ ID NO: 70506 - protein, 345 aa, Porphyrobacter dokdonensis
  REGION 1..345: note = tr|A0A1A7BK44|A0A1A7BK44_9SPHN S-adenosylmethionine:tRNA ribosyltransferase-isomerase; OS = Porphyrobacter dokdonensis DSW-74 OX=1300349 GN=queA; PE = 3 SV=1
MKVDLFDFELPQDRIALRPVRPRDAARMLVVRGSEAPFEDRGVRDLPKVLDPGDVLVFNDTRVIPAQLEGRRADGEARIGATLHKRIDLRRWQAFLRNAKRVKIGDSLVFGGGVTARAEERHADGSLTLFFEGEEPVEVLLDRAGTMPLPPYIASKRGVDRQDLEDYQTMFAREEGAVAAPTASLHFTQRLVDAIDAAGIGRAMLTLHVGAGTFLPVKADDTDDHQMHAEFGRISQATADQLNEARAKGGKIIAVGTTVLRLLESAVDEDGLIQPFAGDTSIFITPGYRLKAVDGLMTNFHLPKSTLMMLVSALMGRERMLAAYQHAITNEYRFYSYGDSSLLLP

SEQ ID NO: 70507 - protein, 342 aa, unidentified
  source 1..342: note = Porphyrobacter mercurialis
  REGION 1..342: note = tr|A0A0B2BWD0|A0A0B2BWD0_9SPHN S-adenosylmethionine:tRNA ribosyltransferase-isomerase; OS = Porphyrobacter mercurialis OX=1572751 GN=queA PE=3 SV=1
MRVDLFDFALPPELIALRPARPRDAARMLVVPGQAGFQDRVVRDLPSALRAGDVLVFNDTRVIPAQLEGTRGEARIGATLHKRIDLRRWQAFIRNGKRLREGDTIAFPADVAAAAEQRHPDGSWTLAFAGEEPVEVLLERAGRMPLPPYIAGKRPTDEADRSDYQTMFAVEDGAVAAPTAALHFTPDLLAALEHAGIGRETLTLHVGAGTFLPVKADDTADHAMHAEWGRIEPDTADRLNAVRANGGRVIAVGTTVLRLLESATGEDRIIRPFAGDTAIFITPGYTFRAIDGLMTNFHLPRSTLFMLVSALMGLDRMQQTYAHAIAEGYRFYSYGDSSLLLP

SEQ ID NO: 70508 - protein, 345 aa, Porphyrobacter neustonensis
  REGION 1..345: note = tr|A0A192D4S5|A0A192D4S5_9SPHN S-adenosylmethionine:tRNA ribosyltransferase-isomerase; OS = Porphyrobacter neustonensis OX=1112 GN=queA PE=3 SV=1
MKVDLFDFDLPPERIALRPARPRDAARMLVVQGQDAPFEDRGVRDLPQLLEAGDVLVFNDTRVIPAQLEGRRAGGEAKVGATLHKRIDLRRWQAFLKNAKRVKLGDQLIFGGGVTAIAEDRHDDGSLTLMFEGDEPVEVLLHRAGTMPLPPYIASKRGVDRQDLEDYQTMFAAEEGAVAAPTASLHFTQELVDALDDAGIGRATLTLHVGAGTFLPVKADDTDDHRMHAEFGRISPATAAQLNAAREAGGRVIAVGTTSLRLLESAADADGIIHPFEGDTAIFITPGVRLRAVDGLMTNFHLPKSTLMMLVSALMGRERMMAAYAHAIASNYRFYSYGDSSLLLP

SEQ ID NO: 70509 - protein, 345 aa, Porphyrobacter sanguineus
  REGION 1..345: note = tr|A0A1M7RSE6|A0A1M7RSE6_9SPHN S-adenosylmethionine:tRNA ribosyltransferase-isomerase; OS = Porphyrobacter sanguineus OX=198312 GN=queA PE=3 SV=1
MKVDLFDFDLPQSRIALRPVRPRDAARMLVVQGSDAPFEDRGVRDLPALLNPGDVLVFNDTRVIPAQLEGRRADGEAKIGATLHKRIDLRRWQAFIRNAKRVRQGDQIIFGGGVTALAEERLGDGSITLLFEGEEPVEVLLDRAGTMPLPPYIASKRGVDAQDLEDYQTMFAAEKGAVAAPTASLHFTPRLVDALDAAGIGRAMLTLHVGAGTFLPVKADDTDDHQMHAEFGRISQTTADQLNEARAKGGRIIAVGTTSLRLLESAVDENGIIQPFAGDTAIFITPGYRLRAVDGLMTNFHLPKSTLMMLVSALMGRDRMMAAYAHAIANEYRFYSYGDSSLLLP

SEQ ID NO: 70510 - protein, 345 aa, Porphyrobacter sp.
  REGION 1..345: note = tr|A0A0N0JRS3|A0A0N0JRS3_9SPHN S-adenosylmethionine:tRNA ribosyltransferase-isomerase; OS = Porphyrobacter sp. AAP60 OX=1523423 GN=queA PE=3 SV=1
MKVDLFDFDLPQDRIALRPVRPRDAARMLVVRGQDAPFEDQHVHELPDLLNPGDVLVFNDTRVIPAQLEGRRADGEAKIGATLHKRIDLRRWQAFVRNAKRVKEGDQLVFGGGVTAIAEGRLPDGSITLFFEGEEPVEVLLTRAGTMPLPPYIASKRGVDAQDLEDYQTMFAAEEGAVAAPTASLHFTQRLVDALDARGIDRAMLTLHVGAGTFLPVKAEDTDDHQMHAEFGRISQCTAERLNQARAKGGRIIAVGTTSLRLLESAVNENGVIQPFAGDTAIFITPGYKLRAVDGLMTNFHLPKSTLMMLVSALMGRDRMMAAYAHAIANEYRFYSYGDSSLLLP

SEQ ID NO: 70511 - protein, 345 aa, Porphyrobacter sp.
  REGION 1..345: note = tr|A0A2N4WWE5|A0A2N4WWE5_9SPHN S-adenosylmethionine:tRNA ribosyltransferase-isomerase; OS = Porphyrobacter sp. TH134 OX=2067450 GN=queA PE=3 SV=1
MKVDLFDFELPPERIALRPVRPRDAARMLVVRGADAPFADMGVRDLPGLLSPGDVLVFNDTRVIPAQLEGRRADGEAKLGATLHKRLDLRRWQAFIRNAKRLKIGDQIIFGGGVTALAEERFDDGSITLFFEGDEPVEVLLDRAGTMPLPPYIASKRGVDAQDLEDYQTMFAAEKGAVAAPTASLHFTQRLVDAIDAAGIGRAMLTLHVGAGTFLPVKADDTDNHQMHAEFGRISAETAAQLNEARARGGRIIAVGTTSLRLLESAVDADGVIHPFAGDTAIFITPGYKLRAVDGLMTNFHLPKSTLMMLVSALMGRERMMAAYAHAIANEYRFYSYGDSSLLLP

SEQ ID NO: 70512 - protein, 411 aa, unidentified
  source 1..411: note = Porphyromonadaceae bacterium
  REGION 1..411: note = tr|A0A348V793|A0A348V793_9PORP S-adenosylmethionine:tRNA ribosyltransferase-isomerase; OS = Porphyromonadaceae bacterium OX=2049046 GN=DCS09_06055; PE = 3 SV=1
MKKDDIGELQISRFNYHLPDEKIAKYPLSQRDSSKLLQYRDGALSSCRFNELPALLPEESLLLFNNTRVIHARLLFHKVTGAQIEIFCLSPHKPADYAMSFQQRQQCSWNCMIGNAKRWKEEPLFMEVPCDGGMVILKAEKTAADGEEWVVRFSWNRNELTFSELLELAGKLPIPPYLNRPADARDDETYQTVYSRIEGSVAAPTAGLHFTPQVMEELHEKGIADAEVTLHVGAGTFRPVKSNTIAGHAMHTEVIAVERDTIEKLLDHRGKLIVVGTTSLRTVESLYYIGRKLHLHPETSAQELNVKQWEPYDEVGDAVSARQALQLILNYLDRQGLDRLIANTQIIIVPGYRFHYADAIITNFHQPQSTLLLLIAAFVGDDWERIYDYAMHHDYRFLSYGDSSILWKKPK

SEQ ID NO: 70513 - protein, 411 aa, unidentified; identical to SEQ ID NO: 70216
  source 1..411: note = Porphyromonadaceae bacterium
  REGION 1..411: note = tr|A0A1I7EWR4|A0A1I7EWR4_9PORP S-adenosylmethionine:tRNA ribosyltransferase-isomerase; OS = Porphyromonadaceae bacterium KHP3R9 OX=1855398; GN = SAMN05216364_100295 PE=3 S V=1

SEQ ID NO: 70514 - protein, 357 aa, Porphyromonas asaccharolytica
  REGION 1..357: note = tr|F4KP43|F4KP43_PORAD S-adenosylmethionine:tRNA ribosyltransferase-isomerase OS=Porphyromonas asaccharolytica (strain ATCC 25260 / DSM 20707 / BCRC 10618 / JCM 6326/ LMG 13178 / VPI 4198) OX=879243; GN = Poras_1641
MRHKAKLSHFDYKLPEELIAQYPTTFRDQSRMMVLHRTDGSIEHKNFVDIIDYFGEKDTFVFNDTKVFPARLYGLKEKNQAKIEVFLLRELNESLRLWDVLVDPARKIRIGNKLEFGEEGGAPVLVAEVIDNTISRGRILRFLYDGSHEDFLKDLYSLGEAPLPEEIKRPAEPSDLERYQSVFAKHIGAVCAPAASLHFSDIILHKLRLQGCNLAFLTLHHNLSSYQEIEVEAISKYKVENEEMYISAECCDIVNQARDDKAQIVAVGATVMRALETGVSTDGYLKEFSGWTNEFIYPPYHIHLPTAMLTNFNAPKSINLMCAATMGGEKNVMNAMNVAVKEKYRFGCYGDALLIMD

SEQ ID NO: 70515 - protein, 425 aa, Porphyromonas asaccharolytica
  REGION 1..425: note = tr|F4KNZ6|F4KNZ6_PORAD S-adenosylmethionine:tRNA ribosyltransferase-isomerase OS=Porphyromonas asaccharolytica (strain ATCC 25260 / DSM 20707 / BCRC 10618 / JCM 6326/ LMG 13178 / VPI 4198) OX=879243; GN = Poras_1594
MCDKPHTQHWVDIDINDYDYPLPDERIAEHPLAERDQCRLLMSDATGRLEDHTFAELPQLLPPHALLIRNNTRVIKARIFFVKATGARIEILCLDPYRPVSYEESLSSLGSCSWHCLVGNSKKWRPEQTISCTLPLAGGQTITLQASRAVETPDVVTFSWSDETKSFGEILELCGQLPIPPYLNRETESSDLTDYQTVYARIEGSVAAPTAGLHFTPELDDRLLAEGHRITELTLHVGAGTFLPVKGRQVAEHQMHSEYCSVPTATLETLLEHIDSPFVPIGTTSVRTLESLYWYAVALQQAAQEGGDVAEPFHLDQWYSYRMRQSCGAALPSRREALEILLCYARHRGLGRLTFSTALLIAPGYQYHMVDILVTNFHQPKSTLLLLVSALIGPRWRTLYEHALADVQYRFLSYGDACLLYRQDL

SEQ ID NO: 70516 - protein, 406 aa, Porphyromonas cangingivalis
  REGION 1..406: note = tr|A0A0A2ETD5|A0A0A2ETD5_PORCN S-adenosylmethionine:tRNA ribosyltransferase-isomerase; OS = Porphyromonas cangingivalis OX=36874 GN=queA PE=3 SV=1
MHDYKNTKIESFSYHLPDERIAKYPLSRRDESKLLRYSGGEITDHTFRDISDIVEEDTLLVSNDTKVIRARLEFFKPTGGRIEIFLLDPVAPSVYETVFEERSRCTWHCLVGNAKKWKEDSITSTVTLPDGREIVLTATKASPATPDGQEIALSWDGGADFGAILEAYGELPIPPYLNRETEESDLTTYQTLFARVQGSVAAPTAGLHFTPEVMQALSEKGIRSTQVTLHVGAGTFRPVKSETMEGHTMHTEAIVVSLETLKALKTHLGHITAVGTTSTRTLESLYYIGVHLIEGKDSPFEVEQWEPYERDYKYSTEESLSAIIRHLEASGEDHFVGATRIIIVPGFTFRLVGTLITNFHQPHSTLLLLISAFVGNDWKSIYDHALANDYRFLSYGDSSILFRPQA

SEQ ID NO: 70517 - protein, 349 aa, Porphyromonas cangingivalis
  REGION 1..349: note = tr|A0A099WTH1|A0A099WTH1_PORCN S-adenosylmethionine:tRNA ribosyltransferase-isomerase; OS = Porphyromonas cangingivalis OX=36874 GN=queA PE=3 SV=1
MKLSQFNFKLPEELIAQHPAKYRDESRLLVLHSKTGEIEHKVFKEITEYFGKDDVFVFNNTKVFPARLYGNKEKTNAKIEVFLLRELKAEQLLWDVLVDPARKIRIGNKLFFGEDESLVAEVIDNTTSRGRTLRFLYDGTHEEFKQALFALGHTPLPKYIQRDPEPEDEERYQTIFAEVEGAVVAPAAGLHFSRELMKRLEIQDCRFGYLTLHTGLTAYRDIDVDDLTKYKMGSELMNVDKRCCDSVNEALARGGRMCAVGTSVLKALETCISTDGFIKQYEGWTSRFIFPPYEFRAKAAMVTNFHMPYSSLLMMTAALGGYEHVMNAYEIAVKEGYRFGAYGDAMLIL

SEQ ID NO: 70518 - protein, 353 aa, Porphyromonas catoniae
  REGION 1..353: note = tr|L1NBY0|L1NBY0_9PORP S-adenosylmethionine:tRNA ribosyltransferase-isomerase OS=Porphyromonas catoniae F0037 OX=1127696 GN=queA PE=3 SV=1
MKDTKLSHFELDVPENLIAKKPATFRDESRMLVLHKKTGEIEHRQFKDILEYFQKDDVFVFNDTKVFPARMYGNKEKTGAQIEVFLLRELNPALKLWDVVVDPARKIRIGNKLYFGKNDELVAEVIDNTTSRGRTLRFLYDGNSEEFRRILYAMGETPLPKYINRSPNNDDAHRYQSLFAENEGAVVGPAASFHFSRELLLRMEIKDIHKAFITVHNGLGNYRDIDVEDLTKYKMESEQIIVPETACTIVNKASDAGRNICAIGTSVLRAMETAAGTERHIKVFDGWTSRFIFPPYDFNVPNALVTNFHLSKSILLMMAAAFGGYEETMNAYAVAIKEKYRFGAYGDAMLIID

SEQ ID NO: 70519 - protein, 421 aa, Porphyromonas catoniae
  REGION 1..421: note = tr|Z4WPK5|Z4WPK5_9PORP S-adenosylmethionine:tRNA ribosyltransferase-isomerase OS=Porphyromonas catoniae ATCC 51270 OX=887901 GN=queA_1 PE=3 SV=1
MPSTKPQDIAIADYDYDLPDERIARYPLSERSSSKLLVYRSGEISTHTFRELPDLLPEGSLIVRNNSKVIRARLIFHKDSGARIEIFCLDPALPESYELSLSSTQGCSWHCMLGNAKRFRLGTSLSAPLSGGKGEVTLQACRIGEGEVSFTWDNESYTFGELLELMGILPIPPYLDRETEERDLVTYQTVYAEREGSVAAPTAGLHFTPEVFEALRHRGIETLDVTLHVGAGTFRPVKADHIGEHEMHAELISVSREAVEKLRKRLGSIIAIGTTSVRTLESLYHLGASLLKHPDTSPETLHVTQWQPYGDVEGELPPAQSGEALKACVSSPSTEEAFAALIDYMQRWELTQLVFPTSIIIAPGYRYRVIRGMVTNFHQPHSTLLLLIAALVGSDWRRIYDHALTHDFRFLSYGDSSLLLP

SEQ ID NO: 70520 - protein, 416 aa, Porphyromonas circumdentaria
  REGION 1..416: note = tr|A0A1T4LBA3|A0A1T4LBA3_9PORP S-adenosylmethionine:tRNA ribosyltransferase-isomerase; OS = Porphyromonas circumdentaria OX=29524; GN = SAMN02745171_00342 PE=3 SV=1
MDERLKQFTNTMKRETETISMKEYDYMLPDKAIACYPLEDRSSCKLLYYNHGDISTYFFSSIASLLPSNSLLVRNNTRVIRARIYLQKRTGAQIELLCLEPVIPSQYEQSLTATQSCVWRCMVGNARKWKEGVLEREVSIEGRESFIFSAERIEKDLIRFSWQNASFTFGQILDQVGILPIPPYLNRDTEERDNRDYQTVYAVNKGSVAAPTAGLHFTDKEFEEIAQRGIPVLDVTLHVGAGTFLPVKSDDIKEHLMHQELCIVTRDTIEQLLGRIETVIAIGTTSVRTLESLYYIARNHLEELGASLEGVLPSVSQWEPYETTEEVDTKELLQKLLLTMEEKGLSSLVFSTSLLIIPGYRFRIIKGLITNFHQPKSTLLLMIAALLGHKWKDMYEYALANGYRFLSYGDASLLLP

SEQ ID NO: 70521 - protein, 349 aa, Porphyromonas circumdentaria
  REGION 1..349: note = tr|A0A1T4NF42|A0A1T4NF42_9PORP S-adenosylmethionine:tRNA ribosyltransferase-isomerase; OS = Porphyromonas circumdentaria OX=29524 GN=queA PE=3 SV=1
MKLSEFDFNLPEHLIASHPTQHRDESRLMVLNRKDGSIEHRIFKDILNYFGKGDTFVFNNTKVIPARLYGKKEKTMARIEVFLLRELNKDIKLWDVLVDPARKIRIGNKLYFGPDDALVAEVIDNTINGGRTLRFLYDGTHEEFKSYLYALGAAPLPKYMNREAEPEDLERFQTIYASEEGAVIAPAAGLHFSRELLKRLQIADCNFAYLTLHNGLGNFENQDIEDLSKHRKNNEQMIITKECCDITNKGKEEGGQIVAVGTSVLRALETAVSTDGRIKEFDGWTNKYIYPPYNIAFATSLITNFHMPLSLLLMMAASMGGYEHVMNAYEVAIKEEYRFGAYGDAMLII

SEQ ID NO: 70522 - protein, 349 aa, Porphyromonas crevioricanis
  REGION 1..349: note = tr|A0A2X4Q069|A0A2X4Q069_9PORP S-adenosylmethionine:tRNA ribosyltransferase-isomerase; OS = Porphyromonas crevioricanis OX=393921 GN=queA_2 PE=3; SV = 1
MKLSMFKFKLPEELIAKYPARFRDESRMMVLHRATGEIEHKQFSDIIDYFDKDDAFVFNNTKVFPARIYGNKEKTGAKIEVFLLRELNEQQKLWDVVVDPARKIRIGNKLYFGEDDSLIAEVIDNTTSRGRTLRFLYDGPHDEFKKVLFDFGETPIPKYLDREAEPEDEERFQSVFAQEEGAVIAPAASLHFSRQLLKRLEIKDCRFAYLTVHNSLGNYREIDVEDLSKHKMESEQMFVGAEACQVINKAKDGGHKVCAVGTSILRAMETAVSTDGHIKEFEGWTNLFIFPPYNFSLPNAMISNFNMPYSILLMMTAAFGGYEHVMNAYDVAIKEKYRFGVYGDALLII

SEQ ID NO: 70523 - protein, 414 aa, Porphyromonas crevioricanis
  REGION 1..414: note = tr|A0A2X4PZ46|A0A2X4PZ46_9PORP S-adenosylmethionine:tRNA ribosyltransferase-isomerase; OS = Porphyromonas crevioricanis OX=393921 GN=queA_1 PE=3; SV = 1
MISFAVMKTTEICISDYTYELPDERIAKYPLPERSHSKLLFYNRGGISDHLFVDLPDLLPSDAILVRNNTKVIRARLLFRKNGDGARIEVFCLEPHLPAGYDTNLTTTETCSWICMIGNAKKWRGAPLECQIQHRDGSQVTLRAERTGEREGEGEIVRFSWDNPQLCFGDLLELCGVLPIPPYLHRETEEQDLQTYQTVYAQAKGSVAAPTAGLHFTPKVFTDLARKQIPVLDLTLHVGAGTFRPVKTATIGEHHMHRELVVASQSLIKELATTARKPIAVGTTSVRSLESLYYLAVLIAENPSIPVSELQVEQWSPYIRSTSLPNRTEAFATLLRYMERNELEQLIFPTGILIAPGYTYRVVEGILTNFHQPQSTLILLVAAFVGEQWRDIYRHALDRDYRFLSYGDSSLLLR

SEQ ID NO: 70524 - protein, 445 aa, Porphyromonas endodontalis
  REGION 1..445: note = tr|C3J8B2|C3J8B2_POREA S-adenosylmethionine:tRNA ribosyltransferase-isomerase OS=Porphyromonas endodontalis (strain ATCC 35406 / BCRC 14492 / JCM 8526 / NCTC 13058 /HG 370) OX=553175 GN=queA PE=3 SV=1
MGVSILSLRDGKSIRSVVGYLYFCPRFVGDNRKSPSNYKAMNETRQVEIESYDYPLPDERIARYPLEDRAACRLLVYRSGEIISSQFRQITDFIPEHSLLIRNNTRVIRARIHVQKPSGAQIEIMCLEPASPAQYERALSATSGCSWHCLVGNARRWKEGALETLVTLPGETDPILFRIERGEGDVIHFSWNSDHCTFGELLSVVGILPIPPYLRRETEESDNINYQTVYAQCDGSVAAPTAGLHFTPELFEALKEKGVSLGEITLHVGAGTFMPVKTSKIGDHRMHQEVCRVERGIVAQLAGGSYSPIIAVGTTSVRTLESLYLLALNHIDELGQEDHLPFVTQWEPYETDYPEASMPQVMAALLSKMDSLSLEEVVFSTALLIAPGYTFRVVGGMVTNFHQPKSTLLLMISAFLGEEWERIYDYALSHDYRFLSYGDGSLLLP

SEQ ID NO: 70525 - protein, 349 aa, Porphyromonas endodontalis
  REGION 1..349: note = tr|C3JA74|C3JA74_POREA S-adenosylmethionine:tRNA ribosyltransferase-isomerase OS=Porphyromonas endodontalis (strain ATCC 35406 / BCRC 14492 / JCM 8526 / NCTC 13058 /HG 370) OX=553175 GN=queA PE=3 SV=1
MKLSEFGFDLPQELIASHPVEHRDESRLMILHRKDGSIEHGIFKDILKYFGKGDTFVFNNTKVIPARLYGKKEKTNAKIEVFLLRELNPQIKLWDVLVDPARKIRIGNKLYFGPDDGLMAEVIDNTINGGRTLRFLYDGSHEEFKSYLYALGEAPLPKYMERDATEEDLERFQTIYASEEGAVIAPAAGLHFSRELLKRLEIADCRLAYLTLHNGLGNFENQDIEDLSKHKKNNEQMFIGPECCEITRKARDEGKHIVAVGTSVLRALETAVSTDGYVKEFDGWTNKYIYPPYPIEFVTSLITNFHMPQSLLLMNAAAVAGYQNIMNAYEVAKQEKYRFGAYGDAMLII

SEQ ID NO: 70526 - protein, 405 aa, Porphyromonas gingivalis
  REGION 1..405: note = tr|A0A212G9W3|A0A212G9W3_PORGN S-adenosylmethionine:tRNA ribosyltransferase-isomerase; OS = Porphyromonas gingivalis SJD12 OX=1297567 GN=queA PE=3; SV = 1
MITTTDISIADYDYPLPEERIAKHALPQRDACKLLVYDKGEIKDVVFSQLSEVLPSGSMLVRNNTRVIRARLLFHKSTGAIIEVFCLEPVSPAQYELSLTARGSCVWHCMVGNAKRWRSGDLQMEIPSPQGGSILLTASHDPAADGCIRFSWENDHYTFGEILEMAGILPIPPYLNRDTEEEDLETYQTVYAKNQGSVAAPTAGLHFTEEEFERLRAQGTPVVDVTLHVGAGTFRPVKSETIGEHRMHCELIVIERSSLEALRDWQGSIVAVGTTSVRTLESLYWQGRSLSTASHTSQESLKVNQWEAYENEDAALSRSEAIRIILNWMDEQGVETLIFPTEILIAPGYRYRMVDAMITNFHQPRSTLLLLVSAFIGEDWKAVYHHALESGYRFLSYGDGSLLIP

SEQ ID NO: 70527 - protein, 350 aa, Porphyromonas gingivalis
  REGION 1..350: note = tr|A0A1R4DYF8|A0A1R4DYF8_PORGN S-adenosylmethionine:tRNA ribosyltransferase-isomerase; OS = Porphyromonas gingivalis OX=837 GN=queA PE=3 SV=1
MKLSKFKFNLPEELIALEPTKFRDESRMMVVHRRTGEIEHRVFKDILEYFDKGDTFVFNNTRVFPARLYGNKEKTGAQIEVFLLRELNERLKLWDVLVDPARKIRIGNKLYFGNDEELVAEVIDNTTSRGRTLRFLYDGSHDEFKELLFQLGQTPLPKYIDRDVNKEDPERYQSIFAEVEGAVVAPAASLHFSRELMKRLEIKDCHFSYITVHHALGAYRDIDVEDLTKHKMDSEEMYITEESCININRAWDEEKKICAVGTSILRALETAVSTDGHLKPFEGWTNRFIFPPYEFHLPSALVTNFHMPLSTLLMMTAAFGGHELIMSTYDLAVKEKYRFGAYGDAMLIID

SEQ ID NO: 70528 - protein, 349 aa, Porphyromonas gingivicanis
  REGION 1..349: note = tr|A0A0A2GC53|A0A0A2GC53_9PORP S-adenosylmethionine:tRNA ribosyltransferase-isomerase; OS = Porphyromonas gingivicanis OX=266762 GN=queA PE=3 SV=1
MKLSEFDFKLPEHLIASHPTQHRDESRLMVLNRKDGSIEHRVFKDIISYFGKGDTFVFNNTKVIPARLYGKKEKTMARIEVFLLRELNKDIKLWDVLVDPARKIRIGNKLYFGPDDALVAEVIDNTINGGRTLRFLYDGTHEEFKSYLYALGAAPLPKYMNREAEEEDLERFQTIYASEEGAVIAPAAGLHFSRELLKRLQIADCNFAYLTLHNGLGNFENQDIEDLSKHRKNNEQMIITKECCDVANKGKEGGGQIVAVGTSVLRALETAVSTDGRIKEFDGWTNKYIYPPYNIAFATSLITNFHMPLSLLLMMAASMGGYEHVMNAYEMAIKEEYRFGAYGDAMLII

SEQ ID NO: 70529 - protein, 407 aa, Porphyromonas gingivicanis
  REGION 1..407: note = tr|A0A0A2G671|A0A0A2G671_9PORP S-adenosylmethionine:tRNA ribosyltransferase-isomerase; OS = Porphyromonas gingivicanis OX=266762 GN=HQ36_03020 PE=3; SV = 1
MKREIESISMKEYDYLLPDEAIARYPLEDRSSCQLLHYNRGNLSTHLFSEIASLLPTNSLLIRNNTRVIRARIYLHKSTGAQIELLCLEPVSPSQYECSLTATESCVWRCMVGNARKWKEGALEREVCFKGENSFTFRAERIEKDLIRFSWDNPSFSFGHILEQVGILPIPPYLNRATEERDNRDYQTVYAVNKGSVAAPTAGLHFTDREFEQIAQRGIPVADVTLHVGAGTFLPVKSDSIAEHSMHQELCIVERATIEQLLDHTDQIIAIGTTSVRTLESLYYVALNHLDELTTSAEGASLPVVDQWEPYTTPDSEETTRDLLQRLLFRMQELELSSVVFATTLLIIPGYRFHIVKGLVTNFHQPKSTLLLMIAALLGENWKAMYDYALAHNYRFLSYGDASLLLP

SEQ ID NO: 70530 - protein, 350 aa, Porphyromonas gulae
  REGION 1..350: note = tr|A0A0A2F2P3|A0A0A2F2P3_9PORP S-adenosylmethionine:tRNA ribosyltransferase-isomerase; OS = Porphyromonas gulae OX=111105 GN=queA PE=3 SV=1
MKLSKFKFNLPEELIALEPTKFRDESRMMVVHRRTGEIEHRVFKDILEYFDKGDTFVFNNTRVFPARLYGNKEKTGAQIEVFLLRELNERLKLWDVLVDPARKIRIGNKLYFGNDEELVAEVIDNTTSRGRTLRFLYDGSHEEFKELLFQLGQTPLPKYIDREVNEEDPERYQSIFAEVEGAVVAPAASLHFSRELMKRLEIKDCRFSYITVHHALGAYRDIDVEDLTKHKMDSEEMYITEEPCININRSWDEEKKICAVGTSVLRALETAVSTDGHLKPFEGWTNRFIFPPYEFHLPSALVTNFHMPLSTLLMMTAAFGGHELIMSAYDLAVKEKYRFGAYGDAMLIID

SEQ ID NO: 70531 - protein, 405 aa, Porphyromonas gulae
  REGION 1..405: note = tr|A0A0A2F9T7|A0A0A2F9T7_9PORP S-adenosylmethionine:tRNA ribosyltransferase-isomerase; OS = Porphyromonas gulae OX=111105 GN=queA PE=3 SV=1
MITTTDISIADYDYPLPEERIAKHALPQRDACKLLVYDKGEIKDAVFSQLSEVLPSGSMLVRNNTRVIRARLLFRKSTGATIEVFCLEPVSPAQYELSLTARGSCVWHCMVGNAKRWRSGDLQMKIPSPHGDSILLTASHDTAADGYIRFSWENDHYTFGEILEMAGILPIPPYLNRDTEEEDLETYQTVYAKNQGSVAAPTAGLHFTEEEFERLRAQGTPVVDVTLHVGAGTFRPVKSETIGGHRMHRELIVIERSSLEALRDWQGSIVAVGTTSVRTLESLYWLGRSLSIGPHTPQESLKVNQWEAYENEDATLSRSETIRIILDWMDEQGVETLIFPTEILIAPGYRYRMVDAMITNFHQPRSTLLLLVSAFIGEDWKAVYHHALESGYRFLSYGDGSLLIP

SEQ ID NO: 70532 - protein, 403 aa, Porphyromonas levii
  REGION 1..403: note = tr|A0A4Y8WMR6|A0A4Y8WMR6_9PORP S-adenosylmethionine:tRNA ribosyltransferase-isomerase; OS = Porphyromonas levii OX=28114 GN=queA PE=3 SV=1
MIDKNIDPRNIKIEDYTYNLPDDMIAKYPLQKRDDAKLLYYNGEETSTHIFSDMPKLLPENAVLVMNTTKVIRARLEFFRATGARIEVFCLEPYAPALYELSLATKGKVVWHCLVGQAKKWKEQYLERTLPEGGTLRVSRVVDGHLICFEWDSDITFGTLLEQLGELPIPPYLNRKTEESDLSDYQTVYAKQEGSVAAPTAGLHFTDELLNNLRDKGIETIPLTLHVGAGTFLPVKSDTMGGHEMHTEVIEVPLSSIESLRDSVMEGKPIVSVGTTSTRTLESLYYMGAQLLLGVEHAFSVTQWLPYQLQEEPTLLQSLEAIIARLKEGKAEKLFGQTQLMIAPGYRYKVVDYLVTNFHQPHSTLLLLVAAFIGEEWRKVYDYALENNYRFLSYGDGSLLKKK

SEQ ID NO: 70533 - protein, 351 aa, Porphyromonas levii
  REGION 1..351: note = tr|A0A4Y8WRW8|A0A4Y8WRW8_9PORP S-adenosylmethionine:tRNA ribosyltransferase-isomerase; OS = Porphyromonas levii OX=28114 GN=queA PE=3 SV=1
MAEYKLSNFNFKLPKDQIAMYPVRHRDESRLLVLHKDTGVIEHKQFKQIIEYFGKDDLFVMNNTRVFPAKMVGNKEKTNAMIDVFLLRELNEPMLWDVLVDPARKIRIGNKLFFGENDELVAEVVDNTTSRGRILKFAYDGSYEDFKKTLFKLGETPLPDYIKRPVEEEDEERYQTIYATEEGAVVAPAAGLHFSRELIKRLELQDVRFTNLTLHTSRVMYDEIDVDDLSKYKMGSERMIVTQETCDVINKAVENKKRIVAVGTSVAKALETAVSMDGFVKPYDGWSSKFIFPEYKYGLQNAMVTGFHLPSSWLLMLAAAFGGYDHVMKAYKVAVKEGYRFGQYGDAMLIL

SEQ ID NO: 70534 - protein, 404 aa, unidentified
  source 1..404: note = Porphyromonas loveana
  REGION 1..404: note = tr|A0A2U1FPS7|A0A2U1FPS7_9PORP S-adenosylmethionine:tRNA ribosyltransferase-isomerase; OS = Porphyromonas loveana OX=1884669 GN=queA PE=3 SV=1
MRTKDIAIADYDYPLPEERIAKHALPQRDACKLLVYEGGRITDAVFSQLADLLPDKSMLVRNNTRVIRARLLFKKETGATIEVFCLEPVAPAQYELALTSRGSCVWNCMVGNAKRWKSGELLMEVPSPAGRSIILKAVHDESGTNHVRFSWEDTAFTFGDILELAGILPIPPYLNRETEEEDLDTYQTVYAVNKGSVAAPTAGLHFTEEEFERLRARGTPVIDVTLHVGAGTFRPVKSETIGEHQMHRELIVIERASLDALLHEERTIVAVGTTSVRTLESLYWLGKRLIASPETQEDALRVDQWEAYEGAEESISRAEILQALLRWMDRQEAEKLIFPTEILIAPGYRYRMVDAMITNFHQPRSTLLLLVSAFIGEDWQRVYRHALETGYRFLSYGDGSLLIP

SEQ ID NO: 70535 - protein, 350 aa, unidentified
  source 1..350: note = Porphyromonas loveana
  REGION 1..350: note = tr|A0A2U1F6K1|A0A2U1F6K1_9PORP S-adenosylmethionine:tRNA ribosyltransferase-isomerase; OS = Porphyromonas loveana OX=1884669 GN=queA PE=3 SV=1
MKLSKFKFNLPDELIAREPSKFRDESRLMVVHRKTGDVEHRVFKDILDYFDKGDTFIFNNTRVFPARLYGNKEKTGAQIEVFLLRELNERLKLWDVLVDPARKIRIGNKLYFGENEELVAEVIDNTTSRGRTLRFLYDGPHDEFKELLFRLGETPLPKYMARNVNEDDPERYQSIFADVEGAVVAPAASLHFSRELMKRLEIKDTRFSFITVHHALGSYRDIDVEDLTKHKMDSEEMYIDDEACININRAWDEEKKICAVGTSVLRAIETAVSTDGHLKPFEGWTSRFIFPPYEFHLPSALVTNFHMPLSTLLMMTSAFGGHEQIMNAYNLAVKEKYRFGAYGDAMLIID

SEQ ID NO: 70536 - protein, 349 aa, Porphyromonas macacae
  REGION 1..349: note = tr|A0A0A2EBM7|A0A0A2EBM7_9PORP S-adenosylmethionine:tRNA ribosyltransferase-isomerase; OS = Porphyromonas macacae OX=28115 GN=queA_1 PE=3 SV=1
MKLSQFKFDLPDNLVAKKPAHFRDEAKLMVLHKETGEVEHRIFKDILDYFQKDDTFVFNNTRVFPARLYGNKEKTGARIEVFLLRELNEQQRLWDVLVDPARKIRIGNKLYFGKDDSMVAEVIDNTTSRGRTLRFLFDGSHDEFKKQLFDLGETPIPKYMEREAIPEDAERYQTLFAEVEGAVVAPAAGLHFSRELLKRIEIKDVRKAFLTVHNGLGNYRDIEVEDLTKHKMDSEQMAIDAECCQIVNKAYDMGRQICAVGTSVLRAMETAASTDKHLKEYEGWTNRFIFPPYEFQIATSLISNFSHPYSTLLMMQAAFGGYENVMEAYKKAIKHKYHFGGYGDALLII

SEQ ID NO: 70537 - protein, 405 aa, Porphyromonas macacae
  REGION 1..405: note = tr|A0A379EAY2|A0A379EAY2_9PORP S-adenosylmethionine:tRNA ribosyltransferase-isomerase; OS = Porphyromonas macacae OX=28115 GN=queA_2 PE=3 SV=1
MIKTTDIVMQDYAYDLPDERIAKYPLPERDSSKLLLYKHGKITETVFRNLPSHLPSKTLLVRNNTRVIRARLFFRKPTGARIEIFCLDPVLPGSYETALSARKECVWHCMLGNAKRWTVNSEPLVKEIPTDKGPLALSAKRICENQVAFSWDDNTFTFGELLESMGILPIPPYLNRDTEPADLKTYQTVYARHKGSVAAPTAGLHFTEAVFADLAKSDIPIVDVTLHVGAGTFKPVKSETIGGHEMHREIIIVDDKTLRCLNRSGRTVVAVGTTSVRTLESLYWLAVRILNNPDIQPEELIVTQWESYGRDENSLPSKKEAFAALLEWLENNELTQLIFPTEILIAPGYRFRVVEAIITNFHQPNSTLLLLIGAFIGNDWQRVYRYALEHSFRFLSYGDSSLLIP

SEQ ID NO: 70538 - protein, 406 aa, Porphyromonas somerae
  REGION 1..406: note = tr|A0A134B8A3|A0A134B8A3_9PORP S-adenosylmethionine:tRNA ribosyltransferase-isomerase; OS = Porphyromonas somerae OX=322095 GN=queA PE=3 SV=1
MNIRPQEIQIADYDYPLPDERIAKYPLADRSSSKLLRYQAGQIEEFTFRDLPRLLPEGAVLVRNNSKVIRARLLFHKDSGARIEIFCLDPASPTSYELSLGERHSCSWHCLIGNAKRFKEGTQLTRLLHREGQGEVTLTAERGEEGIIHFSWDNDAYTFGELLELMGILPIPPYLGRETEEQDLTTYQTVYAETEGSVAAPTAGLHFTPAVFEELRAQGTPVLDVTLHVGAGTFRPVKADHIGDHEMHAELISVSRLTLLALREHIGQIIAVGTTSVRTLESLYHLAIALRRQPDTPPTALHVEQWLPYEEGADEELTTEEALDTLLSYLDAQGEDTLVFPTSIIIAPSYRYRVIRGMVTNFHQPHSTLLLLIAALIGDDWHRVYDWALTHDFRFLSYGDSSLLLP

SEQ ID NO: 70539 - protein, 353 aa, Porphyromonas somerae
  REGION 1..353: note = tr|A0A134BB71|A0A134BB71_9PORP S-adenosylmethionine:tRNA ribosyltransferase-isomerase; OS = Porphyromonas somerae OX=322095 GN=queA PE=3 SV=1
MKDTKLSHFEIEIPETLIAKKPATFRDESRLMVLHRSTGEIEHRHFKDILDYFSKDDVFVFNDTKVFPARMYGNKEKTGAQIEVFLLRELNPAFKLWDVVVDPARKIRIGNKLYFGKNDELVAEVIDNTTSRGRTLRFLFDGSQEEFRELLHAMGETPLPKYMNRSPNSDDAQRYQSLFAKNEGAVVGPAASFHFSRELLLRMEIKDIRKAFITVHNGLGNYREIDVEDLTKYKMESEQMIIPEEACTIVNAASAAGQNICAVGTSVLRAMETASGTQRHLKAFDGWTSKFIFPPYDFNVPNALVTNFHMSKSILLMMTAAFGGYEETMRAYSIAIKEKYRFGAYGDAMLIID

SEQ ID NO: 70540 - protein, 349 aa, Porphyromonas sp.
  REGION 1..349: note = tr|A0A0A2DRW3|A0A0A2DRW3_9PORP S-adenosylmethionine:tRNA ribosyltransferase-isomerase; OS = Porphyromonas sp. COT-239 OH1446 OX=1515613 GN=queA; PE = 3 SV=1
MKLSQFKLDIPEALIAKKPAYFRDESRMMVLNKTTGEIEHRIFKEILDYFGKDDVFVFNNTRVFPARLYGNKEKTGAQIEVFLLRELNSQFKLWDVLVDPARKIRIGNKLYFGQDDNLVAEVIDNTTSRGRTLRFLFDGTHEEFKRTLFSLGETPLPKYMERSPTAEDAERYQSLFATEEGAVVAPAASLHFSRELLKRMEIRDIRKAYLTVHNGLGNYRDIDVEDLTKHKMESEQMIVGREACQIVNEAKTHDHKICVVGTSALRAMETASSTEHRLKEYDGWTNRFIFPPYDFAIPTSLVTNLHMSKSTLLMMTAAFGGYDHVMNAYAVAIKEKYRFGAYGDAMLII

SEQ ID NO: 70541 - protein, 349 aa, Porphyromonas sp.; identical to SEQ ID NO: 69863
  REGION 1..349: note = tr|A0A073I3R9|A0A073I3R9_9PORP S-adenosylmethionine:tRNA ribosyltransferase-isomerase; OS = Porphyromonas sp. 31_2 OX=658663 GN=queA PE=3 SV=1

SEQ ID NO: 70542 - protein, 425 aa, Porphyromonas uenonis
  REGION 1..425: note = tr|C2MAW4|C2MAW4_9PORP S-adenosylmethionine:tRNA ribosyltransferase-isomerase OS=Porphyromonas uenonis 60-3; OX = 596327 GN=queA PE=3 SV=1
MCDKPHTQHWVDIDINDYDYPLPDERIAAHPLAERDQCRLLLSDATGRLEDHTFAELPKLLPPHALLIRNNTRVIKARIFFVKATGARIEILCLDPYKPVSYEESLSSLGSCSWHCLVGNSKKWRPEQTISCTLPLAGGQTITLQANREADTPDVVTFSWSDETKSFGEILELCGQLPIPPYLNRETESSDLTDYQTVYARIEGSVAAPTAGLHFTPELDDQLLAEGHRITELTLHVGAGTFLPVKGRQVADHQMHSEYCSVPTATLETLLEHIDSPFVPIGTTSVRTLESLYWFAVALQQAEQEGRDVAEPFHLDQWYSYRMHQSCGASLPSRREALEILLRYVRHKGLDRLTFSTALLIAPGYQYQMVDILVTNFHQPKSTLLLLVSALIGPHWRTLYEHALADAHYRFLSYGDACLLYRREL

SEQ ID NO: 70543 - protein, 357 aa, Porphyromonas uenonis
  REGION 1..357: note = tr|C2MD77|C2MD77_9PORP S-adenosylmethionine:tRNA ribosyltransferase-isomerase OS=Porphyromonas uenonis 60-3; OX = 596327 GN=queA PE=3 SV=1
MRHKAKLSHFDYKLPEELIAQYPTTFRDQSRMMVLHRTDGSIEHKNFVDILDYFGEKDTFVFNDTKVFPARLYGLKEKNQAKIEVFLLRELNESLRLWDVLVDPARKIRIGNKLEFGEEGGAPVLVAEVIDNTISRGRILRFLYDGSHEDFLKDLYSLGEAPLPQEIKRPAEPSDLERYQSVFAKHIGAVCAPAASLHFSDIILHKLRLQGCNLAFLTLHHNLSSYQEIEVEAISKYKVENEEMYIPLECCDIVNQARDDNAQIVAVGATVMRALETGVSTDGYLKEFSGWTNEFIYPPYHIHLPTAMLTNFNAPKSINLMCAATMGGEKNVMNAMNVAVKEKYRFGCYGDALLIMD

SEQ ID NO: 70544 - protein, 335 aa, unidentified
  source 1..335: note = Porticoccaceae bacterium
  REGION 1..335: note = tr|A0A522B1L1|A0A522B1L1_9GAMM S-adenosylmethionine:tRNA ribosyltransferase-isomerase (Fragment) OS=Porticoccaceae bacterium OX=2026782 GN=queA; PE = 3 SV=1
MRRELFHYDLPPELIATHPPQRRRDSRLLVLDGPRGALSHRHFPDLLQLVRRDDLLVFNDTRVMPARLLGRKDSGGRVEVLIERLGDDPQRALAMMRASKTPRAGTRIHFDQGVTAQVGGRRDDLFELCFEGSVPIVEILEAIGEIPLPPYLGRPATAADRERYQTLYARESGAVAAPTAGLHFDQELLAQLAAQDIGMGFVTLHVGAGTFRPVRADDIREHRMHAERVTVTAELCAQVTATRAAGGRVIAVGTTAVRSLETAAAGGVLRSFVGDTDIFIFPGYEFRSVDALITNFHLPESSLLMLVCAFAGHRATLAAYRAAVAERYRFFSYGD

SEQ ID NO: 70545 - protein, 348 aa, unidentified
  source 1..348: note = Porticoccaceae bacterium
  REGION 1..348: note = tr|A0A2E8UEY6|A0A2E8UEY6_9GAMM S-adenosylmethionine:tRNA ribosyltransferase-isomerase; OS = Porticoccaceae bacterium OX=2026782 GN=queA PE=3 SV=1
MHLKLFDYLLPEELIARFPLDDRSASSMMVLNESGKISHRKFPDLMNYLKEGDLLVFNNTRVIPARLFGKKDSGGMVEILIERTVDENLAWAMVRSNKKMKMRTKINFVNHSYADVIDCRDGLFLLSFSQKVSIIMDLIGQTPIPPYLNRDAERIDSERYQTVYASAPGAIAAPTAGLHFDEPLLDRLKNKGINSCFVTLHVGLGTFKPVKVDNIKEHSMHSEWISVSKKTCDMITETKKNGGRVVAVGTTSLRSLETIAIKPDLEPFQGDTDIFICPGYEFKLVDALITNFHLPKSTLLMLVCAFAGYSQIMDAYKEAINKKYRFYSYGDAMFLNKNIDAKFDLPGL

SEQ ID NO: 70546 - protein, 350 aa, Porticoccus sp.
  REGION 1..350: note = tr|A0A2E5C5J4|A0A2E5C5J4_9GAMM S-adenosylmethionine:tRNA ribosyltransferase-isomerase; OS = Porticoccus sp. OX=2024853 GN=queA PE=3 SV=1
MRRDHFHYPLPDELIARQPAAERSGSRLLVVDGVTGALQHLQFPAISSLVNPGDLLVFNDTRVIPARLFGQKDSGGKVEMLVERLLDDQRLLAHLRASKSPKAGTRLQFEGGVEAEVEGRDGDLFQLLFLGDRTALDILESHGHMPLPPYIDRADNPADRERYQTVYAEKPGAVAAPTAGLHFDQPLLDQLRAKGVDFAFVTLHVGAGTFQPVRVDDIHDHRMHSEVIEVSAEVCQQVRETRARGGRVIAVGTTSVRCLESAAAGGQIQPMTGETDIFIYPGYSFKLVDALLTNFHLPESTLLMLVSAFSGYTHMMNAYRQAVAERYRFFSYGDAMFLTRNPAATEDTPQ

SEQ ID NO: 70547 - protein, 350 aa, Porticoccus sp.
  REGION 1..350: note = tr|A0A2G2QRV8|A0A2G2QRV8_9GAMM S-adenosylmethionine:tRNA ribosyltransferase-isomerase; OS = Porticoccus sp. OX=2024853 GN=queA PE=3 SV=1
MRRDHFHYPLPDELIARQPAAERRGSRLLVVDGVTGALQHLQFPAISSLVNPGDLLVFNNTRVIPARLFGQKDSGGKVEMLVERLLGDQRLLAHLRASKSPRAGTRLQFEGGVEAEVEGRDGDLFQLCFLGDRTALDILESHGHMPLPPYIDRADNPADRERYQTVYAEKPGAVAAPTAGLHFDQPLLDQLRAKGVDFAFVTLHVGAGTFQPVRVDHIHDHHMHSEVIEVSAEVCQQVRETRARGGRVIAVGTTSVRCLESAAAGGQIQPMTGETDIFIYPGYPFKLVDALLTNFHLPESTLLMLVSAFSGYTHMMNAYRQAVAERYRFFSYGDAMFLTRNPAATEDIPQ

SEQ ID NO: 70548 - protein, 369 aa, Poseidonocella pacifica
  REGION 1..369: note = tr|A0A1I0V9L0|A0A1I0V9L0_9RHOB S-adenosylmethionine:tRNA ribosyltransferase-isomerase; OS = Poseidonocella pacifica OX=871651 GN=queA PE=3 SV=1
MQLSDFDFDLPEALIATRPARPRSSARLLVAEGDAIHDQHVLDLTQWLRPGDRLVLNDTKVIPARLSGLRRREGPEGSTEARIEATLLEPKPGGQWSALLKPLRKVRDGEEIRFSEALSARVENRKEGTATLSFNLAGEDFDAALAEAGAMPLPPYIAARRAADAQDHEDYQTVWARNTGAVAAPTASLHFDDALLAALRERGVEISYVTLHVGAGTFLPVKVEDVSRHKMHGEWGEISETAAAEIAATKAAGGRVIPVGTTALRLIETAARSTGAIAPWQGTTDIFIYPGFAFHVADALMTNFHLPRSTLMMLVSAFMGMERIRAIYAHAVAESYRFFSYGDASLLLPTSRNDTATVADGQSGDGARP

SEQ ID NO: 70549 - protein, 349 aa, Poseidonocella sedimentorum
  REGION 1..349: note = tr|A0A1I6DYQ1|A0A1I6DYQ1_9RHOB S-adenosylmethionine:tRNA ribosyltransferase-isomerase; OS = Poseidonocella sedimentorum OX=871652 GN=queA PE=3 SV=1
MQLSDFDFDLPEDLIATRPAKPRSSARLLVAEGARFSDARVSDLPRWLRPGDRLVLNDTKVIPARLTGFRSRGSGPTATRARIEATLLEPQADGVWLALIKPLKKIREGEEIVFSDALTATFEGRAGEGVRLRFNLSGSDFDAALNAAGAMPLPPYIAAKRPADAQDHEDYQTVWAARRGAVAAPTASLHFDAPLLAELEAQGVAFTHVTLHVGAGTFLPVKVEDVTQHKMHAEWGQVSAAAAQEIAVTMAAGGRIIPVGTTALRLIETAARESGEIAPWEGETDIFIYPGFEFHVASALMTNFHLPKSTLMMLVSAFLGADTIRAVYAHAIEARYRFFSYGDASLLIP

SEQ ID NO: 70550 - protein, 342 aa, unidentified
  source 1..342: note = Pradoshia eiseniae
  REGION 1..342: note = tr|A0A2S7N2X8|A0A2S7N2X8_9BACI S-adenosylmethionine:tRNA ribosyltransferase-isomerase; OS = Pradoshia eiseniae OX=2064768 GN=queA PE=3 SV=1
MKVDLFDFHLPEELIAQTPLEKRAESRLMVLDKQTGNLEHTKFKEITSFLKPGDCLVLNDTKVLPARLYGTKKDTGANIELLLLKQIEGDVWETLAKPAKRIQVGTEVVFGDGQLTAVCVGELEHGGREFEFRYDGIFYEVLEELGEMPLPPYIKERLTERSRYQTVYAREEGSAAAPTAGLHFTEELLEEIKAMGVHIAFITLHVGLGTFRPVSSDTIEGHDMHAEFYQMSSETAELLTKVRDEGGKIYSVGTTSTRTLETITRDHDGKFAEASGWTNIFIYPGFEFRAIDGMITNFHLPKSTLIMLISALAGREHVLNAYEVAVKEHYRFFSFGDAMFIK

SEQ ID NO: 70551 - protein, 333 aa, unidentified
  source 1..333: note = Pradoshia eiseniae
  REGION 1..333: note = tr|A0A2S7MZA5|A0A2S7MZA5_9BACI S-adenosylmethionine:tRNA ribosyltransferase-isomerase; OS = Pradoshia eiseniae OX=2064768 GN=CYL18_12080 PE=3 SV=1
MGAIRKSFSIPVELNACIPPEERGVRRDGVKLMVIEKETGKIVHDVFYHLGHYLRKGDLLLLNNSRTIPAVLWTHCGKEVRLARSWTSGYWDVLIIGDEVEAGADLHFPNQLMAKIKNRVDGTPLWTVSFNQENELFFDTLYRHGEPIRYEYIDTPWKLESYQTVYASVPGSAEMPSAGRAFSWELLFELQKKGIKLGFLQLHTGLSDFCDDEYPVKPAVNPEYYHVPEETLKSIHAAKKVGGRIIAVGTTVVRAAESAILTGKAEGITTLSIGEHDQLQVIDGLLTGFHEAEASHLDLLCSLIDSQKLVAAYEMAIKERYLWHEFGDMNLII

SEQ ID NO: 70552 - protein, 342 aa, unidentified
  source 1..342: note = Pradoshia sp.
  REGION 1..342: note = tr|A0A5J6XR90|A0A5J6XR90_9BACI tRNA preQ1(34) S-adenosylmethionine ribosyltransferase-isomerase QueA; OS = Pradoshia sp. D12 OX=2651284 GN=queA PE=4 SV=1
MKVDLFDFHLPEELIAQTPLEKREESRLMVLDKETGDVNHTQFKHIKEFLKPGDCLVLNDTKVLPARLHGEKKDTGAHIELLLLKQIKGDVWETLAKPAKRIRVGTEVVFGDGQLTAVCVKEMEHGGREFEFKYDGIFYEVLEELGEMPLPPYIKERLSDKDRYQTVYAREEGSAAAPTAGLHFTEELLAEIKEMGVHLAFITLHVGLGTFRPVSSDTIEGHDMHSEFYQMNAETAQLLNRVRAEGGNIFSVGTTSTRTLETIARDHNGSFAEASGWTNIFIYPGFEFKAIDGMITNFHLPKSTLIMLISALAGREHVLNAYNTAVREKYRFFSFGDAMFIK

SEQ ID NO: 70553 - protein, 357 aa, Pragia fontium
  REGION 1..357: note = tr|A0A0G3CUG0|A0A0G3CUG0_9GAMM S-adenosylmethionine:tRNA ribosyltransferase-isomerase; OS = Pragia fontium OX=82985 GN=queA PE=3 SV=1
MRVTDFSFELPESLIARYPQAERSACRLLSLDGPSGSLADDVFTDVLNKLEAGDLLVFNNTRVIPARLFGKKASGGKIEVLVERVLDDKRVLAHVRASKAPKPGAELLLGDDESIPVTMVARHDALFELRFDDGRDVLSILNTAGHMPLPPYIDRPDEASDRELYQTVYSERPGAVAAPTAGLHFDQPLLEALRAKGIEMAFVTLHVGAGTFQPVRVDDIHQHVMHSEYAEVPQDVVDAVLACKSRGGKVVAVGTTSVRSLESAAQATKNGLIAPFFGDTNIFIYPGYQFQIIDTLITNFHLPESTLIMLVSAFAGYTNTMKAYQQAVEKQYRFFSYGDAMYITRNPQAVNEIPGGN

SEQ ID NO: 70554 - protein, 357 aa, Pragia fontium
  REGION 1..357: note = tr|A0A379DTA2|A0A379DTA2_9GAMM S-adenosylmethionine:tRNA ribosyltransferase-isomerase; OS = Pragia fontium OX=82985 GN=queA PE=3 SV=1
MRVTDFSFELPESLIARYPQAERSACRLLSLDGPSGSLADDVFTDVLNKLEAGDLLVFNNTRVIPARLFGKKASGGKIEVLVERVLDDKRVLAHVRASKAPKPGAELLLGDDESIPVTMVARHDALFELRFDDGRDVLSILNTAGHMPLPPYIDRPDEASDRELYQTVYSERPGAVAAPTAGLHFDQPLLEALRAKGIEMAFVTLHVGAGTFQPVRVDDIQQHVMHSEYAEVPQDVVDAVLACKSRGGKVVAVGTTSVRSLESAAQATKNGLIAPFFGDTNIFIYPGYRFQIIDTLITNFHLPESTLIMLVSAFAGYTNTMKAYQQAVEKQYRFFSYGDAMYITRNPQAVNEIPGGN

SEQ ID NO: 70555 - protein, 358 aa, Pragia sp.
  REGION 1..358: note = tr|A0A411WHE1|A0A411WHE1_9GAMM S-adenosylmethionine:tRNA ribosyltransferase-isomerase; OS = Pragia sp. CF-458 OX=2498113 GN=queA PE=3 SV=1
MRVTDFSFELPESLIARYPQAERSACRMLSLDGISGTLSDDTFTDVLNKLNPGDLLVFNNTRVIPARLFGKKASGGKIEVLVERVLDDRRVLAHVRASKAPKPGTELLLGDDESIPAIMAARHDALFELHFTDGRDVLTILNAAGHMPLPPYIDRPDEDADRELYQTVYSQRPGAVAAPTAGLHFDEPLLEALRAKGVNMEFVTLHVGAGTFQPVRVDDIKQHVMHAEYAEVPQSVVDAVLACKARGNKVIAVGTTSVRSLESAAQAAKQDLIEPFFGDTSIFIYPGYQFRVIDTLITNFHLPESTLIMLVSAFAGYSNTMRAYQQAVEKQYRFFSYGDAMFITRNPEAINEIPGGKS

SEQ ID NO: 70556 - protein, 372 aa, unidentified
  source 1..372: note = Prevotella aff.
  REGION 1..372: note = tr|A0A1I0NVC3|A0A1I0NVC3_9BACT S-adenosylmethionine:tRNA ribosyltransferase-isomerase; OS = Prevotella aff. ruminicola Tc2-24 OX=81582 GN=queA PE=3; SV = 1
MKLSQFKFKLPEEQIALEPSYHRDECRLMVVHRKSGEIEMTKKDENGEDLKDEEGNPVYLDFRNILDYFDEDDTFIFNDTQVFPARLYGTKEKTDAKIEVFLLRELNADLRLWDVLVEPARKIRIGNKLFFEEDGPMVAEVIDNTTSRGRTLRFLYDCPHDEFKRELFALGAAPLPRYIIDRRPAHEEDMDMFQTIYAKNEGAVTAPATGLHFSRELMKRMEIRGINFAYITLHCGLGNFDPIEVEDLTKHKMSSEQMFIPKEACDIVNKTKLSGHRVCAVGVSTARATETAVGTDGMLKEYEGWTNKFIFPPYEFGMANALVANFYHPESTMMMTQCSFGGYELVYEAYKKAVKNGYRFGCYGDAMLIVDD

SEQ ID NO: 70557 - protein, 420 aa, unidentified
  source 1..420: note = Prevotella aff.
  REGION 1..420: note = tr|A0A1I0MBT4|A0A1I0MBT4_9BACT S-adenosylmethionine:tRNA ribosyltransferase-isomerase; OS = Prevotella aff. ruminicola Tc2-24 OX=81582; GN = SAMN04487850_0477 PE=3 SV=1
MSCSIKESDPRHIHISDYNYPLPDDRIAKFPIARRDQSKLLLYRNGEVGEDVFCHLPDYLPKGALMVFNNTKVIQARMHFRKANANGEPLGALIEVFLLEPADPSDYELMFQTTGHCAWYCLVGNLKKWKEGTLSREIDIKGEKVLVMATRGAIHGTSHRIDFEWKAADNSRISFAEIIDAMGELPIPPYLNRETQESDKTTYQTVYSKIKGSVAAPTAGLHFTPEVLAALDAHGIDREELTLHVGAGTFKPVKSEEIEGHEMHTEYISVRRSTIEKLIRHDGKAIAVGTTSVRTLESLYYMGVKVMRNANLTEEQLHVCQWEPYDSPCDVPAVEALRSLAAWMDVRGLEVLHSSTQIIIAPGYNYKIVKMLVTNFHQPQSTLLLLVSAFVKGDWHKIYDYALSHDFRFLSYGDSSLLIP

SEQ ID NO: 70558 - protein, 394 aa, Prevotella amnii
  REGION 1..394: note = tr|A0A096D541|A0A096D541_9BACT S-adenosylmethionine:tRNA ribosyltransferase-isomerase; OS = Prevotella amnii DNF00058 OX=1401066; GN = HMPREF9302_02670 PE=3 SV=1
MKLSQFKFSLPEDQVALYPHSSERILKRADGSEQKFTVVRRDEGRLMVVHRKSGKIDMFKGEVTGEPKEEDYIRFRDVLNYFDDGDAFIFNDTKVFPARLYGTKEKTDAKIEVFLLRELNADMRLWDVLVEPARKIRIGNKLFFDESGTMVAEVIDNTTSRGRTLRFLYDCDHDEFKRELFSLGEAPLPRYIIDNRPKKEGEDFAHATEDDLEYFQSVFAKNEGAVSAPGTNIHFSEHMMKMMEIKGIKSAFITLHCALGSFHDIEVEDLTKHKMDSEEMHINAEACAVVNSTKKDGHKVCAVGASVVKACETAVGTDGLLKEYDGWTNKFIFPPYKFGLADSMLVNFYHPYSVLLMETAAFGGYDLIMQAYDLAVKNGYMFGCFGDSMLILDD

SEQ ID NO: 70559 - protein, 394 aa, Prevotella amnii; identical to SEQ ID NO: 70558
  REGION 1..394: note = tr|A0A134BJ47|A0A134BJ47_9BACT S-adenosylmethionine:tRNA ribosyltransferase-isomerase; OS = Prevotella amnii OX=419005 GN=HMPREF1860_00449 PE=3 SV=1

SEQ ID NO: 70560 - protein, 394 aa, Prevotella baroniae
  REGION 1..394: note = tr|U2P7R3|U2P7R3_9BACT S-adenosylmethionine:tRNA ribosyltransferase-isomerase OS=Prevotella baroniae F0067; OX = 1115809 GN=queA_1 PE=3 SV=1
MKLSQFDFKLPKEQVALYPHSIYREFENENGQKETFRISRRDEARMMVLHRKSQTIDMYRKDEKGNPMEGQYIEFRDILNYFEEGDTFIFNDTKVFPARLYGTKEKTDAKIEVFLLRELNEEMRLWDVLVEPARKIRIGNKLFFDESGTMVAEVIDNTTSRGRTLRFLYDCPHDEFKRELFSLGESPLPRYILDSRPMRDTEETVHADAEDMADFQTIYAKTEGAVTAPATGLHFTRELMKRMEILGINEAYITLHCGLGNFNAIEVEDLTKHKMDSEQMVIDKEACDVVNAAKAAGRRVCAIGTSVVKATETAVGTDGLLKEYDGWTNKFIFPPYDFGLANNMVANFYHPLSTLVMETAAFGGYDIVMEAYHLAVEHGYMFGCFGDALLILDD

SEQ ID NO: 70561 - protein, 418 aa, Prevotella baroniae
  REGION 1..418: note = tr|U2P8H2|U2P8H2_9BACT S-adenosylmethionine:tRNA ribosyltransferase-isomerase OS=Prevotella baroniae F0067; OX = 1115809 GN=queA_2 PE=3 SV=1
METRHIHISDFDYPLADDRIAKYPMAERDHSKLLVYNRGKLSDDLFFQLPRYLPQGALMVFNNTRVIQARMHFRKETGALIEVFLMEPAAPTDYEQMFQTSGQCSWLCMIGNLKKWKEGQLKREFEIKGRRLTLCARRNVAQDEALGSRSGTNYWVDFSWDNAQVSFAEILEAVGELPIPPYLNRETQESDKVTYQTVYSKVKGSVAAPTAGLHFTDNVLAALDRCGIDREEVTLHVGAGTFKPVKSEEIDGHRMHTEFICVHRHSLEKLLRHECRTIAVGTTSVRTLESLYYMGVYLEKHPQAQEEELHVNQWVPYENGRDGRLVDGIGPVRAIRNIVDWLDRNGLEALHSSTQIIIAPGYEYKIVTMLITNFHQPKSTLLLLVSAFVKGDWRKIYDYALSHDFRFLSYGDSSLLIP

SEQ ID NO: 70562 - protein, 397 aa, Prevotella bergensis
  REGION 1..397: note = tr|D1PVQ4|D1PVQ4_9BACT S-adenosylmethionine:tRNA ribosyltransferase-isomerase OS=Prevotella bergensis DSM 17361 OX=585502 GN=queA PE=3 SV=1
MKLSQFKFKLPEELVALYPHSFMREFTNDDGTKGSIRVTRRDESRLMVLHRTTGEIEMYRKDAKGNPIEGEYLDFRNLLDYFDEHDTFILNDTKVFPARLYGTKEKTDAKIEVFILRELNRETHLWDVLVEPARKIRIGNKLFFDEVGTMVAEVYDNTTSRGRSLRFLYDCSHEQFREDLFALGEMPLPTYILNGRPEHPEMKGMHVRSRALPEDSEYFQCVYAKNEGAVTAPATGLHFSRELMKRMEIKGIHTAFITLHCGLGNFTPIEVEDLTKHKMDSEQMIITKKACDIVNRTRKEGHRLCAIGTSVLKATETAVGTDGMLKEYNGWTSKFIFPKYDFGLADSMVANFYHPESTMVMATAAFGGYEKVMECYDLAVKHGYKFGCFGDSLLIVD

SEQ ID NO: 70563 - protein, 421 aa, Prevotella bergensis
  REGION 1..421: note = tr|D1PYJ9|D1PYJ9_9BACT S-adenosylmethionine:tRNA ribosyltransferase-isomerase OS=Prevotella bergensis DSM 17361 OX=585502 GN=queA2 PE=3 SV=1
MNTKNIHISDYNYELADERIAKFPLTQRDHSKLLLYNKGKVSDDVFYNLPNYLPEGALLVCNNTRVIQARMHFRKETGALIEVFLMEPALPADYEQMFQSTGRCSWLCMVGNLKKWKEGTLERDFQIKGHRLTLTASMDRDRTQEQSGGTNYWIDFVWDNSEVNFADILETVGELPIPPYLNREAQESDKTTYQTVYSKINGSVAAPTAGLHFTDEVLQAIDAKGITRDEVTLHVGAGTFRPVKSETIDGHSMHTEYVVIHRHTLQRLLEHDCQAIAVGTTSVRTLESLYYMGVKLSQCSDLTEDQLHVNQWEPYDLPHDAEGLVLVEDKAVTVRSAIQNLLDYLDRDNLDTLHSSTQIIIAPGYTYKIVKMLITNFHQPQSTLLLLVSAFLKGDWRKVYDYALANDFRFLSYGDSSLLIP

SEQ ID NO: 70564 - protein, 423 aa, Prevotella bivia
  REGION 1..423: note = tr|A0A096ABQ8|A0A096ABQ8_9BACT S-adenosylmethionine:tRNA ribosyltransferase-isomerase; OS = Prevotella bivia DNF00320 OX=1401068; GN = HMPREF0647_06270 PE=3 SV=1
MSEETKHISISDYNYLLPDERIAKFPLAKRDNSKLLLYKHGEVVEDIFYNLPKYLPKGGLMVFNNTKVIQARIHFRKETGALIEVFLLEPTAPTDYELMFQTTHTCSWLCMVGNLKKWKDGVLKREFEIKGHKLTLIASLNRDKTANTPGGTNHWIDFSWDNANVSFAEILEMVGELPIPPYLNRETEESDKETYQTVYSKIKGSVAAPTAGLHFTPEVLQALDASGIVRDELTLHVGAGTFKPVKSEEIEGHNMHTEYVVVHRHTLENLLAHDCSAIAVGTTSVRTLESLYYMGVHLAINPDATEAELHVNQWEPYDLEHNEAGLVIINGKVITVASAIENILNYLKKDNLQALHSSTQIIIAPGFTYKIVKALVTNFHQPQSTLLLLVSAFVKGDWRKIYDYALSHDFRFLSYGDSSLLIP

SEQ ID NO: 70565 - protein, 394 aa, Prevotella bivia
  REGION 1..394: note = tr|A0A137SZS6|A0A137SZS6_9BACT S-adenosylmethionine:tRNA ribosyltransferase-isomerase; OS = Prevotella bivia OX=28125 GN=HMPREF3202_00634 PE=3 SV=1
MKLSQFKFNLPEEQVALYPHSSERVLKRADGSEQKFTVVRRDEGRLMVVHRKSGKIDMFKGDITDKPKEEDYIRFRDVLDYFDEGDTFIFNDTKVFPARLYGTKEKTDAKIEVFLLRELNAEMRLWDVLVEPARKIRIGNKLFFDESGTMVAEVIDNTTSRGRTLRFLYDCDHEEFKRELFALGEAPLPRYIIDNRPKEEGEEFAHATADDLENFQSVFAKNEGAVSAPGTNIHFSEHMMKMMEIKGLKSAFVTLHCGLGSFHDIEVEDLTKHKMDSEEMHINAEACEIVNKTKLGGHKLCAVGASVVKACESSVGTDGLLKEYDGWTNKFIFPPYNFGLADSMLVNFYHPYSVLLMETAAFGGYDLIMEAYDLAVKNGYMFGSFGDSMLILND

SEQ ID NO: 70566 - protein, 424 aa, Prevotella bryantii
  REGION 1..424: note = tr|D8DWL4|D8DWL4_PREBR S-adenosylmethionine:tRNA ribosyltransferase-isomerase OS=Prevotella bryantii B14; OX = 752555 GN=queA PE=3 SV=1
METKHIKISDYSYDLPDERIAKFPLSQRDHSKLLLYKHGEVSEDVFYNIPNHLPKGALMVCNNTRVIQARMHFRKATGALIEVFLMEPAAPTDYELMFQTTGHCAWLCMIGNLKKWKEGSLKRDFSINGHEFTLVASLRRGEALTPEQEKLTTHSGGTNYWVDFEWNTEKVNFAEILEAVGELPIPPYLNRETQESDKTTYQTVYSKIKGSVAAPTAGLHFTDSVLSDLDKHGIVRDEVTLHVGAGTFKPVKSVEIDGHEMHTEYIVVHRHTFERLLEHDCSAIAVGTTSVRTLESLYYMGVYLEHHPDASEDELHVHQWTPYDDGRDGKLVDGITAVKAMQNILDYLDRNNLEALHSSTQIIIAPGYEYKIVKMLITNFHQPQSTLLLLVSAFLKGDWRKVYDYALSHEFRFLSYGDSSLLIP

SEQ ID NO: 70567 - protein, 424 aa, Prevotella bryantii; identical to SEQ ID NO: 70566
  REGION 1..424: note = tr|A0A255SKH9|A0A255SKH9_PREBR S-adenosylmethionine:tRNA ribosyltransferase-isomerase; OS = Prevotella bryantii OX=77095 GN=CIK91_12600 PE=3 SV=1

SEQ ID NO: 70568 - protein, 424 aa, Prevotella buccae
  REGION 1..424: note = tr|D3HY72|D3HY72_9BACT S-adenosylmethionine:tRNA ribosyltransferase-isomerase OS=Prevotella buccae D17; OX = 575611 GN=HMPREF0649_01204 PE=3 SV=1
METKHIRISDYNYELLEERIAKFPIVPRDHSKLLLYKHGEVGEDVFYHLTDHLPNRALMVFNNTRVIQARMHFRKETGALIEVFLMEPAMPTDYELMFQTSGHCSWLCMIGNLKKWKEGMLRRNFDIKGNRLTLTATMLRDEQLDDRQKNMTVHGGGTNYWVDFDWDNQQVSFAEILEAVGELPIPPYLNRATQESDKTTYQTVYSKIKGSVAAPTAGLHFTDDVLADVDRHGIVRDEVTLHVGAGTFKPVKSMEIAGHKMHAEYIVVHRHTFERLLEYGCSAIAVGTTSVRTLESLYYIGLYLEHHPEASEEDLHVGQWDPYDNGRNGKTVEGITPEQAIRNILSYLDRNGLEALHSSTQIIIAPGYEYKIVKMLITNFHQPQSTLLLLVSAFLKGDWKKVYDYALKHDFRFLSYGDSSLLIP

SEQ ID NO: 70569 - protein, 393 aa, Prevotella buccae
  REGION 1..393: note = tr|E6K369|E6K369_9BACT S-adenosylmethionine:tRNA ribosyltransferase-isomerase OS=Prevotella buccae ATCC 33574 OX=873513 GN=queA PE=3 SV=1
MKLSQFKFKLSEEQIALYPHTAEHVITRKDGTQSTFHVTRREESRLMVLHKKSERIDMYKTDETGEPLKDAEGRPQYIQFRDIVDYFGDGDTFIFNDTKVFPARLYGTKEKTDAKIEVFLLRELNEEMRLWDVLVEPARKIRIGNKLFFDDTSTMVAEVIDNTTSRGRTLRFLYDSPHDEFKQNLYALGESPLPRYIIDRRESHHATPEDMDDFQTVFAKNEGAVTAPATGLHFSRELLKRMEIYGINFAYITLHCGLGNFHDIEVEDLTKHKMDSEQMKISAEACKVVNEAKRAGNHICAVGTSVVKATETAVGTDGMLKEFDGWTNKFIFPPYDFGLADCMVANFYHPLSTLLMSTAAFGGYDMVMECYNRAAADGYKFGCFGDSLLILDD

SEQ ID NO: 70570 - protein, 388 aa, Prevotella buccalis
  REGION 1..388: note = tr|A0A2N6QN71|A0A2N6QN71_9BACT S-adenosylmethionine:tRNA ribosyltransferase-isomerase; OS = Prevotella buccalis OX=28127 GN=queA PE=3 SV=1
MKLSQFKFNLPEELVALYPHSVYHEVVDDKGEKHISRMTRRDESRLMVLHRKSQTIDMFQKNKKGKPVEGQYLEFRHVLDYFDEGDTFIFNDTKVFPARLYGTKEKTDAKIEVFLLRELNREMRLWDVLVEPARKIRIGNKLFFDESGTMVAEVIDNTTSRGRTLRFLYDCPHEEFKRELFALGEAPLPRYILNQREVPHADAHDMEDFQTIFAKNEGAVTAAATGLHVSREMMKRMEIKGIHFAYITLHCGLSAFNNIEVEDLTKHKMDSEPMKIDAQACKIVNKAKQEGHRVCAVGTSVVKATETAVGTDGLLKEYDGWTSKFIFPPYDFGLADTMIANFYHSMSPLLMETAAFGGYELVMEAYNLAVKHGYKFGCYGDSLLILDD

SEQ ID NO: 70571 - protein, 432 aa, Prevotella buccalis
  REGION 1..432: note = tr|A0A2N6QRN2|A0A2N6QRN2_9BACT S-adenosylmethionine:tRNA ribosyltransferase-isomerase; OS = Prevotella buccalis OX=28127 GN=CJ231_04650 PE=3 SV=1
MDTKHIHISDYQYDLPDDRIAKFPIAQRDHSKLLLYNQGKVGEDVFYHLKDHLPQGALMIFNNTKVIQARMYFMKSTGARIEVFLMEPAAPTDYEQIFQTRGHCAWYCMIGNLKKWKEGPLTRSYEIKGRSLTLTITRKSQHNENHAEGNLLLSAPATHHWIEFDWDAEDISFSEILEDMGELPIPPYLNRETQESDKTTYQTVYSKIKGSVAAPTAGLHFTNDVLKSLDEHGIDREEVTLHVGAGTFKPVKSQEIEDHDMHTEYICVHQQTLEKLLRHDASAIAVGTTSVRTLESLYYMGVYLSARPDASEAELHVNQWAPYERMREDGTTEQLDGGLIDGITPMQAIQNVLDYLKRNQLGALHSSTQIIIAPGYEYKIVKMLITNFHQPQSTLLLLVSAFVHGDWRKIYDYALAHDFRFLSYGDSSLLIP

SEQ ID NO: 70572 - protein, 396 aa, unidentified
  source 1..396: note = Prevotella colorans
  REGION 1..396: note = tr|A0A2U0U4R2|A0A2U0U4R2_9BACT S-adenosylmethionine:tRNA ribosyltransferase-isomerase; OS = Prevotella colorans OX=1703337 GN=C7379_11550 PE=3 SV=1
MKLSQFKFKLPQELVALYPHSFEREYTNDDGTKGSFRVTRRDESRLMVLHRSTGEIEMYRKDAKGKPIEGDYLDFRNILDYFDEHDTFILNDTKVFPARLYGTKEKTDAKIEVFVLRELNEETHLWDVLVEPARKIRIGNKLFFDEVGTMVAEVYDNTTSRGRSLRFLYDCSHEQFKKDLFALGEPPLPAYILNGRPADPAMKDMHVRSHALPEDAENFQCVFAKNVGAVTAPATGLHFSRELMKRMEIKGINAAYITLHCGLGNFTPIEVEDLTKHKMDSEQMIIDKKACDIVNKTKMAGHRVCAVGTSVVKATETAVGTDGLLKEYDGWTSKFIFPSYDFGLADSMVANFYHPESILLMSTAAFGGYEQVMECYRLAVEHGYKFGCFGDSLLIV

SEQ ID NO: 70573 - protein, 421 aa, unidentified
  source 1..421: note = Prevotella colorans
  REGION 1..421: note = tr|A0A2U0U1J3|A0A2U0U1J3_9BACT S-adenosylmethionine:tRNA ribosyltransferase-isomerase; OS = Prevotella colorans OX=1703337 GN=queA PE=3 SV=1
MDTKNIHISDFNYELPDERIAKYPLPQRDHSKLLVYDRGEVSDDVFRNLPDHLPKGSLMVFNNTRVIQARIHFRKDTGALIEVFLMEPTLPADYEQMFQTTHKCSWLCMVGNLKKWKEGALNRSFEIKGHSFTLSVTMNRDKTAERVGGSNYWIDFEWDNNDINFADILESVGELPIPPYLNRETQESDKTTYQTVYSKIKGSVAAPTAGLHFTDEVLRRIDAKGIVRDELTLHVGAGTFRPVKSDTIDGHNMHSEYVVVHRHTLERLLNHDCRAIAVGTTSVRTLESLYYMGAKLAANPNLSEEELHVNQWEPYDLPHDAEGLAIVNGKSLPVRQAIQNILDYLDRDKIDALHSGTQIIIAPGYTYKVVKMLITNFHQPQSTLLLLVSAFLKGDWRKVYDYALGHDFRFLSYGDSSLLIP

SEQ ID NO: 70574 - protein, 424 aa, Prevotella copri
  REGION 1..424: note = tr|D1P9Y7|D1P9Y7_9BACT S-adenosylmethionine:tRNA ribosyltransferase-isomerase OS=Prevotella copri DSM 18205; OX = 537011 GN=queA PE=3 SV=1
MDTKHIKISDYNYDLPDERIAKFPIAQRDHSKLLVYKHGEVSDDVFHHLPTYLPQGALMIFNNTKVIQARLHFRKETGALIEVFLMEPAEPTDYELMFQTTGHCSWLCMIGNLKKWKEGSLKRDFEIKGHKLTLSATMRRGDALGSEAQKMVAKGGGTNYWVDFDWDNDKVSFAEILEAVGELPIPPYLNRKTEESDKTTYQTVYSKVKGSVAAPTAGLHFTDAVLKDLDAHGIDREEVTLHVGAGTFKPVKSLEIEGHQMHTEYIVVHRRSLEKLIKHECRVIAVGTTSVRTIESLYYMGVHLLKHPEANEEDLHVNQWDPYELSEDGNLVDGITPMQAIQAIIDYLDRNGLEALHSSTQIIIAPGYQYKIVKMLVTNFHQPQSTLLLLVSAFLKGDWKKVYDYALSHDFRFLSYGDSSLLIP

SEQ ID NO: 70575 - protein, 394 aa, Prevotella copri
  REGION 1..394: note = tr|A0A3E4SBA8|A0A3E4SBA8_9BACT S-adenosylmethionine:tRNA ribosyltransferase-isomerase; OS = Prevotella copri OX=165179 GN=DW064_07215 PE=3 SV=1
MKLSQFNFKLPKDQVALYPHKAKHVVKTASGERTFEITRRDESRLMVLHKKSETIEMYKKDENGKDMVDADGNPVFLQFKDIVNYFEEGDTFIFNNTKVFPARLYGTKEKTDAKIEVFLLRELNPEMRLWDVLVEPARKIRIGNKLFFDDVNEMVAEVIDNTTSRGRTLRFLYDEDGNHDVFKRSLFALGEAPLPRYVIDAREDHHATEDDMDDFQCVFAEVEGAVTAPATGLHFSRELMKRMEINGINEAYITLHCGLGNFHDIEVEDLTKHKMDSEQMMISQEACDLVNKTKLAGHRVCAIGTSVMKATETAVGTDGMMKAFDGWTNKFIFPPYDFGLADCAVVNFYHPESTLMMSTAAFGGYELVYEAYKMAVKNGYMFGCYGDSLLMLPD

SEQ ID NO: 70576 - protein, 423 aa, Prevotella corporis
  REGION 1..423: note = tr|A0A133Q1Z3|A0A133Q1Z3_9BACT S-adenosylmethionine:tRNA ribosyltransferase-isomerase; OS = Prevotella corporis OX=28128 GN=HMPREF3226_01834 PE=3; SV = 1
MIQDTKHIKISDYSYQLPDERIAKFPITQRDHSKLLLYKHGNVSEDVFYNLNKHLPKGALMVFNNTKVIQARLHFRKETGALIEIFLMEPANPTDYELMFQTNGNCSWLCMIGNLKKWKEGVLSRAFEINGKKLVLSATRQETKNTATGGGTNHWIDFTWDNTNVSFAEILEAVGELPIPPYLNRDTQESDKTTYQTVYSKIKGSVAAPTAGLHFTDAVLKSLDDSGIVRDELTLHVGAGTFKPVKSTEIAGHSMHTEYVVVHRHTLERLLEHDCNAIAVGTTSVRTLESLYYMGVKLETRPDAQETDLHVSQWEPYEYAHDENGLVYVNGEIISVTKAIANLLNYLKRDELEGLHSSTQIIIAPGYKYKIVKMLITNFHQPQSTLLLLVSAFLNGDWRKVYDYALSHDFRFLSYGDSSLLIP

SEQ ID NO: 70577 - protein, 394 aa, Prevotella corporis
  REGION 1..394: note = tr|A0A133QQJ7|A0A133QQJ7_9BACT S-adenosylmethionine:tRNA ribosyltransferase-isomerase; OS = Prevotella corporis OX=28128 GN=HMPREF3226_00094 PE=3; SV = 1
MKLSQFKFDLPDDQVALYPHSSERVLNRADGTSQVFKITRRDESRLMVLHRKSGTIDMFKNKVKGKPKEEDFIRFKDVLDYFNEGDAFILNDTKVFPARLYGTKEKTDAKIEVFLLRELNQEMRLWDVLVEPARKIRIGNKLFFDESGTMVAEVIDNTTSRGRTLRFLYDCPHDEFKQELYALGEAPLPRYIIDNRPKAEGEDFAHADDEDMEYFQSVFADKEGAVTAPGTNIHFSEHMMKMMEIKGIKPAFITLHCGLGNFHDIEVEDLTKHKMDSEEMHITAEACKVVNETKEAGHHVCAVGASVVKATESAVGTDGFLKEYDGWTNKFIFPPYDFGLADSMLVNFYHPYSTLLMITAAFGGYDLVMEAYDKAVKGGYKFGCFGDSLLILND

SEQ ID NO: 70578 - protein, 397 aa, Prevotella dentalis
  REGION 1..397: note = tr|F9D458|F9D458_PREDD S-adenosylmethionine:tRNA ribosyltransferase-isomerase OS=Prevotella dentalis (strain ATCC 49559 / DSM 3688 / JCM 13448 / NCTC 12043 / ES 2772 ) OX=908937 GN=queA PE=3 SV=1
MKLSQFKFKLPESQVALYPHSFEREFTNDDGTKGSFRVTRRDEARLMVLHRTTGEIELFHKDAKGNPVEGQYLDFRNVLDYFDEGDTFILNDTKVFPARLYGTKEKTDAKIEVFILRELNEETHLWDVLVEPARKIRIGNKLFFDEVGTMVAEVYDNTTSRGRSLRFLYDCPHEQFKRDLFALGEAPLPAYILNGRPEDPKMSGMHVRSHATAEDMENFQCVFARNEGAVTAPATGLHFSRELLKRMEIKGINAAFITLHCGLGNFTPIEVEDLTKHKMDSEQMMIGREACDLVNRTKRAGRHVCAVGTSVVKATETAVGTDGLLKEYDGWTSKFIFPPYDFGLADTMIANFYHPESTLMMSTAAFGGYDNVMRCYDLAVKHGYMFGCFGDSLLIVD

SEQ ID NO: 70579 - protein, 421 aa, Prevotella dentalis
  REGION 1..421: note = tr|F9D6M7|F9D6M7_PREDD S-adenosylmethionine:tRNA ribosyltransferase-isomerase OS=Prevotella dentalis (strain ATCC 49559 / DSM 3688 / JCM 13448 / NCTC 12043 / ES 2772 ) OX=908937 GN=queA2 PE=3 SV=1
MDTKHIHITDYQYNLPDERIAKFPLARRDHSKLLVYRHGELTDDVFCQLPHYLPQGALMVFNNTRVIQARMHFRKETGALIEVFLMEPAQPADYEQMFQTTGRCSWLCMVGNLKKWKEGPLRRDFDVKGRHLTLTATIDRDRAAQTSGGTNYWVDFGWDNAQVSFAEILETVGELPIPPYLNRATEESDKTTYQTVYSKIKGSVAAPTAGLHFTDDVLAALDAHGIVRDEVTLHVGAGTFKPVKSEEIESHSMHTEYIVVHRHTFERLLAHGCRAIAVGTTSVRTLESLYYMGVKLLLRPGAAEADLHVGQWEPYDLPHNADGLVMAGDEPVSPRRAIQAILDYLDRDGLEALHSSTQIIIAPGYAYKMVQMLVTNFHQPQSTLLLLVSAFLGGDWRRVYDYALAHDFRFLSYGDSSLLIP

SEQ ID NO: 70580 - protein, 436 aa, Prevotella denticola
  REGION 1..436: note = tr|F2KZK4|F2KZK4_PREDF S-adenosylmethionine:tRNA ribosyltransferase-isomerase OS=Prevotella denticola (strain F0289) OX=767031 GN=HMPREF9137_1252 PE=3 SV=1
MRHSVPSYQYKKIMSEDTKHICISDYNYPLPDARIAKFPLSERDHSKLLLYKHGEVSEDKFYQLPEYLPKGALMVFNNTKVIQARMHFRKETGALIEVFLMEPAQPTDYELMFQTNHACAWLCMVGNLKKWKEGALRRTFEIKGHKLTLTATMDRSKVQEQAGGTNHWVNFEWDNTNVSFAEILEAVGELPIPPYLNRATEESDKETYQTVYSKIKGSVAAPTAGLHFTDKVLEALDEHGIDREELTLHVGAGTFKPVKSHEIEGHSMHTEFIVVRRQTLEKLLKHGCRAIAVGTTSVRTLESLYYMGVKLVSDPETAEKDLHVNQWEPYDLPHNAEGLVETDGKVITVEDAVRHLLAYLDRDGLNALHSSTQIIIAPGYTYKLVKALVTNFHQPQSTLLLLVSAFVKGDWRKIYDYALGHDFRFLSYGDSSLLIP

SEQ ID NO: 70581 - protein, 423 aa, Prevotella denticola
  REGION 1..423: note = tr|A0A347AX28|A0A347AX28_9BACT S-adenosylmethionine:tRNA ribosyltransferase-isomerase; OS = Prevotella denticola OX=28129 GN=DYJ25_00830 PE=3 SV=1
MSEDTKHICISDYNYPLPDARIAKFPLSERDHSKLLLYKHGEVSEDKFYRLPEYLPKGALMVFNNTKVIQARMHFRKETGALIEVFLMEPAQPTDYELMFQTNHACAWLCMVGNLKKWKEGALRRAFKIKGHKLTLTATMDRSKVQEQAGGTNHWINFEWDNTNVSFAEILEAVGELPIPPYLNRATEESDKETYQTVYSKIKGSVAAPTAGLHFTEKVLEALDEHGIDREELTLHVGAGTFKPVKSHEIEGHSMHTEFIVVRRQTLEKLLKHGCRAIAVGTTSVRTLESLYYMGVKLVSDPETAEKDLHVNQWEPYDLPHNAEGLVETDGKVITVEDAVRHLLAYLDRDGLNALHSSTQIIIAPGYTYKLVKALVTNFHQPQSTLLLLVSAFVKGDWRKIYDYALGHDFRFLSYGDSSLLIP

SEQ ID NO: 70582 - protein, 430 aa, Prevotella disiens
  REGION 1..430: note = tr|U2J688|U2J688_9BACT S-adenosylmethionine:tRNA ribosyltransferase-isomerase OS=Prevotella disiens JCM 6334 = ATCC 29426 OX=1235811 GN=HMPREF0653_01922 PE=3 SV=1
MFKIHKPMLDETKHIKISDYDYPLPDERIAKFPLNQRDQSKLLLYKHGEVSEDVFCNLPKYLPNGALMVFNNTKVIQARMHFRKETGALIEIFLMEPAQPTDYELMFQTNSECSWLCMIGNLKKWKEGELRRSFEINGNKLVLTASVDRSKASDLAGGTNHWVDFKWDNAKVSFAEILEAVGELPIPPYLNRETQESDKETYQTIYSKIKGSVAAPTAGLHFTDAVLEQLDKAGILRDELTLHVGAGTFKPVKSSEIEGHNMHTEYIVVHRHTLENLLSHDCSAIAVGTTSVRTLESLYYMGVKLERNANATEDDLHVNQWEPYAEDVTEDGFIKVNGQVVTVQRAIQNLLDYLKKDDLEALHSSTQIIIAPGFQYKIVKMLVTNFHQPQSTLLLLVSAFLHGDWHKVYDYALQHDFRFLSYGDSSLLIP

SEQ ID NO: 70583 - protein, 423 aa, Prevotella disiens
  REGION 1..423: note = tr|A0A096AR94|A0A096AR94_9BACT S-adenosylmethionine:tRNA ribosyltransferase-isomerase; OS = Prevotella disiens DNF00882 OX=1401075; GN = HMPREF0654_04570 PE=3 SV=1
MLDETKHIKISDYDYPLPDERIAKFPLNQRDQSKLLLYKHGEVSEDVFCNLPKYLPNGALMVFNNTKVIQARMHFRKETGALIEIFLMEPAQPTDYELMFQTNSECSWLCMIGNLKKWKEGELRRSFEINGNKLVLTVSVDRSKASDLAGGTNHWVDFKWDNAKVSFAEILEAVGELPIPPYLNRETQESDKETYQTVYSKIKGSVAAPTAGLHFTDAVLAQLDKAGILRDELTLHVGAGTFKPVKSSEIEGHNMHTEYIVVHRHTLENLLSHDCSAIAVGTTSVRTLESLYYMGVKLERNANATEDDLHVNQWEPYDEDVTEDGFIKVNGQVVTAQRAIQNLLDYLKKDDLEALHSSTQIIIAPGFQYKIVKMLVTNFHQPQSTLLLLVSAFLHGDWHKVYDYALQHDFRFLSYGDSSLLIP

SEQ ID NO: 70584 - protein, 416 aa, Prevotella enoeca
  REGION 1..416: note = tr|A0A0S2KM12|A0A0S2KM12_9BACT S-adenosylmethionine:tRNA ribosyltransferase-isomerase; OS = Prevotella enoeca OX=76123 GN=AS203_07890 PE=3 SV=1
MTETKHIKISDYSYPLPENRIAKFPIPQRDHSKLLIYQHGNVSEDVFYHLPEYLPQGALMVFNNTKVIQARLHFRKETGALIEVFLLEPAQPTDYELMFQTTSHCAWLCMIGNLKKWKNGVLKRDFEINGHRLTLTATRQSPEMLSITGQTSGETYHWVDFQWDNDNVSFAEILEEVGELPIPPYLNRETQERDKTTYQTVYSKIKGSVAAPTAGLHFTDAVLAALDKRGIDREELTLHVGAGTFKPVKSEEIEGHRMHTEYICVHRQTLEKLLRHSGEAIAVGTTSVRTLESLYYIGLKLMRHPDASEAELHVNQWEPYEQPAQQVTPTDAIRAVLDYLDRNHLPALHTSTQIIIAPGYDYKIVKMLVTNFHQPQSTLLLLVSAFVKGDWRKIYDYALGHDFRFLSYGDSSLLIP

SEQ ID NO: 70585 - protein, 393 aa, Prevotella enoeca
  REGION 1..393: note = tr|A0A0S2KLT3|A0A0S2KLT3_9BACT S-adenosylmethionine:tRNA ribosyltransferase-isomerase; OS = Prevotella enoeca OX=76123 GN=AS203_09275 PE=3 SV=1
MKLSQFKFKLPEEQIALYPHSIIHSVTNDDGLEESVRVTRRDECRLMVLHRKSQTIDMYKKDKKGKPIEGEFLDFRNVLDYFDENDTFVFNDTKVFPARLYGMKEKTDSKIEVFLLRELNAEMRLWDVLVEPARKIRIGNKLFFDDSGTMVAEVIDNTTSRGRTLRFLYDCPHDEFKRELFALGAAPLPHYIIDHKDADGNLDRPATKEDLEDFQTIYAKNEGAVTAPVSGLHFSREMLKRMEIRGINFAYITLHCGLGNFRSIEVEDLTKHKMDSEQMIISAEACDIVNRTKAAGHHICAVGTSMVKAMETAAGTDGQLKEYDGWTNRFIFPPYDFNIADTMIANFYHPMSTLLMSTAAFGGYDLVMKAYELAVENGYKFGCYGDALLILDD

SEQ ID NO: 70586 - protein, 424 aa, Prevotella fusca
  REGION 1..424: note = tr|A0A0K1NM56|A0A0K1NM56_9BACT S-adenosylmethionine:tRNA ribosyltransferase-isomerase; OS = Prevotella fusca JCM 17724 OX=1236517 GN=queA PE=3 SV=1
MSKDTKHICISDYNYSLPDERIAKFPLAERDQSKLLLYKHGEVSEDTFYNLPEHLPLGALMVFNNTKVIQARMHFRKETGALIEVFLMEPAEPTDYELMFQTNHECAWLCMVGNLKKWKEGTLKRAFEIKGNRLTLTATMNRSKMQEQAGGTNHWINFEWDNTNVSFAEILEAVGELPIPPYLNRATEESDKKTYQTVYSKIKGSVAAPTAGLHFTDRVLKALDEHGIDREELTLHVGAGTFKPVKSREIEGHSMHTEFIVVRRQTLEKLLAHDCRAIAVGTTSVRTLESLYYMGVKLVLDPESTEKDLHVNQWEPYDLPHNADGLVEVDGRVITAEESIRHLLAYLDKDGFEMLHSSTQIIIAPGYSYKIIKALVTNFHQPQSTLLLLVSAFVKGGNWHKIYDYALSHGFRFLSYGDSSLLIP

SEQ ID NO: 70587 - protein, 394 aa, Prevotella fusca
  REGION 1..394: note = tr|A0A0K1NIQ6|A0A0K1NIQ6_9BACT S-adenosylmethionine:tRNA ribosyltransferase-isomerase; OS = Prevotella fusca JCM 17724 OX=1236517 GN=ADJ77_03870; PE = 3 SV=1
MKLSQFKFNLPKEQVALYPHSSERVLTRTDGSTQTFTVTRRDEGRLMVLHRKSGKIEMFKGEVNGEPKEEDYIRFKDVFNYFDEGDAFIFNDTKVFPARLYGTKEKTDAKIEVFLLRELNQEMRLWDVLVEPARKIRIGNKLFFDESGTMVAEVIDNTTSRGRTLRFLYDCPHDEFKRELFALGEAPLPRYIIDNRPKEEGEEFAHATADDMEHFQSVFAKNEGAVSAPGTNIHFSEHMMKMMDIRGIKKAFITLHCGLGNFHDIEVEDLTKHKMDSEEMHINADACRIANGAKQAGHRLCAVGASVVKATETAVGTDGMLKEYDGWTNEFIFPPYNFGFADSMLVNFYHPYSTLLMETAAFGGYDLVMEAYDKAVENGYMFGCFGDSLLILND

SEQ ID NO: 70588 - protein, 423 aa, Prevotella histicola
  REGION 1..423: note = tr|A0A096BA43|A0A096BA43_9BACT S-adenosylmethionine:tRNA ribosyltransferase-isomerase; OS = Prevotella histicola JCM 15637 = DNF00424 OX=1236504; GN = HMPREF2132_01535 PE= 3 SV=1
MSKDTKHICISDYNYPLPDERIAKFPLAERDHSKLLLYKHGVITEDVFYNLPNYLPKGALMVFNNTKVIQARMHFRKDTGALIEVFLMEPAQPTDYELMFQTNHQCAWFCMVGNLKKWKEGSLQREFEIKGHRLTLTATLDRVRSQEHGGGTNHWITFVWDNENISFAEILEVVGELPIPPYLNRATEESDKETYQTVYSKIKGSVAAPTAGLHFTEKVLSALDAHGVDREELTLHVGAGTFKPVKSHEIEGHNMHTEFIVVRRQTLEKLLKHNCKAIAIGTTSVRTLESLYYMGVKLVTNPDASENKLHVNQWEPYDLPHNQEGLVEVDGNVITVEDSIRRLLDYLEREDLMSLHSSTQIIIAPGYTYKIVNALVTNFHQPQSTLLLLVSAFVKGDWRKIYDYAIGHDFRFLSYGDSSLLIP

SEQ ID NO: 70589 - protein, 394 aa, Prevotella histicola
  REGION 1..394: note = tr|A0A095YWV8|A0A095YWV8_9BACT S-adenosylmethionine:tRNA ribosyltransferase-isomerase; OS = Prevotella histicola JCM 15637 = DNF00424 OX=1236504; GN = HMPREF2132_06905 PE= 3 SV=1
MKLSQFKFNLPKDQVALYPHSSKRVLTRTDGSTQTFTVTRRDEGRLMVLHRKSGTIDMFKNEVKGEPKEEDYIRFKDVFDYFDEGDAFIFNDTKVFPARLYGTKEKTDAKIEVFLLRELNQEMRLWDVLVEPARKIRIGNKLFFDESGTMVAEVIDNTTSRGRTLRFLYDCPHEEFKRELFALGEAPLPRYIIDNRPKEEGEEFAHATAEDMENFQSVFARNEGAVSAPGTNIHFSEHMMKMMDIRGIHKSFITLHCGLGNFHDIEVEDLTKHKMDSEEMHINAEACRIANEAKQSGHRLCAVGASVVKATETAVGTDGMLKEYDGWTNEFIFPPYKFGFADSMLVNFYHPYSTLLMETAAFGGYELVMEAYDKAVKNGYMFGCFGDSLLILND

SEQ ID NO: 70590 - protein, 424 aa, Prevotella intermedia
  REGION 1..424: note = tr|A0A1P8JGN8|A0A1P8JGN8_PREIN S-adenosylmethionine:tRNA ribosyltransferase-isomerase; OS = Prevotella intermedia ATCC 25611 = DSM 20706 OX=1122984; GN = BWX39_09300 PE=3SV=1
MLEKTRHIKISDYDYPLPDERIAKFPLAQRDHSKLLLYKHGEVGEDVFCNLPTHLPKGALMVFNNTRVIQARMHFRKETGALIEIFLMEPAQPTDYELMFQTNARCSWLCMIGNLKKWKEGTLKRSFEINGNTLELTATVDRTKANAAAAGGTNHWVDFAWDNSKVSFAEILEAVGELPIPPYLNRNTQESDKQTYQTVYSKIKGSVAAPTAGLHFTNKVLAALDEAGIVRDELTLHVGAGTFKPVKSTEIEGHNMHTEYVVVHRHTLENLLSHGCSAIAVGTTSVRTLESLYYMGVKLERNPQAAEDELHVCQWEPYEQEHNADGLVIVNGTAVTVERALQNLLAYLDSNDLSALHSSTQIIIAPGFNYKIVKMLVTNFHQPQSTLLLLVSAFLKGDWHKVYDYALANNFRFLSYGDSSLLIP

SEQ ID NO: 70591 - protein, 395 aa, Prevotella intermedia
  REGION 1..395: note = tr|A0A0D9NJS4|A0A0D9NJS4_PREIN S-adenosylmethionine:tRNA ribosyltransferase-isomerase; OS = Prevotella intermedia ZT OX=1347790 GN=M573_102059 PE=3; SV = 1
MKLSQFKFNLPNEQVALYPHSSERVLNRADGTSQVFKVTRRDEARLMVVHKKSGTIDMYNNKKIKGEPKEEDYIRFKDVVNYFDEGDTFIFNDTKVFPARLYGTKEKTDAKIEVFLLRELNQEMRLWDVLVEPARKIRIGNKLFFDESGSMVAEVIDNTTSRGRTLRFLYDCSHEEFKRELYALGEAPLPRYIIDNRPKGADEDFAHADADDLENFQTVFAKHEGAVTAPGTNLHFSEHLMKMMEIKGIQAAYITLHCGLGNFHDIEVEDLTKHKMDSEEMHISAEACKIVNETKAANHRVCAVGASVVKATETAVGTDGMLKEYDGWTNKFIFPPYDFGLADSMLVNFYHPYSTLLMETAAFGGYDLIMEAYDKAVKAGYKFGCFGDALLILND

SEQ ID NO: 70592 - protein, 423 aa, unidentified
  source 1..423: note = Prevotella jejuni
  REGION 1..423: note = tr|A0A2K9HB39|A0A2K9HB39_9BACT S-adenosylmethionine:tRNA ribosyltransferase-isomerase; OS = Prevotella jejuni OX=1177574 GN=CRM71_10430 PE=3 SV=1
MSEDTKHICITDYNYPLPDERIAKFPLTERDHSKLLLYKHGEVSENIFYNLPEYLPKGALMVFNNTKVIQARMHFRKETGALIEVFLMEPAQPTDYELMFQTNHECAWLCMVGNLKKWKEGALKRAFEIKGHKLTLTATMDRSKVHEQAGGTNHWIHFEWDNANISFAEILEAVGELPIPPYLNRATEESDKETYQTVYSKIKGSVAAPTAGLHFTDKVLNALDEYGIDREELTLHVGAGTFKPVKSHEIEGHSMHTEYVVVRRQTLEKLLQHNCNAVAVGTTSVRTLESLYYMGVKLVSAPDMAEKDLHVNQWEPYDLPHNEEGLVEVNGKAVSVDEAIRNLLTYLDRDGLNALHSSTQIIIAPGYSYKIVKALVTNFHQPQSTLLLLVSAFLKGDWRKVYDYALSHDFRFLSYGDSSLLIP

SEQ ID NO: 70593 - protein, 394 aa, unidentified
  source 1..394: note = Prevotella jejuni
  REGION 1..394: note = tr|A0A2K9H9G6|A0A2K9H9G6_9BACT S-adenosylmethionine:tRNA ribosyltransferase-isomerase; OS = Prevotella jejuni OX=1177574 GN=CRM71_02735 PE=3 SV=1
MKLSQFKFNLPKEQVALYPHSSERVLTRTDGSTQTFTVTRRDEGRLMVLHRKSGKIDMFKADIDGEPTEEDYIRFKDVFNYFDEGDAFIFNDTKVFPARLYGTKEKTDAKIEVFLLRELNQEMRLWDVLVEPARKIRIGNKLFFDESGTMVAEVIDNTTSRGRTLRFLYDCPHDEFKRELFALGEAPLPRYVIDNRPKEDGEEFAHATADDMENFQSVFAKHEGAVSAPGTNIHFSEHMMKMMDIKGIKKAFITLHCGLGTFHDIEVEDLTKHKMDSEEMHINADACRIANGAKQAGHHICAVGASVVKATETAVGTDGMIKEYDGWTNEFIFPPYNFGFADSMLVNFYHPYSTLLMETAAFGGYDLVMEAYDKAVRNGYMFGCFGDSLLILND

SEQ ID NO: 70594 - protein, 407 aa, Prevotella loescheii
  REGION 1..407: note = tr|A0A069QGG4|A0A069QGG4_PRELO S-adenosylmethionine:tRNA ribosyltransferase-isomerase; OS = Prevotella loescheii DSM 19665 = JCM 12249 = ATCC 15930; OX = 1122985 GN=HMPREF 1991_02033 PE=3 SV=1
MNTKHIRIKDYNYDLPDKRIAKFPLPERDKSKLLVYNHGEVSQDVFSNITHYLPQGALMVFNNTKVIQARLHFRKETGSLIEIFLLEPALPADYEQMFQTTGACSWYCLVGNLKKWKGGPLTTTVEMPGQPSVQLSAERDMSCETALKIDFKWTGDDKLSFAELIDKVGELPIPPYLNRNTQESDKTTYQTVYSKIKGSVAAPTAGLHFTQKVLADIDQHGIDREELTLHVGAGTFKPVKSEEIEGHAMHTEYVCIRRSTLEKLLQHNCEAVAVGTTSVRTLESLYYMGCKVKANPNVSLDQLHVNQWEPYASTTTTITPAEAIGELIAYMDRNNLPSLHSSTQIIIAPGYQYKIVKRLITNFHQPQSTLLLLVSAFVGGDWKSIYRYALDNDFRFLSYGDSSILIP

SEQ ID NO: 70595 - protein, 388 aa, Prevotella loescheii
  REGION 1..388: note = tr|A0A069QKL4|A0A069QKL4_PRELO S-adenosylmethionine:tRNA ribosyltransferase-isomerase; OS = Prevotella loescheii DSM 19665 = JCM 12249 = ATCC 15930; OX = 1122985 GN=HMPREF 1991_00723 PE=3 SV=1
MKLSQFNFKLPQELIALYPHSVYHEIENEKGEKEMSRLTRRDECRLMVLHKKSNTIDLFKKDKKGKPIKGEFIQFRDIIDYFDEGDTFIFNDTKVFPARLYGMKEKTDAKIEVFLLRELNQEMRLWDVLVEPARKIRIGNKLFFDDSGTMVAEVIDNTTSRGRTLRFLYDCDHDEFKRSLFALGESPLPRYIIDARENHHGTEEDMEDFQTIYAANEGAVTAPATGLHFSRELLKRMEIRGINSAAITLHCGLGNFHDIEVEDLTKHKVDSESMHIGSEACAIVNKAKSEGKHICAVGTSVVKATETAVGTDGMLKEYSGWTNRFIFPPYDFGLADTMVANFYHPLSTLLMSTAAFGGYDLVMEAYRLAVENEYKFGCFGDALLILND

SEQ ID NO: 70596 - protein, 388 aa, Prevotella maculosa
  REGION 1..388: note = tr|H1HM90|H1HM90_9BACT S-adenosylmethionine:tRNA ribosyltransferase-isomerase OS=Prevotella maculosa OT 289; OX = 999422 GN=HMPREF9944_01344 PE=3 SV=1
MKLSQFKFNLEQEQVALYPHSFTRTFKNEDGTTDSFQVTRQDECRLMVLHKRSGKIDMFKKDAEGNPIEGAFLDFRNILDYFDEGDTFIFNDTKVFPARLYGTKEKTDAKIEVFLLRELNPEMRLWDVLVEPARKIRIGNKLFFDETGTMVAEVIDNTTSRGRTLRFLYDCDHDEFKRELFALGEAPLPRYVIDNRKEPHATATDLADFQTVFAKHEGAVTAPATGLHFSRELLKRMEIRGIHDAYITLHCGLGNFNPIEVEDLTKHKIDSEKMVISAKACARVNQTKRERHHVLAVGVSVVKATETAVGTDGMLKEYDGWTNKFIFPPYDFGLADSMVANFYHPLSTLLMATAAFGGYDAVMECYRLASENGYMFGCYGDALLILDD

SEQ ID NO: 70597 - protein, 416 aa, Prevotella maculosa
  REGION 1..416: note = tr|H1HIR8|H1HIR8_9BACT S-adenosylmethionine:tRNA ribosyltransferase-isomerase OS=Prevotella maculosa OT 289; OX = 999422 GN=HMPREF9944_00062 PE=3 SV=1
MDTKHIKTGDYDYALPDERIAKFPLARRDHSKLLIYEHGKVYEDIFYNLPDHLPKHALMVFNNTRVIQARMHFRKETGALIEVFLMEPAAPTDYEQMFQTKGKCSWLCMIGNLKKWKEGALKHEFAIKGEPLTLSVTMNREKSVHHATGTNYRVDFTWDNTNISFAEILEAVGELPIPPYLNRETQESDKITYQTVYSKIKGSVAAPTAGLHFTDEVLKAIDNRAIEREEVTLHVGAGTFKPVKSKEIEGHEMHTEYVVVHRHTLESLLKHDCKAIAVGTTSVRTLESLYYIGVKLASNPDATEEELHVNQWEPYEDEREGKTVKYIMPTEAIQNIIDWLDRSGTEVLHGSTQIIIAPGYEYKIVKMLITNFHQPQSTLLLLVSAFVNGDWKKIYDYALHNGFRFLSYGDSSLLIP

SEQ ID NO: 70598 - protein, 439 aa, Prevotella marshii
  REGION 1..439: note = tr|E0NQI6|E0NQI6_9BACT S-adenosylmethionine:tRNA ribosyltransferase-isomerase OS=Prevotella marshii DSM 16973 = JCM 13450 OX=862515 GN=queA PE=3 SV=1
MFRNGSTGKKWKVENRLPITYRHRDYSNRKRYYTTKGFHIYMKLSQFNFKLTDDKVALYPHTDEHRVTNAEGKKSVFKVKRRDECKLMVLHRKSQKIDMYKTDKDGKPLKDKKKKPVFLDFRNILDYFDEGDAFIFNDTKVFPARLYGTKEKTDAKIEVFLLRELNAEMRLWDVLVEPARKIRIGNKLFFDDSGTMVAEVIDNTTSRGRTLRFLYDCPHEEFKRELYALGEAPLPRYIIDHKDKDGNPDRPTLEEDFEDFQCVFAKNEGAVTAPATGLHFSRELMKRMEIKGINFAFITLHCGLGNFNNIEVEDLTKHKMESEQMYIGAEACRTVNEAKKTGHRICAVGSSVIKATETAVGPDGQLKEYDGWTSKFIFPPYEFGLADTMVANFYHPLSTLLMATAAFGGYDLVMEAYDLALKNDYKFGCYGDAMLILND

SEQ ID NO: 70599 - protein, 406 aa, Prevotella marshii
  REGION 1..406: note = tr|E0NQN3|E0NQN3_9BACT S-adenosylmethionine:tRNA ribosyltransferase-isomerase OS=Prevotella marshii DSM 16973 = JCM 13450 OX=862515 GN=queA PE=3 SV=1
MEMDTKHIRIADYNYLLPEERIAKYPVTPRDHSKLLVYRHGAITEEKFYRLPQLLPQGALMVYNNTKVIQARIHFRKDTGAQIEVFLLEPLTPADYELMFQSRRRCTWLCLVGNLKKWKEGTLTRTLSIQGEPFTLTATREEAMRSGHRITFEWDNPRVSFAEILEAVGELPIPPYLNRATQESDKQTYQTVYSKIKGSVAAPTAGLHFTNDVLQALDTAGIEREEVTLHVGAGTFKPVKAEEIEGHEMHTEYICVHQETLEKLIMHKGHAIAVGTTSVRTLESLYYIGLKLKANPQLSEEELHVNQWEPYEQEATLTPVEAIIRVLDYLYRNQLKTLHTSTQIIIAPGYEYKIVKMLITNFHQPQSTLLLLVSAFVKGDWRRIYDYALDHDFRFLSYGDSSLLIP

SEQ ID NO: 70600 - protein, 394 aa, Prevotella melaninogenica
  REGION 1..394: note = tr|A0A250KG72|A0A250KG72_9BACT S-adenosylmethionine:tRNA ribosyltransferase-isomerase; OS = Prevotella melaninogenica OX=28132 GN=queA PE=3 SV=1
MKLSQFKFNLPKEQVALYPHSSERVLTRTDGSTQTFTVTRRDEGRLMVLHRKSGKIDMFKGEVNGEPKEEDYIRFKDVFNYFDEGDAFIFNDTKVFPARLYGTKEKTDAKIEVFLLRELNQEMRLWDVLVEPARKIRIGNKLFFDESGTMVAEVIDNTTSRGRTLRFLYDCPHDEFKRELFALGEAPLPRYIIDNRPKEDGEEFAHATADDMEHFQSVFAKNEGAVSAPGTNIHFSEHMMKMMDIKGIKKAFITLHCGLGNFHDIEVEDLTKHKMDSEEMHINADACRIANGAKKAGHHLCAVGASVVKATETAVGTDGMLKEYDGWTNEFIFPPYNFGFADSMLVNFYHPYSTLLMETAAFGGYDLVMEAYDMAVKNGYKFGCFGDSLLILND

SEQ ID NO: 70601 - protein, 423 aa, Prevotella melaninogenica
  REGION 1..423: note = tr|D3I404|D3I404_9BACT S-adenosylmethionine:tRNA ribosyltransferase-isomerase OS=Prevotella melaninogenica D18 OX=575612 GN=queA PE=3 SV=1
MSEDTKHISISDYNYPLPDERIAKFPLTERDHSKLLLYKHGEVSEDIFYNLPEYLPKGALMIFNNTKVIQARMHFRKETGALIEVFLMEPAQPTDYELMFQTNHECAWLCMVGNLKKWKEGALKRAFEIKGHKLTLTATMDRSKVQEQAGGTNHWIQFEWDNTNISFAEILEAVGELPIPPYLNRATEESDKETYQTVYSKIKGSVAAPTAGLHFTDKVLKALDEHGVDREELTLHVGAGTFKPVKSQEIEGHNMHTEFVVVRRQTLEKLLKHKCHAVAVGTTSVRTLESLYYMGVKLVLSPETAEKDLHVNQWEPYDLPHNEEGLVVVNGKVITAEESIRHLLAYLDKDGLNVLHSSTQIIIAPGYTYKIVKALVTNFHQPQSTLLLLVSAFLKGDWRKVYDYALSHDFRFLSYGDSSLLIP

SEQ ID NO: 70602 - protein, 416 aa, Prevotella micans
  REGION 1..416: note = tr|H1Q1K8|H1Q1K8_9BACT S-adenosylmethionine:tRNA ribosyltransferase-isomerase OS=Prevotella micans F0438; OX = 883158 GN=queA PE=3 SV=1
MLTDSKHIKIVDYDYSLPEERIAKHPIAQRDRSKLLVYRKGTITHDSFRNLPKYLPKGALMVFNNTRVIQARMHFRKETGALIEIFLMEPVRPADYERVFQSNGQCSWLCMVGNLKKWKDGRLKRIVDIKGTSAVLSASINGTSGSMQSIDFEWDGRFSFAEVLEAVGELPIPPYLNRETQESDKTDYQTVYSKINGSVAAPTAGLHFSSEVLDALDSRGIEREELTLHVGAGTFKPVKSAEIAGHQMHSEYVVVRRHTLERLIAHQSHAIAVGTTSVRTLESLYYMGVKLEINPDTTQHNLHVSQWEPYDLEHNEAGLVVVRNRAVSVEKSLRNLLNCLERDGSEALHSSTQIIIAPGYRYKIVDMLVTNFHQPKSTLLLLVSAFVKGDWRQIYNYALRHDFRFLSYGDSSLLIP

SEQ ID NO: 70603 - protein, 394 aa, Prevotella micans
  REGION 1..394: note = tr|H1Q2M7|H1Q2M7_9BACT S-adenosylmethionine:tRNA ribosyltransferase-isomerase OS=Prevotella micans F0438; OX = 883158 GN=HMPREF9140_01165 PE=3 SV=1
MKLSQFNFTLPEEQVALYPHVSERIHKLADGTTKTFKVTRRDEARLMVLHRKSQKIDKFKRDSRGRIKKGEYIRFKDALDYFTEGDTFVLNDTKVFPARLYGTKEKTDAKIEVFLLRELNADMRLWDVLVEPARKIRIGNKLFFDDTGSMVAEVIDNTTSRGRTLRFLYDCSHEEFKRELFTLGEAPLPRYIIDKRPKADDEQFAHADADDIINFQTVFAANEGAVTAPGTNLHFSEQMMKIMELRGMGTAFVTLHCGLGNFHEIEVEDLTKHKMDSEEMHINAKACEVVNRAKRAGKHICVVGASMLKATETAVGTDKMLKEYDGWTNKFIFPKYEFGLADTMLVNFYQPFSTALMATAAFAGYDLVMEAYNQAVQDGYRFGCFGDSILILDD

SEQ ID NO: 70604 - protein, 423 aa, Prevotella multiformis
  REGION 1..423: note = tr|F0F5E2|F0F5E2_9BACT S-adenosylmethionine:tRNA ribosyltransferase-isomerase OS=Prevotella multiformis DSM 16608 OX=888743 GN=tgt PE=3 SV=1
MAEDTKHICISDYSYPLPDSRIAKFPLAERDHSKLLLYRHGEVSEDTFYRLPEYLPEGALMVFNNTKVIQARMHFRKETGALIEVFLMEPARPTDYELMFQTNHACAWLCMVGNLKKWKEGSLKRVFEIKGHRLTLTAAMDRSREQELAGGTHHWISFEWDNTNVSFAEILEAVGELPIPPYLNRATEESDKETYQTVYSKVKGSVAAPTAGLHFTDKVLKSLDGHGIDREELTLHVGAGTFKPVKSREIEGHSMHTEFVVVRRQTLEKLLKHGCCAIAVGTTSVRTLESLYYMGVKLVSDPDAAEKDLHVDQWEPYDLPHNAEGLVEVDGRAVTVEDAVRQLLAYLDRDGLDVLHSSTQIIIAPGYDYKIVKILVTNFHQPQSTLLLLVSAFVKGDWRKIYDYALSHEFRFLSYGDSSLLIP

SEQ ID NO: 70605 - protein, 394 aa, Prevotella multiformis
  REGION 1..394: note = tr|F0F6H2|F0F6H2_9BACT S-adenosylmethionine:tRNA ribosyltransferase-isomerase OS=Prevotella multiformis DSM 16608 OX=888743 GN=queA PE=3 SV=1
MKLSQFKFNLPKEQVALYPHSSDRVLTRSDGSTQTFTVTRRDEGRLMILHRKSGRIDMFKGDVKGEPKEEDFIRFKDVLDYFDEGDAFIFNDTKVFPARLYGTKEKTDAKIEVFLLRELNQEMRLWDVLVEPARKIRIGNKLFFDESGTMVAEVIDNTTSRGRTLRFLYDCPHDEFKRELYALGEAPLPRYIIDNRPKEKGAEFAHASADDMENFQSVFAKNEGAVSAPGTNIHFSEQMMKMMDIRGIKKAFITLHCGLGTFHDIEVEDLTKHKMDSEEMHINADACRIANGAKQAGHHLCAVGASVVKATETAVGTDGMMKEYDGWTNEFIFPPYNFGFADSMLVNFYHPYSTLLMETAAFGGYELVMEAYDKAVKNGYMFGCFGDSLLILDD

SEQ ID NO: 70606 - protein, 397 aa, Prevotella multisaccharivorax
  REGION 1..397: note = tr|F8N9P4|F8N9P4_9BACT S-adenosylmethionine:tRNA ribosyltransferase-isomerase OS=Prevotella multisaccharivorax DSM 17128 OX=688246 GN=Premu_1257 PE=3; SV = 1
MKLSQFNFNLPQDLVALYPHSIEREFVNDEGAKESFRVFRRDESRLMVLHRTTGEIELFKKDTKGQPVEGDYLDFRNVLDYFGEDDTFVLNDTKVFPARLYGTKEKTDAKIEVFILRELNEETHLWDVLVEPARKIRIGNKLFFDDAGVMVAEVYDNTTSRGRSLRFLYDCPHDQFVHDLYALGECPLPTYILNNRPVEPGMENMHVHSHATKEDMENFQTIYARNVGAVTAPATGLHFSRELMKRMEIKGINTAFITLHCSLSNFSKIEVEDLSKHKMDSEAMIVNKECCDIVNKTKDAGHHICAVGCSVAKATETATGTDGYLKEYDGWTSKFIFPPYDYQLADTMIANFYHPESTLVMATAAFGGYENVMECYRLAVKHGYKFGCFGDSLLIVD

SEQ ID NO: 70607 - protein, 421 aa, Prevotella multisaccharivorax
  REGION 1..421: note = tr|F8NBN9|F8NBN9_9BACT S-adenosylmethionine:tRNA ribosyltransferase-isomerase OS=Prevotella multisaccharivorax DSM 17128 OX=688246 GN=Premu_2647 PE=3; SV = 1
MNTKHIRIDDYSYDLPEDRIAKFPLQARDHSKLLIYNKGALSDDLFFNLPHYLPQGALMVFNNTRVIQARLHFRKETGALIEVFLMEPAQPADYEQMFQSTGHCSWLCMIGNLKKWKEGTLKRVFEIKGHRLTLTASMDRSKSVEKSGGSNYWVEFVWDNDQVNFAEILDAVGELPIPPYLNRKTEESDKTTYQTVYSKIKGSVAAPTAGLHFTDKVLKDLDNYGVLRDEVTLHVGAGTFKPVKTEEIEGHKMHSEYIVVHRHTFEHLLEHDCWAIAVGTTSVRTLESLYYIGVKLLSNPNATEEDLHVNQWEPYDLPHTDEGCVLVDGRAVSVHDAIQAILDYLDRDGLEALHTSTQIIIAPGYTYKIVKMLVTNFHQPKSTLLLLVSAFLKGDWRKVYDYALSHNFRFLSYGDANLLIP

SEQ ID NO: 70608 - protein, 395 aa, Prevotella nigrescens
  REGION 1..395: note = tr|A0A246ENT0|A0A246ENT0_9BACT S-adenosylmethionine:tRNA ribosyltransferase-isomerase; OS = Prevotella nigrescens OX=28133 GN=CBG57_05395 PE=3 SV=1
MKLSQFKFNLPEEQVALYPHSSERVLNRADGTSQVFKVTRRDEARLMVVHKKSETIDMYNNKKIKGEPKEEDYIRFKDVVNYFDEGDTFIFNDTKVFPARLYGTKEKTDAKIEVFLLRELNQEMRLWDVLVEPARKIRIGNKLFFDESGAMVAEVIDNTTSRGRTLRFLYDCSHEEFKRELYALGEAPLPRYIIDNRPKGADEDFAHADADDLENFQTVFAKHEGAVTAPGTNLHFSEHLMKMMEIKGIHAAYITLHCGLGNFHDIEVEDLTKHKMDSEEMHISAEACKIVNETKAANHRVCAVGASVVKATETAVGTDGMLKEYDGWTNKFIFPPYDFGLADSMLVNFYHPYSTLLMETTAFGGYDLIMEAYDKAVKAGYKFGCFGDALLILND

SEQ ID NO: 70609 - protein, 395 aa, Prevotella nigrescens
  REGION 1..395: note = tr|F9D7X5|F9D7X5_9BACT S-adenosylmethionine:tRNA ribosyltransferase-isomerase OS=Prevotella nigrescens ATCC 33563 OX=997352 GN=queA PE=3 SV=1
MKLSQFKFNLPEEQVALYPHSSERVLNRADGTSQVFKVTRRDEARLMVVHKKSGTIDMYNNKKIKGEPKEEDYIRFKDVVNYFDEGDTFIFNDTKVFPARLYGTKEKTDAKIEVFLLRELNQEMRLWDVLVEPARKIRIGNKLFFDESGAMVAEVIDNTTSRGRTLRFLYDCSHEEFKRELYALGEAPLPRYIIDNRPKGADEDFAHADADDLENFQTVFAKHEGAVTAPGTNLHFSEHLMKMMEIKGIHAAYITLHCGLGNFHDIEVEDLTKHKMDSEEMHISAEACKIVNETKAANHRVCAVGASVVKATETAVGTDGMLKEYDGWTNKFIFPPYDFGLADSMLVNFYHPYSTLLMETTAFGGYDLIMEAYDKAVKAGYKFGCFGDALLILND

SEQ ID NO: 70610 - protein, 388 aa, Prevotella oralis
  REGION 1..388: note = tr|E7RPV2|E7RPV2_9BACT S-adenosylmethionine:tRNA ribosyltransferase-isomerase OS=Prevotella oralis ATCC 33269 OX=873533 GN=queA PE=3 SV=1
MKLSQFKFKLPEEQVALYPHSFERKFKNEDGTKETFRVTRRDESRLMVLHKKTQAIEMFKKDKKGKPIEGDYLDFRNILDYFDEGDTFIFNDTKVFPARLYGTKEKTDAKIEVFLLRELNEEMRLWDVLVEPARKIRIGNKLFFDDTSTMVAEVIDNTTSRGRTLRFLYDCPHEEFKRELFALGEAPLPRYIIDNRENHHAVKEDLENFQCIFAKHEGAVTAPATGLHFSRELMKRMEIRGINFAFITLHCGLGNFHEIEVEDLTKHKMDSEQMIIDAEACEVVNATKKGGHRICAVGTSVVKATETAVGTDGMLKEFSGWTNKFIFPPYDFGLANTMIANFYHPLSTLLMQTAAFGGYDLVMQAYEMAVENGYKFGCFGDSLLILDD

SEQ ID NO: 70611 - protein, 404 aa, Prevotella oralis
  REGION 1..404: note = tr|V8C2W5|V8C2W5_9BACT S-adenosylmethionine:tRNA ribosyltransferase-isomerase OS=Prevotella oralis CC98A; OX = 1073367 GN=queA PE=3 SV=1
MDTKHIHISDYNYQLPDERIAKFPISQRDHSKLLVYKHGKVSDDLFYNLPEYLPKGALMVFNNTKVIQARIHFRKETGALIEVFLLEPVDPTDYELMFQTSEHCSWLCMIGNLKKWKEGTLKRDFEINGHRLTLIAARKEEYGTGHWVDFSWNNNKVSFAEILETAGELPIPPYLNRDTQESDKTTYQTVYSKIKGSVAAPTAGLHFTDSVLKDLDTHGIDREELTLHVGAGTFKPVKSDEIEGHKMHTEYICVHRQTLEKLLKHDCQAIAVGTTSVRTLESLYYMGVYLAAHPDATEEELHVGQWTPYETKAALTPMEAIKNVLNYLDRNGLSALHSSTQIIIAPGYEYKIVKMLVTNFHQPQSTLLLLVSAFVHGDWRTIYDNALSHDFRFLSYGDSSLLIP

SEQ ID NO: 70612 - protein, 416 aa, Prevotella oris
  REGION 1..416: note = tr|D7NAL9|D7NAL9_9BACT S-adenosylmethionine:tRNA ribosyltransferase-isomerase OS=Prevotella oris C735; OX = 563008 GN=HMPREF0665_00037 PE=3 SV=1
METKHIKISEYDYVLPDERIAKFPLPQRDHSKLLIYEHGKVSDDVFFNLPKYLPQHALMVYNNTRVIQARMHFRKETGALIEVFLMEPAAPTDYELMFQTKGQCSWLCMIGNLKKWKEGSLKRDFDIKGEHLTLSVLLNYEKSAHGATGTNYWVDFSWDNANINFAEILEVVGELPIPPYLNRETEESDKLTYQTVYSKIKGSVAAPTAGLHFTDDVLRAIEARGIEREEVTLHVGAGTFKPVKSKEIYGHEMHTEYIVVHRHTLVNLIKYECKAIAVGTTSVRTLESLYYMGVKLENNPDATEEELHVSQWEPYEREREGGLINGITPVHAIQNLIDWLDKAGVEVLHSSTQILIAPGYEYKIVKMLVTNFHQPQSTLLLLVSAFVKGDWRKIYDYALANNFRFLSYGDSSLLIP

SEQ ID NO: 70613 - protein, 416 aa, Prevotella oris
  REGION 1..416: note = tr|A0A3S4T5M8|A0A3S4T5M8_9BACT S-adenosylmethionine:tRNA ribosyltransferase-isomerase; OS = Prevotella oris OX=28135 GN=queA_1 PE=3 SV=1
METKHIKISEYDYVLPDERIAKFPLPQRDHSKLLIYEHGKVSDDVFFNLPKYLPQHALMVYNNTRVIQARMHFRKETGALIEVFLMEPAAPTDYELMFQTKGQCSWLCMIGNLKKWKEGSLKRDFDIKGEHLTLSVLLNYEKSAHSATGTNYWVDFSWDNANINFAEILEVVGELPIPPYLNRETEESDKLTYQTVYSKIKGSVAAPTAGLHFTDDVLRAIEARGIEREEVTLHVGAGTFKPVKSKEIYGHEMHTEYIVVHRHTLVNLIKYECKAIAVGTTSVRTLESLYYMGVKLENNPDATEEELHVSQWEPYEKEREGGLINGITPVHAIQNLIDWLDKAGVDVLHSSTQILIAPGYEYKIVKMLVTNFHQPQSTLLLLVSAFVKGDWRKIYDYALANNFRFLSYGDSSLLIP

SEQ ID NO: 70614 - protein, 388 aa, Prevotella oulorum
  REGION 1..388: note = tr|G1WBT3|G1WBT3_9BACT S-adenosylmethionine:tRNA ribosyltransferase-isomerase OS=Prevotella oulorum F0390; OX = 702438 GN=HMPREF9431_01284 PE=3 SV=1
MKLSQFKFNLPQELIALYPHSFTREFKHEDGSVERFHVTRRDECRLMVLHTKSGEIELFHKDADGKPIEGDYLDFRNLLDYFDEGDTFIFNDTKVFPARLYGTKEKTDAKIEVFLLRELNAEMRLWDVLVEPARKIRIGNKLFFDDTGSMVAEVIDNTTSRGRTLRFLYDCDHEEFKRELYSLGEAPLPRYVIDYREDHHATAEDLEQFQTVFAQAEGAVTAPATGLHFSRELMKRMEIRGIRHAFITLHCGLGTFNPIEVEDLTKHKMDSEQMLIHAEACRIVNAAKREGKRILSVGTSVVKATETAVGTDGMLKEYDGWTNKFIFPPYDFGLSNAMVANFYHPLSTLLMETAAFGGYDAVMECYRLAVEHGYKFGCYGDALLILND

SEQ ID NO: 70615 - protein, 416 aa, Prevotella oulorum
  REGION 1..416: note = tr|A0A1T4PGF7|A0A1T4PGF7_9BACT S-adenosylmethionine:tRNA ribosyltransferase-isomerase; OS = Prevotella oulorum OX=28136 GN=SAMN02745202_01429 PE=3; SV = 1
MDTKHIKISDYQYCLPDARIAKFPLAQRDHSKLLVYRKGEISESQFFNLPTFLPRHSLMVYNNTRVIQARMHFRKATGALIEVFLMEPAHPVDYERMFQSKGHCAWLCMIGNLKKWKEGVLKRNFDINGQTFTLTVERREDTVQTLGKGTNYWVDFRWDNAQINFADILEAVGELPIPPYLNRETEERDKITYQTVYSKIKGSVAAPTAGLHFTHEVLQAIQQRGIVEEEVTLHVGAGTFKPVKSESIDEHEMHSEYIVVHRHTLENLLHFHGEAIAVGTTSVRTLESLYYMGVKLAANPDATEEMLHVTQWEPYEAGRDGTWVDGISSEQAIRNVLDWLQRNNLEALHSSTQIIIAPGYHYKIVKMLITNFHQPQSTLLLLVSAFVHGDWRRIYDYALSHDFRFLSYGDSSLLIP

SEQ ID NO: 70616 - protein, 395 aa, Prevotella pallens
  REGION 1..395: note = tr|A0A379F314|A0A379F314_9BACT S-adenosylmethionine:tRNA ribosyltransferase-isomerase; OS = Prevotella pallens OX=60133 GN=queA_1 PE=3 SV=1
MKLSQFKFNLPEEQVALYPHSSERVLNRADGTSQVFKVTRRDEARLMVVHKKSGTIDMYNKDIDGKEPTEEDYIRFKDVVNYFDEGDTFIFNDTKVFPARLYGTKEKTDAKIEVFLLRELNQEMRLWDVLVEPARKIRIGNKLFFDESGSMVAEVIDNTTSRGRTLRFLYDCSHEEFKRELYALGEAPLPRYIIDNRPKNAGEDFAHADADDLENFQTVFAKYEGAVTAPGTNLHFSEHLMKMLEIKGIHAAYITLHCGLGNFHDIEVEDLTKHKMDSEEMHISAEACKIVNETKQAGHHVCAVGASVVKATETAVGTDGMLKEYEGWTNKFIFPPYDFGLADSMLVNFYHPYSTLLMETAAFGGYDLVMEAYDKAVKAGYKFGCFGDALLILND

SEQ ID NO: 70617 - protein, 424 aa, Prevotella pallens
  REGION 1..424: note = tr|F9DKS8|F9DKS8_9BACT S-adenosylmethionine:tRNA ribosyltransferase-isomerase OS=Prevotella pallens ATCC 700821 OX=997353 GN=tgt2 PE=3 SV=1
MLEDTKHIKISDYDYPLPDERIAKFPLSKRDHSKLLLYKHGEVGEDVFCNLPKYLPQNALMVFNNTRVIQARMHFRKETGALIEIFLMEPAQPTDYEQMFQTNQQCSWLCMIGNLKKWKEGTLKRAFQINGHDLVLTATVNRTKTNAAVAGGTNHWVDFVWDNCHVTFAEILEAVGELPIPPYLNRETEESDKQTYQTVYSKVKGSVAAPTAGLHFTQNVLHNIDKAGITRDELTLHVGAGTFKPVKSSEIEGHNMHSEYVVVHRHTIENLLSHNCKAIAVGTTSVRTLESLYYMGVKLERNSNATEDELHVEQWEPYEQEHNSNGLILVNGTPVSVERALQNLLSYLDNNGLTALHTSTQIIIAPGFTYKIVQMLVTNFHQPQSTLLLLVSAFLGGNWRKVYNYALENNFRFLSYGDSSLLIP

SEQ ID NO: 70618 - protein, 416 aa, Prevotella pleuritidis
  REGION 1..416: note = tr|U2L7D0|U2L7D0_9BACT S-adenosylmethionine:tRNA ribosyltransferase-isomerase OS=Prevotella pleuritidis F0068 OX=1081904 GN=queA_1 PE=3 SV=1
MIETKHIKISDYDYPLPENRIAKYPIPQRDHSKLLFYKHGEVGEDVFYNLPEYLPQGALMVFNNTKVIQARMHFRKETGALIEVFLLEPAQPTDYELMFQTTKYCAWLCMVGNLKKWKDGSLIRSFDINGHELVLTATRRMSESLSMTGHKSADTYHWVDFEWDNDKVSFAEILEAVGELPIPPYLNRETQESDKTTYQTVYSKIKGSVAAPTAGLHFTDSVLAALDERGIEREELTLHVGAGTFKPVKSEEIEGHRMHTEYICVHRQILEKLLCHNGEAIAVGTTSVRTLESLYYIGLKLMHNSDASEADLHVNQWEPYEYQAVNVLPKEAIREVLDYLDRNHLPALHTSTQIIIAPGYDYKIVKMLVTNFHQPQSTLLLLVSAFVKGDWRKIYDYALAHDFRFLSYGDSSLLIP

SEQ ID NO: 70619 - protein, 393 aa, Prevotella pleuritidis
  REGION 1..393: note = tr|U2L025|U2L025_9BACT S-adenosylmethionine:tRNA ribosyltransferase-isomerase OS=Prevotella pleuritidis F0068 OX=1081904 GN=queA_2 PE=3 SV=1
MKLSQFKFKLPEEQIALYPHSIIHSVTNDDGSEGLFRVTRRDECRLMVLHRKSQTIDMYKKDKKGKPIEGEFLDFRNVLDYFDENDTFVFNDTKVFPARLYGMKEKTDAKIEVFLLRELNAEMRLWDVLVEPARKIRIGNKLFFDDSGTMVAEVIDNTTSRGRTLRFLYDCPHDEFKRELFALGEAPLPHYIIDHKDADGNPDRPATKEDLDDFQTIYAKNEGAVTAPASGLHFSREMMKRMEIKGINFAYITLHCGLGNFHGIEVEDLTKHKMDSEQMIISAEACNTVNRTKEAGHRICAVGTSVIKATETAAGTDGLLKEYDGWTNRFIFPPYDFNIADAMIANFYHPLSTLLMSTAAFGGYDLVMKAYELAVENGYLFGCYGDALLIVDD

SEQ ID NO: 70620 - protein, 354 aa, Prevotella ruminicola
  REGION 1..354: note = tr|A0A1M7FBL4|A0A1M7FBL4_PRERU S-adenosylmethionine:tRNA ribosyltransferase-isomerase; OS = Prevotella ruminicola OX=839 GN=queA PE=3 SV=1
MKLSQFKFKLPEEQIALEPPFHRDECKLMVLHRKSKRIESGLDFRNILDYFDEDDAFIFNDTKVFPARLYGTKEKTDAKIEVFLLRELNADQRLWDVLVEPARKIRIGNKLFFEEDGPMVAEVIDNTTSRGRTLRFLYDCPHDEFKQMLFGLGEAPLPRYIIDRRPATEEDMTNFQTIYAKNEGAVTAPATGLHFSRELMKRMEIKGINFAFITLHCGLGNFDAIEVEDLTKHKMSSEQMFIPAEACEIVNKAKEEGHRVCCVGVSTARATESAVGTDGMLKEFEGWTNKFIFPPYEFGLCNALIGNFYHPESPMMMTEASFAGYELLYEGYQRALKEGYKFGCYGDALLMLDD

SEQ ID NO: 70621 - protein, 354 aa, Prevotella ruminicola
  REGION 1..354: note = tr|A0A1H6JI07|A0A1H6JI07_PRERU S-adenosylmethionine:tRNA ribosyltransferase-isomerase; OS = Prevotella ruminicola OX=839 GN=queA PE=3 SV=1
MKLSQFKFKLPEEQIALEPPFHRDECKLMVLHRKSKRIESGLDFRNILDYFDEDDAFIFNDTKVFPARLYGTKEKTDAKIEVFLLRELNADQRLWDVLVEPARKIRIGNKLFFEEDGPMVAEVIDNTTSRGRTLRFLYDCPHDEFKQMLFGLGEAPLPRYIIDRRPATEEDMTNFQTIYAKNEGAVTAPATGLHFSRELMKRMEIKGINFAFITLHCGLGNFDAIEVEDLTKHKMSSEQMFIPAEACEIVNKAKEEGHRVCCVGVSTARATESAVGTDGMLKEFEGWTNKFIFPPYEFGLCNALIGNFYHPESPMMMTEASFAGYDLLYEGYQRALKEGYKFGCYGDALLMLDD

SEQ ID NO: 70622 - protein, 388 aa, Prevotella saccharolytica
  REGION 1..388: note = tr|L1NFD7|L1NFD7_9BACT S-adenosylmethionine:tRNA ribosyltransferase-isomerase OS=Prevotella saccharolytica F0055 OX=1127699 GN=HMPREF9151_00833 PE=3 SV=1
MKLSQFSFNLPEEQIALYPHSVYHEIKDEKGKKQTVRVTRRDECRLMVLHRQSGTIDMFKQDKKKKPVKGDFLDFRNVLDYFDEGDTFIFNDTKVFPARLYGTKEKTDAKIEVFLLRELNAEMRLWDVLVEPARKIRIGNKLFFDDTSTMVAEVIDNTTSRGRTLRFLYDCPHDEFKRSLFALGETPLPRYIIDARDQHHDTKEDMEDFQCIFARNEGSVTAPASGLHFSREMLKRMEIRGINQAFITLHCGLGSFHNIEVEDLTKHKLDSEQMIIGAEACQIVNKTKTERKHICAVGTSVIKATETAVGTDGLLKEYDGWTNRFIFPPYDFGLADSMIANFYHPLSPLMMATAAFGGYDLVMEAYRLAVENGYMFGCYGDAMLIVND

SEQ ID NO: 70623 - protein, 407 aa, Prevotella saccharolytica
  REGION 1..407: note = tr|L1NJE8|L1NJE8_9BACT S-adenosylmethionine:tRNA ribosyltransferase-isomerase OS=Prevotella saccharolytica F0055 OX=1127699 GN=queA PE=3 SV=1
MNTKHIRIKDYNYDLPDERIAKFPLPQRDKSKLLVYNHGEVSQDEFSNITRYLPQGALMVFNNTKVIQARLHFRKETGSLIEIFLLEPALPADYEQMFQTTDACSWYCMVGNLKKWKGGPLTTTVEIAGQPAAVQLTAERDMSCETALKIDFKWTGNKLSFAELLDKAGELPIPPYLNRNTQESDKTTYQTVYSKIKGSVAAPTAGLHFTQRVLADIDQHGIDREELTLHVGAGTFKPVKSEEIEGHSMHTEYVCIHRTTLEKLLQHNCEAIAVGTTSVRTLESLYYMGCKVKANPNVSLEQLHVNQWEPYDQMPTNITPTEAIGELIAYMDRNNLPSLHSSTQIIIAPGYQYKIVKRLVTNFHQPQSTLLLLVSAFVGGDWKSIYRYALDNDFRFLSYGDSSILIP

SEQ ID NO: 70624 - protein, 388 aa, Prevotella salivae
  REGION 1..388: note = tr|E6MP16|E6MP16_9BACT S-adenosylmethionine:tRNA ribosyltransferase-isomerase OS=Prevotella salivae DSM 15606 OX=888832 GN=queA2 PE=3 SV=1
MKLSQFKFNLAKEQVALYPHSFTRVFENEDGTKGSFQVTRRDECRLMVLHKRSGQIDMFKKDADGNPIEGEYLDFRNILDYFDKGDTFIFNDTKVFPARLYGTKEKTDAKIEVFLLRELNQEMRLWDVLVEPARKIRIGNKLFFDETGSMVAEVIDNTTSRGRTLRFLYDCDHEEFKRELFALGEAPLPRYVIDNRTEPHATPDDLVDFQTVFAKKEGAVTAPATGLHFSRELMKRMEIRGIHDAYLTLHCGLGNFNSIEVEDLTKHKMDSEQMVIDAEACAKVNQAKREGHHVLAVGVSVVKATETAVGTDGMLKEYDGWTNKFIFPPYDFHLADSMVANFYHPYSTLLMTTAAFGGYDAVMECYNLASENGYMFGCYGDALLIVDD

SEQ ID NO: 70625 - protein, 388 aa, Prevotella salivae; identical to SEQ ID NO: 70624
  REGION 1..388: note = tr|U2LDG6|U2LDG6_9BACT S-adenosylmethionine:tRNA ribosyltransferase-isomerase OS=Prevotella salivae F0493; OX = 1395125 GN=queA_1 PE=3 SV=1

SEQ ID NO: 70626 - protein, 394 aa, Prevotella scopos
  REGION 1..394: note = tr|A0A1B1I8N5|A0A1B1I8N5_9BACT S-adenosylmethionine:tRNA ribosyltransferase-isomerase; OS = Prevotella scopos JCM 17725 OX=1236518 GN=AXF22_06620; PE = 3 SV=1
MKLSQFKFNLPKAQVALYPHSSERVLTRTDGSTQTFTVTRRDEGRLMVLHRKSGKIDMFKGEVNGEPKEEDYIRFKDVFNYFDEGDAFIFNDTKVFPARLYGTKEKTDAKIEVFLLRELNQEMRLWDVLVEPARKIRIGNKLFFDESGTMVAEVIDNTTSRGRTLRFLYDCPHDEFKRELFALGEAPLPRYIIDNRPKKDGEEFAHATADDMEQFQSVFAKNEGAVSAPGTNIHFSEHMMKMMDIKGIKKAFITLHCGLGNFHDIEVEDLTKHKMDSEEMHINADACRIANSAKQAGHRLCAVGASVVKATETAVGTDGMLKEYDGWTNEFIFPPYNFGFADCMLVNFYHPYSTLLMETAAFGGYDLVMEAYDKAVKNGYMFGCFGDSLLILND

SEQ ID NO: 70627 - protein, 425 aa, Prevotella scopos
  REGION 1..425: note = tr|A0A1B1IBV1|A0A1B1IBV1_9BACT S-adenosylmethionine:tRNA ribosyltransferase-isomerase; OS = Prevotella scopos JCM 17725 OX=1236518 GN=AXF22_12745; PE = 3 SV=1
MSEDTKHICISDYNYSLPDERIAKFPLAERDHSKLLLYKHGEVSEDIFYNLPEYLPTGALMVFNNTKVIQARMHFRKETGALIEIFLMEPAQPTDYELMFQTNHECAWLCMVGNLKKWKEGALKREFEIKGHKLTLTASMDREKVHEQAGGTNHWINFEWDNSNVSFAEILEAVGELPIPPYLNRATEESDKETYQTVYSKIKGSVAAPTAGLHFTDRVLRALDEHGIDCEELTLHVGAGTFKPVKSYEIEGHSMHTEFVVVRRQTLEKLLKHGYQAIAVGTTSVRTLESLYYMGVKLVLSPDTNEKELHVNQWEPYDLPHNSEGLVEKDGKVITVEDAIHHLLAYLDKGGLDVLHSSTQIIIAPGYSYKIVKALVTNFHQPQSTLLLLVSAFLKGDWRKVYDYALTHDFRFLSYGDSSLLIPKE

SEQ ID NO: 70628 - protein, 407 aa, Prevotella shahii
  REGION 1..407: note = tr|A0A318HZC8|A0A318HZC8_9BACT S-adenosylmethionine:tRNA ribosyltransferase-isomerase; OS = Prevotella shahii DSM 15611 = JCM 12083 OX=1122991; GN = queA PE=3 SV=1
MDTKHIRIKDYNYDLPDERIAKFPLPQRDQSKLLVYNHGDISQDVFTNITRYLPQGALMVFNNTKVIQARLHFRKDTGSLIEIFLLEPALPADYEQMFQTTNACSWYCMVGNLKKWKTGALTTIVDIPGQPPVTLTAERDLSCDTALKIDFKWRGDDKLSFAELIDKVGELPIPPYLNRNTQESDKTTYQTVYSKVKGSVAAPTAGLHFTQRVLSDIDQHGIDREELTLHVGAGTFKPVKSDEIEGHAMHTEYVSVRLSTLEKLLKHNCEAIAVGTTSVRTLESLYYMGCKVMADANIALEKLHVNQWEPYAPTAINIKPAEAIGQLIAYMQRNNLPTLHSSTQIIIAPGYNYKIVKRLVTNFHQPQSTLLLLVSAFVGGNWKNIYRYALDNDFRFLSYGDSSILIP

SEQ ID NO: 70629 - protein, 388 aa, Prevotella shahii
  REGION 1..388: note = tr|A0A318I2K6|A0A318I2K6_9BACT S-adenosylmethionine:tRNA ribosyltransferase-isomerase; OS = Prevotella shahii DSM 15611 = JCM 12083 OX=1122991; GN = EJ73_00159 PE=3 SV=1
MKLSQFNFKLPQELIALYPNSVYHEIHNEKGEKEMSRLTRRDECRLMILHKKSGTIDLYRKDKKGKPVKGDYLQFRDVIDYFDEGDTFIFNDTKVFPARLYGMKEKTDAKIEVFLLRELNQEMRLWDVLVEPARKIRIGNKLFFDDSGTMVAEVIDNTTSRGRTLRFLYDCDHDEFKRSLFALGESPLPRYIIDAREDHHGTEDDMEDFQTIYAQNEGAVTAPATGLHFSRELLKRMEIRGINSAFITLHCGLGNFHDIEVEDLTKHKVDSESMHIGAEACAIVNKAKAEGRRVCAVGTSVIKATETAVGTDGMLKEYTGWTNRFIFPPYDFGLADTMLANFYHPLSTLLMSTAAFGGYDLVMEAYRLAVENEYKFGCFGDALLILND

SEQ ID NO: 70630 - protein, 407 aa, Prevotella sp.
  REGION 1..407: note = tr|C9Q1A0|C9Q1A0_9BACT S-adenosylmethionine:tRNA ribosyltransferase-isomerase OS=Prevotella sp. oral taxon 472 str. F0295 OX=619693 GN=queA PE=3 SV=1
MNTKHIRIKDYNYDLPDERIAKFPLPERDKSKLLVYNHGEVSQDVFSNITRYLPQGALMVFNNTKVIQARLHFRKETGSLIEIFLLEPALPADYEQMFQTTGACSWYCLVGNLKKWKSGPLTTTVEMPGQPSVQLSAERDMSCETALKIDFKWTGDDKLSFAELIDKVGELPIPPYLNRNTQESDKTTYQTVYSKIKGSVAAPTAGLHFTQKVLADIDQHGIDREELTLHVGAGTFKPVKSEEIEGHAMHTEYVCIRRSTLEKLLQHNCEAVAVGTTSVRTLESLYYMGCKVKANPNVSLDQLHVNQWEPYASTTTTITPAEAIGELIAYMDRNNLPSLHSSTQIIIAPGYQYKIVKRLITNFHQPQSTLLLLVSAFVGGDWKSIYRYALDNDFRFLSYGDSSILIP

SEQ ID NO: 70631 - protein, 388 aa, Prevotella sp.
  REGION 1..388: note = tr|R6VJ02|R6VJ02_9BACT S-adenosylmethionine:tRNA ribosyltransferase-isomerase OS=Prevotella sp. CAG:474; OX = 1262926 GN=BN673_02277 PE=3 SV=1
MKLSQFKFKLPEEQIALYPHSIYHDFVDDNGNKVTSRITRRDECKLMVLHSKSQTIELYKKDADGNPIEGEYLDFRNVLDYFDEGDTFVFNDTKIFPARLYGTKEKTDAKIEVFLLRELNQEMRLWDVLVEPARKIRIGNKLFFDDSGTMVAEVFDNTTCRGRTLRFLYDCPHEEFKRELFALGEAPLPRYIIDRRDNHHGTAEDLEDFQCIFAKNEGGVTVPASGLHFSRELMKRMEIKGIETAFVTLHCGLGAFHDIEVEDLTKHKMDSEQMIITREACDRVNSAKAAGHHICAVGTSVVKATETAVGTDGLLKEYDGWTNKFIFPPYDFGLADTMIANFYHPYSTLLMETAAFGGYDLVMEAYNLALKHGFMFGCYGDAMLIMND

SEQ ID NO: 70632 - protein, 406 aa, Prevotella stercorea
  REGION 1..406: note = tr|A0A415GMX6|A0A415GMX6_9BACT S-adenosylmethionine:tRNA ribosyltransferase-isomerase; OS = Prevotella stercorea OX=363265 GN=DW060_06175 PE=3 SV=1
METKHIHIKDYNYALPDERIAKFPLAQRDHSKLLLYKHGEVSEDTFCNIANHLPEGALMVFNNTRVIQARMHFRKATGALIEVFLLEPYAPADYEQMFQTRGECEWLCMIGNLKKWKGEVLQRTFDVNSESVTLKAERLEDVGKSYRVRFTWDNAEVSLAELLDAVGELPIPPYLNRETQESDKTTYQTVYSKVKGSVAAPTAGLHFTPEVLAAIDRRGIDREELTLHVGAGTFKPVKSEEIQDHEMHTEYVCVHRETLDKLIKHGAEAIAVGTTSVRTLESLYYMGVKLEQNMDLSEEELHVNQWEPYENEAAKGVTPMKALENIVAYLDKHGLRALHSSTQIIIAPGYEYKIVKMLVTNFHQPQSTLLLLVSAFLHGDWHKVYDYALAHDFRFLSYGDSSLLIP

SEQ ID NO: 70633 - protein, 388 aa, Prevotella stercorea
  REGION 1..388: note = tr|A0A415GL74|A0A415GL74_9BACT S-adenosylmethionine:tRNA ribosyltransferase-isomerase; OS = Prevotella stercorea OX=363265 GN=DW060_07760 PE=3 SV=1
MKLSQFKFKLPEELIALYPHSIYREFENDNGEKETFRITRRDECRLMVLHKKSQTIEMYKKDDKGNPIEGEYLDFRNVLDYFGEHDTFIFNDTKVFPARLYGTKEKTDAKIEVFLLRELNEEMRLWDVLVEPARKIRIGNKLFFDDSGTMVAEVIDNTTSRGRTLRFLYDCPHDEFKRELYSLGEAPLPRYIVDRRPDKRSTEDDFDDFQCIFAKHEGAVTAPATGLHFSRELMKRMEIRGINFAYITLHCGLGNFHDIEVEDLTKHKMDSEQMRVDADCCKLVNDTKRAGHHVCAVGTSVVKATETAVGTDGMLKEYDGWTNKFIFPPYDFGLADSMISNFYHPYSTLLMETCAFGGYDLVMEAYNLAVKHGFKFGSYGDALLIVND

SEQ ID NO: 70634 - protein, 432 aa, Prevotella timonensis
  REGION 1..432: note = tr|A0A2N6Q6L1|A0A2N6Q6L1_9BACT S-adenosylmethionine:tRNA ribosyltransferase-isomerase; OS = Prevotella timonensis OX=386414 GN=CJ232_04770 PE=3 SV=1
METKHIHISDYQYELPDERIAKFPIAQRDHSKLLIYNHGKVGEDVFYNLYEYLPQGALMIFNNTKVIQARMHFKKDTGALIEVFLMEPAMPADYEQIFQSKRHCAWYCMIGNLKKWKSGSLTRIYHINQKSVTLQVTRREPATDEHQPAQGLHATPSTHHWIDFDWDAEDVSFAEILESIGELPIPPYLNRETQESDKTTYQTVYSKIKGSVAAPTAGLHFTDSVLQSLDEHGIDREELTLHVGAGTFKPVKSEEIKGHAMHTEYICVHRQTLEKLLRHNVEAIAVGTTSVRTLESLYYMGVFLETHPDATEEELHVKQWAPYERLHTDGQVEHLDGGLIDNISPKQAIQNVLDYLVRNELESLHSSTQIIIAPGYQYKIVKMLITNFHQPQSTLLLLVSAFVNGDWRTIYDYALAHQFRFLSYGDSSLLIP

SEQ ID NO: 70635 - protein, 388 aa, Prevotella timonensis
  REGION 1..388: note = tr|A0A098YS96|A0A098YS96_9BACT S-adenosylmethionine:tRNA ribosyltransferase-isomerase; OS = Prevotella timonensis S9-PR14 OX=1401062; GN = HMPREF9304_09385 PE=3 SV=1
MKLSQFKFNLPEELIALYPHSVYHEIKNAHGKKEISRMTRRDESRLMVLHRKSQTIDMFQKDKKGKDIKGQYLEFRHVLDYFDEGDTFIFNDTKVFPARLYGTKEKTDAKIEVFLLRELNQEMRLWDVLVEPARKIRIGNKLFFDESGTMVAEVIDNTTSRGRTLRFLYDCPHDEFKHELFALGETPLPRYIINRREVPHADAHDQEDYQTIFAKHEGAVRAPSTGLHFSREMLKRMEIKGIHDTYITLHCSLSAFNSIEVEDLTKHKMDSEQMKIDAKVCEIVNRTKQEGHHVCAVGTSVVKATETAVGTDGLLKEYDGWTSKFIFPPYDFGLADTMIANFYHSMSPLLMETAAFGGYELVMEAYDLAVKNGYKFGCYGDSMLILND

SEQ ID NO: 70636 - protein, 394 aa, Prevotella veroralis
  REGION 1..394: note = tr|C9MQX4|C9MQX4_9BACT S-adenosylmethionine:tRNA ribosyltransferase-isomerase OS=Prevotella veroralis F0319; OX = 649761 GN=HMPREF0973_02141 PE=3 SV=1
MKLSQFKFNLPKEQVALYPHSSKRVLTRSDGSTQTFTITRRDESRLMVVHRKSGKIDMFKGEVNGDPTEDDYIRFKDVFDYFEEGDAFIFNDTKVFPARLYGTKEKTDAKIEVFLLRELNQEMRLWDVLVEPARKIRIGNKLFFDESGTMVAEVIDNTTSRGRTLRFLYDCPHEEFKRELFALGEAPLPRYIIDNRPKEEGEEFAHATKEDMENFQSVFARNEGAVSAPGTNIHFSEHMMKMMEIRGIKKSFITLHCGLGNFHDIEVEDLTKHKMDSEEMHINAEACEIANNAKKAGHHLCAVGASVVKATETAVGTDGMLKEYDGWTNEFIFPPYNFGFADSMLVNFYQPYSTLLMETAAFGGYDLIMEAYDKAVKNGYMFGCFGDSLLILND

SEQ ID NO: 70637 - protein, 423 aa, Prevotella veroralis
  REGION 1..423: note = tr|C9MQR3|C9MQR3_9BACT S-adenosylmethionine:tRNA ribosyltransferase-isomerase OS=Prevotella veroralis F0319; OX = 649761 GN=queA PE=3 SV=1
MSEDTKHISISDYNYPLPDERIAKFPLTERDHSKLLLYKHGDVSEDIFYNLPEYLPKGALMVFNNTKVIQARMHFRKETGALIEVFLMEPAQPTDYELMFQTNHECAWLCMVGNLKKWKEGALKRAFEIKGQKLTLTATMDRSKVQEQAGGTNHWIQFEWDNTNISFAEILEAVGELPIPPYLNRATEESDKETYQTVYSKIKGSVAAPTAGLHFTDKVLKALDEHGVDREELTLHVGAGTFKPVKSHEIEGHNMHTEFIIVRRQTLIKLLKHKCRAIAVGTTSVRTLESLYYMGVKLVSNNNATEDDLHVNQWEPYDLPHNSDGLVKVNGKVISVEESIQNLLDYLDRDGLNALHSSTQIIIAPGYTYKIVKALITNFHQPQSTLLLLVSAFVKGDWRKIYDYALSHDFRFLSYGDSSLLIP

SEQ ID NO: 70638 - protein, 380 aa, unidentified
  source 1..380: note = Prevotellaceae bacterium
  REGION 1..380: note = tr|A0A239R0V4|A0A239R0V4_9BACT S-adenosylmethionine:tRNA ribosyltransferase-isomerase; OS = Prevotellaceae bacterium MN60 OX=1945887; GN = SAMN06298211_103152 PE=3 SV=1
MKLSQFKFKLPEDLVALEPPHRVFKNDDGTEEKVYRRDECRLMVVHRKSQTVDMFEKDAEGKDTENYLTFRNIVDYFDEGDTFIFNDTKVFPARLYGTKEKTDAQIEVFLLRELNEELRLWDVLVEPARKIRIGNKLFFNEQGPMVAEVIDNTTSRGRTLRFLYDCPHDEFKEELYALGSAPLPRYIVDKRPATADDMENFQTIYAKHEGAVTAPASGLHFSRELMKRLEIRGVNFSYITVHCGLGCFDPIEVEDLTKHKMSSEQMIVSQEACEVVNEAKAGGHHVCAIGISTLRATETAAGTDGMLKEFSGWTNKFIFPPYDFGMADSMVTNFYHPESTMVMATAAFGGYDLVMKAYEMAVENGYKFGCYGDAMLILDD

SEQ ID NO: 70639 - protein, 406 aa, unidentified
  source 1..406: note = Prevotellaceae bacterium
  REGION 1..406: note = tr|A0A1K1NIG2|A0A1K1NIG2_9BACT S-adenosylmethionine:tRNA ribosyltransferase-isomerase; OS = Prevotellaceae bacterium HUN156 OX=1520830 GN=queA PE=3; SV = 1
MNTKDIHISNYNYELPDERIAKFPKEERDHSKLLIYNKGQVGEDVFFHLPEYLPQGALMVFNNTKVIQARLHFRKDTGALIEIFLLEPAQPADYEQMFQQSERCSWLCLVGNQKKWKEGTLCRVIDVKGTSVEVRVTRKGEHGTSQWIDFEWTGGVSFAEILDAMGELPIPPYLNRETQESDKTTYQTVYSKIKGSVAAPTAGLHFTERVLSAVDERGIEREEVTLHVGAGTFKPVKSETIGEHAMHTEYIAVRRHTIERLLAHGGSAIAVGTTSVRTLESLYYMGMKVMRNPDIKEEQLHVNQWEPYEVESSELKVESSEALQALLNWMDRHELTVLHSSTQIIIAPGYTYKIVKMLVTNFHQPQSTLLLLVSAFVHGDWHKIYDYALAHDFRFLSYGDSSLLIP

SEQ ID NO: 70640 - protein, 349 aa, unidentified
  source 1..349: note = Pricia antarctica
  REGION 1..349: note = tr|A0A1G7GPP8|A0A1G7GPP8_9FLAO S-adenosylmethionine:tRNA ribosyltransferase-isomerase; OS = Pricia antarctica OX=641691 GN=queA PE=3 SV=1
MKLSHFNFELPDNLLAEYPAENRDESKLMVVHRETGKIEHKMFKDMIDYFEEDDVMVLNNTKVFPARLYGNKEKTGARIEVFLLRELNEEQRLWDVLVDPARKIRIGNKLYFGDDEDLVAEVIDNTTSRGRTLRFLYDGSYIDFRRKLRDLGQTPLPKYIKRDVEPEDETRYQTIYAKHEGAVAAPTAGLHFSKHLLKRLEIKGIDFAEVTLHVGLGTFNPVEVEDLSKHKMDSEELIIDEKATDIVNRAKAKKKRICAIGTTAMRGLESAVSSDHLLNTHDGWTNKFIFPPYEFSIADAMVTNFHLPKSTLLMMVSAFMGHDLMKRAYKEAILEQYKFYSYGDAMLII

SEQ ID NO: 70641 - protein, 348 aa, unidentified
  source 1..348: note = Primorskyibacter insulae
  REGION 1..348: note = tr|A0A2R8AWY6|A0A2R8AWY6_9RHOB S-adenosylmethionine:tRNA ribosyltransferase-isomerase; OS = Primorskyibacter insulae OX=1695997 GN=queA PE=3 SV=1
MQLSDFDFDLPDTLIATRPAKPRSYARLLVADGDAITDAIVRDLPDWLRAGDLLVLNDTKVIPARLSGLRRRMGDTGMTEARIEVTLLEPRADGAWSALVKPLKKVRDGEEIRFSDALSATVESRADGQAALRFNLAGDDFDAALAEAGAMPLPPYIAAKRPADAQDKEDYQTVWARNSGAVAAPTASLHFDAPLLEALAAKGVGFVHVTLHVGAGTFLPVKVDDVTQHKMHAEWGQVTEDAAKRIAEAKANGGRVIPVGTTALRLIESAAAGGQIAPWEGETDIFIYPGYQFRVADALMTNFHLPKSTLMMLVSALMGKDRITRIYGHAVDNGYRFFSYGDASLLLP

SEQ ID NO: 70642 - protein, 356 aa, Primorskyibacter sedentarius
  REGION 1..356: note = tr|A0A4R3J8T3|A0A4R3J8T3_9RHOB S-adenosylmethionine:tRNA ribosyltransferase-isomerase; OS = Primorskyibacter sedentarius OX=745311 GN=queA PE=3 SV=1
MKLAEFDFDLPDDLIATRPAQPRSSARLLVAEGDAIHDAVVTDIVNWLRPGDRLVLNDTRVIPARLSGLRSRDGAEGATQARIEVTLLEPTSDGSWMALLKPLKKVRDGEVITFSPKLEATVVSRDEGQAKLRFSLSGTDFDAALAEAGAMPLPPYIAAKRPADDRDKTDYQTVWARRPGAVAAPTASLHFDDALLGALKDRGIAFTHVTLHVGAGTFLPVKVEDVTTHRMHAEWGEVTQTAAVEIAATRADGGRIIPVGTTALRLIESAAADGEIRAWSGDTDIFIYPGYEFRITDALMTNFHLPKSTLLMLVSALMGQDRIRRIYAHAVDAQYRFFSYGDASLLLPGCKSDSKA

SEQ ID NO: 70643 - protein, 353 aa, Primorskyibacter sp.
  REGION 1..353: note = tr|A0A4R6ALE1|A0A4R6ALE1_9RHOB S-adenosylmethionine:tRNA ribosyltransferase-isomerase; OS = Primorskyibacter sp. SS33 OX=2547833 GN=queA PE=3 SV=1
MKLSDFNFDLPEELIATRPARPRSSARMLVADGARIADCRAIDLPEWLAPGDRLVLNDTRVIPARLTGRRDRAGAAGARIEATLLEPLADGAWRALLKPLRKVRDGETLVFSDALSAVVEGREEGTARLRFDAEGDAFDAALEQAGAMPLPPYIAARRPADARDHEDYQTIWARRRGAVAAPTASLHFDAALMAGLAARGVDLTHVTLHVGAGTFLPVKVDDIAQHRMHAEWGEVTPEAAAAIAATRAAGGRVIAVGTTALRLVETAARENGGRIGSWTGETDIFITPGFRFAVADGLMTNFHLPKSTLMMLVSAFMGVEPIRRIYAHAIEERYRFFSYGDASLLLPGDRPAR

SEQ ID NO: 70644 - protein, 370 aa, Prochlorococcus marinus
  REGION 1..370: note = sp|Q7VDH4|QUEA_PROMA S-adenosylmethionine:tRNA ribosyltransferase-isomerase OS=Prochlorococcus marinus (strain SARG / CCMP1375 / SS120) OX=167539 GN=queA PE=3; SV = 1
MVIDPRDFLLSSYDYELNSSLIAQEPIEPRHNARMLHVSKRSGEGLKAFHLKVWDLLAELRAGDLLVMNDTRVLKARLKVRLRNGTFVELFLLEPKGQGRWLCLAKPAKKLRAGDCIWMESSGEESIPLKIIDQDISTGGRIVQFPELFSDRRKIEPLLEKFGEIPLPPYINRCDFKDVNRYQTRYASTPGAVAAPTAGLHLSDQFLEALSQQGIKDAKVTLHVGLGTFRPLVEENLANLHLHSEWVEVKEEVVSAIKECRDRGGRVIAIGTTTVRSLEASFLAGDGCLKPFKGEVDLVIKPGYKFGIVDGLLTNFHLPKSSLLLLVSALIGRENLLELYKEAIDQKYRFFSYGDAMFISPEGVLPSARL

SEQ ID NO: 70645 - protein, 371 aa, Prochlorococcus marinus
  REGION 1..371: note = sp|A2CBJ6|QUEA_PROM3 S-adenosylmethionine:tRNA ribosyltransferase-isomerase OS=Prochlorococcus marinus (strain MIT 9303) OX=59922 GN=queA PE=3 SV=1
MVLDPRDSLLSSYDYPLDPERIAQLPVEPRHAARLLIVQPLGMKPPIARHAEVWDWQEELRAGDLLVINDTRVLKARLRVRRSGGGLAELLVLEPRGEGRWLCLGRPAKRLRPGDQLWLEALGEEPIALQVISKDSASGGRVVQFPSHYANAEQLELLLERYGEVPLPPYIKCHDPSDSERYQTRYASRPGAVAAPTAGLHLSDELLEALKQRGVMLTSVTLHVGLGTFRPVETEDLRHLQLHSEWVEVRDEVVAAVMACRARAGRVIAVGTTSVRALEGAALAGGGFLQSFCGPVDLVIQPGYRFAVVDGLLTNFHLPKSSLLLLVSAMVGRERLLALYAEAIEHHYRFFSYGDAMWIDPGAVLPAARPC

SEQ ID NO: 70646 - protein, 378 aa, Prochlorococcus sp.
  REGION 1..378: note = tr|A0A2E6GHE5|A0A2E6GHE5_9PROC S-adenosylmethionine:tRNA ribosyltransferase-isomerase; OS = Prochlorococcus sp. SP3034 OX=2024877 GN=queA PE=3 SV=1
MNTSKEEIDSDYNLNSYDYKLNTSLIANKPSNIRHQSRMMVVNDMSSLDSYSVDKLTLNIIDELNPGDAIIINDTKVMKARIYVELESGSIVELLVLELIRDSIWLCLAKPAKKLKINKILKLNSQNNKSVELKVVGIHKDTGGRLIEFPNHINDLLSMSNFLAKYGQIPLPPYITNEDSLFLHEETYQTRYAKNPGAIAAPTAGLHLSDFILSELTNKGVKILPITLHVGYGTFKPIDKVNLIDLKLHKEFVNVDQTVINEIKDVKRKGKKIIAIGTTSVRALESCYCSLNKDILPISKNVDLVIKPGFKFRVVDGLLTNFHLPKSSLLLLVSAIIGRKRLLDLYRIAIREKFRFFSYGDAMYITPEAFLREAKFKP

SEQ ID NO: 70647 - protein, 365 aa, Prochlorococcus sp.
  REGION 1..365: note = tr|A0A089PEH0|A0A089PEH0_9PROC S-adenosylmethionine:tRNA ribosyltransferase-isomerase; OS = Prochlorococcus sp. MIT 0801 OX=1501269 GN=queA PE=3; SV = 1
MLDQKDNLLSSYSYDLPNDLIAQSPTKSRHDAKLMIVKDGLDDSLNLVHAKVWDIKDILKTGDLLVVNNTRVVKARLKIRLSGGGTGELLLMEPRGDGRWLCLGRPARRMRGGDQLWLDTSPDNSLILKVIDKDERTGGRIIQFSNEFTSWTEMETLLDLCGEVPLPPYIDKDKSSGHEESYQTRFASKPGAIAAPTAGLHLSDELIENLKTRGIKIAQITLHVGLGTFRPLEKEDLSQLHLHSEWIEVTEETIKAITNCKEDGGKVFAVGTTSVRALEATYLSGRGTLEPYEGKVDLVIKPGFKFSVIDGLLTNFHLPKSSLLLLVSALIGRKRMLKLYKHAIYNKYRFFSYGDAMLITPESVI

SEQ ID NO: 70648 - protein, 415 aa, unidentified
  source 1..415: note = Prochlorothrix hollandica
  REGION 1..415: note = tr|A0A0M2PW44|A0A0M2PW44_PROHO S-adenosylmethionine:tRNA ribosyltransferase-isomerase; OS = Prochlorothrix hollandica PCC 9006 = CALU 1027; OX = 317619 GN=queA PE=3 SV=1
MAFSIAPQPIDSQLSSYDYLLPPDRIAQNPVVPRDRSRLLVVNSPHSHEHQWFYQIPHWLKPGDLLVLNNTQVIPARLRGHKLVDAGSLGAGPGLTGSGLGAGPGLGAEVEVLLLEALGDDRWLTLVKPGRRLKPGAQIIFTPPQADGGSAADRGATATVPDRTAPNLTASALTASALTATVLATDIPTGGRVLQFSPPPNTSLWDCFQTLGEVPIPPYITASQATPDQYQTVYSSQPGAVAAPTAGLHFTPELLAQLQAQGIDQAQITLHVGVGTFRPVEVENINHHAMHGEWIEISPETVAKIHETQSRGGRIIAVGTTVVRALEGAAALGTLQPYQGKVNLFIHPGYPWQVVEGLVTNFHLPRSSLMMLVSALVGRQRLLDLYALAIEHHYRFYSFGDAMVILPEARPSFSA

SEQ ID NO: 70649 - protein, 344 aa, Prolinoborus fasciculus
  REGION 1..344: note = tr|A0A2U3MG07|A0A2U3MG07_9NEIS S-adenosylmethionine:tRNA ribosyltransferase-isomerase; OS = Prolinoborus fasciculus OX=1056810 GN=queA PE=3 SV=1
MQLSDFNFDLPDELIARYPLETRSASRLLHLDAQGQYHDHQFTDILDLLEDGDLLVLNDTKVMKARLKGKRASGGAVEVLVERMQDRFIAYCHIKASNTPKAGAELFIGPDAVKVTVQGRHENLFIVEFSQPILDVLDQYGALPIPPYFNREAEEIDTERYQTVFNDPTKLASVAAPTASLHFDADLLAKLEAKGIQKTFVTLHVGAGTFLPVRTDDIQNHIMHSEWCDVPETAVEMIRQTKARGNKVISVGTTATRAVESAAQAHNGELAAWTGDTQIFIYPGYQFKVVDRLITNFHLPESTLLMLVSALSNRDNILNAYKHAVDSKYRFFSYGDAMLIDQAK

SEQ ID NO: 70650 - protein, 409 aa, unidentified
  source 1..409: note = Prolixibacter denitrificans
  REGION 1..409: note = tr|A0A2P8CCC8|A0A2P8CCC8_9BACT S-adenosylmethionine:tRNA ribosyltransferase-isomerase; OS = Prolixibacter denitrificans OX=1541063 GN=queA PE=3 SV=1
MVQTKNLQNISVQEFTYELPDERIAKYPLAERDQSQLLIWNRGAISDDAFKNLSTHLPESSLLVFNNTRVIRARLHFRKQTGARIEIFCLEPTTPADYALSFTQTEKCRWKCIVGNLKKWKGEILEQTLELDNQPIKFRAERIGEAGNAQEIEFSWDNPAFTFSELLEATGNIPIPPYLHRESEESDLTRYQTVYSRIKGSVAAPTAGLHFTERVFDSLPEKGIERAELTLHVGAGTFQPVKSDTIGGHEMHTEHILVEKTFIEQLRDKLDSVVAVGTTSIRTLESLYWIGKKLMENQNLSEKELLVAQWEPYQEENHLPSPKEALTAVIDYLSRKNMDKLNTATQIIILPGYEFRIVRGMITNFHQPQSTLLLLISAFLGDDWKRVYQHALENNYRFLSYGDSNLYIK

SEQ ID NO: 70651 - protein, 349 aa, unidentified
  source 1..349: note = Prolixibacter denitrificans
  REGION 1..349: note = tr|A0A2P8CLB6|A0A2P8CLB6_9BACT S-adenosylmethionine:tRNA ribosyltransferase-isomerase; OS = Prolixibacter denitrificans OX=1541063 GN=queA PE=3 SV=1
MKLSKFKYNLPENLIALHPAQNRDESRMMVLHRETGEIEHKTFKDIIDYFDDEDVMVFNNTKVFPARLYGNKEKTGAQIEVFLLRELNREQRLWDVLVDPARKIRIGNKLYFGDDDLLVAEVIDNTTSRGRTLRFLYDGPYEEFKKTLYSLGETPLPKFIDRPVEESDAERYQTIFAKHEGAVAAPTAGLHFSRELLKRLEIKGVDFAEITLHVGLGNFRSVDVEDLTKHKMDSEQIWINDKAAKQVNGAKKSKHRVCAVGTTVMRTLESSVSTMGTLKPYEGWTNKFIFPPYEFSVADSMVSNFHLPLSTLLMMVAAFGGYDKVMNAYQVAIKEKYRFGTYGDAMLII

SEQ ID NO: 70652 - protein, 349 aa, unidentified
  source 1..349: note = Prolixibacteraceae bacterium
  REGION 1..349: note = tr|A0A399T579|A0A399T579_9BACT S-adenosylmethionine:tRNA ribosyltransferase-isomerase; OS = Prolixibacteraceae bacterium XSD2 OX=2305463 GN=queA; PE = 3 SV=1
MKLSKFKYELNPERIALHPADNRDESKLMVLNRATRTIEHRLFKDVLDYFDDQDVMIFNDTKVFPARLYGNKEKTGAEIEVFLLRELNREQRLWDVLVDPARKIRIGNKLYFGDDDLLVAEVIDNTTSRGRTLRFLFDGPYDEFKKALYGLGETPLPKFINRQVQPEDKDRYQTIFAKHEGAVAAPTAGLHFSRELMKRLEIKGIDFAYVTLHVGLGNFRSVDVEDLTKHKMDSEQIWIRQEACDVVNNAKENKRNVCAVGTTVMRTLESSVSTQGHLKPYEGWTNKFIFPPYDFSVANSMITNFHLPYSTLLMMVAAFGGYDFVMEAYKSAIKEDYRFGTYGDAMLII

SEQ ID NO: 70653 - protein, 348 aa, unidentified
  source 1..348: note = Prolixibacteraceae bacterium
  REGION 1..348: note = tr|A0A4V5SBU7|A0A4V5SBU7_9BACT S-adenosylmethionine:tRNA ribosyltransferase-isomerase; OS = Prolixibacteraceae bacterium JC036 OX=2528631 GN=queA; PE = 3 SV=1
MKLSKFKYELPDELIALHPAYNRDESRLMVLHKESGEIEHKLFKDIVTYFNDKDVMVFNNTKVFPARLYGNKEKTGAEIEVFLLRELNREQRLWDVLVDPARKIRIGNKLYFGDDELVAEVIDNTTSRGRTLRFLYDGPYDEFKKTLYGLGQTPLPKFITRDVEPEDKDRYQTIFAKHEGAVAAPTAGLHFSRELLKRLEIIGVDFSEITLHVGLGNFRNVDVEDLTKHKMDSEQIWIPENACDVVNTAKDARKNVCAVGTTVMRTLETSVSTQGHLKPFEGWTNKFIFPPYEFRVANRMVTNFHLPYSTLLMMVCAFGGYDKVMNAYEVALKEKYRFGTYGDAMLIL

SEQ ID NO: 70654 - protein, 348 aa, unidentified
  source 1..348: note = Propionibacteriaceae bacterium
  REGION 1..348: note = tr|A0A2A9H0R0|A0A2A9H0R0_9ACTN S-adenosylmethionine:tRNA ribosyltransferase-isomerase; OS = Propionibacteriaceae bacterium ES.041 OX=1945889; GN = B0O41_3671 PE=3 SV=1
MSRLALRPSTTFGGRTPGFADRPIEADARSRDAVRLLVAAGPFIRHRRFGDLVDELRPGDVLVVNTSATVNGEVDASWRGMPIVLHATEGPFGDWVVELRSAPDAGRSILDAAPGDHVAITEGPGLRLLAPHPHRSSPTGEGNRLWRAEAEGGLRTLLDAVGRPIAYGYLAGRWPLAAYQTVFGQVPGSAEMASAGRPFTDALVQALLRRGVLIAPVLLHTGFSSQEAGEGPQPERFEVGPATARTLNLARRSGGRVVAVGTTATRAVESAVVGGRVVASRGWTDRVVTPAEPPQIVNGLITGWHDAGASHLLLVEAIAGAEKTQRAYDAALAEGYAWHEFGDSCLIL

SEQ ID NO: 70655 - protein, 348 aa, unidentified
  source 1..348: note = Propionibacteriaceae bacterium
  REGION 1..348: note = tr|A0A255GQA4|A0A255GQA4_9ACTN S-adenosylmethionine:tRNA ribosyltransferase-isomerase; OS = Propionibacteriaceae bacterium NML 030167 OX=2016500; GN = CGZ94_02460 PE=3 SV= 1
MSRLALRPSTTFGGRTPGFADRPIEADARSRDAVRLLVAAGPFIRHRRFGDLVDELRAGDVLVVNTSATVNGEVDASWRGMPIVLHATEGPFGDWVVELRSAPDAGRSILDAAPGDHVAITEGPGLRLLAPHPHRSSPTGEGNRLWRAEAEGGLRALLDAVGRPIAYGYLAGRWPLAAYQTVFGQVPGSAEMASAGRPFTDALVQALLRRGVLIAPVLLHTGFSSQEAGEGPQPERFEVGPATARTLNLVRRSGGRVVAVGTTATRAVESAVVGGRVVASRGWTDRVVTPAEPPQIVNGLITGWHDAGASHLLLVEAIAGAEKTQRAYDAALAEGYAWHEFGDSCLIL

SEQ ID NO: 70656 - protein, 346 aa, Propionispira arboris
  REGION 1..346: note = tr|A0A1H6WCG3|A0A1H6WCG3_9FIRM S-adenosylmethionine:tRNA ribosyltransferase-isomerase; OS = Propionispira arboris OX=84035 GN=queA PE=3 SV=1
MLLSDFDYNLPEELIAQTPCEPRNHSRLMVLDKTAKTIEHHHFYDLKDQLVPGDTLIFNDTRVMPARLIGHRESTGGKVEVFLLRRINGDEWETLVKPGKKALAGNIISFGTELSCEIMSHTDFGGRIVKFHYKGIFEEILDRLGETPLPPYIHEELADKERYQTVYSKEKGSAAAPTAGLHFTTEMLEELKAMGVNLGFVTLHVGLGTFRPVNVEKIEDHVMHKEYYCVPEATAKLICDTKARGDRVIAVGTTSIRTLESASERKGFIEAKSGWTEIFIYPGYEFKIVDAIITNFHLPKSTLLMLISAFSDKEFILQAYEEAIKEKYRFFSFGDAMIILNQKIKK

SEQ ID NO: 70657 - protein, 339 aa, Propionispora hippei
  REGION 1..339: note = tr|A0A1M6AHH7|A0A1M6AHH7_9FIRM S-adenosylmethionine:tRNA ribosyltransferase-isomerase; OS = Propionispora hippei DSM 15287 OX=1123003 GN=queA PE=3; SV = 1
MRLEDFDYLLPEERIAQLPCEPRDASRLLVLDRGRDELEHKQFFNLPEYLRPGDTLVFNDTRVIPARLIGHKEQTGAKIEVFLLNRLTATDWEVLVKPGKKARPGTVIVFSEALRCEILDGTDFGGRVIRFQFDGVFEEILDQLGETPLPPYIKEQLTDKERYQTVYARERGSAAAPTAGLHFTQGLLEHLRQQGINLAFVTLHVGLGTFRPVQVEDITQHNMHKEYYTITPEAAELINATKQAGNRVIAVGTTSVRTLETAAVGGQVKSGSGWTSIFIYPGCQFQVVDAIITNFHLPKSTLLMLISAFAGREKVLAAYREAVARQYRFFSFGDAMLII

SEQ ID NO: 70658 - protein, 340 aa, Propionispora sp.
  REGION 1..340: note = tr|A0A0K8J925|A0A0K8J925_9FIRM S-adenosylmethionine:tRNA ribosyltransferase-isomerase; OS = Propionispora sp. 2/2-37 OX=1677858 GN=queA PE=3 SV=1
MLVDEFDYDLPEELIAQHPCEPRDASRLLVLERNGQKINHRHFYDLPEFLQTGDLLVFNDTKVIPARLFGIKAGSGGKVEVFLLNRLTGNTWEVLVKPGKKVRPGTVVVFSDELQCEVLSTTDFGGRIVRFSFQGIFEEILDRLGEMPLPPYIKERLSDQERYQTVYARKRGAAAAPTAGLHFTHSLLEQIKLKGVQIVFVTLHVGLGTFRPVQVHDISEHSMHREYYNISEQAACQISEAKQAGRRVIAVGTTSVRTLETAAAEDGRITSCSGWTNIFIYPGYRFKMVDAMITNFHLPKSTLLMLISAFAGKDAVLKAYRAAVSERYRFFSFGDAMLIL

SEQ ID NO: 70659 - protein, 339 aa, Propionispora vibrioides
  REGION 1..339: note = tr|A0A1H8NXS6|A0A1H8NXS6_9FIRM S-adenosylmethionine:tRNA ribosyltransferase-isomerase; OS = Propionispora vibrioides OX=112903 GN=queA PE=3 SV=1
MRLEDFDYLLPEDRIAQLPCEPRDASRLLVLDRGRDELEHKQFFNLPEYLRPGDTLVFNDTRVIPARLIGHKEQTGAKIEVFLLNRLTATDWEVLVKPGKKARPGTVIVFSEALRCEILDCTDFGGRVIRFQFDGVFEEILDKLGETPLPPYIKEQLTDKERYQTVYARERGSAAAPTAGLHFTQGLLEHLRQQGINLAFVTLHVGLGTFRPVQVEDITQHTMHKEYYTITPEAAELINATKQAGNRVIAVGTTSVRTLETAAAGGQVRSGSGWTSIFIYPGCQFQVVDAIITNFHLPKSTLLMLISAFAGRERVLAAYREAVVRQYRFFSFGDAMLII

SEQ ID NO: 70660 - protein, 344 aa, Propionivibrio dicarboxylicus
  REGION 1..344: note = tr|A0A1G8BR21|A0A1G8BR21_9RHOO S-adenosylmethionine:tRNA ribosyltransferase-isomerase; OS = Propionivibrio dicarboxylicus OX=83767 GN=queA PE=3 SV=1
MLTLDDFDFPLPPALIAQHPALERTSSRLLHVAGERLDDRLFAELPTLVAPGDLLVFNNTKVIKARLFGRKESGGQIEVMIERVVDARHAIAQIRASKSPKPGSRILLEDAFTLTVTGRTGEQGEFFALELDGDGDLYALTERHGRLPLPPYITHAAAAEDETRYQTVYARHVGAVAAPTAGLHFDEAMLARLQEAGAELAWLTLHVGAGTFQPVRVHDVAAHRMHSETYELPQATVDAIARTRARGGRVIAVGTTTLRTLEAAAQGGELRAGTAETDIFITPGYRFRVIDRLITNFHLPKSTLLMLVSAFAGMAPIRAAYRHAVDEHYRFFSYGDAMLLERQP

SEQ ID NO: 70661 - protein, 298 aa, Prosthecobacter debontii
  REGION 1..298: note = tr|A0A1T4Y9L8|A0A1T4Y9L8_9BACT S-adenosylmethionine:tRNA ribosyltransferase-isomerase; OS = Prosthecobacter debontii OX=48467 GN=SAMN02745166_02772; PE = 3 SV=1
MLVVDRQSGTITHRMFTDLPEFVREGDLFVMNNTRVVPARYFSNEGSREVLRLEPLTATRWRCMVKPGKKFRIGHTVEIGEATGTVEQILENGERVIQWDREVDEAAHGHLALPHYMGRDDQPADRERYQTVFAQAAGAIAAPTAGLHFTPEILAQLPHAFVTLHVGVGTFQPVKAEKIAEHVMHSEQYEVTEETAVAIGQAKRVVAVGTTAMRTLETVARDNAGRVVAQSGSTDIFIYPGYEFRAVGAMLTNFHLPKSTLIMLVSAFAGKELILRAYEEAIRERYRFFSYGDCMLIL

SEQ ID NO: 70662 - protein, 353 aa, Prosthecobacter fusiformis
  REGION 1..353: note = tr|A0A4R7RKI3|A0A4R7RKI3_9BACT S-adenosylmethionine:tRNA ribosyltransferase-isomerase; OS = Prosthecobacter fusiformis OX=48464 GN=queA PE=3 SV=1
MASGCLQDRRIIFHFLALAASRRSALPTVLTSDFDYSLPPELIASEPLPDRAASRMLVVHRETGTLEHRLFSDLPKFARAGDLWVMNNTRVVPARYFSNDGSREVLRLEPLTETRWRCMVKPGKRFRVGHTVEVGEATGTVIEILENGERIIQWDRVVDEEAHGHLALPHYMGRDDQPADRERYQTVFAQAAGAIAAPTAGLHFTPEILAGLPHAFVTLHVGVGTFQPVKVDHIQEHVMHRECYVVPPETAVAVQNAQRVVAVGTTAMRTLETVARDNNGQIVAQSGSTDIFIYPGFQFKAVGAMLTNFHLPKSTLIMLVSAFAGRELIMRAYEEAIRERYRFFSYGDCMLIL

SEQ ID NO: 70663 - protein, 341 aa, Prosthecochloris aestuarii
  REGION 1..341: note = tr|B4S6I6|B4S6I6_PROA2 S-adenosylmethionine:tRNA ribosyltransferase-isomerase OS=Prosthecochloris aestuarii (strain DSM 271 / SK 413) OX=290512 GN=queA PE=3 SV=1
MNVSDFDYELPESSIALYPPAERGTTRLEVLCRETGSITHARYADLHRFLEPGDLLVLNNTRVILARLFASKKTGAKIELVLLEKHERDQNLVMYRGRLKRGDILISHGEELLVDSLVGNGIASVSCLSGRQIASFFQEFAEVPIPPYLRRDAEEVDRERYQTVFAEIPGSVAAPTASLNMTPELIDTLRLKGVQIASITLHVGLGTFMPIRVDDLASHVMHREYYDIPVSVVSAIRDARDRRKRVIAVGTTVTRALEHASQTVLHTNPVMPVRGEADIFIYPGYQFQTIDALVTNYHAPRSTVLMLTAAFAGWDLLRKGYQEALQNDYRFLSYGDSMLIV

SEQ ID NO: 70664 - protein, 346 aa, Prosthecochloris aestuarii
  REGION 1..346: note = tr|B4S8U6|B4S8U6_PROA2 S-adenosylmethionine:tRNA ribosyltransferase-isomerase OS=Prosthecochloris aestuarii (strain DSM 271 / SK 413) OX=290512 GN=queA PE=3 SV=1
MRLSNFRYSLPKTKIADRPVSPRDSSKLMVLNRRKKEIEHKTFGDIVSFFKKGDLLILNNSRVFPAKIFGQKEKTDAKIEVFLLRELNKEAGLWDVLVDPARKVRVGNKIYFQDDVVAEVVDNTTSRGRTIRFLNPEIDVFDLVEKIGTVPLPPYFSRKPDAGDREDYQTVYASQTGAVVAPMAGLHFTMPLLEAIKKKGVKILPITLHPSLSSFNAIEVEDVSKHKMDSEYFNIPYQTAMEVNETKLNKSGRIIAVGTTTCRVLEANATVEGKIKFGQGWTDKFIYPPYQFKVTDALVANFQQPETTLLMMVSAFAEHRFLMDSYKTAMKENYRFLAYGDAMFIH

SEQ ID NO: 70665 - protein, 346 aa, unidentified
  source 1..346: note = Prosthecochloris marina
  REGION 1..346: note = tr|A0A317T8B7|A0A317T8B7_9CHLB S-adenosylmethionine:tRNA ribosyltransferase-isomerase; OS = Prosthecochloris marina OX=2017681 GN=queA PE=3 SV=1
MRLSNFRYSLPKTRIADRPVADRDTCKLMVLNRRKKEIDHKVFSDIVSYFKKGDLLVLNNSRVFPAKIFGQKEKTDAKIEVFLLRELNKEAGLWDVLVDPARKVRVGNKIYFQDDVVAEVVDNTTSRGRTIRFLNPEIDVFELVEKIGTVPLPPYFTRKPDESDRKDYQTVYASQTGAVVAPMAGLHFTMPLLEEIKKKGVKILPLTLHPSLSSFNAIEVEDVSKHKMDSEYFNIPYQTAMEINETKLNKTGRVIAVGTTTCRVLEANATVEGKIKFGQGWTDKFIYPPYQFKVTDALVTNFQQPETTLLMMVSAFAEYRLLMDAYKKALKSDYHFLAYGDAMFIH

SEQ ID NO: 70666 - protein, 341 aa, unidentified
  source 1..341: note = Prosthecochloris marina
  REGION 1..341: note = tr|A0A317T4E6|A0A317T4E6_9CHLB S-adenosylmethionine:tRNA ribosyltransferase-isomerase; OS = Prosthecochloris marina OX=2017681 GN=queA PE=3 SV=1
MKVSDYDYELPESSIAIYPPADRGTTRLEVLSRDTGAIIHAAYAELGRFIEPGDLLVLNNSRVVQARLFAQKTTGAKVELVLLEKHGDHQDLVMYRGRLKPGDVLLAHGNKLLVSAVEGEGVARVVCQDGRSVPDFFADYGDVPIPPYLKRAAEEVDRERYQTVFAEIPGSVAAPTASLNMTRELLDSLEEKGVVFAYVTLHVGLGTFLPIRGDDLDSHVMHREYYCIPADTVRKIRETKGKKKKVVAVGTTVTRSLEHAASVIEQQQSPREIAGEADIFIYPGYSFRVIDGLVTNYHAPRSTVLMLTAAFAGWENLKHAYEEALDRDYRFLSYGDSMLIV

SEQ ID NO: 70667 - protein, 341 aa, Prosthecochloris sp.
  REGION 1..341: note = tr|A0A422HIM6|A0A422HIM6_9CHLB S-adenosylmethionine:tRNA ribosyltransferase-isomerase; OS = Prosthecochloris sp. ZM_2 OX=2045206 GN=queA PE=3 SV=1
MKTSGFDYDLPQERIAVYPPEERGSTRLEVLDRTAREIGHARYRDLGSYLRTGDLLVLNNSQVVQARMHARKTTGGRVELVLLEKHEGVQNRVMYRGRLKDGDVLHAHGHELHVQRVEGDGVALLELPEGGTLAGFFARYGETPIPPYLQRSAEEVDRERYQTVFAEIPGSVAAPTASLNMTPELLASLQQNGVKTAYVTLHVGLGTFMPIRVEDLSSHVMHREYYEIPVDTLEAIRAAKQNGGRVVAVGTTVTRALEHAAAGVLDPAENSCIEGEADIFIYPGYAFRVIDALLTNFHAPRSTVLMLTAAFAGRELLQEAYREALERDYRFLSYGDSMLIV

SEQ ID NO: 70668 - protein, 340 aa, Prosthecochloris sp.
  REGION 1..340: note = tr|A0A1B1Q3H8|A0A1B1Q3H8_9CHLB S-adenosylmethionine:tRNA ribosyltransferase-isomerase; OS = Prosthecochloris sp. CIB 2401 OX=1868325 GN=queA_2 PE=3; SV = 1
MRPSDFDYELPAERIAQYPPEERGSTRLEVLDRNTGRITHARYAGLSGFLAEGDLLVLNNTKVILARLQARKITGAKIELVLLEKHEGEQELAMYRGRLRQGDRLVTEGGELVVDAIMGEGVACLSSPDGPVAALFQRYGEVPIPPYLRRDAEEVDRERYQTVFAEIPGSVAAPTASLNLTPDILRELGEKGVEITSMTLHVGLGTFLPIRADDLANHVMHREYYHIPASTVEAVRRVRSGRGRVVAVGTTVTRALEHAASRLIAEGAPVALSGEADIFIYPGYEFRVIEGLLTNYHAPRSTVLMLTAAFAGPDFLRRAYAEALEREYRFLSYGDSMLIL

SEQ ID NO: 70669 - protein, 346 aa, Prosthecochloris vibrioformis
  REGION 1..346: note = tr|A0A5C4S1J8|A0A5C4S1J8_PROVB S-adenosylmethionine:tRNA ribosyltransferase-isomerase; OS = Prosthecochloris vibrioformis OX=1098 GN=queA PE=3 SV=1
MRLSNFRYTLPKTKIADRPASPRDSCKMMVLNRRKKEVEHKVFSDIVSFFKKGDLLILNNTRVFPAKIFGQKEKTDAKIEVFLLRELNKEAGLWDVLVDPARKVRVGNKIYFQDDVVAEVVDNTTSRGRTIRFLNPEIDVFELVEKIGTVPLPPYFSRKPDDADRQDYQTVYASQTGAVVAPMSGLHFTMPLLEEIRKKGVKILPITLHPSLSSFNAIEVEDVSKHKMDSEYFNIPYQTAMEINETKINKSGRVIAVGTTTCRVLEANATVDGKIKFGQGWTDKFIYPPYQFKVTDALVTNFQQPETTLLMMVSAFADHRFLMDSYKTALKNNYRFLAYGDAMFIY

SEQ ID NO: 70670 - protein, 340 aa, Prosthecochloris vibrioformis; identical to SEQ ID NO: 70668
  REGION 1..340: note = tr|A0A5C4S015|A0A5C4S015_PROVB S-adenosylmethionine:tRNA ribosyltransferase-isomerase; OS = Prosthecochloris vibrioformis OX=1098 GN=queA PE=3 SV=1

SEQ ID NO: 70671 - protein, 361 aa, Prosthecomicrobium hirschii
  REGION 1..361: note = tr|A0A0P6VUK5|A0A0P6VUK5_9RHIZ S-adenosylmethionine:tRNA ribosyltransferase-isomerase; OS = Prosthecomicrobium hirschii OX=665126 GN=queA PE=3 SV=1
MRVDLFDFDLPAERIALRPASPREAARLMVVRPDEGCRIEDRTVGDLPELVRPGDALVFNDTRVIPAELHGTRIRDEGRVAVAFTLLKREGADRWRAFARPGKRLKVGDRILFGEQGRACLLGEVWATVAEKAEDGQVLIAFDLAGPDLDQAIHAVGTVPLPPYISSKRAADAQDLADYQTVYARAEGAVAAPTAGLHFTPDLIARLDAAGVERHFVTLHVGAGTFLPVKAEDTAEHRMHSEWGTIDVATADALNAVRARGGRIVAVGTTSLRLLESAADGEGRIQPFSGETDIFITPGKPIRAVDMLMTNFHLPRSTLFMLVSAFAGLDCMRAAYAQAIATGYRFYSYGDTSLLFRATGR

SEQ ID NO: 70672 - protein, 341 aa, Proteiniborus ethanoligenes; identical to SEQ ID NO: 67033
  REGION 1..341: note = tr|A0A1H3QRN4|A0A1H3QRN4_9FIRM S-adenosylmethionine:tRNA ribosyltransferase-isomerase; OS = Proteiniborus ethanoligenes OX=415015 GN=queA PE=3 SV=1

SEQ ID NO: 70673 - protein, 341 aa, Proteiniborus sp.
  REGION 1..341: note = tr|A0A1M4M7A4|A0A1M4M7A4_9FIRM S-adenosylmethionine:tRNA ribosyltransferase-isomerase; OS = Proteiniborus sp. DW1 OX=1889883 GN=queA PE=3 SV=1
MKREDFYFDLPEELIAQVPIENREGSRLLVLDKNTGEIVHGVFSDIVQYLDKGDCLVLNNTRVIPARLFGRRKDTGSSVEFLLLKRIDNNKWEVLVKPGKKARPGGVFDFGEGLMEGEILAVQDGGTRIIEFKYDGVFEQILDELGEMPLPPYIKEKLEDKERYQTVYSKKEGSAAAPTAGLHFTEFLLQKIKEKGVNIVYVTLHVGLGTFRPVKVEDIEEHDMHYEYYEIDEESANIINESKKAGGKIVAVGTTSVRTIESASNEEGQVLPKNGWTNIFIYPGYKYKVIDRLITNFHLPESTLIMLVSALAGRENILHAYNEAIKLKYRFFSFGDAMFIK

SEQ ID NO: 70674 - protein, 342 aa, Proteiniclasticum ruminis
  REGION 1..342: note = tr|A0A1I4YK24|A0A1I4YK24_9CLOT S-adenosylmethionine:tRNA ribosyltransferase-isomerase; OS = Proteiniclasticum ruminis OX=398199 GN=queA PE=3 SV=1
MKVEDFYFDLPEELIAQHPLEKRDSSRLLVLDKKTGEINHQHFGDLPDFLKKGDVLVLNDTRVIPARLLGVKEDTEGKIEFLLLNRKMLDTYECLAKPGKRARKGAKFIFGEGLLTAEVVDVLENGNRIVKFSYDGVFEEILDRLGEMPLPPYIKEKLEDRERYQTVYSREEGSAAAPTAGLHFTKELLDKLQSMGVQTAFLTLHVGLGTFRPVKVESVENHDMHEEFYSLDAKNAEIINNAKNEGRRIISVGTTSTRTLETIADEKGFVREASGYTKIFIYPGYRFKCVDCLITNFHLPESTLIMLVSALAGQENVMRAYRTAVKEKYRFFSFGDSMLIKE

SEQ ID NO: 70675 - protein, 342 aa, Proteiniclasticum ruminis
  REGION 1..342: note = tr|A0A1G8GCX9|A0A1G8GCX9_9CLOT S-adenosylmethionine:tRNA ribosyltransferase-isomerase; OS = Proteiniclasticum ruminis OX=398199 GN=queA PE=3 SV=1
MRVEDFNFELPEELIAQHPLEKRDSSRLLVLDKKTGEINHKHFGDLPDFLKKGDVLVLNDTRVIPARLLGVKEDTEGKIEFLLLNRKKLDTYECLAKPGKRARKGAKFTFGEGLLKAEVLDVLENGNRIVKFSYEGVFEEILDRLGEMPLPPYIKEKLEDRERYQTVYSREEGSAAAPTAGLHFTKELLDKLQSMGVETAFLTLHVGLGTFRPVKVESVENHDMHEEFYSLDAKNAEIINTAKNEGRRIISVGTTSTRTLETIADEKGFVREASGYTKIFIYPGYQFKCVDCLITNFHLPESTLIMLVSALAGQENVMNAYRTAVKEKYRFFSFGDSMLIKE

SEQ ID NO: 70676 - protein, 342 aa, Proteiniclasticum sp.
  REGION 1..342: note = tr|A0A358S4V6|A0A358S4V6_9CLOT S-adenosylmethionine:tRNA ribosyltransferase-isomerase; OS = Proteiniclasticum sp. OX=2053595 GN=queA PE=3 SV=1
MKVEDFYFDLPEELIAQHPLEKRDSSRLLVLDKKTGEINHQHFGDLPDFLRKGDVLVLNDTRVIPARLLGVKEDTEGKIEFLLLNRKMLDTYECLAKPGKRARKGAKFTFGEGLLKAEVLDVLENGNRIVKFFYDGVFEEILDRLGEMPLPPYIKEKLEDRERYQTVYSREEGSAAAPTAGLHFTKELLDKLQSMGVQTAFLTLHVGLGTFRPVKVESVENHDMHEEFYSLDAKNAEIINNAKNEGRRIISVGTTSTRTLETIADEKGFVREASGYTKIFIYPGYHFKCVDCLITNFHLPESTLIMLVSALAGQENVMSAYRTAVKEKYRFFSFGDSMLIKE

SEQ ID NO: 70677 - protein, 350 aa, unidentified
  source 1..350: note = Proteiniphilum saccharofermentans
  REGION 1..350: note = tr|A0A1R3T5U0|A0A1R3T5U0_9BACT S-adenosylmethionine:tRNA ribosyltransferase-isomerase; OS = Proteiniphilum saccharofermentans OX=1642647 GN=queA; PE = 3 SV=1
MKLSQFKFNLPEELIAKYPAAHRDESRLLVVHKKSDQLEHKTFKEVLDYFNKGDFFIFNNTKVFPARLFGNKEKTGAKIEVFLLRELNPEQHLWDVLVNPARKIRIGNKLYFGENEELVAEVIDNTTSRGRTLRFLYDGPYDEFKNQLFSIGETPIPEYLERSAEPEDVERYQNIFAQHEGAVVAPAAGLHFSRELMKRMEIRDIDFGFLTLHNGLGAYRMIDVEDLTKHKMESEQMIITEELCEKVNRAKDAEKNICAVGTSVLRAIETTVSTDGHLKPRNGWTNKFIFPPYDFTLTNSLITNFHLPYSTLLMMACAFGGYEKVMNVYEEAIKEKYTFGAYGDAMLIVD

SEQ ID NO: 70678 - protein, 413 aa, unidentified
  source 1..413: note = Proteiniphilum saccharofermentans
  REGION 1..413: note = tr|A0A1R3T832|A0A1R3T832_9BACT S-adenosylmethionine:tRNA ribosyltransferase-isomerase; OS = Proteiniphilum saccharofermentans OX=1642647 GN=queA; PE = 3 SV=1
MQKEKIQQLQISRYNYHLPDDKIAKYPLERRDASKLLLYDGVGIDTHRFGELPDLLPEGSLLLFNNTRVIHARLLFLKETGAQVEVFCLSPHYPADYVVNFQQRRHCSWYCMIGNAKRWKEGTLQMQISTHDGIVNLKAEKADIAGSDTVVRFCWDNEGFTFSELLEIAGKLPIPPYLNRPSEAIDDETYQTVYSRSEGSVAAPTAGLHFTEAVMEELRNKGILTAEVTLHVGAGTFKPVKSEIIAGHEMHTEFISVPKETIEKLLTHNSGKIVVVGTTSMRTVESLYYIGRKLSTNPDISPEELGVKQWEPYDDTVEISPEQALLNILNYLEETGLQQLISSTQLMIAPGYEFHFPDAIITNFHQPQSTLLLLISAFAGDDWRKIYNYALENDYRFLSYGDSSLLFKKPIFG

SEQ ID NO: 70679 - protein, 414 aa, Proteiniphilum sp.
  REGION 1..414: note = tr|A0A117MIH5|A0A117MIH5_9BACT S-adenosylmethionine:tRNA ribosyltransferase-isomerase; OS = Proteiniphilum sp. 51_7 OX=1641377 GN=queA PE=3 SV=1
MKKEEIAHLSISRFHYHLPEEKIARYPLPQRDASRLLIYDEGAIGSAHFIDLPQHLPEGSLLLFNNTRVIHARLLFYKPGGARIEIFCLTPSHPADYAVNFQQRQSCSWHCMTGNARRWREEPLVMKVPTDKGEMTLQAERVSRQGSETEIRFSWDDDRFTFSELLEAAGQLPIPPYLNRPSEVQDEVTYQTVYSRIEGSVAAPTAGLHFTPRVMERLHARGVAIAEVTLHVGAGTFRPVKSEIIADHEMHTEFISVERETIEKLLHHQGKLIVVGTTSLRTVESLYYIGRKLQDQPNLQPHELTVRQWEPYEEEKAITPADALQNILLYLDRTGEKRLMADTQIIIVPGYGFHYPDALMTNFHQPQSTLLLLIAAFVGEDWRKIYDYALREGYRFLSYGDSSLLWKKMKEACK

SEQ ID NO: 70680 - protein, 408 aa, Proteiniphilum sp.
  REGION 1..408: note = tr|A0A3M8EEY5|A0A3M8EEY5_9BACT S-adenosylmethionine:tRNA ribosyltransferase-isomerase; OS = Proteiniphilum sp. X52 OX=2382159 GN=queA PE=3 SV=1
MQKEKIRQLQISQYNYPLPDDRIAKYPLPQRDASKLLLYSGLQISTFQFSELPELLPEGSLLLFNDTRVIHARLLFQKETGAQIEVFCLSPHYPADYGVNFQQRRACSWNCMIGNAKRWKGEPLQMRIPVNKGIVGLKVEKAGVTDGDDTVVRFSWDNEEFTFSELLEIAGKLPVPPYLNRPSEAKDDETYQTVYSRFEGSVAAPTAGLHFTEGMMGRLRQKGIRTAEVTLHVGAGTFKPVKSETIADHEMHAEFISVPKETIEQLLHHSGKVVAVGTTSMRTVESLYYIGKKLGVNPGLSGHELDVKQWEPYDGTPDIAPKQALRNILRHLEETGRQRLISSTRLMIVPGYEFHFPNAIITNFHQPQSTLLLLVSAFVGDDWHKIYDYALENDYRFLSYGDSSLLWK

SEQ ID NO: 70681 - protein, 213 aa, unidentified
  source 1..213: note = Proteobacteria bacterium
  REGION 1..213: note = tr|R6A861|R6A861_9PROT S-adenosylmethionine:tRNA ribosyltransferase-isomerase OS=Proteobacteria bacterium CAG:139 OX=1262986 GN=BN492_01151 PE=3 SV=1
MLEVLDEYGKVPLPPYIQHAAEKSDESRYQTVYAKYPGAVAAPTAGLHFTDELLQQIRDKGCEEVFVTLHVGAGTFQPVRVENLSEHIMHSEWYSISPEAAEKINKAKAEGRRVVCVGTTSLRTVEASASQNPEGKVRAESADTRLFIKPGYEFKVCDAMVTNFHLPKSTLVMLVSALCGRDEILAAYKHAVDEKYRFFSYGDACFLEKKVNQ

SEQ ID NO: 70682 - protein, 355 aa, unidentified
  source 1..355: note = Proteobacteria bacterium
  REGION 1..355: note = tr|A0A1W9I0M4|A0A1W9I0M4_9PROT S-adenosylmethionine:tRNA ribosyltransferase-isomerase; OS = Proteobacteria bacterium SG_bin8 OX=1827387 GN=queA; PE = 3 SV=1
MQTDDFDFELPAERIALRPAVPRECARLLVIKRHRGIIAETTIADLPLYLRGGDALIVNDTRVIPCALKGYRQRGEARVALNVTLHRRTRGDAWWAFAKPGRRLAVDDMLVFSSADEKLTVMARLCEKGEGGEVLLEFDRAGVALDQAVAAVGDMPLPPYIASRRAADQRDRSDYQTIYASRDGSVAAPTAGLHLTEKMMTRLAVHEIGLERVTLHVGGGTFLPVKSAAIADHRMHAEWGEIDSATAARLAARRAGGGRLIAVGTTAARLLESAARPSGSVNAFRGETDIFMTPGYRFAAVDGLMTNFHLPRSTLFMLVCAFAGYDVMRQAYAHAIATGYRFFSYGDACLLLPEG

SEQ ID NO: 70683 - protein, 356 aa, Proteus hauseri
  REGION 1..356: note = tr|A0A410XAV8|A0A410XAV8_PROHU S-adenosylmethionine:tRNA ribosyltransferase-isomerase; OS = Proteus hauseri OX=183417 GN=queA PE=3 SV=1
MRVSDFRFELPEALIAHYPQPQRSGCRLLSLDGTTGELSHDVFTDVLDKLNAGDLLVFNNTRVIPARLYGRKASGGKIEVLVERMLDEHRVLAHVRASKSPKEGAALILGEDESVQATMVARHDTLFEIRFDDERDVLTILNSIGHMPLPPYIDRPDEESDKELYQTVYNERPGAVAAPTAGLHFDEPLLEALRNKGVEMAFVTLHVGAGTFQPVRVDNIEEHTMHSEYAEVPQDVVDAVLACKARGNKVVAVGTTSVRSLESAANAAKDALIAPFFDDTQIFIYPGYNYQVIDALITNFHLPESTLIMLVSAFAGYKNTMNAYKEAVEQQYRFFSYGDAMFITRNPLAIDEKVGI

SEQ ID NO: 70684 - protein, 357 aa, Proteus hauseri
  REGION 1..357: note = tr|V6MWE4|V6MWE4_PROHU S-adenosylmethionine:tRNA ribosyltransferase-isomerase OS=Proteus hauseri ZMd44; OX = 1312367 GN=tgt PE=3 SV=1
MRVSDFTFELPEALIAHYPQPQRSGCRLLSLDGETGALSHGIFTDVLDKINAGDLLVFNNTRVIPARIYGRKASGGKIEVLVERMLDEHRVLAHVRASKSPKEGAELVLGEDESVQATMVARHDTLFEIRFDDERDVLTILNSIGHMPLPPYIDRPDEESDKELYQTVYNERPGAVAAPTAGLHFDEPLLQALKEKGVEMAFVTLHVGAGTFQPVRVDNIEEHTMHSEYAEVPQEVVDAVLACKARGNRVIAVGTTSVRSLESAAKAAKDALIAPFFDDTQIFIYPGYQYQIIDALITNFHLPESTLIMLVSAFAGYKNTMNAYKEAVEQEYRFFSYGDAMFITCNPFAINEKVGQE

SEQ ID NO: 70685 - protein, 357 aa, Proteus mirabilis
  REGION 1..357: note = sp|B4EU12|QUEA_PROMH S-adenosylmethionine:tRNA ribosyltransferase-isomerase OS=Proteus mirabilis (strain HI4320) OX=529507 GN=queA PE=3 SV=1
MRVSDFRFDLPESLIAHYPHPQRSGCRLLSLEGKTGNLSHGVFTDVLDKLNAGDLLVFNNTRVIPARIYGRKASGGKIEVLVERMLDEHRVLAHVRASKSPKEGASLILGEDESVQATMIARHDTLFEIRFDDERDVLTILNSIGHMPLPPYIDRPDERSDKELYQTVYNERPGAVAAPTAGLHFDEPLLEALRNKGVEMAFVTLHVGAGTFQPVRVDNIEEHTMHSEYAEVPQEVVDAVLACKARGNRVIAVGTTSVRSLESAAKAAKDALIAPFFDDTQIFIYPGYQYQIIDALITNFHLPESTLIMLVSAFAGYKNTMNAYNVAVEQKYRFFSYGDAMFITRNPLAINEKVGEE

SEQ ID NO: 70686 - protein, 357 aa, Proteus mirabilis
  REGION 1..357: note = tr|A0A1Z1SZM5|A0A1Z1SZM5_PROMI S-adenosylmethionine:tRNA ribosyltransferase-isomerase; OS = Proteus mirabilis OX=584 GN=queA PE=3 SV=1
MRVSDFRFDLPESLIAHYPHPQRSGCRLLSLEGKTGNLSHGVFTDVLDKLNAGDLLVFNNTRVIPARIYGRKASGGKIEVLVERMLDEHRVLAHVRASKSPKEGASLILGEDESVQATMIARHDTLFEIRFDDERDVLTILNSIGHMPLPPYIDRPDEGSDKELYQTVYNERPGAVAAPTAGLHFDEPLLEALRNKGVEMAFVTLHVGAGTFQPVRVDNIEEHTMHSEYAEVPQEVVDAVLACKARGNRVIAVGTTSVRSLESAAKAAKDALIAPFFDDTQIFIYPGYQYQVIDALITNFHLPESTLIMLVSAFAGYKNTMNAYNVAVEQKYRFFSYGDAMFITRNPLAINEKVGEE

SEQ ID NO: 70687 - protein, 357 aa, Proteus penneri
  REGION 1..357: note = tr|A0A379EIF8|A0A379EIF8_9GAMM S-adenosylmethionine:tRNA ribosyltransferase-isomerase; OS = Proteus penneri OX=102862 GN=queA PE=3 SV=1
MRVSDFTFELPEALIAHYPQPQRSGCRLLSLEGETGALSHGIFTDVLDKINAGDLLVFNNTRVIPARIYGRKASGGKIEVLVERMLDEHRVLAHVRASKSPKEGAALVLGEDESVQATMVARHDTLFEIRFDDERDVLTILNSIGHMPLPPYIDRPDEESDKELYQTVYNERPGAVAAPTAGLHFDEPLLQALKEKGVEMAFVTLHVGAGTFQPVRVDNIEEHTMHSEYAEVPQDVVDAVLACKARGNRVIAVGTTSVRSLESAAKATNDALIAPFFDDTQIFIYPGYQYQVIDALITNFHLPESTLIMLVSAFAGYRNTMNAYKEAVEQEYRFFSYGDAMFITRNPLAINEKVGQE

SEQ ID NO: 70688 - protein, 307 aa, Proteus penneri
  REGION 1..307: note = tr|C0AYU6|C0AYU6_9GAMM S-adenosylmethionine:tRNA ribosyltransferase-isomerase OS=Proteus penneri ATCC 35198; OX = 471881 GN=queA PE=3 SV=1
MLVICWFFNNTRVIPARIYGRKASGGKIEVLVERMLDEHRVLAHVRASKSPKEGAALVLGEDESVQATMVARHDTLFEIRFDDERDVLTILNSIGHMPLPPYIDRPDEESDKELYQTVYNERPGAVAAPTAGLHFDEPLLQALKEKGVEMAFVTLHVGAGTFQPVRVDNIEEHTMHSEYAEVPQDVVDAVLACKARGNRVIAVGTTSVRSLESAAKATNDALIAPFFDDTQIFIYPGYQYQVIDALITNFHLPESTLIMLVSAFAGYRNTMNAYKEAVEQEYRFFSYGDAMFITRNPLAINEKVGQE

SEQ ID NO: 70689 - protein, 354 aa, Proteus sp.; identical to SEQ ID NO: 67669
  REGION 1..354: note = tr|A0A1F2HCN9|A0A1F2HCN9_9GAMM S-adenosylmethionine:tRNA ribosyltransferase-isomerase; OS = Proteus sp. HMSC10D02 OX=1581079 GN=queA PE=3 SV=1

SEQ ID NO: 70690 - protein, 357 aa, Proteus vulgaris
  REGION 1..357: note = tr|A0A379F7A4|A0A379F7A4_PROVU S-adenosylmethionine:tRNA ribosyltransferase-isomerase; OS = Proteus vulgaris OX=585 GN=queA PE=3 SV=1
MRVSDFTFKLPEALIAHYPQPQRSGCRLLSLEGETGALSHGIFTDVLDKINAGDLLVFNNTRVIPARIYGRKASGGKIEVLVERMLDEHRVLAHVRASKSPKEGATLVLGEDESVQATMVARHDTLFEIRFDDERDVLTLLNSIGHMPLPPYIDRPDEESDKELYQTVYNERPGAVAAPTAGLHFDEPLLQALKEKGVEMAFVTLHVGAGTFQPVRVDNIEEHTMHSEYAEVPQEVVDAVLACKARGNRVIAVGTTSVRSLESAAKATNDALIAPFFDDTQIFIYPGYQYQVIDALITNFHLPESTLIMLVSAFAGYKNTMNAYKEAVEQAYRFFSYGDAMFITRNPLAINEKIGQE

SEQ ID NO: 70691 - protein, 357 aa, Proteus vulgaris
  REGION 1..357: note = tr|A0A0G4Q7F7|A0A0G4Q7F7_PROVU S-adenosylmethionine:tRNA ribosyltransferase-isomerase; OS = Proteus vulgaris OX=585 GN=queA PE=3 SV=1
MRVSDFTFELPEALIAHYPQPQRSGCRLLSLEGETGALSHGIFTDVLDKINAGDLLVFNNTRVIPARIYGRKASGGKIEVLVERMLDEHRVLAHVRASKSPKEGAALVLGEDESVQATMVARHDTLFEIRFDDERDVLTILNSIGHMPLPPYIDRPDEESDKELYQTVYNERPGAVAAPTAGLHFDEPLLQALKEKGVEMAFVTLHVGAGTFQPVRVDNIEEHTMHSEYAEVPQDVVDAVLACKARGNRVIAVGTTSVRSLESAAKATNDALIAPFFDDTQIFIYPGYQYQIIDALITNFHLPESTLIMLVSAFAGYRNTMNAYKEAVEQEYRFFSYGDAMFITRNPLAINEKVGQE

SEQ ID NO: 70692 - protein, 360 aa, Providencia alcalifaciens
  REGION 1..360: note = tr|B6XA46|B6XA46_9GAMM S-adenosylmethionine:tRNA ribosyltransferase-isomerase OS=Providencia alcalifaciens DSM 30120 OX=520999 GN=queA PE=3 SV=1
MRVSDFTFELPEELIAHYPQAERSSCRLLGLDGATGQLTHGVFTDILEKLEPGDLLVFNNTRVIPARLFGRKASGGKIEVLIERMLDEHRVLAHVRASKAPKEGAALLLGEDESVNATMVARHGALFELRFDDARDVLSILNQIGHMPLPPYIDRPDEESDKELYQTVYSQRPGAVAAPTAGLHFDEPLLDALRQKGVEMAFVTLHVGAGTFQPVRVDSIEDHIMHSEYAEVPQEVVDAVLACKARGNRVIAVGTTSVRSLESAAKASQNALIAPFFDDTQIFIYPGYEYQVIDALITNFHLPESTLIMLVSAFAGYQNTMRAYKEAVEQKYRFFSYGDAMFITPNANARFEQVGSAEQE

SEQ ID NO: 70693 - protein, 360 aa, Providencia alcalifaciens; identical to SEQ ID NO: 70692
  REGION 1..360: note = tr|X6Q6E5|X6Q6E5_9GAMM S-adenosylmethionine:tRNA ribosyltransferase-isomerase OS=Providencia alcalifaciens F90-2004 OX=1256987 GN=queA PE=3 SV=1

SEQ ID NO: 70694 - protein, 356 aa, Providencia burhodogranariea
  REGION 1..356: note = tr|K8W199|K8W199_9GAMM S-adenosylmethionine:tRNA ribosyltransferase-isomerase OS=Providencia burhodogranariea DSM 19968 OX=1141662 GN=queA PE=3 SV=1
MRVSDFTFELPEELIAHYPQAQRSACKLLNLDGPTGQLTHGVFTDILEKLNPGDLLVFNNTRVIPARLFGRKASGGKIEVLVERMLDEHRVLAHIRASKAPKEGAELILGEDESVNATMVARHGALFELQFEDDRDVLTILNQIGHMPLPPYIDRPDEESDKELYQTVYSQRPGAVAAPTAGLHFDEPLLEALRAKGIEMAFVTLHVGAGTFQPVRVDTIEDHVMHSEYAEVPQDVVDAVLACKARGNRVVAVGTTSVRSLESAAKASQNALIAPFFDDTQIFIFPGFEYQIVDILITNFHLPESTLIMLVSAFAGYQNTMQAYKEAVAQKYRFFSYGDAMYITRNPLARLEQVGE

SEQ ID NO: 70695 - protein, 358 aa, Providencia heimbachae
  REGION 1..358: note = tr|A0A4D7IM40|A0A4D7IM40_9GAMM S-adenosylmethionine:tRNA ribosyltransferase-isomerase; OS = Providencia heimbachae OX=333962 GN=queA PE=3 SV=1
MRVSDFTFELPEELIAHYPQAQRSSCRLLSLDGETGKLTHGIFTDILDKLEEGDLLVFNNTRVIPARLFGRKVSGGKIEVLIERMLDEHRVLAHVRASKSPKEGAELLLGEDESVKATMIARHGALFELRFDDERDVLSILNQIGHMPLPPYIDRPDEESDKELYQTVYSQRPGAVAAPTAGLHFDEPLLEALRQKGVEMAFVTLHVGAGTFQPVRVDTIEDHIMHSEYAEVPQDVVDAVLACKARGNRVIAVGTTSVRSLESAAKASRSALIAPFFDDTQIFIYPGYEYQVVDTLITNFHLPESTLIMLVSAFAGYQNTMNAYKEAVEQQYRFFSYGDAMFITPNSKARFESIGEKA

SEQ ID NO: 70696 - protein, 358 aa, Providencia heimbachae; identical to SEQ ID NO: 70695
  REGION 1..358: note = tr|A0A1B7JQH9|A0A1B7JQH9_9GAMM S-adenosylmethionine:tRNA ribosyltransferase-isomerase; OS = Providencia heimbachae ATCC 35613 OX=1354272 GN=queA; PE = 3 SV=1

SEQ ID NO: 70697 - protein, 356 aa, Providencia rettgeri
  REGION 1..356: note = tr|A0A1J0E370|A0A1J0E370_PRORE S-adenosylmethionine:tRNA ribosyltransferase-isomerase; OS = Providencia rettgeri OX=587 GN=queA PE=3 SV=1
MRVSDFTFQLPEELIAHYPQAERSACRLLSLDGSSGQLTHGVFTDVLEKLEKGDLLVFNNTRVIPARLFGRKVSGGKIEVLIERMLDQHRVLAHVRASKAPKEGAELLLGEDESVKATMMARHGALFELRFDDERDVLSILNQIGHMPLPPYIDRPDEEADKELYQTVYSEKPGAVAAPTAGLHFDEPLLEALRQKGVEMAFVTLHVGAGTFQPVRVDTIEDHIMHSEYAEVPQDVVDAVLACKARGNRVVAVGTTSVRSLESAAKASQDALIAPFFDDTQIFIYPGYEYQVIDALITNFHLPESTLIMLVSAFAGYKNTINAYKEAVEQKYRFFSYGDAMFITPNANAPFEKIGE

SEQ ID NO: 70698 - protein, 356 aa, Providencia rettgeri
  REGION 1..356: note = tr|A0A2A5Q3B8|A0A2A5Q3B8_PRORE S-adenosylmethionine:tRNA ribosyltransferase-isomerase; OS = Providencia rettgeri OX=587 GN=queA PE=3 SV=1
MRVSDFTFELPEELIAHYPQAERSACRLLSLDGGSGQLTHGVFTDILEKLEHGDLLVFNNTRVIPARLFGRKVSGGKIEVLIERMLDEHRVLAHVRASKAPKEGAELLLGEDESVKATMVARHGALFELRFDDERDVLSILNQIGHMPLPPYIDRPDEESDKELYQTVYSEKPGAVAAPTAGLHFDEPLLEALRQKGVEMAFVTLHVGAGTFQPVRVDTIEDHIMHSEYAEVPQEVVDAVLACKARGNRVIAVGTTSVRSLESAAKASQDALIAPFFDDTQIFIYPGYEYQVIDALITNFHLPESTLIMLVSAFAGYKNTMNAYEEAVKQKYRFFSYGDAMFITPNTNARFEKIGE

SEQ ID NO: 70699 - protein, 358 aa, Providencia rustigianii
  REGION 1..358: note = tr|A0A379G0Q5|A0A379G0Q5_9GAMM S-adenosylmethionine:tRNA ribosyltransferase-isomerase; OS = Providencia rustigianii OX=158850 GN=queA PE=3 SV=1
MRVSDFTFELPEELIAHYPQAERSSCRLLSLDGATGQLTHGVFTDILEKLEPGDLLVFNNTRVIPARLFGRKASGGKIEVLVERMLDEHRVLAHVRASKAPKEGAALLLGEDESVNATMVARHGALFELRFDDARDVLSILNQIGHMPLPPYIDRPDEESDKELYQTVYSQRPGAVAAPTAGLHFDEPLLEALRQKGIEMAFVTLHVGAGTFQPVRVDSIEDHIMHSEYAEVPQDVVDAVLACKARGNRVIAVGTTSVRSLESAAKASQDALIAPFFDDTQIFIYPGYQYQVVDALITNFHLPESTLIMLVSAFAGYKNTMQAYQEAVEQKYRFFSYGDAMFITPNANARFESIGEAN

SEQ ID NO: 70700 - protein, 358 aa, Providencia rustigianii; identical to SEQ ID NO: 70699
  REGION 1..358: note = tr|D1P6C3|D1P6C3_9GAMM S-adenosylmethionine:tRNA ribosyltransferase-isomerase OS=Providencia rustigianii DSM 4541 OX=500637 GN=queA PE=3 SV=1

SEQ ID NO: 70701 - protein, 356 aa, Providencia sneebia
  REGION 1..356: note = tr|K8W7V6|K8W7V6_9GAMM S-adenosylmethionine:tRNA ribosyltransferase-isomerase OS=Providencia sneebia DSM 19967 OX=1141660 GN=queA PE=3 SV=1
MRVSDFTFELPEELIAHYPQAQRSACRLLSLDGPSGQLTHGVFTDILDKLAPGDLLVFNNTRVIPARLFGRKASGGKIEVLVERMLDEHRVLAHVRASKAPKEGAELILGEDESVKAEMVARHGALFELRFEDQRDVLSILNQIGHMPLPPYIDRPDEESDKELYQTVYSQRPGAVAAPTAGLHFDDPLLDALREKGVEMAFVTLHVGAGTFQPVRVDSIEDHIMHSEYAEVPQDVVDAVLACKARGNRVIAVGTTSVRSLESAAQASKDALIAPFFDDTQIFIYPGYEYQIIDALITNFHLPESTLIMLVSAFAGYQNTMKAYKEAVEQQYRFFSYGDAMYITRNPDAQFEQVGQ

SEQ ID NO: 70702 - protein, 356 aa, Providencia sp.
  REGION 1..356: note = tr|A0A345LX59|A0A345LX59_9GAMM S-adenosylmethionine:tRNA ribosyltransferase-isomerase; OS = Providencia sp. WCHPHu000369 OX=2027290 GN=queA PE=3; SV = 1
MRVSDFTFELPEELIAHYPQAERSACRLLSLDGGSGQLTHGVFTDILEKLERGDLLVFNNTRVIPARLFGRKVSGGKIEVLIERMLDEHRVLAHVRASKAPKEGAELLLGEDESVKATMVARHGALFELRFDDERDVLSILNQIGHMPLPPYIDRPDEESDKELYQTVYSEKPGAVAAPTAGLHFDEPLLEALRQKGVEMAFVTLHVGAGTFQPVRVDTIEDHIMHSEYAEVPQEVVDAVLACKARGNRVIAVGTTSVRSLESAAKVSQGALIAPFFDDTQIFIYPGYEYQVIDALITNFHLPESTLIMLVSAFAGYKNTMNAYKEAVEQKYRFFSYGDAMFITPNAHASSEKIGE

SEQ ID NO: 70703 - protein, 356 aa, Providencia sp.
  REGION 1..356: note = tr|A0A356D992|A0A356D992_PROSP S-adenosylmethionine:tRNA ribosyltransferase-isomerase; OS = Providencia sp. OX=589 GN=queA PE=3 SV=1
MRVSDFTFELPEELIAHYPQTERSSCRLLSLDGETGKLTQGVFTDIFEKLEQGDLLVFNNTRVIPARLFGRKVSGGKIEVLIERMLDEHRVLAHVRASKAPKEGAELLLGDDESVKATMLARHGALFELRFDDERDVLSILNQIGHMPLPPYIARPDEESDKELYQTVYSQRPGAVAAPTAGLHFDEPLLEALRQKGVEMAFVTLHVGAGTFQPVRVDTIEDHIMHSEYAEVPQDVVDAVLACKARGNRVVAVGTTSVRSLESAAKASQNALIAPFFDDTQIFIYPGYEYQVIDALITNFHLPESTLIMLVSAFAGYKNTMRAYQEAITQKYRFFSYGDAMFITPNSNARFEQVGE

SEQ ID NO: 70704 - protein, 356 aa, Providencia stuartii
  REGION 1..356: note = tr|A0A140NHN4|A0A140NHN4_PROSM S-adenosylmethionine:tRNA ribosyltransferase-isomerase; OS = Providencia stuartii (strain MRSN 2154) OX=1157951; GN = queA PE=3 SV=1
MRVSDFTFELPEELIAHYPQAQRSACRLLSLDGPTGQLTHGIFTDILEKLSPGDLLVFNNTRVIPARLFGRKASGGKIEMLVERMLDEHRVLAHIRASKAPKEGAELILGEDESVNATMVARHGALFEVQFDDQRDVLSILNEIGHMPLPPYIDRPDEESDKELYQTVYSQRPGAVAAPTAGLHFDEPLLDALREKGVEMAFVTLHVGAGTFQPVRVDTIEDHVMHSEYAEVPQEVVDAVLACKVRGNRVVAVGTTSVRSLESAAKASQDALIAPFFDDTQIFIYPGFEYQVVDALITNFHLPESTLIMLVSAFAGYQNTMQAYKEAVAQKYRFFSYGDAMYITRNPDARFEQIGQ

SEQ ID NO: 70705 - protein, 356 aa, Providencia stuartii
  REGION 1..356: note = tr|B2Q6X2|B2Q6X2_PROST S-adenosylmethionine:tRNA ribosyltransferase-isomerase OS=Providencia stuartii ATCC 25827 OX=471874 GN=queA PE=3 SV=1
MRVSDFTFELPEELIAHYPQAQRSACRLLSLDGPTGQLTHGIFTDILEKLSPGDLLVFNNTRVIPARLFGRKASGGKIEMLVERMLDEHRVLAHIRASKAPKEGAELILGEDESVNATMVARHGALFEVQFDDQRDVLSILNEIGHMPLPPYIDRPDEESDKELYQTVYSQRPGAVAAPTAGLHFDEPLLDALREKGVEMAFVTLHVGAGTFQPVRVDAIEDHVMHSEYAEVPQEVVDAVLACKARGNRVVAVGTTSVRSLESAAKASQDALIAPFFDDTQIFIYPGFEYQVVDALITNFHLPESTLIMLVSAFAGYQNTMQAYKEAVAQKYRFFSYGDAMYITRNPDARFEQIGL

SEQ ID NO: 70706 - protein, 362 aa, unidentified
  source 1..362: note = Unknown
  REGION 1..362: note = tr|A0A368DZQ9|A0A368DZQ9_9PROT S-adenosylmethionine:tRNA ribosyltransferase-isomerase; OS = PS1 clade bacterium OX=2175152 GN=queA PE=3 SV=1
MQVEAFDFDLPDELIALRPASPRDSAKLLHVAPNGHLTDKFIRDLSSYFVKGDVLLVNDTRVIPAKLSGTRLRESVAGDTQQSGAHVELNLIERQGTSTWKCLLKPAKKVKPGDIIRFQDKEGVVYPATVLEKDQGEALIDFKLSLDKMDALLGLIGSMPLPPYIAGKRRPDEKDNQDYQTLFAEHDGAVAAPTAGLHFTPNLQAELEAMGVEICRVTLHVGAGTFLPVKVENTANHKMHAEWGEVKPEIADKLNNAKQNGHRICCVGTTSLRLLESATKKDGIIEPFADATDIFIKPSYCFRAADMLLTNFHLPKSTLFMLVSAFSGLDTMKKAYEHAVQNNYRFYSYGDACLLELADKNN

SEQ ID NO: 70707 - protein, 356 aa, unidentified
  source 1..356: note = Unknown
  REGION 1..356: note = tr|A0A368DMF6|A0A368DMF6_9PROT S-adenosylmethionine:tRNA ribosyltransferase-isomerase; OS = PS1 clade bacterium OX=2175152 GN=queA PE=3 SV=1
MKSSPVDLKLFDFQLDKNKIALEPVSPRDHSRLLVLDKNYSDLNFYDLPSFLDAGDTLVLNETKVIPSYFECIRKRADKSSKIKLNLIKELEDGSWLILVKPKKRVRINDKIIFSATDEIEAIVLAFEEDDHVKISFNLDKEKLIKWIFVNGTMPLPPYIMSQRDIKKEDELDYQTVYARTHGSAAAPTAGLHFTENLIEEIKSKGVNICTVILHVGSGTFSPIKTNDILDHKIHSEWCCLGADQVKILNQTKENKNKIVAVGTTSMRILETAVNMEGVFSEYIGETDIYITPGFKFNAVDILVTNFHLPRSSLFVLVCAFYGIQNMQKAYRYAIKNNYRFYSYGDACLIKKNYDI

SEQ ID NO: 70708 - protein, 360 aa, Pseudacidovorax intermedius
  REGION 1..360: note = tr|A0A370FNL2|A0A370FNL2_9BURK S-adenosylmethionine:tRNA ribosyltransferase-isomerase; OS = Pseudacidovorax intermedius OX=433924 GN=queA PE=3 SV=1
MSRTDFTLSDFDFALPPELVAQQPAPERSASRLLDGTGPGLTDRIFRDLPSLLREGDLLVFNDTQVVKARLFGEKPTGGRLELLIERVLDGQEVAAHMKVSKKPAVGTVLRMDAAPGQPAFRATLLGRWPEEGGPLFRFALESDDGAAPYTLMERHGHVPLPPYIERQQAQESATDAAEDARRYQTVFARVPGAVAAPTAALHFDEALLAQLEARGVRRANVTLHVGAGTFQPVKTENIAEHVMHAERYDVPPATQQAIADCRARGGRVVAVGTTTVRTLESWAASGQAQGDTQIFITPGFRFQHVDLLVTNFHLPKSTLMMLVSALAGYERVMSLYAHAIRERYRFFSYGDAMLLERAA

SEQ ID NO: 70709 - protein, 360 aa, Pseudacidovorax intermedius
  REGION 1..360: note = tr|A0A147GX39|A0A147GX39_9BURK S-adenosylmethionine:tRNA ribosyltransferase-isomerase; OS = Pseudacidovorax intermedius OX=433924 GN=queA PE=3 SV=1
MSRTDFTLSDFDFALPPELIAQQPAPERSASRLLDGTGPEPTDRIFRDLPALLREGDLLVFNDTQVVKARLFGEKPTGGRLELLIERVLDGQEVAAHMKVSKKPAVGTVLRMDTPPGQPAFRATLLGRWPEEGGPLFRFALASDDGADPYTLMERHGHVPLPPYIERQQAQETAADAAEDARRYQTVFARVPGAVAAPTAALHFDEALLAQLEARGVRRANVTLHVGAGTFQPVKAENIAEHVMHAERYHVPPATQQAIADCRARGGRVVAVGTTTVRTLESWAASGQAQGDTQIFITPGFRFRHVDLLVTNFHLPKSTLMMLVSALAGYERVMALYAHAIRERYRFFSYGDAMLLERAA

SEQ ID NO: 70710 - protein, 361 aa, Pseudacidovorax sp.
  REGION 1..361: note = tr|A0A1N6VJ70|A0A1N6VJ70_9BURK S-adenosylmethionine:tRNA ribosyltransferase-isomerase; OS = Pseudacidovorax sp. RU35E OX=1907403 GN=queA PE=3 SV=1
MSRTDFTLSDFDFALPPELIAQQPAPERSASRLLDGTGPDPTDRIFRDLPTLLRDGDLLVFNDTQVVKARLFGEKPTGGRLELLIERVLAGQEVAAHMKVSKKPAVGTVLRMDAAPGQPAFRATLLGRWPEEGGPLFRFALESDDGADPYMLMERHGHVPLPPYIERQQAQESASDAAEDARRYQTVFARVPGAVAAPTAALHFDEALLAQLEARGVRRANVTLHVGAGTFQPVKTENIAEHVMHAERYDVPPATQQAIADCRARGGRVVAVGTTTVRTLESWAASGQAQGDTQIFITPGFRFRHVDLLVTNFHLPKSTLMMLVSALAGYERVMALYAHAIRERYRFFSYGDAMLLQRTAP

SEQ ID NO: 70711 - protein, 348 aa, unidentified
  source 1..348: note = Pseudaestuariivita atlantica
  REGION 1..348: note = tr|A0A0L1JN52|A0A0L1JN52_9RHOB S-adenosylmethionine:tRNA ribosyltransferase-isomerase; OS = Pseudaestuariivita atlantica OX=1317121 GN=queA PE=3; SV = 1
MKLSDFDFDLPEGRIALRPARPRSSARLLVAGRDSIADRIVSDLPQVLRPGDLLVLNDTRVIPARLSGERVRGEARARIEATLLEPQGDGAWTALLKPLRKVKDGEEIVFSPRLSARVTGRADGQATLDFTVADGTFDAALKEAGAMPLPPYIEALRPADAADRDDYQTVWAAEDGAVAAPTASLHFDAPLLKALEARGVGFAHVTLHVGAGTFLPVKVDDVRDHKMHAEWGRVPQAAAEAIARTRAEGGRVIPVGTTALRLIETAARETGEVAAWEGWTDIFITPGFSFRAADALMTNFHLPKSTLMMLVSALMGPERIREIYAHAIAREYRFFSYGDASILLPQEP

SEQ ID NO: 70712 - protein, 358 aa, unidentified
  source 1..358: note = Pseudaminobacter manganicus
  REGION 1..358: note = tr|A0A1V8RJ43|A0A1V8RJ43_9RHIZ S-adenosylmethionine:tRNA ribosyltransferase-isomerase; OS = Pseudaminobacter manganicus OX=1873176 GN=queA PE=3 SV=1
MRVDLFDFELPENRIALRPAEPRDSARLLVVRPEKASEDRIVRDLPSLLEAGDVLVFNDTKVIPAQLNGTRRRGDASAQVEATLHMRVGPDRWHAFMRPGKRIAAGDHIHFGHDGNSCFLGQLDAKVIEKGEGGEVLLEFDLSGPFLDEALHAVGHIPLPPYIASKRDEDERDRTDYQTIYAREEGAVAAPTAGLHFTPELFAALDAKGIERHFVTLHVGAGTFLPVKADDTANHKMHAETGFVPQSVADALNAAKARGGRIVAVGTTSLRLLESAVQPDGTIAAWSGSTDIFITPGYRFRLVDALMTNFHLPRSTLFMLVSALSGLDTMRAAYAHAVDTGYRFYSYGDASLLFRADR

SEQ ID NO: 70713 - protein, 358 aa, Pseudaminobacter salicylatoxidans
  REGION 1..358: note = tr|A0A316C8Z1|A0A316C8Z1_PSESE S-adenosylmethionine:tRNA ribosyltransferase-isomerase; OS = Pseudaminobacter salicylatoxidans OX=93369 GN=queA PE=3; SV = 1
MRVDLFDFDLPEERIALRPAEPRDAARMLVVRAEAPLEDKRVGDLPSLLEPGDVLVFNDTKVIPAQLKGLRQRGEAVAHVDATLHMRVGADRWKAFVRPGKRVAEGDRIRFGHSAEACMLGALDATVIEKGEAGEVLLAFDLSGPMLDEALHAVGHIPLPPYIASKRPDDERDRKDYQTVYAREEGAVAAPTAGLHFTPELFAALDARRIERRFVTLHVGAGTFLPVKADDTADHKMHAEIGYVSEETAAAINAARAEGRRVVAVGTTSLRLLESAATPDGTMSAWSGATDIFITPGYKFRAVDVLMTNFHLPRSTLFMLVSAFSGLETMRVAYQHAIDTGYRFYSYGDASLLFRTDK

SEQ ID NO: 70714 - protein, 358 aa, Pseudaminobacter sp.
  REGION 1..358: note = tr|A0A432V6R0|A0A432V6R0_9RHIZ S-adenosylmethionine:tRNA ribosyltransferase-isomerase; OS = Pseudaminobacter sp. CB3 OX=1851146 GN=queA PE=3 SV=1
MRVDLFDFELPEERIALRPAHPRDAARLMVVEPGEAVEDRLVADLPSLLSPGDVVVFNDTKVIPAQLKGIRRRGEAVAQVEATLHMRAGADRWHAFMRPGKRVAAGDRIHFGHDENACFLGALDATVVEKGEGGEALLAFDVSGPFLDEAIRSVGHIPLPPYIASKRPDDASDRADYQTIYAREDGAVAAPTAGLHFTPALLAALDERGIEGHFVTLHVGAGTFLPVKADDTDEHKMHAEIGYVSEATANAINAAKAGGRRIVSIGTTSLRLLESAAGEDGRIKAWSGPTDIFITPGYRFKLVDVLMTNFHLPRSTLFMLVSAFSGIDIMRQAYAHAIETGYRFYSYGDASLLFRADP

SEQ ID NO: 70715 - protein, 351 aa, unidentified
  source 1..351: note = Pseudanabaena biceps
  REGION 1..351: note = tr|L8N6N5|L8N6N5_9CYAN S-adenosylmethionine:tRNA ribosyltransferase-isomerase OS=Pseudanabaena biceps PCC 7429 OX=927668 GN=queA PE=3 SV=1
MTSSPAELAPDFALSAYDYELPSDRIAQDPVTPRDSSRLLVIERDRNLRHHHFYDLPDFLQAGDLLVFNNTKVIPARMYGQKLSGVPVEILLMEPVGHNRWLALVKPGKRLPVGSTIVFAERVKATVEGIETSTRARELQFHIPEDADLDKIIDQLGKVPLPPYVTDSHTDAERYQTIYAEVSGAIAAPTAGLHFTESLFQTLSDRGIDKSFVTLHVGIGTFRPVETEDITQHVMHNEWCEVPEETIAKIKETKAKGGRVIGVGSTVARSLENANYEAFRGKTNLMIYPGYEWKVLDGMITNFHLPKSTLLMMVASFLGESGREFLMSVYQEAIAKDYRFYSFGDAMLILR

SEQ ID NO: 70716 - protein, 352 aa, unidentified
  source 1..352: note = Pseudanabaena frigida
  REGION 1..352: note = tr|A0A2W4WKY9|A0A2W4WKY9_9CYAN S-adenosylmethionine:tRNA ribosyltransferase-isomerase; OS = Pseudanabaena frigida OX=945775 GN=queA PE=3 SV=1
MTSSPVPELELDYTLSAYDYELPSDRIAQDPVTPRDTSRLLVIDAERNLLHHHFYDLPNFLRAGDLLVFNNTKVIPARMYGHKLSGVPVEILLMEPLGNDRWLALVKPGKRLPIGSTIVFADNVKATVEGIETTTRARELQFHIPADANLDLIIDRLGKLPLPPYVTDSHTDPARYQTIYAEVSGAIAAPTAGLHFTDELFQQLQDRGIDKAFVTLHVGIGTFRPVETEDITQHVMHNEWCEVPEQTIAKIKETKARGGRVIGVGSTVARSLESSNFQVFKGKTNLMIYPGYEWKVIDAMVTNFHLPKSTLLMMVASFLGKDGREFLMSVYQEAIAKDYRFYSFGDAVLILR

SEQ ID NO: 70717 - protein, 352 aa, Pseudanabaena sp.
  REGION 1..352: note = tr|A0A256BBU7|A0A256BBU7_9CYAN S-adenosylmethionine:tRNA ribosyltransferase-isomerase; OS = Pseudanabaena sp. SR411 OX=1980935 GN=queA PE=3 SV=1
MTSQPVTELEPDYALSAYDYELPSDRIAQDPVTPRDTSRLLVIDGDRNLLHQHFYDLPNFLRAGDLLVFNNTKVIPARMYGQKLSGVPVEILLMEPIGLNRWLALVKPGKRLPIGSTIVFAENVKATVEGIETTTRARELQFHIPAEADLDKIIQQLGKLPLPPYVTDSHTDPDRYQTIYAEVSGAIAAPTAGLHFTEPLFQKLEDQGIDKAFVTLHVGIGTFRPVETEDITQHVMHNEWCEVSEETIAKIKETKARGGRVIGVGSTVARSLENSNFQAFKGKTNLMIYPGYEWRVLDGMVTNFHLPKSTLLMMMSSFLGEGGREFLMSVYQEAIAKEYRFYSFGDAMLMLR

SEQ ID NO: 70718 - protein, 352 aa, Pseudanabaena sp.
  REGION 1..352: note = tr|A0A2W6YTJ1|A0A2W6YTJ1_9CYAN S-adenosylmethionine:tRNA ribosyltransferase-isomerase; OS = Pseudanabaena sp. OX=1153 GN=queA PE=3 SV=1
MTSSPASELAPDFALSAYDYDLPSDRIAQDPVTPRDTSRMLVVDSDRCLHHQHFYDLPQFLQAGDLLVFNNTKVIPARMFGQKLSGVPVEILLMEPVGIDRWLALVKPGKRLPIGSTIIFREDVKATVEGIDAASRARELQFHIPAGADLDKIIEQLGQVPLPPYVTTSNSEPERYQTIYAEISGAIAAPTAGLHFTESLFQTLADKGIDKSFITLHVGLGTFRPVETEDITQHIMHNEWCEVSSETIAKIKETKANGGRVIGVGSTVARSLESANYQAYRGKTNLMIYPGYEWKVLDAMVTNFHLPKSTLLMMVSSFLGKNGREFLMSTYQEAIAKEYRFYSFGDAMLLFK

SEQ ID NO: 70719 - protein, 410 aa, unidentified
  source 1..410: note = Pseudarcicella hirudinis
  REGION 1..410: note = tr|A0A1I5Z3J1|A0A1I5Z3J1_9BACT S-adenosylmethionine:tRNA ribosyltransferase-isomerase; OS = Pseudarcicella hirudinis OX=1079859 GN=queA PE=3 SV=1
MNIPEINLELYTYDLPDERIAKFPLPKRDESKLQVYRQGEIIHTGFKAIGDFLPEESLLVFNNTKVIPARLLFPKTTGAVIQIFLLHPVLPTPVINLAMNIRSECVWECMIGNRKRWKLGDSLEMTLQIDGKEVEVKAEWFDDEKSHVKFSWQLKTESHEDIPDFLEIIQAFGQIPLPPYLNRETTEEDLKTYQTVYSEKQGAVAAPTAGLHFTEEVLQDLSQRGIRQDFLTLHVGAGTFQPIKVKNILEHKMHNEQLVFSRKNIETLLQNIGNIIPVGTTSMRALESLYWYGVKLLTEKDQNPDFFIEKLYPYQYGNNSATAEDALHAILNRMIEDQVEEITGETEIFIFPGYVFKLCKGIVTNYHQPESTLILLIAALIGEDWRKIYREALEKDYRFLSYGDSSLLLP

SEQ ID NO: 70720 - protein, 350 aa, unidentified
  source 1..350: note = Pseudarcicella hirudinis
  REGION 1..350: note = tr|A0A1I5SV88|A0A1I5SV88_9BACT S-adenosylmethionine:tRNA ribosyltransferase-isomerase; OS = Pseudarcicella hirudinis OX=1079859 GN=queA PE=3 SV=1
MKLSEFRFDLPQSLIALHPPENRGDSRLMVVNRKTKTIEHRMFSDILEYFDDGDVMVTNNTKVFPARLYGNKEKTGAKIEVFLLRELNREHRLWDVLVDPARKIRVGNKLYFGDSDLVAEVIDNTTSRGRTIRFLYDGDHNALMKAIDELGETPLPDEIRFKRKAEASDRERYQTIYAEHVGAVAAPTAGMHFSKIIMKRMELKGVHFSPVTLHVGLGTFRQVDVEDLTKHKTDSENFVITEATCQSVNDAIDNSKRVCAVGTTVLKALESSVSADGHLKPIEGWTDKFIFPPYDFRIPNALLTNFHLPESILIMMTSAFGGYELITSAYEQAIKEKYKFFSYGDAMLIL

SEQ ID NO: 70721 - protein, 407 aa, unidentified
  source 1..407: note = Pseudarcicella sp.
  REGION 1..407: note = tr|A0A2S2DTY4|A0A2S2DTY4_9BACT S-adenosylmethionine:tRNA ribosyltransferase-isomerase; OS = Pseudarcicella sp. HME7025 OX=2183547 GN=queA PE=3 SV=1
MKLELAPLSIQAFDYHLPESSIALHPSPSRDASRLLVSQNGQISHHHFYDILDVLPKNSLLVFNNTRVIPARIHLQKSTGATIELFLLKPLASQIATQLTMESQHEVEWECLVGNKKRWKDGEILRHELLIGDEEIQLALHWIDREKNWVKITWNSTHLFAEILNAFGQIPLPPYLGRDLDEEDQERYQTIFSKELGAVAAPTASLHFTQALLDQIPTKGHQSTFITLHVGAGTFLPVKEENVANHPMHREQLIFSIPMMEAILKHEGPIVPVGTTALRALESLYWSGVYLLEEREIPSEGFVLAKEFAYLPRAESYSVKESLEKVIAYLQGHGQDQWIAETELLIMPGYTLHLCDALITNFHQPKSTLLVLVAALIGDHWKEVYAEAQEQGYRFLSYGDTSLLFKQ

SEQ ID NO: 70722 - protein, 350 aa, unidentified
  source 1..350: note = Pseudarcicella sp.
  REGION 1..350: note = tr|A0A2S2DUW5|A0A2S2DUW5_9BACT S-adenosylmethionine:tRNA ribosyltransferase-isomerase; OS = Pseudarcicella sp. HME7025 OX=2183547 GN=queA PE=3 SV=1
MKLSEFRFDLPQSLIALHPTDNREDARMMVVNRKNKTIEHKKFTDIVDYFGEGDVLVTNNTKVFPARLYGNKEKTGAQIEVFLLRELNREHRLWDVLVDPARKIRVGNKLYFGDSDLVAEVIDNTTSRGRTIRFLYDGDHDALMAAIHELGETPLPEEIRSKREATPEDAERFQTIYAEHVGAVAAPTAGLHFSKIIMKKMELNGAQFTPITLHVGLGTFRQVDVEDLTKHKTDSEHFIINQDTCDYVNQAIDNKKHVLSVGTTVMKALESSVSASGHLKPINSWTDKFIFPPYEFKIPTALLTNFHLPESILLMMTSAFGGYELIHEAYQQAIKEKYRFFSYGDVMLII

SEQ ID NO: 70723 - protein, 356 aa, unidentified
  source 1..356: note = Pseudescherichia vulneris
  REGION 1..356: note = tr|A0A090V157|A0A090V157_PSEVU S-adenosylmethionine:tRNA ribosyltransferase-isomerase; OS = Pseudescherichia vulneris NBRC 102420 OX=1115515; GN = queA PE=3 SV=1
MRVADFSFELPESLIAHYPQPERSSCRLLSLDGPTGALTHGTFTDLLDKLNPGDLLVFNNTRVIPARLFGRKASGGKIEVLVERMLDDKRILAHIRASKAPKPGAELLLGDDESIQATMVARHDALFEVEFNDARPVLDILNAIGHMPLPPYIDRPDEDADRELYQTVYSEKPGAVAAPTAGLHFDEPLLAALREKGIEQAFVTLHVGAGTFQPVRVDSIEDHIMHSEYAEVPQEVVDAVLAAKARGNRVIAVGTTSVRSLESAAQAAKSDLIEPFFGDTQIFIYPGYQYKVIDALVTNFHLPESTLIMLVSAFAGYQHTMNAYHAAVEEKYRFFSYGDAMFITYNPSAIHERVGE

SEQ ID NO: 70724 - protein, 348 aa, unidentified
  source 1..348: note = Pseudidiomarina sp.
  REGION 1..348: note = tr|A0A443YY96|A0A443YY96_9GAMM S-adenosylmethionine:tRNA ribosyltransferase-isomerase; OS = Pseudidiomarina sp. R04H25 OX=2487740 GN=queA PE=3 SV=1
MNVKDFSFELPDELIARYPQPERSASRLLNLDGASGKVMHQQFKDIVSHLNAGDLLVFNDTRVIPARMLGEKVSGGKVEVLIERIVDEHRVLAHLRSNRSPKVGARMILEGAVEVEMLGRQDALFELYFHTSEPVLNVLEAHGHMPLPPYIDRPDEDSDRERYQTVYNKKPGAVAAPTAGLHFDDAILKQLQDKGVEFAYVTLHVGAGTFQPVRVDNIEEHHMHSEYAEVPEEVVQAIKATRARGGRVIAVGTTSVRSLESAAQASKMKGQELQPFFADTDIFIYPGYAFQIVDAMITNFHLPESTLIMLVSAFAGRENVLNAYAEAVAERYRFFSYGDAMFVTRTAR

SEQ ID NO: 70725 - protein, 343 aa, unidentified
  source 1..343: note = Pseudoalteromonadaceae bacterium
  REGION 1..343: note = tr|A0A2D6VNI1|A0A2D6VNI1_9GAMM S-adenosylmethionine:tRNA ribosyltransferase-isomerase; OS = Pseudoalteromonadaceae bacterium OX=2026783 GN=queA; PE = 3 SV=1
  VARIANT 259: note = Xaa can be any naturally occurring amino acid
  VARIANT 282: note = Xaa can be any naturally occurring amino acid
  VARIANT 287: note = Xaa can be any naturally occurring amino acid
  VARIANT 296: note = Xaa can be any naturally occurring amino acid
  VARIANT 298: note = Xaa can be any naturally occurring amino acid
  VARIANT 321..322: note = Xaa can be any naturally occurring amino acid
  VARIANT 328: note = Xaa can be any naturally occurring amino acid
MRVADFSFDLPDELIARFPKADRTSSRLLTLDGPSGQVEHKVFSDILSLVNENDLLVFNNTKVIPARMFGQKESGGKLEVLVERVLDEHRVLAHVRASKSPKPGSKIILEGKAEATMVARHGELFELEFAKDENVLDILNDIGHMPLPPYIDRPDNESDRERYQTVYGEKPGAVAAPTAGLHFDDKLMAALKDKGINMAFVTLHVGAGTFQPVRVDSVDEHVMHSEYIEVPDEVVKAVAETKAKGGRVIAVGTTSVRSXESAAKVHGGKLDTYFGDTDIFIXPGYQXNVVDAMVTXFXLPESTLIMLVSAFAGQENIMGAXXTAIEQXYRFFSYGDAMFLTRK

SEQ ID NO: 70726 - protein, 343 aa, unidentified
  source 1..343: note = Pseudoalteromonadaceae bacterium
  REGION 1..343: note = tr|A0A2D7MZU9|A0A2D7MZU9_9GAMM S-adenosylmethionine:tRNA ribosyltransferase-isomerase; OS = Pseudoalteromonadaceae bacterium OX=2026783 GN=queA; PE = 3 SV=1
MRVADFSFDLPDELIARFPKQDRTSSRLLTLDGPTGNVEHKVFSDILDLVNEGDLLVFNNTRVIPARMFGQKASGGKVEVLVERVVDEHRVLAHVRASKSLKPGNEVILEGKAKATMIARHDTLFELEFDRSQNVLDILNDIGHMPLPPYIDRPDTEADRERYQTVYGEKPGAVAAPTAGLHFDDKLMAALKQKGVNMAFVTLHVGAGTFQPVRVESVDEHVMHSEYIEVPDEVVHAVANTKANGGRVIAVGTTSVRSLESAAKVHGGKLESYFGDTDIFIFPGYQFNVVDAMVTNFHLPESTLIMLVSAFSGQDNIMGAYNTAIEQKYRFFSYGDAMFLTRK

SEQ ID NO: 70727 - protein, 343 aa, Pseudoalteromonas agarivorans
  REGION 1..343: note = tr|A0A290RSR9|A0A290RSR9_9GAMM S-adenosylmethionine:tRNA ribosyltransferase-isomerase; OS = Pseudoalteromonas agarivorans DSM 14585 OX=1312369; GN = queA PE=3 SV=1
MRVADFSFDLPDELIARFPKQDRTSSRLLTLDGPTGNVEHKVFSDLLDLVNEGDLLVFNNTRVIPARMFGQKASGGKVEVLVERVVDEHRVLAHVRASKSLKPGNEVILEGKAKATMITRHDTLFELEFDRSQNVLDILNDIGHMPLPPYIDRPDTEADRERYQTVYGEKPGAVAAPTAGLHFDDKLMAALKQKGVNMAFVTLHVGAGTFQPVRVESVDEHVMHSEYIEVPDEVVHAVANTKANGGRVIAVGTTSVRSLESAAKVHGGKLESYFGDTDIFIFPGYQFNVVDAMVTNFHLPESTLIMLVSAFSGQDNIMGAYNTAIEQKYRFFSYGDAMFLTRK

SEQ ID NO: 70728 - protein, 343 aa, Pseudoalteromonas agarivorans
  REGION 1..343: note = tr|N6V998|N6V998_9GAMM S-adenosylmethionine:tRNA ribosyltransferase-isomerase OS=Pseudoalteromonas agarivorans S816 OX=1307437 GN=queA PE=3 SV=1
MRVADFSFDLPDELIARFPKQDRTSSRLLTLDGPTGNVEHKVFSDLLDLVNEGDLLVFNNTRVIPARMFGQKASGGKVEVLVERVVDEHRVLAHVRASKSLKPGNEVILEGKAKATMIARHDTLFELEFDRSQNVLDILNDIGHMPLPPYIDRPDTEADRERYQTVYGEKPGAVAAPTAGLHFDDKLMAALKQKGVNMAFVTLHVGAGTFQPVRVESVDEHVMHSEYIEVPDEVVHAVANTKANGGRVIAVGTTSVRSLESAAKVHGGKLESYFGDTDIFIFPGYQFNVVDAMVTNFHLPESTLIMLVSAFSGQDNIMGAYNTAIEQKYRFFSYGDAMFLTRK

SEQ ID NO: 70729 - protein, 344 aa, Pseudoalteromonas aliena
  REGION 1..344: note = tr|A0A1Q2GYD1|A0A1Q2GYD1_9GAMM S-adenosylmethionine:tRNA ribosyltransferase-isomerase; OS = Pseudoalteromonas aliena OX=247523 GN=queA PE=3 SV=1
MRVADFSFDLPDELIARFPKTDRTSSRLLKLDGPSGEIEHKVFSDILELVHENDLLVFNNTRVIPARMFGQKASGGKVEVLVERVLDEHRVLAHVRASKSLKPGNEVILEGKAKAIMVARHDTLFELEFDHSQNVLDILNDIGHMPLPPYIDRPDNEADRERYQTVYGEKPGAVAAPTAGLHFDKQLMAALKEKGVQMVFVTLHVGAGTFQPVRVETIDEHVMHSEYIEVPQDVVDAVAQTKANGGRVIAVGTTSMRSLESAAKIHGGKLDTYFGDTDIFIYPGYQFNVVDVMVTNFHLPESTLIMLVSAFSGQENIMGAYNTAIEQQYRFFSYGDAMFLTRKY

SEQ ID NO: 70730 - protein, 346 aa, unidentified
  source 1..346: note = Pseudoalteromonas amylolytica
  REGION 1..346: note = tr|A0A1S1MS38|A0A1S1MS38_9GAMM S-adenosylmethionine:tRNA ribosyltransferase-isomerase; OS = Pseudoalteromonas amylolytica OX=1859457 GN=queA PE=3; SV = 1
MRVADFSFELPDELIARHPKKERSSSRLLALDGDSGEISHKVFTDILEMLQPNDIMIFNNTKVIPARMFGQKSTGGKVEVLVERVLDEHRVLAHIRSSKSPKAGATLILEGKAEATMLGRQGELFELEFSAEQGVLSILEEIGHMPLPPYIDRPDEEEDKQRYQTVYNEKPGAVAAPTAGLHFDEKLLQQIKDKGVETAFITLHVGAGTFQPVRVDSVDEHVMHSEYIEVPESVVEAIAAAKAKGGRVIAVGTTSVRSLESAAKVHGGELQAFTGDTDIFIYPGYEFKVVDAMVTNFHLPESTLIMLVSAFAGQTHIMNAYHQAIEQRYRFFSYGDAMFLTKHTRS

SEQ ID NO: 70731 - protein, 343 aa, Pseudoalteromonas arctica
  REGION 1..343: note = tr|A0A290S702|A0A290S702_9GAMM S-adenosylmethionine:tRNA ribosyltransferase-isomerase; OS = Pseudoalteromonas arctica A 37-1-2 OX=1117313 GN=queA; PE = 3 SV=1
MRVADFSFDLPDELIARFPKADRTSSRLLTLDGPSGTLEHKVFSDILDLVNEGDLLVFNNTRVIPARMFGQKASGGKVEVLVERVLDEHRVLAHVRASKSLKVGNEVILEGKAKAIMVARHDTLFELEFDHSQNVLDILNDIGHMPLPPYIDRPDTEADRERYQTVYGEKPGAVAAPTAGLHFDDKLMTALKDKGVNMAFVTLHVGAGTFQPVRVDSVDEHVMHSEYIEVPDDVVAAVAQTKASGGRVIAVGTTSVRSLESAAKVHGGKLDTYFGDTDIFIFPGYQFNVVDAMVTNFHLPESTLIMLVSAFSGQDNIMGAYNTAIEQKYRFFSYGDAMFLTRK

SEQ ID NO: 70732 - protein, 346 aa, Pseudoalteromonas atlantica
  REGION 1..346: note = sp|Q15WI5|QUEA_PSEA6 S-adenosylmethionine:tRNA ribosyltransferase-isomerase OS=Pseudoalteromonas atlantica (strain T6c / ATCC BAA-1087) OX=342610 GN=queA; PE = 3 SV=1
MKVSEFQFDLPEALIARYPTKERTASRLMHLATTGLSHLQFTDVVNLINPGDLLIFNNTRVIPARLLGQKASGGKVEVLIERIIDEHHVLAHVRASKSPKEGTQLLLEGKVEMEMVGRQDALFTLKLLNPEPILEILEQYGHMPLPPYIDRPDEESDKERYQTVYNEKPGAVAAPTAGLHFDDVILKQLRDKGVNTEFVTLHVGAGTFQPVRVDNILEHQMHSEYAEVPQNVVDAIAKTKTAGKRVIAVGTTSVRSLESAAKAALENGTALASFFSDTDIFIYPGYKFQVIDAMLTNFHLSESTLIMLVSAFAGKENVMNAYQEAIAQQYRFFSYGDAMFIEKNQD

SEQ ID NO: 70733 - protein, 343 aa, Pseudoalteromonas atlantica
  REGION 1..343: note = tr|A0A510ZJK9|A0A510ZJK9_PSEAF S-adenosylmethionine:tRNA ribosyltransferase-isomerase; OS = Pseudoalteromonas atlantica OX=288 GN=queA PE=3 SV=1
MRVADFSFDLPDELIARFPKQERTSSRLLTLDGPTGNVEHKVFSDLLDLVNEGDLLVFNNTRVIPARMFGQKASGGKVEVLVERVVDEHRVLAHVRASKSLKPGNEVILEGKAKATMIARHDTLFELEFDRSQNVLDILNDIGHMPLPPYIDRPDTEADRERYQTVYGEKPGAVAAPTAGLHFDDKLMAALKQKGVNMAFVTLHVGAGTFQPVRVESVDEHVMHSEYIEVPDEVVHAVANTKANGGRVIAVGTTSVRSLESAAKVHGGKLESYFGDTDIFIFPGYQFNVVDAMVTNFHLPESTLIMLVSAFSGQDNIMGAYNTAIEQKYRFFSYGDAMFLTRK

SEQ ID NO: 70734 - protein, 346 aa, Pseudoalteromonas byunsanensis
  REGION 1..346: note = tr|A0A1S1NBP0|A0A1S1NBP0_9GAMM S-adenosylmethionine:tRNA ribosyltransferase-isomerase; OS = Pseudoalteromonas byunsanensis OX=327939 GN=queA PE=3; SV = 1
MRVADFSFELPDELIARHPKKERSSSRLLALDGNSGEISHKVFTDILEMLQPNDIMIFNNTKVIPARMFGQKSTGGKIEVLVERVLDEHRVLAHIRSSKSPKTGATLILEGKAEAIMLGRQGELFELEFQSEQGVLAILEEIGHMPLPPYIDRPDEEEDKQRYQTVYNEKPGAVAAPTAGLHFDEKLLQQIKDKGVETAFITLHVGAGTFQPVRVDSVDEHVMHSEYIEVPEAVVEAITAAKAKGGRVVAVGTTSVRSLESAAKVHGGELKAFTGDTDIFIYPGYQFKVVDAMVTNFHLPESTLIMLVSAFAGQTHIMDAYHSAIEQRYRFFSYGDAMFLTKQTRS

SEQ ID NO: 70735 - protein, 343 aa, Pseudoalteromonas carrageenovora
  REGION 1..343: note = tr|A0A2K4XCW0|A0A2K4XCW0_PSEVC S-adenosylmethionine:tRNA ribosyltransferase-isomerase; OS = Pseudoalteromonas carrageenovora IAM 12662 OX=1314868; GN = queA PE=3 SV=1
MRVADFSFELPDELIARFPKADRTSSRLLTLDGPTGQVEHKVFSDVLDLVNEGDLLVFNNTRVIPARMFGQKASGGKVEVLVERVVDEHRVLAHVRASKSLKPGNEVILEGKAKVTMIARHDTLFELEFDRNQNVLDILNDIGHMPLPPYIDRPDTEADRERYQTVYGEKPGAVAAPTAGLHFDDKLMAALKNKGVNMAFVTLHVGAGTFQPVRVDSVDEHVMHSEYIEVPDDVVQAVAQTKVNGGRVIAVGTTSVRSLESAAKIHGGKLDSYFGDTDIFIFPGYQFNVVDAMVTNFHLPESTLIMLVSAFSGQDNIMGAYNTAIEQQYRFFSYGDAMFLTRK

SEQ ID NO: 70736 - protein, 346 aa, Pseudoalteromonas citrea
  REGION 1..346: note = tr|U1JP54|U1JP54_9GAMM S-adenosylmethionine:tRNA ribosyltransferase-isomerase OS=Pseudoalteromonas citrea DSM 8771 OX=1117314 GN=queA PE=3 SV=1
MRVADFSFELPDELIARHPKKERTSSRLLTLDGDSGQLGHKTFTDIIDMLEPNDLMVFNNTKVIPARMFGQKASGGKVEVLVERVLDEHSVLAHVRASKSPKPGAELILEGKASATMVARHGELFELKFAGEQTVLSILDDIGHMPLPPYINRPDEEEDKERYQTVYNEKPGAVAAPTAGLHFDEALLAQIQSKGIETAFITLHVGAGTFQPVRVDEIDDHVMHSEYIEVPAEVVDAIARTKAKGGRIVAVGTTSVRSLESAAKASPEDLKAFYGDTDIFIYPGYEFQVVDAMVTNFHLPESTLIMLVSAFSGQDHIMNAYHTAVEEQYRFFSYGDAMFLTKQSQK

SEQ ID NO: 70737 - protein, 345 aa, Pseudoalteromonas denitrificans
  REGION 1..345: note = tr|A0A1I1E1A6|A0A1I1E1A6_9GAMM S-adenosylmethionine:tRNA ribosyltransferase-isomerase; OS = Pseudoalteromonas denitrificans DSM 6059 OX=1123010; GN = queA PE=3 SV=1
MRVADFSFELPDELIARFPKENRSSSRLLKLNGNSGDISHHVFSDMLDFVNEDDLLVFNNTKVIPARMFGQKASGGKVEVLVERVLDEHRVLAHIRASKSPKPGNELILEGSVKAIMIQRQGSLFELEFSGEENVLEILNKIGHMPLPPYIDRPDTEKDRKRYQTVYGEKPGAVAAPTAGLHFDDDLMAKLKDKGVEMAFVTLHVGAGTFQPVKVETIAEHVMHSEYIEVPESVIEAVKATKARGGRVIAVGTTSVRSLESAAQKSDNELTSFYGDTDIFINPGYEFQVIDAMITNFHLSESTLIMLVSAFSGFDNIKHAYQVAIAEKYRFFSYGDAMFLEPKTQ

SEQ ID NO: 70738 - protein, 343 aa, Pseudoalteromonas distincta
  REGION 1..343: note = tr|F3BE14|F3BE14_9GAMM S-adenosylmethionine:tRNA ribosyltransferase-isomerase OS=Pseudoalteromonas distincta OX=77608 GN=queA PE=3 SV=1
MRVADFSFDLPDELIARFPKADRTSSRLLTLDGPSGTLEHKVFSDILDLVNEGDLLVFNNTRVIPARMFGQKASGGKVEVLVERVLDEHRVLAHVRASKSLKVGNEVILEGKAKAIMVARHDTLFELEFDHSQNVLDILNDIGHMPLPPYIDRPDTDADRERYQTVYGEKPGAVAAPTAGLHFDDKLMTALKDKGVNMAFVTLHVGAGTFQPVRVDSVDEHVMHSEYIEVPDDVVAAVAQTKANGGRVIAVGTTSVRSLESAAKVHGGKLDTYFGDTDIFIFPGYQFNVVDAMVTNFHLPESTLIMLVSAFSGQDNIMGAYNTAIEQQYRFFSYGDAMFLTRK

SEQ ID NO: 70739 - protein, 343 aa, Pseudoalteromonas distincta
  REGION 1..343: note = tr|A0A5B0U6N0|A0A5B0U6N0_9GAMM S-adenosylmethionine:tRNA ribosyltransferase-isomerase; OS = Pseudoalteromonas distincta OX=77608 GN=queA PE=3 SV=1
MRVADFSFDLPDELIARFPKADRTSSRLLTLDGPSGTLEHKVFSDILDLVNEGDLLVFNNTRVIPARMFGQKASGGKVEVLVERVLDEHRVLAHVRASKSLKVGNEVILEGKAKAIMVARHDTLFELEFDHSQNVLDILNDIGHMPLPPYIDRPDTDADRERYQTVYGEKPGAVAAPTAGLHFDDKLMTALKGKGVNMAFVTLHVGAGTFQPVRVDSVDEHVMHSEYIEVPDDVVAAVAQTKANGGRVIAVGTTSVRSLESAAKVHGGKLDTYFGDTDIFIFPGYQFNVVDAMVTNFHLPESTLIMLVSAFSGQDNIMGAYNTAIEQQYRFFSYGDAMFLTRK

SEQ ID NO: 70740 - protein, 343 aa, Pseudoalteromonas elyakovii
  REGION 1..343: note = tr|A0A558I1H1|A0A558I1H1_9GAMM S-adenosylmethionine:tRNA ribosyltransferase-isomerase; OS = Pseudoalteromonas elyakovii OX=81037 GN=queA PE=3 SV=1
MRVADFSFDLPDELIARFPKADRTSSRLLTLDGPSGTLEHKVFSDILDLVNEGDLLVFNNTRVIPARMFGQKASGGKVEVLVERVLDEHRVLAHVRASKSLKVGNEVILEGKAKAIMVARHDTLFELEFDHSQNVLDILNDIGHMPLPPYIDRPDTDADRERYQTVYGEKPGAVAAPTAGLHFDDKLMMALKDKGVNMAFVTLHVGAGTFQPVRVDSVDEHIMHSEYIEVPDDVVAAVAQTKASGGRVIAVGTTSVRSLESAAKVHGGKLDTYFGDTDIFIFPGYQFNVVDAMVTNFHLPESTLIMLVSAFSGQDNIMGAYNTAIEQQYRFFSYGDAMFLTRK

SEQ ID NO: 70741 - protein, 343 aa, Pseudoalteromonas espejiana
  REGION 1..343: note = tr|A0A510XXG0|A0A510XXG0_9GAMM S-adenosylmethionine:tRNA ribosyltransferase-isomerase; OS = Pseudoalteromonas espejiana OX=28107 GN=queA PE=3 SV=1
MRVADFSFDLPDELIARFPKQDRTSSRLLTLDGPSGNVEHKVFSDILDLVNEGDLLVFNNTRVIPARMFGQKASGGKVEVLVERVVDEHRVLAHVRASKSLKPGNEVILEGKAKATMVARHDTLFELEFDHRQNVLDILNDIGHMPLPPYIDRPDTEADRERYQTVYGEKPGAVAAPTAGLHFDDKLMAALKNKGVNMAFVTLHVGAGTFQPVRVESVDEHVMHSEYIEVPDDVVQAVAQTKASGGRVIAVGTTSVRSLESAAKVHGGELKSYFGDTDIFIFPGYQFNVVDAMVTNFHLPESTLIMLVSAFSGQDNIMGAYNTAIEQQYRFFSYGDAMFLTRK

SEQ ID NO: 70742 - protein, 343 aa, unidentified
  source 1..343: note = Pseudoalteromonas fuliginea
  REGION 1..343: note = tr|A0A063KM47|A0A063KM47_9GAMM S-adenosylmethionine:tRNA ribosyltransferase-isomerase; OS = Pseudoalteromonas fuliginea OX=1872678 GN=queA PE=3 SV=1
MRVADFSFDLPDELIARFPKPDRTSSRLLSLDGPSGSVEHKVFSDILELVNENDLLVFNNTRVIPARMFGQKASGGKVEVLVERVLDEHRVLAHVRASKSLKPGNEVILEGKAKAIMVARHDTLFELEFDHSQNVLDILNDIGHMPLPPYIDRPDNEADRERYQTVYGEKPGAVAAPTAGLHFDKQLMAALKDKGVQMAFVTLHVGAGTFQPVRVDSVDDHIMHSEYIEVPEDVVAAVAKTKAKGGRVIAVGTTSVRSLESAAKVHGGKLDTYFGDTDIFIYPGYQFNVVDAMVTNFHLPESTLIMLVSAFSGQDNIMGAYNTAIEQQYRFFSYGDAMFLTRK

SEQ ID NO: 70743 - protein, 343 aa, unidentified
  source 1..343: note = Pseudoalteromonas fuliginea
  REGION 1..343: note = tr|A0A5B0USM5|A0A5B0USM5_9GAMM S-adenosylmethionine:tRNA ribosyltransferase-isomerase; OS = Pseudoalteromonas fuliginea OX=1872678 GN=queA PE=3 SV=1
MRVADFSFDLPDELIARFPKPDRTSSRLLSLDGPSGSVEHKVFSDILELVNENDLLVFNNTRVIPARMFGQKASGGKVEVLVERVLDEHRVLAHVRASKSLKPGNEVILEGKAKAIMVARHDTLFELEFDHSQNVLDILNDIGHMPLPPYIDRPDNEADRERYQTVYGEKPGAVAAPTAGLHFDKQLMAALKDKGVQMAFVTLHVGAGTFQPVRVDSVDDHIMHSEYIEVPEDVVAAVAKTKAKGGRVIAVGTTSVRSLESAAKVHGGKLGTYFGDTDIFIYPGYQFNVVDAMVTNFHLPESTLIMLVSAFSGQDNIMGAYNTAIEQQYRFFSYGDAMFLTRK

SEQ ID NO: 70744 - protein, 343 aa, Pseudoalteromonas haloplanktis
  REGION 1..343: note = sp|Q3ILB9|QUEA_PSEHT S-adenosylmethionine:tRNA ribosyltransferase-isomerase OS=Pseudoalteromonas haloplanktis (strain TAC 125) OX=326442 GN=queA PE=3 SV=1
MRVADFSFDLPDELIARFPKQDRTSSRLLSLDGPSGVVEHKVFSDLLELVNENDLLVFNNTRVIPARMFGQKASGGKVEVLVERVLDEHRVLAHVRASKSLKPGNEVILEGKAKATMVARHDTLFELEFEHSQNVLDILNDIGHMPLPPYIDRPDNEADRERYQTVYGEKPGAVAAPTAGLHFDDKLMTALKNKGVQMAFVTLHVGAGTFQPVRVATVDEHIMHSEYIEVPDDVVAAVANTKANGGRVIAIGTTSVRSLESAAKVHGGKLDTYFGDTDIFIYPGYQFNVVDAMITNFHLPESTLIMLVSAFAGQNNIMGAYNTAIEQQYRFFSYGDAMFLTRK

SEQ ID NO: 70745 - protein, 343 aa, Pseudoalteromonas issachenkonii
  REGION 1..343: note = tr|A0A290SJW7|A0A290SJW7_9GAMM S-adenosylmethionine:tRNA ribosyltransferase-isomerase; OS = Pseudoalteromonas issachenkonii OX=152297 GN=queA PE=3; SV = 1
MRVADFSFDLPDELIARFPKADRTSSRLLSLNGPTGEIEHKIFSDILELVNENDLLVFNNTKVIPARMFGQKESGGKVEVLVERVLDEHRVLAHIRASKSPKPGNVLILEGKAKAIMVARHDTLFELEFDRNENVLDILNDVGHMPLPPYIDRPDNEADRERYQTVYGEKPGAVAAPTAGLHFDDKLMAALKDKGVQMAFVTLHVGAGTFQPVRVESVDEHIMHSEYIEVPQDVVDAVASTKAKGGRVIAIGTTSVRSLESAAKIHGGKLDTYFGDTDIFIFPGYQFNVVDAMVTNFHLPESTLIMLVSAFAGQDNIMGAYNTAIEQQYRFFSYGDAMFLTRK

SEQ ID NO: 70746 - protein, 343 aa, Pseudoalteromonas lipolytica
  REGION 1..343: note = tr|A0A0P7E2F7|A0A0P7E2F7_9GAMM S-adenosylmethionine:tRNA ribosyltransferase-isomerase; OS = Pseudoalteromonas lipolytica OX=570156 GN=queA PE=3 SV=1
MRVADFSFDLPDELIARFPKADRTSSRLLTLDGPSGQVEHKVFSDILSLVNENDLLVFNNTKVIPARMFGQKESGGKLEVLVERVLDEHRVLAHVRASKSPKPGSKIILEGKAEATMVARHGELFELEFAKDENVLDILNDIGHMPLPPYIDRPDNESDRERYQTVYGEKPGAVAAPTAGLHFDDKLMAALKDKGINMAFVTLHVGAGTFQPVRVDSVDEHVMHSEYIEVPDEVVKAVAETKAKGGRVIAVGTTSVRSLESAAKVHGGKLDTYFGDTDIFIYPGYQFNVVDAMVTNFHLPESTLIMLVSAFAGQENIMGAYHTAIEQKYRFFSYGDAMFLTRK

SEQ ID NO: 70747 - protein, 343 aa, Pseudoalteromonas lipolytica
  REGION 1..343: note = tr|Z5XKL8|Z5XKL8_9GAMM S-adenosylmethionine:tRNA ribosyltransferase-isomerase OS=Pseudoalteromonas lipolytica SCSIO 04301 OX=1452721 GN=queA PE=3 SV=1
MRVADFSFDLPDELIARFPKADRTSSRLLTLDGPTGQVEHKVFSDILSLVNENDLLVFNNTKVIPARMFGQKESGGKLEVLVERVLDEHRVLAHVRASKSPKPGSKIILEGKAEATMVARHGELFELEFAKDENVLDILNDIGHMPLPPYIDRPDNEADRERYQTVYGEKPGAVAAPTAGLHFDDKLMAALKDKGINMAFVTLHVGAGTFQPVRVDSVDEHVMHSEYIEVPDEVVKAVAETKAKGGRVVAVGTTSVRSLESAAKVHGGKLDTYFGDTDIFIYPGYQFNVVDAMVTNFHLPESTLIMLVSAFAGQENIMGAYHTAIEQQYRFFSYGDAMFLTRK

SEQ ID NO: 70748 - protein, 344 aa, Pseudoalteromonas luteoviolacea
  REGION 1..344: note = tr|A0A167F196|A0A167F196_9GAMM S-adenosylmethionine:tRNA ribosyltransferase-isomerase; OS = Pseudoalteromonas luteoviolacea H33 OX=1365251 GN=queA; PE = 3 SV=1
MRVADFNFELPDELIARHPKAERTSSRLLALNGNNGELEHKIFKDIIDLFEPEDLIIFNNTKVIPARMFGQKSTGGKVEVLVERIVDEHRVLAHVRSSKSPKPGAELILEGKAHATMVARHGELFELEFKGEHSVLTILDEIGHMPLPPYIDRPDEEGDKERYQTVYGEKPGAVAAPTAGLHFDDNLMAQLKDKGVEMAFVTLHVGAGTFQPVRVDDVNDHHMHSEYIEVPDEVVDAVAKCKSRGGRVIAVGTTSVRSLESAAKVHGGELKTFYGDTDIFIYPGYQFNVVDVMITNFHLPESTLIMLVSAFSGQEHIMNAYHEAIAQKYRFFSYGDAMFLTKKQ

SEQ ID NO: 70749 - protein, 344 aa, Pseudoalteromonas luteoviolacea
  REGION 1..344: note = tr|A0A0F6ACM4|A0A0F6ACM4_9GAMM S-adenosylmethionine:tRNA ribosyltransferase-isomerase; OS = Pseudoalteromonas luteoviolacea S4054 OX=1129367; GN = queA PE=3 SV=1
MRVADFNFELPDELIARHPKAERTSSRLLTLNGTSGDLEHKIFKDIIDLIEPEDLIIFNNTKVIPARMFGQKSTGGKVEVLVERILDEHRVLAHVRSSKSPKPGAELILEDKAQATMVARHGELFELEFKGEHSVLSILDEIGHMPLPPYIDRPDEEGDKERYQTVYGEKPGAVAAPTAGLHFDDALMAQLKDKGVEMAFVTLHVGAGTFQPVRVDDINDHHMHSEYIEVPDEVVDAVAKCKSRGGRVIAVGTTSVRSLESAAKVHGGELKTFYGDTDIFIYPGYQFNVVDVMITNFHLPESTLIMLVSAFSGQEHIMNAYHEAIAQKYRFFSYGDAMFLTKKQ

SEQ ID NO: 70750 - protein, 343 aa, Pseudoalteromonas marina
  REGION 1..343: note = tr|U1K2G3|U1K2G3_9GAMM S-adenosylmethionine:tRNA ribosyltransferase-isomerase OS=Pseudoalteromonas marina DSM 17587 OX=1117316 GN=queA PE=3 SV=1
MRVADFSFDLPDELIARFPKKDRTSSRLLSLDGPTGEISHKVFSDILELVNENDLLIFNNTRVIPARMFGQKASGGKVEVLVERVLDEHRVLAHVRASKSLKPGNEVILEGKAKATMIARHDTLFELEFDHSKNVLDTLNDIGHMPLPPYIDRPDDEADRERYQTVYGEKPGAVAAPTAGLHFDEPLMAALKNKGVNMAFVTLHVGAGTFQPVRVETIDEHVMHSEYIEVPQDVVDAVAQTKASGGRVIAVGTTSMRSLESAAKIHGGKLDTYFGDTDIFIFPGYQFNVVDAMVTNFHLPESTLIMLVSAFSGQDNIMGAYNTAIEQKYRFFSYGDAMFLTRK

SEQ ID NO: 70751 - protein, 343 aa, unidentified
  source 1..343: note = Pseudoalteromonas neustonica
  REGION 1..343: note = tr|A0A558IPF6|A0A558IPF6_9GAMM S-adenosylmethionine:tRNA ribosyltransferase-isomerase; OS = Pseudoalteromonas neustonica OX=1840331 GN=queA PE=3; SV = 1
MRVADFSFDLPDELIARFPKQDRTSSRLLTLDGPSGAVEHKIFSDIIDLVNENDLLVFNNTKVIPARMYGQKASGGKVEVLVERVLDEHRVLAHVRASKSPKPGTELILEGKAQATMVGRHGELFELEFSDSQNVLEILNDIGHMPLPPYIDRPDTDEDRKRYQTVYGEKPGAVAAPTAGLHFDDTLMAAIKAKGVNMAFVTLHVGAGTFQPVRVDSVDDHIMHSEYIEVPDDVVAAVAATKANGGRVIAVGTTSVRSLESAAKIHGGQLASYFGDTDIFIYPGYQFNVVDAMVTNFHLSESTLIMLVSAFAGQDNIMSAYQTAIAQKYRFFSYGDAMFLTRK

SEQ ID NO: 70752 - protein, 343 aa, Pseudoalteromonas nigrifaciens; identical to SEQ ID NO: 70744
  REGION 1..343: note = tr|A0A379HEB8|A0A379HEB8_9GAMM S-adenosylmethionine:tRNA ribosyltransferase-isomerase; OS = Pseudoalteromonas nigrifaciens OX=28109 GN=queA PE=3; SV = 1

SEQ ID NO: 70753 - protein, 345 aa, Pseudoalteromonas peptidolytica
  REGION 1..345: note = tr|A0A510U8F0|A0A510U8F0_9GAMM S-adenosylmethionine:tRNA ribosyltransferase-isomerase; OS = Pseudoalteromonas peptidolytica OX=61150 GN=queA PE=3; SV = 1
MRVADFSFDLPDELIARHPMKERSSSRLLTLNGNSGEIEHKIFKDIVALINPEDLIIFNNTKVIPARMFGQKASGGKLEVLVERVVDERTVLAHVRASKSPKPGTKIELEGQATAEMVQRHGELFELRFEGEENVLAILDKIGHMPLPPYIDRPDDDEDKERYQTVYGEKPGAVAAPTAGLHFDDELMAKLKDKGVEMAFVTLHVGAGTFQPVRVDSVEEHVMHSEYIEVSEEVVQAIKAAKARGGRVIAVGTTSVRSLESAAKANGGEIAPLYGDTDIFIYPGYRFNVVDAMVTNFHLPESTLIMLVSAFAGQEHIMNAYQTAIAKQYRFFSYGDAMFLQKQDM

SEQ ID NO: 70754 - protein, 345 aa, Pseudoalteromonas phenolica
  REGION 1..345: note = tr|A0A0S2JYA4|A0A0S2JYA4_9GAMM S-adenosylmethionine:tRNA ribosyltransferase-isomerase; OS = Pseudoalteromonas phenolica OX=161398 GN=queA PE=3 SV=1
MRVADFSFELPDELIARHPMADRTSSRLLTLDGNTGELGHKIFKDLIEFLNPNDLMIFNNTKVIPARMYGQKSTGGKVEVLVERVVDEHRVLAHVRSSKSPKEGATLILEGKAEATMVARHGELFELEFKGEQTVLNILDDIGHMPLPPYIDRPDTEEDKARYQTVYNEKPGAVAAPTAGLHFDEALLEKIKEKGIETQFITLHVGAGTFQPVRVDSVDEHVMHSEYIEVSQEVVDAIKKAKANGGRVIAVGTTSVRSLESAAKASEGELQPFYGDTDIFIYPGYEFQVVDAMITNFHLPESTLIMLVSAFAGQDHIINAYKTAVTEEYRFFSYGDAMFITKQDK

SEQ ID NO: 70755 - protein, 345 aa, Pseudoalteromonas phenolica
  REGION 1..345: note = tr|A0A4Q7IPX8|A0A4Q7IPX8_9GAMM S-adenosylmethionine:tRNA ribosyltransferase-isomerase; OS = Pseudoalteromonas phenolica OX=161398 GN=queA PE=3 SV=1
MRVADFSFELPDELIARHPMADRTASRLLTLDGNTGELGHKIFKDLIDFLNPNDLMIFNNTKVIPARMYGQKSTGGKVEVLVERVVDEHRVLAHVRSSKSPKEGATLILEGKAEATMIARHGELFELEFKGEQTVLNILDDIGHMPLPPYIDRPDTEEDKARYQTVYNEKPGAVAAPTAGLHFDETLLEKIKEKGIETQFITLHVGAGTFQPVRVDSVDEHVMHSEYIEVSQEVVDAIKKTKANGGRVIAVGTTSVRSLESAAKASEVELQPLYGDTDIFIYPGYEFQVVDAMITNFHLPESTLIMLVSAFSGQDHIINAYKTAVNEEYRFFSYGDAMFITKQDK

SEQ ID NO: 70756 - protein, 345 aa, unidentified
  source 1..345: note = Pseudoalteromonas piratica
  REGION 1..345: note = tr|A0A0A7EAW4|A0A0A7EAW4_9GAMM S-adenosylmethionine:tRNA ribosyltransferase-isomerase; OS = Pseudoalteromonas piratica OX=1348114 GN=queA PE=3 SV=1
MRVADFNFELPDELIARFPMEERTASRLLKLEGNSGEITHHTFADVLDFVNPNDLIIFNNTKVIPARMFGQKTSGGKVEVLVERVVDKHTVLAHVRANKSPKVGNELILEGSATAVMQGRQGELFELKFEGEEGVLDILDRIGHMPLPPYIDRPDNEKDRNRYQTVYGEKPGAVAAPTAGLHFDDSLLEKLKAKGVDLGFVTLHVGAGTFQPVRVDKIEDHHMHSEYIEVPEQVVAQIKACRERGGRVVAVGTTSMRSLESAAMKSDGELAPFYGDTDIFIFPGYEFQVVDAMITNFHLPESTLIMLVSAFAGQDNIMNAYQTAIAEKYRFFSYGDAMFLTKKES

SEQ ID NO: 70757 - protein, 345 aa, Pseudoalteromonas piscicida
  REGION 1..345: note = tr|A0A2A5JQA5|A0A2A5JQA5_PSEO7 S-adenosylmethionine:tRNA ribosyltransferase-isomerase; OS = Pseudoalteromonas piscicida OX=43662 GN=queA PE=3 SV=1
MRVADFSFDLPDELIARHPMKERSSSRLLTLNGNSGEIEHKVFKDILALINPEDLIIFNNTKVIPARMFGQKASGGKLEVLVERVVDAHTVLAHIRASKSPKAGTKIELEGQATAEMVQRHGELFELKFDGDENVLAILDKIGHMPLPPYIDRPDDEEDKERYQTVYGEKPGAVAAPTAGLHFDDDLMAKLKDKGVEMAFVTLHVGAGTFQPVRVDSVEEHVMHSEYIEVSDEVVQAVNAAKARGGRVIAVGTTSVRSLESAAKANGGEIAPLYGDTDIFIYPGYQFNVVDAMVTNFHLPESTLIMLVSAFAGQEHIMNAYKTAIEQKYRFFSYGDAMFLQKQDK

SEQ ID NO: 70758 - protein, 345 aa, Pseudoalteromonas piscicida
  REGION 1..345: note = tr|A0A0F4P7H3|A0A0F4P7H3_PSEO7 S-adenosylmethionine:tRNA ribosyltransferase-isomerase; OS = Pseudoalteromonas piscicida OX=43662 GN=queA PE=3 SV=1
MRVADFSFDLPDELIARHPMKERSSSRLLTLNGNSGEIEHKVFRDILALINPEDLIIFNNTKVIPARMFGQKASGGKLEVLVERVVDERTVLAHVRASKSPKPGTKIELEGQATAEMVQRHGELFELRFEGEENVLAILDKIGHMPLPPYIDRPDDEEDKERYQTVYGEKPGAVAAPTAGLHFDDELMAKLKDKGVEMAFVTLHVGAGTFQPVRVDSVEEHVMHSEYIEVSAEVVEAIKAAKARGGRVIAVGTTSVRSLESAAKANGGEIAPLYGDTDIFIYPGYRFNVVDAMVTNFHLPESTLIMLVSAFAGQQHIMKAYQTAIEQKYRFFSYGDAMFLQKQDK

SEQ ID NO: 70759 - protein, 343 aa, unidentified
  source 1..343: note = Pseudoalteromonas porphyrae
  REGION 1..343: note = tr|A0A0N1MWI8|A0A0N1MWI8_9GAMM S-adenosylmethionine:tRNA ribosyltransferase-isomerase; OS = Pseudoalteromonas porphyrae OX=187330 GN=queA PE=3 SV=1
MRVADFSFDLPDELIARFPKQDRTSSRLLTLDGPSGDLEHKIFSDVLDLVNENDLLVFNNTKVIPARMYGQKSSGGKVEVLVERVLDEHRVLAHVRASKSPKPGTTIILEGKAEATMVGRHGELFELQFTDSQNVLEILNDIGHMPLPPYIDRPDTDEDRKRYQTVYGEKPGAVAAPTAGLHFDDALMAALKAKGVSMAFVTLHVGAGTFQPVRVDSVDDHIMHSEYIEVPDDVVAAVAATKAKGGRVIAVGTTSVRSLESAAKIHGGQLATYFGDTDIFIYPGYEFNVVDAMVTNFHLSESTLIMLVSAFAGQDNIMGAYQTAIEQKYRFFSYGDAMFLTRK

SEQ ID NO: 70760 - protein, 343 aa, unidentified
  source 1..343: note = Pseudoalteromonas profundi
  REGION 1..343: note = tr|A0A3A3EUP3|A0A3A3EUP3_9GAMM S-adenosylmethionine:tRNA ribosyltransferase-isomerase; OS = Pseudoalteromonas profundi OX=1774956 GN=queA PE=3 SV=1
MRVADFSFDLPDELIARFPKADRTSSRLLTLDGPSGHLEHKVFSDILSLVNENDLLVFNNTKVIPARMFGQKESGGKLEVLVERVLDEHRVLAHVRASKSPKPGSKIILEGKAEATMVARHGELFELEFAKDENVLDILNDIGHMPLPPYIDRPDNESDRERYQTVYGEKPGAVAAPTAGLHFDDKLMVALKDKGINMAFVTLHVGAGTFQPVRVDSVDEHVMHSEYIEVPDDVVKAVAETKAKGGRVIAVGTTSVRSLESAAKVHGGKLDTYFGDTDIFIYPGYQFNVVDAMVTNFHLPESTLIMLVSAFAGQDNIMGAYHTAIKEQYRFFSYGDAMFLTRK

SEQ ID NO: 70761 - protein, 346 aa, Pseudoalteromonas rubra
  REGION 1..346: note = tr|A0A0F4QS29|A0A0F4QS29_9GAMM S-adenosylmethionine:tRNA ribosyltransferase-isomerase; OS = Pseudoalteromonas rubra OX=43658 GN=queA PE=3 SV=1
MRVADFSFELPDELIARHPKKERSSSRLLTLDGNTGELQHKVFKDIVDLINPEDLIIFNNTKVIPARMFGQKATGGKLEVLVERVLDEHSVLAHVRASKSPKEGAEIILEGKAKATMVARHGELFELKFHGDSSVLSILDEIGHMPLPPYIDRPDEEEDKERYQTVYGEKPGAVAAPTAGLHFDDVLMAQLKDKGVEMAFVTLHVGAGTFQPVRVENVNDHHMHSEYIEVPQEVVDAIAAARQRGGRVIAIGTTSVRSLESAAKAHPDELKPFYGDTDIFIYPGYQFQLVDAMVTNFHLPESTLIMLVSAFAGQSHIMHAYETAIAEQYRFFSYGDAMFLTRQDKA

SEQ ID NO: 70762 - protein, 346 aa, Pseudoalteromonas rubra
  REGION 1..346: note = tr|U1KUK9|U1KUK9_9GAMM S-adenosylmethionine:tRNA ribosyltransferase-isomerase OS=Pseudoalteromonas rubra DSM 6842 OX=1117318 GN=queA PE=3 SV=1
MRVADFSFELPDELIARHPKKERSSSRLLTLDGNTGDLQHKVFKDIVDLINPEDLIIFNNTKVIPARMFGQKATGGKLEVLVERVLDERSVLAHVRASKSPKEGAEILLEGKAKATMVARHGELFELKFHGDASVLSILDEIGHMPLPPYIDRPDEEEDKERYQTVYGEKPGAVAAPTAGLHFDDALMTQLKDKGVEMAFVTLHVGAGTFQPVRVDDVNDHQMHSEYIEVPQEVVDAIAAARQRGGRVIAIGTTSVRSLESAAKAHPDELKPFYGDTDIFIYPGYQFQLVDAMVTNFHLPESTLIMLVSAFSGQSHIMHAYETAIAEQYRFFSYGDAMFLTRQNKA

SEQ ID NO: 70763 - protein, 346 aa, Pseudoalteromonas ruthenica
  REGION 1..346: note = tr|A0A0F4Q2F3|A0A0F4Q2F3_9GAMM S-adenosylmethionine:tRNA ribosyltransferase-isomerase; OS = Pseudoalteromonas ruthenica OX=151081 GN=queA PE=3 SV=1
MRVADFSFELPEELIARFPQKERSQSRLLKVEGNSGNTTHHIFKDIIDFIEPGDLLVFNNTKVIPARMHGQKRSGGKVEVLVERVLDDKRVLAHVRANKSPKPGTVMVLEEQAQMEMIGRQGELFELELKGDMSVLDTLEQIGHMPLPPYIDRPDTDEDKQRYQTVYGEKPGAVAAPTAGLHFDEPLMAALKDKGVAMAFVTLHVGAGTFQPVRVDSVQEHHMHSEYIDVPQDVVDAIAKTKAQGGRVIAVGTTSVRSLESAAKIGGGELISYVGDTDIFIYPGYQFNVVDAMITNFHLPESTLIMLVSAFSGQEHIMSAYQEAIKERYRFFSYGDAMFLTRQDKD

SEQ ID NO: 70764 - protein, 346 aa, Pseudoalteromonas sp.; identical to SEQ ID NO: 70763
  REGION 1..346: note = tr|A0A4Q6YEY4|A0A4Q6YEY4_9GAMM S-adenosylmethionine:tRNA ribosyltransferase-isomerase; OS = Pseudoalteromonas sp. CO325X OX=1777262 GN=queA PE=3; SV = 1

SEQ ID NO: 70765 - protein, 343 aa, Pseudoalteromonas sp.
  REGION 1..343: note = tr|A0A4S1F6I9|A0A4S1F6I9_9GAMM S-adenosylmethionine:tRNA ribosyltransferase-isomerase; OS = Pseudoalteromonas sp. MEBiC 03607 OX=2563601 GN=queA; PE = 3 SV=1
MRVADFSFDLPDELIARFPKADRTSSRLLTLDGPSGKVEHKVFSDILSLVNENDLLVFNNTKVIPARMFGQKESGGKLEVLVERVLDEHRVLAHVRASKSPKPGSKIILEGKAEAIMVARHGELFELEFAKDENVLDILNDIGHMPLPPYIDRPDNESDRERYQTVYGEKPGAVAAPTAGLHFDDKLMTALKDKGINMAFVTLHVGAGTFQPVRVDSVDEHVMHSEYIEVPDDVVKAVAETKAKGGRVIAVGTTSVRSLESAAKVHGGKLDTYFGDTDIFIYPGYQFNVVDAMVTNFHLPESTLIMLVSAFAGQENIMGAYHTAIEQKYRFFSYGDAMFLTRK

SEQ ID NO: 70766 - protein, 345 aa, Pseudoalteromonas spongiae
  REGION 1..345: note = tr|A0A290T5B4|A0A290T5B4_9GAMM S-adenosylmethionine:tRNA ribosyltransferase-isomerase; OS = Pseudoalteromonas spongiae UST010723-006 OX=1117319; GN = queA PE=3 SV=1
MRVADFNFELPDELIARFPMEDRTASRLLKLAGNSGEITHHTFADVLDFINPNDLIIFNNTKVIPARMFGQKASGGKVEVLVERVVDKHTVLAHVRANKSPKVGNELILEETATAVMQGRQGELFELKFEGEEGVLDILDRIGHMPLPPYIDRPDNEKDRNRYQTVYGEKPGAVAAPTAGLHFDDALLAKLKDKGVDLGFVTLHVGAGTFQPVRVDKIEDHHMHSEYIEVPEQVVAQIKACRERGGRVVAVGTTSMRSLESAAMKSEGELAPFYGDTDIFIFPGYEFQVVDAMITNFHLPESTLIMLVSAFAGQENIMNAYNTAIEEKYRFFSYGDAMFLTKKDI

SEQ ID NO: 70767 - protein, 343 aa, Pseudoalteromonas tetraodonis
  REGION 1..343: note = tr|A0A1E3WV75|A0A1E3WV75_9GAMM S-adenosylmethionine:tRNA ribosyltransferase-isomerase; OS = Pseudoalteromonas tetraodonis OX=43659 GN=queA PE=3 SV=1
MRVADFSFDLPDELIARFPKADRTSSRLLSLDGPSGAVEHKIFSDILELVNENDLLVFNNTKVIPARMFGQKESGGKVEVLVERVLDEHRVLAHIRASKSPKPGNVLILEGKAKAIMVARHDTLFELEFDRSENVLDILNDVGHMPLPPYIDRPDNEADRERYQTVYGEKPGAVAAPTAGLHFDDKLMTALKDKGVQMAFVTLHVGAGTFQPVRVESVDEHIMHSEYIEVPQDVVDAVASTKAKGGRVIAVGTTSVRSLESAAKIHGGKLDTYFGDTDIFIFPGYQFNVVDAMVTNFHLPESTLIMLVSAFAGQDNIMGAYNTAIEQQYRFFSYGDAMFLTRK

SEQ ID NO: 70768 - protein, 343 aa, Pseudoalteromonas tetraodonis
  REGION 1..343: note = tr|A0A290TI40|A0A290TI40_9GAMM S-adenosylmethionine:tRNA ribosyltransferase-isomerase; OS = Pseudoalteromonas tetraodonis OX=43659 GN=queA PE=3 SV=1
MRVADFSFDLPDELIARFPKADRTSSRLLSLNGPTGEIEHKIFSDILELVNENDLLVFNNTKVIPARMFGQKESGGKVEVLVERVLDEHRVLAHIRASKSPKPGNVLILEGKAKAIMVARHDTLFELEFDRSENVLDILNDVGHMPLPPYIDRPDNEADRERYQTVYGEKPGAVAAPTAGLHFDDKLMAALKDKGVQMAFVTLHVGAGTFQPVRVESVDEHIMHSEYIEVPQDVVDAVASTKAKGGRVIAIGTTSVRSLESAAKIHGGKLDTYFGDTDIFIFPGYQFNVVDAMVTNFHLPESTLIMLVSAFAGQDNIMGAYNTAIEQQYRFFSYGDAMFLTRK

SEQ ID NO: 70769 - protein, 343 aa, Pseudoalteromonas translucida
  REGION 1..343: note = tr|A0A0U2WII8|A0A0U2WII8_9GAMM S-adenosylmethionine:tRNA ribosyltransferase-isomerase; OS = Pseudoalteromonas translucida KMM 520 OX=1315283; GN = queA PE=3 SV=1
MRVADFSFDLPDELIARFPKQDRTSSRLLSLDGPSGVVEHKVFSDLLELVNENDLLVFNNTRVIPARMFGQKASGGKVEVLVERVLDEHRVLAHVRASKSLKPGNEVILEGKAKATMVARHDTLFELEFDHSQNVLDILNDIGHMPLPPYIDRPDNEADRERYQTVYGEKPGAVAAPTAGLHFDDKLMAALKNKGVQMAFVTLHVGAGTFQPVRVATVDEHIMHSEYIEVPDDVVAAVANTKANGGRVIAIGTTSVRSLESAAKVHGGKLDTYFGDTDIFIYPGYQFNVVDAMITNFHLPESTLIMLVSAFAGQNNIMGAYNTAIEQQYRFFSYGDAMFLTRK

SEQ ID NO: 70770 - protein, 345 aa, Pseudoalteromonas tunicata
  REGION 1..345: note = tr|A4C7I8|A4C7I8_9GAMM S-adenosylmethionine:tRNA ribosyltransferase-isomerase OS=Pseudoalteromonas tunicata D2 OX=87626 GN=queA PE=3 SV=1
MRVADFNFDLPDELIARFPKEERTSSRLLKMNGNSGEIEHCVFSDIINFIGPKDLLVFNNTKVIPARMFGQKASGGKIEVLIERVLDEHRVLAHVRASKSPKAGALLILENSAEATMVQRHGELFELKFHGDNNVLDILENIGHMPLPPYIDRPDNESDRKRYQTVYGEKPGAVAAPTAGLHFDEKLMADLKAKGVEMAFVTLHVGAGTFQPVRAQTVDEHVMHSEYIEVPDDVVAAIVKTKARGGRVIAVGTTSVRSLESAAKQSQGELKSYFGDTDIFIYPGYQFQVIDAMITNFHLPESTLIMLVSAFAGQENIMNAYNVAIAEQYRFFSYGDAMFLERKTN

SEQ ID NO: 70771 - protein, 346 aa, Pseudoalteromonas ulvae
  REGION 1..346: note = tr|A0A244CNR7|A0A244CNR7_9GAMM S-adenosylmethionine:tRNA ribosyltransferase-isomerase; OS = Pseudoalteromonas ulvae OX=107327 GN=queA PE=3 SV=1
MRVADFSFDLPDELIARFPKEERTSSRLLKMNGDTGEIVHHVFSDIIDFITPNDLLVFNNTKVIPARMFGQKESGGKVEVLVERVLNEHSVLAHVRASKSPKEGAVLTLENSAKATMVQRHGELFELKFHGDKNVLDVLESIGHMPLPPYIDRPDNDADRKRYQTVYGEKPGAVAAPTAGLHFDEKLMAALTEKGIEMAFITLHVGAGTFQPVRVDNIDEHIMHSEYIEVPDEVVAAIAKTKARGGRVIAVGTTSVRSLESAAKQSNGPLKSYFGDTDIFIYPGYEFQVIDMMITNFHLPESTLIMLVSAFSGQEHIMNAYKVAIEEQYRFFSYGDAMLLSPQNKK

SEQ ID NO: 70772 - protein, 340 aa, unidentified
  source 1..340: note = Pseudoarcobacter caeni
  REGION 1..340: note = tr|A0A363D1A9|A0A363D1A9_9PROT S-adenosylmethionine:tRNA ribosyltransferase-isomerase; OS = Pseudoarcobacter caeni OX=1912877 GN=queA PE=3 SV=1
MLDPLKTSSYDYDLPKEFIATHPVSPADNARLLVYNRTTNSITHTTFKNLLDFLPQNLSIFLNDTKVIKARIFGTKETGGKIELLLNKPLFMDRYLVMIGGKVRIGTKLFFDENLNAEVLEVNEDGSRVVQFFQNDKKLDFLTLVDILNKIGHLPLPPYMNRDDEEKDEKDYQTLFAKNYGAVAAPTASLHFTPELLEKINAKYSVNYLTLHVGAGTFKPVDVDDILNHPMHSEYFEIGIDAKKALDKASKVLAVGTTVTRTVEYYQRTNKIQGECDLFLNPANKPIKVDYLLTNFHLPKSTLIMLVASFVGLEKTLEIYHEAIKENYRFYSYGDGMLII

SEQ ID NO: 70773 - protein, 486 aa, unidentified
  source 1..486: note = Pseudobacter ginsenosidimutans
  REGION 1..486: note = tr|A0A4Q7MQ34|A0A4Q7MQ34_9BACT S-adenosylmethionine:tRNA ribosyltransferase-isomerase; OS = Pseudobacter ginsenosidimutans OX=661488 GN=EV199_2690; PE = 3 SV=1
MWISCGFTGKTCAYPVHRRCYLFKIKGSELYRFPLWNRKNGNLNLMGLGGVFGKREKSGGKVGGIAGCRQRLRLTFARMHPKEIAIKDFTYDLPEELIAKYPLPNRDASRLLIWQEETISEDIYRNLDQYLPSNSLLVFNNTRVVAARLLFQKITGATIEIFCLEPHAKYPDITTAMSTRGSVTWMCLVGGVSKWKPGNILEKKIPHGSTELKLHAAYIEKIKDSFAIELSWNEPDLSFAEVLHLAGVMPLPPYIKRKAEQTDEDRYQTIYAKHEGSVAAPTAGLHFTDTIFQKLDARNIKRSFVTLHVGAGTFQPVKSGTLEGHPMHIEFIDVTVESIRNLIDHIDTHITAVGTTSLRTIESLYWLGSKVMAQPDIQPEELSVQQWDAYEMKGDIPAKAALEALLKYLEQKGLNRLLTRTQLLIAPGYSIRIPHALVTNFHQPQSTLLLLVAAFAGPKWKEIYHYALSNGFRFLSYGDGCLLFRH

SEQ ID NO: 70774 - protein, 349 aa, unidentified
  source 1..349: note = Pseudobacter ginsenosidimutans
  REGION 1..349: note = tr|A0A4Q7ML26|A0A4Q7ML26_9BACT S-adenosylmethionine:tRNA ribosyltransferase-isomerase; OS = Pseudobacter ginsenosidimutans OX=661488 GN=queA PE=3; SV = 1
MKLSQFRFDLPLNLIAQHPTKKREDARLMVVHRKTGQIENKYFRDVMDYFDDKDVFVVNNTKVFPARMYGRKEKTGAKIEVFLLRELNKPNRLWDVIVDPARKIRVGNKLYFGENDELVAEVIDNTTSRGRTIRFLWDGTDEEFRQMLEFLGETPLPKYIKRKPEAEDKERYQTVYAKHEGAVAAPTAGLHFSIELIKRLEIKGIRFAEVTLHTGLGTFRPIEVEDLSKHKMDAEYYRIEEGACKVVNKAIETGHRICSVGTTTMRALESSYTAEKHLKPSEGWTNIFIHPPYQFNIADSLITNLHLPKTSLLIMTCAFAGYELAMEAYRKAIKDKYRFFSYGDAMLVI

SEQ ID NO: 70775 - protein, 364 aa, unidentified
  source 1..364: note = Pseudobacteriovorax antillogorgiicola
  REGION 1..364: note = tr|A0A1Y6B4Q9|A0A1Y6B4Q9_9PROT S-adenosylmethionine:tRNA ribosyltransferase-isomerase; OS = Pseudobacteriovorax antillogorgiicola OX=1513793; GN = queA PE=3 SV=1
MLKRSDFFYNLPDELIAQYPADHRTDSKLLVYRDQSINDSVTRNLAMHVPENAVFVRNNSRVIPSRLLGETQHGGKVELMLIEPIPGNGDATWKAFGKPLKKMKPDSKLFFNGGNAYIEDRVQDEDSPYLIVSFDKSWAEFYSWIDKVGYIPLPPYIKREKAETAPQSTDAIRYQTVYAEPKGSVAAPTAGLHFTDDLIRTMVNDKGIEFVDITLHVGAGTFLPVKSEDIDQHKMHFETYMLPSASFQAIQKARAENRKVIAVGTTSLRCLESFFRLGCDTHSWDNYLDLWHQTNLFIRPKTKNDRFRPGLIDGIMTNFHQPESTLLMLISAMFGYDEVRRIYQHAIEQRYRFFSYGDSSLLMF

SEQ ID NO: 70776 - protein, 341 aa, unidentified
  source 1..341: note = Pseudobacteroides cellulosolvens
  REGION 1..341: note = tr|A0A0L6JI94|A0A0L6JI94_9FIRM S-adenosylmethionine:tRNA ribosyltransferase-isomerase; OS = Pseudobacteroides cellulosolvens ATCC 35603 = DSM 2933; OX = 398512 GN=queA PE= 3 SV=1
MKVTDFYYDLPEELIAQEPVLNRDMSRLMVLHKDSGNIEHKIFKDVKDYLKEGDCLVLNDTRVIPARLYGEKEGTGSKIEFVLLKRINGDVWEVILKPGRKAKVGSRFSFGEGILRAEVIEIVEEGNRLVRFEYDGIFEHILDKVGLMPLPPYITKRLTDKERYQTVYSKNKGSAAAPTAGLHFTRELIQQITEMGVNIVYVTLHVGLGTFRPVKVENITEHHMHSEFYTISEDTCSVINNTREKGKNVIAVGTTSVRVLETVGDSAGKVSPGSGNTNIFIYPGYKFKVVDKIITNFHLPESTLIMLISAFAGKEKVLNAYNEAIKEKYRFFSFGDAMIII

SEQ ID NO: 70777 - protein, 345 aa, Pseudobutyrivibrio ruminis
  REGION 1..345: note = tr|A0A285RTJ6|A0A285RTJ6_9FIRM S-adenosylmethionine:tRNA ribosyltransferase-isomerase; OS = Pseudobutyrivibrio ruminis DSM 9787 OX=1123011 GN=queA; PE = 3 SV=1
MKVKDFDYDLPEELIAQDPLEKRSNSRLMVLDKNTGETFHRHFYDIKDYLKPGDCLVINNTKVIPARLYGARVGSGGKVEILLLKRISDNQWECLVKPGKKARPGMEISFGDGLLMGKIIDIVDEGNRIIEFSYEGIFEEILDKLGEMPLPPYITHKLQDRDRYQTVYAKYDGSAAAPTAGLHFTPELLDEVRAMGVKIAEVTLHVGLGTFRPVKEEEVLEHHMHSEYYELNQEACDIINETKANGGRIISVGTTSTRTLESAAEAGKPLTPKSGWTQIFIYPGYEFKVIDGLITNFHLPQSTLIMLVSALAGREHVLKAYEEAVQERYRFFSFGDAMLITDLSK

SEQ ID NO: 70778 - protein, 344 aa, Pseudobutyrivibrio ruminis
  REGION 1..344: note = tr|A0A2G3E9Q5|A0A2G3E9Q5_9FIRM S-adenosylmethionine:tRNA ribosyltransferase-isomerase; OS = Pseudobutyrivibrio ruminis OX=46206 GN=queA PE=3 SV=1
MLVKDFDYELPEELIAQDPLEKRSNSRLMVLDKNTGEISHRHFYDIKEYLKPGDCLVINNTRVIPARLYGARVGSGGKVEILLLKRISDNRWECLVKPGKKARPGMEISFGDGLLIGKIVDIVDEGNRIIEFSYDGIFEEILDKLGEMPLPPYITHKLKDRDRYQTVYAKYDGSAAAPTAGLHFTPELLDEVRAMGVKIAEVTLHVGLGTFRPVKEEEVLDHHMHSEYYELTQEACDIINETKANGGRVISVGTTSTRTLESAAEAGKPLSPKSGWTQIFIYPGYEFKVIDGLITNFHLPQSTLIMLVSALAGREHVLAAYKEAVKERYRFFSFGDAMLIADLK

SEQ ID NO: 70779 - protein, 345 aa, Pseudobutyrivibrio sp.
  REGION 1..345: note = tr|A0A1I5FCG7|A0A1I5FCG7_9FIRM S-adenosylmethionine:tRNA ribosyltransferase-isomerase; OS = Pseudobutyrivibrio sp. JW11 OX=1855302 GN=queA PE=3 SV=1
MKVKDFDYDLPEELIAQDPLEKRSNSRLMVLDKNTGETFHRHFYDIKDYLKPGDCLVINNTKVIPARLYGARVGSGGKVEILLLKRISDNQWECLVKPGKKARPGMEISFGDGLLMGKIIDIVDEGNRIIEFSYEGIFEEILDKLGEMPLPPYITHKLQDRDRYQTVYAKYDGSAAAPTAGLHFTPELLDEVRAMGVKIAEVTLHVGLGTFRPVKEEEVLEHHMHSEYYELNQEACDIINETKANGGRIISVGTTSTRTLESAAEAGKPLTPKSGWTQIFIYPGYEFKVIDGLITNFHLPQSTLIMLVSALAGREHVLKAYEEAVQEKYRFFSFGDAMLITDLSK

SEQ ID NO: 70780 - protein, 344 aa, Pseudobutyrivibrio sp.
  REGION 1..344: note = tr|A0A1H4CCF0|A0A1H4CCF0_9FIRM S-adenosylmethionine:tRNA ribosyltransferase-isomerase; OS = Pseudobutyrivibrio sp. ACV-2 OX=1520801 GN=queA PE=3; SV = 1
MLVKDFDYELPEELIAQDPLEKRSNSRLMVLDKNTGEIVHRHFYDIKEYLKPGDCLVINNTRVIPARLYGARVGSGGKVEILLLKRISDSQWECLVKPGKKARPGMEISFGDGLLIGKIVDIVDEGNRIIEFSYDGIFEEILDKLGEMPLPPYITHKLADRDRYQTVYAKYDGSAAAPTAGLHFTPELLEEVKAMGVRIAEVTLHVGLGTFRPVKEEEVLEHHMHSEYYELTQEACDIINETKANGGRVISVGTTSTRTLESAAEPGKPLAPKSGWTQIFIYPGYEFKVIDGLITNFHLPQSTLIMLVSALAGREHVLAAYEKAVEERYRFFSFGDAMMITDLQ

SEQ ID NO: 70781 - protein, 347 aa, Pseudobutyrivibrio xylanivorans
  REGION 1..347: note = tr|A0A1G5RVB2|A0A1G5RVB2_PSEXY S-adenosylmethionine:tRNA ribosyltransferase-isomerase; OS = Pseudobutyrivibrio xylanivorans OX=185007 GN=queA PE=3; SV = 1
MLVKDFDYDLPEELIAQDPLEKRSNSRLMVLDKKTGEIAHRHFYDIKEYLRPGDCLVINNTRVIPARLYGARVGSGGKVEILLLKRLSDNQWECLVKPGKKARPGMEISFGDGLLVGKIIDIVDEGNRIIEFTYDGIFEEILDKLGEMPLPPYITHKLKDRDRYQTVYAKFDGSAAAPTAGLHFTPELLEEVKAMGVKIAEVTLHVGLGTFRPVKEDEVLDHHMHSEYYELTQEACDIINETKANGGRVISVGTTSTRTLESAAEPGKPLVPKSGWTQIFIYPGYEFKVIDCLITNFHLPQSTLIMLVSALAGREHVLAAYEQAVQERYRFFSFGDAMMITDLHQGE

SEQ ID NO: 70782 - protein, 345 aa, Pseudobutyrivibrio xylanivorans
  REGION 1..345: note = tr|A0A1M6CL20|A0A1M6CL20_PSEXY S-adenosylmethionine:tRNA ribosyltransferase-isomerase; OS = Pseudobutyrivibrio xylanivorans DSM 14809 OX=1123012; GN = queA PE=3 SV=1
MLVKDFDYELPEELIAQDPLEKRSNSRLMVLDKNTGETVHRHFYDIKEYLRPGDCLVINNTRVIPARLYGARVGSGGKVEILLLKRLSDTQWECLVKPGKKARPGMEISFGDGLLIGKIIDIVDEGNRIIEFSYEGIFEEILDKLGEMPLPPYITHKLQDRDRYQTVYAKFDGSAAAPTAGLHFTSELLEEVKAMGVKIAEVTLHVGLGTFRPVKEDEVLDHHMHSEYYELTQEACDIINETKANGGRVISVGTTSTRTLESAAEPGKPLVPKSGWTQIFIYPGYEFKVIDCLITNFHLPQSTLIMLVSALAGREHVLAAYEEAVKERYRFFSFGDAMMITDLQE

SEQ ID NO: 70783 - protein, 357 aa, Pseudochrobactrum asaccharolyticum
  REGION 1..357: note = tr|A0A366EC41|A0A366EC41_9RHIZ S-adenosylmethionine:tRNA ribosyltransferase-isomerase; OS = Pseudochrobactrum asaccharolyticum OX=354351 GN=queA; PE = 3 SV=1
MRVDLFDFDLPEERIALRPVTPRYHAKLLRVIPDQPLQDLHVGDLPDLLREGDALVFNDTKVIPAQLEGTRERDGTVATVSATLHMRTGADRWKAFLRPAKRVKQGERIRFGHSGSSCFLGTLDALVAEKHDSGEVLLVFDVSGAVLDEAIASVGHIPLPPYIASKRAEDAQDRQDYQTVYAREEGAVAAPTAGLHFTPELLERIRAKGVEEHFVTLHVGAGTFLPVKADDTADHKMHAEIGYVSEETAAALNRVHERGGRIISVGTTSLRLIESAAGEDGIIRPWSGATDIFITPGYKFRAIDMLMTNFHLPRSTLFMLVSAFSGFETMQAAYAHAISNEYRFYSYGDASLLTLRT

SEQ ID NO: 70784 - protein, 354 aa, unidentified
  source 1..354: note = Pseudocitrobacter faecalis
  REGION 1..354: note = tr|A0A366F2J5|A0A366F2J5_9ENTR S-adenosylmethionine:tRNA ribosyltransferase-isomerase; OS = Pseudocitrobacter faecalis OX=1398493 GN=queA PE=3 SV=1
MRLADFSFELPESLIAHYPQPERSGCRLLSLDGPTGALTHGTFTDLLDKLNPGDLLVFNNTRVIPARLFGRKASGGKIEVLVERMLDDNRILAHIRASKAPKPGAELLLGDDESINATMVARHDALFEVQFNDERPVLDILNSIGHMPLPPYIDRPDEDADRELYQTVYSSRPGAVAAPTAGLHFDEPLLAKLREKGIDMAFVTLHVGAGTFQPVRVESIEEHTMHSEYAEVPQEVVDAVLAAKARGNRVIAVGTTSVRSLESAAQAAKNDLIEPFFGDTQIFIYPGYQYKVIDALVTNFHLPESTLIMLVSAFAGYKHTLHAYHEAVKAEYRFFSYGDAMFITYNPQAINERP

SEQ ID NO: 70785 - protein, 354 aa, unidentified
  source 1..354: note = Pseudocitrobacter sp.
  REGION 1..354: note = tr|A0A5B0KGG7|A0A5B0KGG7_9ENTR S-adenosylmethionine:tRNA ribosyltransferase-isomerase; OS = Pseudocitrobacter sp. 73 OX=2605731 GN=queA PE=3 SV=1
MRLADFSFELPESLIAHYPQPERSGCRLLSLDGPTGALTHGTFTDLLDKLNPGDLLVFNNTRVIPARLFGRKASGGKIEVLVERMLDDNRILAHIRASKAPKPGAELLLGDDESINATMVARHDALFEVQFNDERPVLDILNSIGHMPLPPYIDRPDEDADRELYQTVYSSRPGAVAAPTAGLHFDDPLLAKLREKGIDMAFVTLHVGAGTFQPVRVESIEEHTMHSEYAEVPQDVVDAVLAAKARGNRVIAVGTTSVRSLESAAQAAKNDLIEPFFGDTQIFIYPGYQYKVIDALVTNFHLPESTLIMLVSAFAGYKNTMHAYHEAVKAEYRFFSYGDAMFITYNPQAINERP

SEQ ID NO: 70786 - protein, 341 aa, unidentified
  source 1..341: note = Pseudoclostridium thermosuccinogenes
  REGION 1..341: note = tr|A0A2K2F8J4|A0A2K2F8J4_9FIRM S-adenosylmethionine:tRNA ribosyltransferase-isomerase; OS = Pseudoclostridium thermosuccinogenes OX=84032 GN=queA; PE = 3 SV=1
MKLSDFYYDLPEELIAQEPIKERAMSRLLVLDRATGSIEHKIFKDIINYLDAGDCLVLNDTRVIPARLLGTREDTGGKIEFVLLKRIEERVWEVILKPGRRAKPGARFVFGGGLLKAEIIDIVEEGNRIVKFEYDGIFEEILDKVGIVPLPPYITRRLDDSERYQTVYSRYNGSAAAPTAGLHFTEELLDNIAKKGVSLAYVTLHVGLGTFRPVKTENIQDHKMHSEFYNINEEACKKINAAKESGKRVIAVGTTSCRVLETAGDETGLVTPHNGWTDIFIYPGYKFKVVDALITNFHLPESTLLMLVSALAGKDKIFEAYRVAIEERYSFFSFGDAMFIK

SEQ ID NO: 70787 - protein, 364 aa, unidentified
  source 1..364: note = Pseudodesulfovibrio aespoeensis
  REGION 1..364: note = tr|E6VSY4|E6VSY4_PSEA9 S-adenosylmethionine:tRNA ribosyltransferase-isomerase OS=Pseudodesulfovibrio aespoeensis (strain ATCC 700646 / DSM 10631 / Aspo-2); OX = 643562GN=queA PE=3 SV=1
MEIPKDFRLSSYHYTLPEERIAQTPADRRDGSRLLVLDRAGESLRAASFASLMDHLPPDALLVANNSRVIPARVFGTKDTGGRVEFLMLTPLPLMEPQEGTGALTGWRTARAEGLLRASKSPKPGAMVTFADDFQLTALEGGPFGRWQVELAWRGDLKDRFEALGHLPLPPYIHRPDSEADRERYQTTYSDTAKAGSVAAPTAGLHFTSDLRSGLAARGFGWAEITLYVGYGTFSPVRCADIREHRMHSEYIEVPEATALAVQQAKAEGRPVVAVGTTSARSLEGMVRESGRIGEFRGETDIFITPGYRFQVVDAMITNFHLPESSLIIMIAALAGRKTVLSAYDFALENGFRFFSYGDAMLIK

SEQ ID NO: 70788 - protein, 360 aa, unidentified
  source 1..360: note = Pseudodesulfovibrio hydrargyri
  REGION 1..360: note = tr|A0A1J5MTF6|A0A1J5MTF6_9DELT S-adenosylmethionine:tRNA ribosyltransferase-isomerase; OS = Pseudodesulfovibrio hydrargyri OX=2125990 GN=queA PE=3; SV = 1
MEIPEDYKLSSYDYELPEDHIAQEPAERRDGSRLLVLDRAADTLTPVRFTDLLDYLPDNCLLVANNSRVIPARIFGRKPTGGQVEFLLLTPLPLLVPGEEGGWMTARAEGLLRASKGPKTGTVVTFADDFSLTAEEPGEFGRWRVTLRWKGDLTGLFNTHGHLPLPPYIKRPDGEADRERYQTTYSNTAKTGSVAAPTAGLHFTPELRERIRAKGIQWAEVTLYVGYGTFSPVRCPDIRDHRMHAEYIEVGEETAEAIHRAKAEGRPVIAVGTTSARTLEGMVREAGSVRQFRGETDIFISPGYTFRVIDGILTNFHLPESSLIIMISALAGRKTILDAYAFALENNFRFFSYGDAMLIL

SEQ ID NO: 70789 - protein, 360 aa, unidentified
  source 1..360: note = Pseudodesulfovibrio indicus
  REGION 1..360: note = tr|A0A126QK44|A0A126QK44_9DELT S-adenosylmethionine:tRNA ribosyltransferase-isomerase; OS = Pseudodesulfovibrio indicus OX=1716143 GN=queA PE=3 SV=1
MEIPEDYRLSSYDYDLPEDRIAQEPAEKRDGSRLLVLDRKAGTRTPVPFADLLDHLPDNCLLVANNSRVIPARVFGTKPTGGQVEFLLLTPLPLIEPAEKGGWFSARAEGLLRASKGPKPGTTVSFADDFSLIALEPGEFGRWKVELRWRGDLKTLFDTLGHLPLPPYIKRPDGAADRERYQTTYSDKSKTGSVAAPTAGLHFTPELRKRIADKGIEWAEVTLYVGYGTFSPVRCPDIRDHRMHAEYIEVPVHTAEAVLRAKAEGRPVIAVGTTSARTLEGMVREAGEIREFRGETDIFISPGYTFKVIDGILTNFHLPESSLIIMISALAGRNTILDAYALALEQGFRFFSYGDAMLIL

SEQ ID NO: 70790 - protein, 372 aa, unidentified
  source 1..372: note = Pseudodesulfovibrio piezophilus
  REGION 1..372: note = tr|M1WKE1|M1WKE1_PSEP2 S-adenosylmethionine:tRNA ribosyltransferase-isomerase OS=Pseudodesulfovibrio piezophilus (strain DSM 21447 / JCM 15486 / C1TLV30); OX = 1322246GN=queA PE=3 SV=1
MTHNIPNKRYLFMEIPPDFQLQSYSYDLPEDRIAQEPSQQRDGSRLLVLDKKDGTLTPANFVDIAQYLPEGALLVANNSRVIPARIFGNKPTGGQVEFLLLTPLPLITPKEENGWQTATVEGLLRASKTPKPHTQVTFSENFHLITETPGPFGRWQAELRWKGDLTTLFKEMGHLPLPPYIKRPDTEADKERYQTTYSDQTKTGSVAAPTAGLHFTPKIRQTLMDKGFGWAEVTLYVGYGTFSPVRCEDIRDHTMHSEYIEVPKKTALAIRQAKKEGRPVISIGTTSARTLEGMFQECGEITEFRGETDIFIAPGYQFQVIDGILTNFHLPESSLIIMISALAGRKTIFSAYACALENNFRFFSYGDAMLIR

SEQ ID NO: 70791 - protein, 361 aa, unidentified
  source 1..361: note = Pseudodesulfovibrio profundus
  REGION 1..361: note = tr|A0A2C8F9L9|A0A2C8F9L9_9DELT S-adenosylmethionine:tRNA ribosyltransferase-isomerase; OS = Pseudodesulfovibrio profundus OX=57320 GN=queA PE=3 SV=1
MMDIPADFLLESYNFDLPEDQIAQEPAQKRDGSRLLVVNRSQESMEPTDFKKLIDHLPKNALLVANNSRVIPARIFGMKPTGGKVEFLLLTPLPLIEPTVEDGWNIARAEGLLRASKTPKEGTVITFTDTFRLIAREAGHFGRWQVELQWKDDLTEHFKDNGHLPLPPYIKRPDSDSDKERYQTTYSDASKTGSVAAPTAGLHFTPQYREQLKERGFEWAEVTLYVGYGTFSPVRCKDIRQHQMHAEYIEVPDKTARAIQKAKSEGRPVIAIGTTSARTLEGMYRECGNISEFKGETDIFISPGYEFNVIDGILTNFHLPESSLIIMISALAGRETILSAYEFALAHKFRFFSYGDAMLII

SEQ ID NO: 70792 - protein, 360 aa, unidentified
  source 1..360: note = Pseudodesulfovibrio sp.
  REGION 1..360: note = tr|A0A443YI23|A0A443YI23_9DELT S-adenosylmethionine:tRNA ribosyltransferase-isomerase; OS = Pseudodesulfovibrio sp. S3 OX=2283629 GN=queA PE=3 SV=1
MEIPQDYLLSNYNFELPEDRIAQQPADRRDGSKLLVLGRDDGNLTEAAFTDLLDFLPDNALLVANNSRVIPARIFGAKATGGQVEFLLLTPLPLINAEKKGEWNHARAEGLLRASKGPKPGATVSFGEDFRLTAEAAGEFGRWQVQLQWQGDLKSIFDRLGHLPLPPYIKRPDNDADRERYQTTYSDASKTGSVAAPTAGLHFTPELRQRLADRGIEWAEVTLYVGYGTFSPVRCADIREHRMHAEYIEVPEETASAVRRAKSEGRPVIAVGTTSARTLEGMFKESEEISKFQGETNIFISPGYEFKVIDGILTNFHLPESSLIIMISALAGRKTILNAYAYALNNSFRFFSYGDAMLIV

SEQ ID NO: 70793 - protein, 349 aa, unidentified
  source 1..349: note = Pseudoflavitalea sp.
  REGION 1..349: note = tr|A0A3B7MQ77|A0A3B7MQ77_9BACT S-adenosylmethionine:tRNA ribosyltransferase-isomerase; OS = Pseudoflavitalea sp. 5GH32-13 OX=2315862 GN=queA PE=3; SV = 1
MKLSQFRFDLPLNLIAQHPTKKREDARMMVVHRKTGQIENKHFRDIMDYFDDKDVFVVNNTKVFPARMYGRKEKTGAKIEVFLLRELNKPNRLWDVIVDPARKIRVGNKLYFGENDELVAEVIDNTTSRGRTIRFLWDGTDDEFRQMLEFLGETPLPKYIKRKPEAEDKERFQTVYAKHEGAVAAPTAGLHFSIELIKRLEIKGIRFAEVTLHTGLGTFRPIEVEDLSKHKMDAEYYRIEDTACKIVNKAIEGNHRICSVGTTTMRALESSYTAEKLLKPSEGWTNIFIHPPYQFNIADALVTNLHLPKTSLLIMTCAFAGYDLAMEAYKKAIKDKYRFFSYGDAMIVI

SEQ ID NO: 70794 - protein, 408 aa, unidentified
  source 1..408: note = Pseudoflavitalea sp.
  REGION 1..408: note = tr|A0A3B7MT04|A0A3B7MT04_9BACT S-adenosylmethionine:tRNA ribosyltransferase-isomerase; OS = Pseudoflavitalea sp. 5GH32-13 OX=2315862 GN=D3H65_28510; PE = 3 SV=1
MHPKSLAIKDFTYELPEERIAKYPLPERDSSKLLIYNQGKITEDTYRHIDQYLPSDSLLLFNNTRVVEARLLFQKPTGASIEVFCLEPHPRYPDITTAMTQKERVTWMCLIGGASKWKTGQLLEKKIPHGDKTIVLQAQYLEKIKDSFAIELSWTPSSLSFAEVLHIAGMIPLPPYIKRAAESGDATRYQTIYALTEGSVAAPTAGLHFTEALFERMQAKNIRRSYVTLHVGAGTFQPVKSENMEGHNMHAEFIDIPTTLIQQLIDYAGRFITVVGTTSLRTVESLYWLGVKTILTPAIAPAELTVHQWDAYELKADHISVQEALTSLLQYMKKQQWERLITRTQLLITPGYTIRIPKALVTNFHQPQSTLLLLVAAFVGTKWKNIYKHALEHEFRFLSYGDGCLLFR

SEQ ID NO: 70795 - protein, 343 aa, Pseudoflavonifractor capillosus
  REGION 1..343: note = tr|A6NV37|A6NV37_9FIRM S-adenosylmethionine:tRNA ribosyltransferase-isomerase OS=Pseudoflavonifractor capillosus ATCC 29799 OX=411467 GN=queA PE=3 SV=1
MELKTSDFYYDLPQELIAQTPLDRRDGSRLMVLNKETGETSHHHFYELPNFLRPGDCLVLNDSRVLPARLLGHREPTGGAVEVLLLIDRGNKVWECLVRPGRKVKPGTKLSFGDGLLTADVLEEVEGGNRLIEFHYEGIFLEILERLGKMPLPPYIKEELNDPERYQTVYSREVGSAAAPTAGLHFTKELLAQIEAMGVRLAYVTLHVGLGTFRPVKEENITDHEMHAEYCMISQKTADIINETKANGGRVICVGTTSCRTIESWAAEDGTLKESAGWTSIYIYPGYRFKALDCLITNFHLPESTLVMLVSALAGRENILNAYAEAAREKYRFFSFGDAMFIC

SEQ ID NO: 70796 - protein, 340 aa, Pseudoflavonifractor sp.
  REGION 1..340: note = tr|A0A1Y4KUP5|A0A1Y4KUP5_9FIRM S-adenosylmethionine:tRNA ribosyltransferase-isomerase; OS = Pseudoflavonifractor sp. An187 OX=1965578 GN=queA PE=3; SV = 1
MKTSDFYFDLPEELIAQTPLERRDASRLLTLDKVTGQTQHMHFYDLPKLLRAGDCLVLNDSRVLPARLLGHRSTGGACEVLLLIDRGEKVWECLVRPGKKLHTGAKITFGNGELTAEVVGEVEGGNRLVRFDYEGIFLETLEKLGKMPLPPYIKEELEDSERYQTVYSKVVGSAAAPTAGLHFTPELLQQVQDMGVKVCYVTLHVGLGTFRPVKAEEVTDHEMHSEYCVISQETADVINATRAAGGRVICVGTTSCRTIESWANEDGSMEAKAGWTNIFIYPGYRFKVLDGLITNFHLPESTLIMLVSALAGREHVLAAYKEAVENRYRFFSFGDAMFIS

SEQ ID NO: 70797 - protein, 340 aa, Pseudoflavonifractor sp.
  REGION 1..340: note = tr|A0A1Y3YPZ2|A0A1Y3YPZ2_9FIRM S-adenosylmethionine:tRNA ribosyltransferase-isomerase; OS = Pseudoflavonifractor sp. An44 OX=1965635 GN=queA PE=3; SV = 1
MKTSDFYFDLPEELIAQTPLERRDASRLLTLDKVTGQTQHMHFYDLPRLLRPGDCLVLNDSRVLPARLLGHRSTGGACEVLLLIDRGEKVWECLVRPGKKLHTGAKITFGNGELTAEVVGEVEGGNRLVRFDYEGIFLETLEKLGKMPLPPYIKEELEDSERYQTVYSKVVGSAAAPTAGLHFTPELLQQVQDMGVKVCYVTLHVGLGTFRPVKAEEVTDHEMHSEYCVISQETADVINETRAAGGRVICVGTTSCRTIESWANQDGTMEAKAGWTNIFIYPGYRFKVLDGLITNFHLPESTLIMLVSALAGREHVLAAYKEAVENRYRFFSFGDAMFIS

SEQ ID NO: 70798 - protein, 362 aa, Pseudofulvimonas gallinarii
  REGION 1..362: note = tr|A0A4R3LPU8|A0A4R3LPU8_9GAMM S-adenosylmethionine:tRNA ribosyltransferase-isomerase; OS = Pseudofulvimonas gallinarii OX=634155 GN=queA PE=3 SV=1
MADSEFARPSDVKRSDFHYELPPELIAQAPLPRRSDSRLLHLPASGNLEDRRIGDLPSLLRAGDLLVFNDTRVLPARLDARKRTGGRAEILIERVLGPFDVKAMLGVSKKPRSGDRLALADGSGVEVLGRDGAFFLLRFDADLPLAQRLERLGRMPLPPYIDRPVDEADAQRYQTVFAREPGAVAAPTAGLHFDQELLDTLAAQGVESGNVTLHVGAGTFQPVRADDIREHRMHSEWINVGAGLCAQIRQARARGGRVVAIGTTVMRALESARQGGDEVLPYTGETAIFIYPGYRFASADLLLTNFHLPESTLLMLVSAYAGRERVFAAYRHAVAERYRFFSYGDAMLVEKAEMPTQPQPQS

SEQ ID NO: 70799 - protein, 351 aa, Pseudofulvimonas gallinarii
  REGION 1..351: note = tr|A0A4S3KYF5|A0A4S3KYF5_9GAMM S-adenosylmethionine:tRNA ribosyltransferase-isomerase; OS = Pseudofulvimonas gallinarii OX=634155 GN=queA PE=3 SV=1
MKRSDFHYELPPELIAQAPLPRRSDSRLLHLPASGNLEDRRIGDLPSLLRAGDLLVFNDTRVLPARLDARKRTGGRAEILIERVLGPFDVKAMLGVSKKPRSGDRLALADGSGVEVLGRDGAFFLLRFDADLPLAQRLERLGRMPLPPYIDRPVDEADAQRYQTVFAREPGAVAAPTAGLHFDQELLDTLAAQGVESGNVTLHVGAGTFQPVRADDIREHRMHSEWINVGAGLCAQIRQARARGGRVVAIGTTVMRALESARQGGDEVLPYTGETAIFIYPGYRFASADLLLTNFHLPESTLLMLVSAYAGRERVFAAYRHAVAERYRFFSYGDAMLVEKAEMPTQPQPQS

SEQ ID NO: 70800 - protein, 347 aa, unidentified
  source 1..347: note = Pseudogracilibacillus auburnensis
  REGION 1..347: note = tr|A0A2V3VXD8|A0A2V3VXD8_9BACI S-adenosylmethionine:tRNA ribosyltransferase-isomerase; OS = Pseudogracilibacillus auburnensis OX=1494959 GN=queA; PE = 3 SV=1
MDMEQYNYHLPNELIAQTPLKDRTSSKLLLLQKGTNKISHDVFSNIGNYVKKGDCIVLNNSRVIPVRLFGSKTDTNAKIEMLLLHEIDNNVWEALVKPARKVKKGTEIMFGEGQLVATCIEEKDEGARLLQLSFDGILLEVLEELGEMPLPPYIKEQLTDQERYQTVYAKEEGSAAAPTAGLHFTTELLSHLEQLGVQIVYITLHVGLGTFRPVTAEHIEEHQMHAEYYSLSKEAAQTLNEVKANNGRIIAVGTTSTRVLETVAKANNGLFKASNGWTDIYIYPPYEFTAIDGLITNFHLPKSTLLLLISAFAGKDAIFNAYEEAIKREYRFFSFGDAMFILPDKKA

SEQ ID NO: 70801 - protein, 340 aa, unidentified
  source 1..340: note = Pseudogulbenkiania ferrooxidans
  REGION 1..340: note = tr|U1AAQ0|U1AAQ0_9NEIS S-adenosylmethionine:tRNA ribosyltransferase-isomerase OS=Pseudogulbenkiania ferrooxidans EGD-HP2 OX=1388764 GN=queA PE=3 SV=1
MQLSDFDYHLPEALIAQHPPAERGASRLLHVDGMTLSDLSFADLPSRLQAGDLLVFNDTRVIRARLFGEKASGGKVEALIERVLDDHTALAHVRASKSPKPGSRLIFAGRWEAEMVERHDALFKLRFLAEENVYDILEASGKLPLPPYIERSAEHDDDERYQTVYAREQGAVAAPTAGLHFTDEMLAGLKAQGVETAFVTLHVGAGTFQPVKVDNVAEHKMHSEIYDIPQATVDAVAAARARGGRVVAIGTTSVRALESAARSGELTAGRGETDIFITPGYRFRVVDRLLTNFHLPKSTLLMLVSAFAGYDEIFQAYRHAVEKEYRFFSYGDAMLLERKE

SEQ ID NO: 70802 - protein, 355 aa, unidentified
  source 1..355: note = Pseudogulbenkiania ferrooxidans
  REGION 1..355: note = tr|B9Z6E0|B9Z6E0_9NEIS S-adenosylmethionine:tRNA ribosyltransferase-isomerase OS=Pseudogulbenkiania ferrooxidans 2002 OX=279714 GN=queA PE=3 SV=1
MEGIIGRFTRANELMQLSDFDYHLPDELIAQHPPEHRGASRLLHVDGLALADLSFGAVLERIQPGDVMVFNDTRVIKARLFGEKASGGKVEALVERVLDEHTVWAHVRASKSPKPGSTITFAGRWQAEMVERDDALFKLRFLDAENVFDILEASGKLPLPPYIERDTDSDDDSRYQTVYARERGAVAAPTAGLHFTEAMLDALRAKGVILAYVTLHVGAGTFQPVRVENIAEHKMHSEIYEIPPATVDAIAAAHAAGRKVLAVGTTSMRALESAAQGGALVAGRGETDIFITPGYRFRVVDRLLTNFHLPKSTLLMLVSAFAGVEPIRNAYRHAVEHRYRFFSYGDAMLLEKQAD

SEQ ID NO: 70803 - protein, 341 aa, Pseudogulbenkiania sp.
  REGION 1..341: note = tr|G2IYM5|G2IYM5_PSEUL S-adenosylmethionine:tRNA ribosyltransferase-isomerase OS=Pseudogulbenkiania sp. (strain NH8B) OX=748280 GN=queA PE=3 SV=1
MQLSDFDYHLPDELIAQHPPEHRGASRLLHVDGMALADLSFGAVLEHIQPGDVMVFNDTRVIKARLFGEKASGGKVEALVERVLDEHTVWAHVRASKSPKPGSTITFAGRWQAEMVERDDALFKLRFLDAENVFDILEASGKLPLPPYIERDTDSDDDSRYQTVYARERGAVAAPTAGLHFTEAMLDALRAKGVILAYVTLHVGAGTFQPVRVENIAEHKMHSEIYEIPPATVDAIAAAHAAGRKVLAVGTTSMRALESAAQGGALVAGRGETDIFITPGYRFRVVDRLLTNFHLPKSTLLMLVSAFAGVEPIRNAYRHAVEHRYRFFSYGDAMLLEKQAD

SEQ ID NO: 70804 - protein, 341 aa, Pseudogulbenkiania subflava
  REGION 1..341: note = tr|A0A1Y6BSV3|A0A1Y6BSV3_9NEIS S-adenosylmethionine:tRNA ribosyltransferase-isomerase; OS = Pseudogulbenkiania subflava DSM 22618 OX=1123014; GN = queA PE=3 SV=1
MQLSDFDYHLPDELIAQHPPEHRGASRLLHVDGMALADLSFGAVLERLQPGDVMVFNDTRVIKARLFGEKASGGKVEALIERVLDEHTVWAHVRASKSPKPGSTITFAGRWQAEMVERDDALFKLRFLDAENVFDILEASGKLPLPPYIERDTDSDDDSRYQTVYARERGAVAAPTAGLHFTEAMLDALRAKGVILAYVTLHVGAGTFQPVRVENIAEHKMHSEIYEIPPATVDAIAAAHAAGRKVLAVGTTSMRALESAAQGGELVAGRGETDIFITPGYRFRVVDRLLTNFHLPKSTLLMLVSAFAGVEPIRNAYRHAVEHRYRFFSYGDAMLLEKQAD

SEQ ID NO: 70805 - protein, 354 aa, unidentified
  source 1..354: note = Pseudohaliea rubra
  REGION 1..354: note = tr|A0A095VRF8|A0A095VRF8_9GAMM S-adenosylmethionine:tRNA ribosyltransferase-isomerase; OS = Pseudohaliea rubra DSM 19751 OX=1265313 GN=queA PE=3; SV = 1
MQRSDFTYDLPEELIAQRPLADRAASRLLCLDGARGVIAHRQFRDLPSLLSPDDLLVFNNTRVLPARLWGRKGTGGRVEVLVERLRGDDEALVHLRASKPSAPGTVIYLAADPDAEPGDECLEVLGREDDLYRVAAPGKPVTRLLAELGHMPLPPYIERADDAADRERYQTVYASRDGSVAAPTAGLHFDDALFSALAGRGIARTEVTLHVGAGTFQPVRADAIEDHVMHAEYLEVGEAACAAIAAARARGGRVVAVGTTAVRSLETAAADGGLAPYRGDTRLFIYPGYRFRCVDAMVTNFHLPESTLLMLVSAFAGREAVLAAYEAAVAERYRFFSYGDAMFLTPCAGAREPA

SEQ ID NO: 70806 - protein, 357 aa, unidentified
  source 1..357: note = Pseudohoeflea suaedae
  REGION 1..357: note = tr|A0A4R5PQ85|A0A4R5PQ85_9RHIZ S-adenosylmethionine:tRNA ribosyltransferase-isomerase; OS = Pseudohoeflea suaedae OX=877384 GN=queA PE=3 SV=1
MRVDLFDFDLPEDNIALRPANPRDSARLLSVKPDGTLGDLVVRDLPSLLRPGDALVFNDTRVIPAQLEGWRIRGENRSRISATLHMRAGPDTWLAFVRPAKRVSEGDRLSFGEDNPACDLGSLLATAGPRGDGGEFELRFDLSGPALDQAIMTAGHIPLPPYIASKRPEDERDRADYQTIYAREEGAVAAPTAGLHFTPELFAALDARGISRHFVTLHVGAGTFLPVKADDTDDHRMHSEIGHVSEEVARALNEVRARGGRIVSVGTTSLRLLESAASEDGVIHPWSGATDIFITPGYAFRAVDLLMTNFHLPRSTLFMLVSAFSGSETMKAAYAHAIENNYRFYSYGDSSLLERAP

SEQ ID NO: 70807 - protein, 352 aa, unidentified
  source 1..352: note = Pseudohongiella acticola
  REGION 1..352: note = tr|A0A1E8CIZ1|A0A1E8CIZ1_9GAMM S-adenosylmethionine:tRNA ribosyltransferase-isomerase; OS = Pseudohongiella acticola OX=1524254 GN=queA PE=3 SV=1
MKLSDFDYHLPDQLIAHYPLEQRSGSRLLCLGRESGAVEHRRFSDIVSMIDAQDLLVFNDTRVLSARLLGKRADTGGAVEVLIERLLPDNEAIAHVRASNARQPGVRLILTSPCGQYSLEAEVIGRQDRFYHLRFFCQGLLIDELDRVGHVPLPTYIKRDDEVLDQSRYQTVYARNPGAVAAPTAGLHFDEALLGALRSQSVEMAFVTLHVGSGTFQPVRVDNVQEHKMHSEWISVTPDVCARINACRERGGRVIAVGTTSVRSLESAALKAGSPGPAAGLQPYEGETDIFIYPGYQFQVVDAMITNFHLPRSTLMMLISAFAGREQVMAAYEQAIEQRYRFFSYGDAMFIR

SEQ ID NO: 70808 - protein, 352 aa, unidentified
  source 1..352: note = Pseudohongiella sp.
  REGION 1..352: note = tr|A0A2D9DVR0|A0A2D9DVR0_9GAMM S-adenosylmethionine:tRNA ribosyltransferase-isomerase; OS = Pseudohongiella sp. OX=1979412 GN=queA PE=3 SV=1
  VARIANT 254: note = Xaa can be any naturally occurring amino acid
  VARIANT 281: note = Xaa can be any naturally occurring amino acid
  VARIANT 296: note = Xaa can be any naturally occurring amino acid
  VARIANT 308: note = Xaa can be any naturally occurring amino acid
  VARIANT 326..327: note = Xaa can be any naturally occurring amino acid
MKLSDFDYDLPEELIAHYPAANRSGSRMLCLDRSSGAVSHHVFSDIVSMLRAEDLLVFNDTRVLPARLHGQKATGGKVEVLIERLLSEHEALAQVRASKSPGPGMQLILEASDSDAGLTVEVLGRQGEFFHLRFPADAPAVDLLDRYGHMPLPPYIDRPDEQADQSRYQTVYGRNPGAVAAPTAGLHFDDPLLDAIKQRGVDMAFVTLHVGSGTFQPVRTENVLEHRMHSEWIDVPVSVCEQIAACRARGGRVXAVGTTSVRSLESAALKAGGDIDVERTXNPYQGDTDIFIYPGXQFQVVDAMITNXHLPKSTLMMLISAFASRXXVMAAYAEAISQRYRFFSYGDAMFIR

SEQ ID NO: 70809 - protein, 352 aa, unidentified
  source 1..352: note = Pseudohongiella sp.
  REGION 1..352: note = tr|A0A355V960|A0A355V960_9GAMM S-adenosylmethionine:tRNA ribosyltransferase-isomerase; OS = Pseudohongiella sp. OX=1979412 GN=queA PE=3 SV=1
MKLSDFDYDLPEELIAHYPAANRSGSRMLCLDRSSGAVSHHVFSDIVSMLRAEDLLVFNDTRVLPARLHGQKATGGKVEVLIERLLSEHEALAQVRASKSPGPGMQLILEASDSDAGLTVEVLGRQGEFFHLRFPADAPAVDLLDRYGHMPLPPYIDRPDEQADQSRYQTVYGRNPGAVAAPTAGLHFDDPLLDAIKQRGVDMAFVTLHVGSGTFQPVRTENVLEHRMHSEWIDVPVSVCEQIAACRARGGRVIAVGTTSVRSLESAALKAGGDIDVERTINPYQGDTDIFIYPGYQFQVVDAMITNFHLPKSTLMMLISAFASRDKVMAAYAEAISQRYRFFSYGDAMFIR

SEQ ID NO: 70810 - protein, 364 aa, unidentified
  source 1..364: note = Pseudohongiella spirulinae
  REGION 1..364: note = tr|A0A0S2KCL1|A0A0S2KCL1_9GAMM S-adenosylmethionine:tRNA ribosyltransferase-isomerase; OS = Pseudohongiella spirulinae OX=1249552 GN=queA PE=3 SV=1
MRGLVFVGHSGKLAALMQLSDFDYNLPDELIAHYPAENRSASRLLQLDRMTGEVSHHSFRDLLDMLTSDDLLVFNDTKVLPARLLGHKTSGGRIEILIERLLSDNEAIAQIRASKSPGAGTRINVKSASCDGVLEIEVTGRQDAFFKIRFDSSRSALELLQQFGHMPLPPYIDRQDEPEDQTRYQTVYGCNPGAVAAPTAGLHFDEPLLDALRDKGVDMAFITLHVGSGTFQPVRTDDIKSHQMHSEWIDVSASACQKIKACRARGGRVVAVGTTSVRSLESAAQMCPSNGDLLPYQGETDIFIYPGYEFRVVDAMITNFHLPRSTLMMLISAFACREQIMNAYAQAIKERYRFFSYGDAMFIR

SEQ ID NO: 70811 - protein, 363 aa, Pseudolabrys sp.
  REGION 1..363: note = tr|A0A0Q7TLJ8|A0A0Q7TLJ8_9RHIZ S-adenosylmethionine:tRNA ribosyltransferase-isomerase; OS = Pseudolabrys sp. Root1462 OX=1736466 GN=queA PE=3 SV=1
MKTDLFDFDLPSERIALRPAHPRESARLMVVRPGEGGETLEDRTIGDLPDLLAPGDCLVVNDSKVIAARLKGRRIGRGEAEPAIEATLHKRIDGSTWRAFILGAKKVQVGDILRFGTEGRVCFLGQLDAEVLHKDEGGDVTLSFSFTGPVLDQAIEERGEMPLPPYIASKRPTDDQDKTDYQTVFAHEDGSVAAPTAGLHFTPALLERLEARGVALHKVTLHVGAGTFLPVKADDTAEHRMHAEFGVVSAATAEALNAARAKGGRVVAVGSTALRLLESAASDDGRIREFAGDTAIFITPGYRFKTVDLMMTNFHLPRSTLFMLVSAFSGLDTMQRAYRHAIDTGYRFYSYGDACLLYPQPRR

SEQ ID NO: 70812 - protein, 365 aa, Pseudolabrys sp.
  REGION 1..365: note = tr|A0A371B0R9|A0A371B0R9_9RHIZ S-adenosylmethionine:tRNA ribosyltransferase-isomerase; OS = Pseudolabrys sp. GY_H OX=2292256 GN=queA PE=3 SV=1
MRTDLFDFDLPPDRIALRPVSPRESARLLVVRPGQAAEFENRTVGDLPEFLQPGDCLVVNDSKVIAARLKGRRIGRGETEPAIEATLHKRLDGSTWRAFILGAKKVQAGDVLRFGSEGRVCFLDQLDAQVLHKDEGGDVTLSFSLHGPHLDQAIEERGDMPLPPYIASKRPTDAQDKTDYQTVFAHADGSVAAPTAGLHFTAELLTRLQARGVALHKVTLHVGAGTFLPVKAGDTADHKMHAEFGVVSAATAAALNAARAKGGRIVAVGSTALRLLESAAGADGVIHEFAGDTAIFITPGYRFKAVDLMMTNFHLPRSTLFMLVSAFSGLETMQRAYRHAIETGYRFYSYGDACLLHPAVAAAKA

SEQ ID NO: 70813 - protein, 394 aa, Pseudolabrys taiwanensis
  REGION 1..394: note = tr|A0A345ZT10|A0A345ZT10_9RHIZ S-adenosylmethionine:tRNA ribosyltransferase-isomerase; OS = Pseudolabrys taiwanensis OX=331696 GN=queA PE=3 SV=1
MRTDLFDFDLPADRIALRPVHPRDAARLLVVRPHAPVAPEQAGAQRSEVGAGGPWVPAFAGTNGEVLEDRHIRDLPDLLAPGDCLVVNDSKVIAARLKGRRIGRGDTEPGIEATLHKRLDGSTWKAFILGAKKVQVGDTLRFGDEGKVCFLGQLDAKVSHKDEGGEVTISFSFHGPILDQAIAERGDLPLPPYIASKRKPDDQDRADYQTVFAHEEGSVAAPTAGLHFTEDLLARLTARGVAVHKVTLHVGAGTFLPVKADDTAEHKMHSEFAILPAEVADALNAARAKGGRIVAVGSTAMRTLESAAGDDGRLRPFAADTDIFITPGYRFKAVDLMLTNFHLPRSTLFMLVSAFSGRETMQRAYRHAIETGYRFYSYGDACLLFPQPSFRDSA

SEQ ID NO: 70814 - protein, 200 aa, unidentified
  source 1..200: note = Pseudomonadaceae bacterium
  REGION 1..200: note = tr|A0A2D5CGQ8|A0A2D5CGQ8_9GAMM S-adenosylmethionine:tRNA ribosyltransferase-isomerase (Fragment) OS=Pseudomonadaceae bacterium OX=1914538; GN = CMK71_12575 PE=3 SV=1
DRPDEAADRERYQTVYAERAGAVAAPTAGLHFDQPLMEAIAAKGVSTAFVTLHVGAGTFQPVRVERIEDHHMHTEWLEVSQKVVDAVAACRARGGRVIAVGTTSVRSLESAARDGVLKPFSGDTDIFIYPGRPFHVVDALVTNFHLPESTLLMLVSAFAGYPETMAAYKSAVAEAYRFFSYGDAMFITRNPAARGPEEQV

SEQ ID NO: 70815 - protein, 349 aa, unidentified
  source 1..349: note = Pseudomonadaceae bacterium
  REGION 1..349: note = tr|A0A4Q9RGB5|A0A4Q9RGB5_9GAMM S-adenosylmethionine:tRNA ribosyltransferase-isomerase; OS = Pseudomonadaceae bacterium P17C OX=2211397 GN=queA PE=3; SV = 1
MQVADFSFELPDELIARHPLAERRASRLLTLEGETGRLAHRSFADLLDLLEPADLLVFNNTRVIPARLFGRKDSGGKLEILVERLLDERHVLAHVRSSKAPRPGTTIILDDGSEVGMLARHDSLFELQFPEDVLPLLERIGHMPLPPYIDRADESSDRERYQTVYALHAGAVAAPTAGLHFDQALLDALREKGVETAFVTLHVGAGTFQPVRVERIEEHVMHREWLEVGQDVVDAVAACRARGGRVVAVGTTSVRSLETAARGGVLEPFRGDTDIFIYPGKAFNVVDALVTNFHLPESTLLMLVSAFAGYPETMAAYAEAVAQRYRFFSYGDAMFITRNPAARGPEESV

SEQ ID NO: 70816 - protein, 349 aa, unidentified
  source 1..349: note = Pseudomonadales bacterium
  REGION 1..349: note = tr|A0A1G3DCZ5|A0A1G3DCZ5_9GAMM S-adenosylmethionine:tRNA ribosyltransferase-isomerase; OS = Pseudomonadales bacterium RIFCSPHIGHO2_01_FULL_64_12; OX = 1802004 GN=queA PE=3SV=1
MQVADFYFELPDALIARHPLAERRASRLLVLDGQSGQMSHRNFADLLDYVRPGDLMVFNNTRVIPARLFGQKATGGKLEILVERVTGNRSVLAHVRSSKSPKPGSQILLDGGGAAEMVARHDALFELVFDEDVLPLLERIGHMPLPPYIDRPDDAADRERYQTVYAQRAGAVAAPTAGLHFDEALLDALRNAGVQTAYVTLHVGAGTFQPVRVERIEEHHMHREWLEVTQEVVDAVAACRARGGRVIAVGTTSVRSLETAARDGELKPFSGDTDIFIYPGKTFHVVDALVTNFHLPESTLLMLVSAFAGYPETMAAYAEAVAQRYRFFSYGDAMFITRNPAARGPEETR

SEQ ID NO: 70817 - protein, 349 aa, unidentified
  source 1..349: note = Pseudomonadales bacterium
  REGION 1..349: note = tr|A0A2E3KRW3|A0A2E3KRW3_9GAMM S-adenosylmethionine:tRNA ribosyltransferase-isomerase; OS = Pseudomonadales bacterium OX=1891229 GN=queA PE=3 SV=1
MRLSDFDFELPDDLIARHPLAERRGSRLLCLDGPSGSIAHRQFVDLLGYLRPGDLMVFNNTRVIPARLFGRKATGGALEVLVERVLDEYRVLAHIRSSKSPKPGSRILLDGDAEAEMVARHDALFELRFAEPVLPLLQRVGHMPLPPYIDRPDEDADRERYQTVYAKREGAVAAPTAGLHFDQPLLDAIAELGVETAEVTLHVGAGTFQPVRVEKIEDHVMHQEWLEVSPEVVAAVEACKARGGRVIAVGTTSVRSLESAARDGQLKPFSGDTDIFLYPGRPFHVVDALVTNFHLPESTLLMLVSAFAGYPETMAAYRAAVAEKYRFFSYGDAMFITRNPAPTGPEVSS

SEQ ID NO: 70818 - protein, 359 aa, Pseudomonas abietaniphila
  REGION 1..359: note = tr|A0A1G8B9H0|A0A1G8B9H0_9PSED S-adenosylmethionine:tRNA ribosyltransferase-isomerase; OS = Pseudomonas abietaniphila OX=89065 GN=queA PE=3 SV=1
MRVADFTFELPDSLIARHPLAERRSSRLLTLDGPSGALAHRQFTDLLEHLRPGDLMVFNNTRVIPARLFGQKASGGKLEILVERVLDQHRVLAHVRSSKSPKAGSTILIDGGGEAEMVARHDALFELRFAEPVLPLLERVGHMPLPPYIDRPDDDADRERYQTVYAQRAGAVAAPTAGLHFDQTMMDAIAEKGVETAFVTLHVGAGTFQPVRVDRIEDHHMHSEWLEVTQDVVDAVAACRARGGRVIAVGTTSVRSLESAARDGVLKPFSGDTDIFIYPGRPFHVVDALVTNFHLPESTLLMLVSAFAGYPETMAAYAAAVEHGYRFFSYGDAMFITRNPAPTAPEDSDPVDAASEDQA

SEQ ID NO: 70819 - protein, 349 aa, unidentified
  source 1..349: note = Pseudomonas abyssi
  REGION 1..349: note = tr|A0A2A3MKE3|A0A2A3MKE3_9PSED S-adenosylmethionine:tRNA ribosyltransferase-isomerase; OS = Pseudomonas abyssi OX=170540 GN=queA PE=3 SV=1
MRLSDFDFELPDDLIARHPLAERRGSRLLCLDGPSGTLEHRLFVDLLEYLRPGDLMVFNNTRVIPARLFGRKATGGALEVLVERVLDEYRVLAHIRSSKSPKPGSQIVIDGGAEAEMVARHDALFELRFAEPVLPLLQRVGHMPLPPYIDRPDEDADRERYQTVYAKREGAVAAPTAGLHFDQPLLDAIAGLGVETAEVTLHVGAGTFQPVRVEKIEDHVMHQEWLEVSPEVVAAVEACKARGGRVIAVGTTSVRSLESAARDGELKPFSGDTDIFLYPGRPFHVVDALVTNFHLPESTLLMLVSAFAGYPETMAAYRAAVAEKYRFFSYGDAMFITRNPAPTGPEVSS

SEQ ID NO: 70820 - protein, 353 aa, unidentified
  source 1..353: note = Pseudomonas acidophila
  REGION 1..353: note = tr|A0A2A4EZA7|A0A2A4EZA7_9PSED S-adenosylmethionine:tRNA ribosyltransferase-isomerase; OS = Pseudomonas acidophila OX=1912599 GN=queA PE=3 SV=1
MFTLSDFDFTLPPELIAQTALPERSASRLLEVDGTRTPAHFTDRGFAELPNCIAPGDLLVFNDTKVLKARFLGQKASGGKIEVLIERLTGERTALAQIRASKTPVAGTTLRLADAFDVTVGERVEPFYTLHFPADCLTLIEQYGRLPLPPYIEHDPDATDETRYQTVFAQNPGAVAAPTAGLHFDDALLARLDERGVQRATLTLHVGAGTFQPVRVENLSEHKMHSEWYALPQTLVEQIEATRQRGNRVIAVGTTSMRALEAAARDADAAGRPLAATSAETDIFITPGYRFRVVDRLVTNFHLPKSTLLMLVSAFAGIDTIRAAYRHAIDERYRFFSYGDAMLLTRTDDAAQN

SEQ ID NO: 70821 - protein, 367 aa, unidentified
  source 1..367: note = Pseudomonas acidophila
  REGION 1..367: note = tr|A0A2A4F4S1|A0A2A4F4S1_9PSED S-adenosylmethionine:tRNA ribosyltransferase-isomerase; OS = Pseudomonas acidophila OX=1912599 GN=BWP39_03510 PE=3; SV = 1
MRAATVPMQRPRDARLLTVDRYGHIDERPRTAFADLLQPGDCVIANDAATLPASLHGIHERTGTGIEVRLAGRTSLASDAMNRFSAIVFGAGDFHTRTEERAAPPDLCQGDRLIFGASGATIMRLLDHPRFVELRFDGDAAQVWRMLASHGKPVQYAHLADPLALWDVWTPIAAQPVAFEPPSAGFVLDWSTLDALHARGVPFATLTHAAGLSSTGDAMLDQRLPLDEPYRIPVATAVLVETTRARGGRVVAIGTTVVRALEHAAAIDGVVHPGDGVATQRIGPQTRLRVVDVIVSGTHEPDSSHYALLRAFADAPTLARVTATLEAHRYRTHEFGDSMWIERRADAVREEHASSERLRSCTAVYCA

SEQ ID NO: 70822 - protein, 347 aa, Pseudomonas aeruginosa
  REGION 1..347: note = sp|Q9HXH8|QUEA_PSEAE S-adenosylmethionine:tRNA ribosyltransferase-isomerase OS=Pseudomonas aeruginosa (strain ATCC 15692 / DSM 22644 / CIP 104116 / JCM 14847 / LMG 1 2228 / 1C / PRS 101 / PAO1) OX=208964 GN=queA PE
MRVADFHFDLPEALIARHPLPERRASRLLALDGPTGTLAHRQFADLLDYLRPGDLMVFNNTRVIPARLFGQKESGGKLEVLVERVLDQHRVLAHIRASKAPKPGTRILVEGGGSAEMLQRHDALFELAFAEPVLPLLERVGHMPLPPYIDRPDDAADRERYQTVYAQRAGAVAAPTAGLHFDEALLEAIRAKGVDTAFVTLHVGAGTFQPVRVERIEDHVMHREWLEVGQDVVDAVSVCRARGGRVVAVGTTSVRSLESAARDGELKPFSGDTDIFIYPGRPFHVVDALVTNFHLPESTLLMLVSAFAGYPETMAAYAAAVAQGYRFFSYGDAMFITRNPAPRGPED

SEQ ID NO: 70823 - protein, 347 aa, Pseudomonas aeruginosa
  REGION 1..347: note = sp|B7UVU3|QUEA_PSEA8 S-adenosylmethionine:tRNA ribosyltransferase-isomerase OS=Pseudomonas aeruginosa (strain LESB58) OX=557722 GN=queA PE=3 SV=1
MRVADFHFDLPEALIARHPLPERRASRLLALDGPTGTLAHRQFADLLDYLRPGDLMVFNNTRVIPARLFGQKESGGKLEVLVERVLDQDRVLAHIRASKAPKPGTRILVEGGGSAEMLQRHDALFELAFAEPVLPLLERVGHMPLPPYIDRPDDAADRERYQTVYAQRAGAVAAPTAGLHFDEALLEAIRAKGVDTAFVTLHVGAGTFQPVRVERIEDHVMHREWLEVGQDVVDAVSVCRARGGRVVAVGTTSVRSLESAARDGELKPFSGDTDIFIYPGRPFHVVDALVTNFHLPESTLLMLVSAFAGYPETMAAYAAAVAQGYRFFSYGDAMFITRNPAPRGPED

SEQ ID NO: 70824 - protein, 349 aa, unidentified
  source 1..349: note = Pseudomonas aestusnigri
  REGION 1..349: note = tr|A0A1H5Y971|A0A1H5Y971_9PSED S-adenosylmethionine:tRNA ribosyltransferase-isomerase; OS = Pseudomonas aestusnigri OX=857252 GN=queA PE=3 SV=1
MRLSDFHFDLPDELIARHPLAERRASRLLCLDGPTGQLAHRQFVDLLEYLRPGDLMVFNNTRVIPARLFGRKETGGALEVLVERVVDEFRVLAHIRSSKSPKPGSRILIDGGAEAEMVARHDALFELRFAEPVLPLLQRVGHMPLPPYIDRPDDEADRERYQTVYAKREGAVAAPTAGLHFDRPLLDAIAELGVETAEVTLHVGAGTFQPVRVDKIEEHVMHQEWLEVTPEVVAAVEACKARGGRVIAVGTTSVRSLESAARDGVLKPFSGDTDIFLYPGKPFHVVDALVTNFHLPESTLLMLVSAFAGYPEAMAAYRAAVAEKYRFFSYGDAMFITRNPAPTGPEVSS

SEQ ID NO: 70825 - protein, 354 aa, Pseudomonas agarici
  REGION 1..354: note = tr|A0A0X1T4M8|A0A0X1T4M8_PSEAA S-adenosylmethionine:tRNA ribosyltransferase-isomerase; OS = Pseudomonas agarici OX=46677 GN=queA PE=3 SV=1
MRVADFTFELPDSLIARHPLAERRNSRLLTLDGPSGALAHRQFTDLLEHLRPGDLMVFNNTRVIPARLFGQKASGGKLEILVERVLDSHRVLAHVRSSKSPKPGSKILIEGGGEAEMLARHDTLFELGFTEHVLPLLERVGHMPLPPYIDRPDEGADRERYQTVYAERLGAVAAPTAGLHFDQPLLDAIAAKGVETAFVTLHVGAGTFQPVRVERIEDHHMHHEWLEVSQAVVDAVAACRARGGRVVAVGTTSVRSLESAARDGVLKPFSGDTDIFIYPGRPFHVVDALVTNFHLPESTLLMLVSAFAGYPETMAAYQAAVANGYRFFSYGDAMFITRNPAPTGPQKSASEDQA

SEQ ID NO: 70826 - protein, 351 aa, Pseudomonas alcaligenes
  REGION 1..351: note = tr|A0A1N6QYR3|A0A1N6QYR3_PSEAC S-adenosylmethionine:tRNA ribosyltransferase-isomerase; OS = Pseudomonas alcaligenes OX=43263 GN=queA PE=3 SV=1
MRVADFQFDLPDSLIARHPLAERRASRLLVLDGPTGALAHRQFADLLEYLRPGDLMVFNDTRVIPARLFGQKASGGKLEVLVERVLDEYRVLAHVRSSKSPKPGSLIHIEGGGEAEMLARHDALFELRFSEPVLPLLDRVGHMPLPPYIDRPDEAADRERYQTVYSDKSKAGAVAAPTAGLHFDEALLAAIREKGIDTVFVTLHVGAGTFQPVRVERIEDHHMHREWLQVSQDVVDAVAACRARGGRVIAVGTTSVRSLESAARDGELKAFSGDTDIFLYPGKRFHVVDALVTNFHLPESTLLMLVSAFAGYPQTMAAYRAAVEQQYRFFSYGDAMFITRNPDPRGPEETP

SEQ ID NO: 70827 - protein, 351 aa, Pseudomonas alcaligenes
  REGION 1..351: note = tr|A0A5C7WEQ3|A0A5C7WEQ3_PSEAC S-adenosylmethionine:tRNA ribosyltransferase-isomerase; OS = Pseudomonas alcaligenes OX=43263 GN=queA PE=3 SV=1
MRVADFQFDLPDSLIARHPLAERRASRLLVLDGPTGALAHRQFADLLEYLCPGDLMVFNDTRVIPARLFGQKASGGKLEVLVERVLDEYRVLAHVRSSKSPKPGSLIHIEGGGEAEMLARHDALFELRFSEPVLPLLDRVGHMPLPPYIDRPDEAADRERYQTVYSDRSKAGAVAAPTAGLHFDEALLAAIRDKGIDTVFVTLHVGAGTFQPVRVERIEDHHMHREWLQVGQDVVDAVAACRARGGRVIAVGTTSVRSLESAAREGELKAFSGDTDIFLYPGKRFHVVDALVTNFHLPESTLLMLVSAFAGYPETMAAYAAAVEQQYRFFSYGDAMFITRNPDPRGPEETP

SEQ ID NO: 70828 - protein, 347 aa, Pseudomonas alcaliphila
  REGION 1..347: note = tr|A0A1G7PHG9|A0A1G7PHG9_9PSED S-adenosylmethionine:tRNA ribosyltransferase-isomerase; OS = Pseudomonas alcaliphila OX=101564 GN=queA PE=3 SV=1
MRVADFHFDLPESLIARHPLPERRASRLLQLDGPSGALRHGQFTDVLEQLRPGDLMVFNNTRVIPARLFGQKASGGKLEVLVERVLDQYRVLAHVRSSKSPKPGSQVLIDGGGEAEMVARHDALFELRFAEPVLPLLERVGHMPLPPYIDRPDDEADRERYQTVYAQKAGAVAAPTAGLHFDDELLAAIRAKAVETAFVTLHVGAGTFQPVRVERIEDHHMHSEWLEVGQDVVDAVVACRARGGRVVAVGTTSVRSLETAARDGELKPFSGDTDIFIYPGRPFHVVDALVTNFHLPESTLLMLVSAFAGYPETMAAYREAVAQGYRFFSYGDAMFITRNPAARGPEV

SEQ ID NO: 70829 - protein, 347 aa, Pseudomonas alcaliphila
  REGION 1..347: note = tr|A0A1L7G391|A0A1L7G391_9PSED S-adenosylmethionine:tRNA ribosyltransferase-isomerase; OS = Pseudomonas alcaliphila JAB1 OX=741155 GN=queA PE=3 SV=1
MRVADFHFDLPESLIARHPLAERRASRLLQLDGPSGELRHGQFTDVLEQLRPGDLMVFNNTRVIPARLFGQKASGGKLEVLVERVLDQYRVLAHVRSSKSPKPGSQILIEGGGEAEMVARHDALFELRFAEPVLPLLERVGHMPLPPYIDRPDDEADRERYQTVYAQKAGAVAAPTAGLHFDDELLAAIRAKGVDTAFVTLHVGAGTFQPVRVERIEDHHMHSEWLEVGQDVVDAVAACRARGGRVVAVGTTSVRSLETAARDGELKPFSGDTDIFIYPGRPFHVVDALVTNFHLPESTLLMLVSAFAGYPETMAAYREAVAQGYRFFSYGDAMFITRNPAARGPEV

SEQ ID NO: 70830 - protein, 349 aa, unidentified
  source 1..349: note = Pseudomonas alkylphenolica
  REGION 1..349: note = tr|A0A077FHH6|A0A077FHH6_9PSED S-adenosylmethionine:tRNA ribosyltransferase-isomerase; OS = Pseudomonas alkylphenolica OX=237609 GN=queA PE=3 SV=1
MRVADFSFELPDSLIARHPLAQRHSSRLLTLDGPSGALAHRQFTDLLEHLRPGDLMVFNNTRVIPARLFGQKASGGKLEILVERVLDSHRVLAHVRSSKSPKPGTQILIDGGGEAEMVARHDTLFELRFAEEVLPLLDRVGHMPLPPYIDRPDEGADRERYQTVYAERAGAVAAPTAGLHFDEALMARIADKGVETAFVTLHVGAGTFQPVRVERIEDHHMHKEWLEVGQDVVDAVAACRARGGRVIAVGTTSVRSLESAARDGVLKAFSGDTDIFIYPGRPFHVVDALVTNFHLPESTLLMLVSAFAGYPETMAAYAAAVENGYRFFSYGDAMFITRNPAPRGPEDQA

SEQ ID NO: 70831 - protein, 349 aa, unidentified
  source 1..349: note = Pseudomonas alkylphenolica
  REGION 1..349: note = tr|A0A443ZXK4|A0A443ZXK4_9PSED S-adenosylmethionine:tRNA ribosyltransferase-isomerase; OS = Pseudomonas alkylphenolica OX=237609 GN=queA PE=3 SV=1
MRVADFSFELPDSLIARHPLAQRHSSRLLTLDGPSGALAHRQFTDLLEHLRPGDLMVFNNTRVIPARLFGQKASGGKLEILVERVLDSHRVLAHVRSSKSPKPGTQILIDGGGEAEMVARHDALFELRFAEEVLPLLDRVGHMPLPPYIDRPDEGADRERYQTVYAERAGAVAAPTAGLHFDEELMGKIAAKGVETAFVTLHVGAGTFQPVRVERIEDHHMHKEWLEVSQDVVDAVAACRARGGRVIAVGTTSVRSLESAARDGVLKAFSGDTDIFIFPGRPFHVVDALVTNFHLPESTLLMLVSAFAGYPETMAAYAAAVENGYRFFSYGDAMFITRNPAPRGPEDQA

SEQ ID NO: 70832 - protein, 326 aa, Pseudomonas amygdali
  REGION 1..326: note = tr|A0A3M4YQL2|A0A3M4YQL2_PSEAJ S-adenosylmethionine:tRNA ribosyltransferase-isomerase; OS = Pseudomonas amygdali pv. tabaci OX=322 GN=queA PE=3 SV=1
MTLDGPTGALAHRQFTDLLEHLRPGDLMVFNNTRVIPARLFGQKASGGKLEILVERVLDSHRVLAHVRSSKSPKPGSSILIDGGGEAEMVARHDALFELRFAEEVLPLLERVGHMPLPPYIDRPDEGADRERYQTVYAQRAGAVAAPTAGLHFDQPLLEAIAAKGVETAFVTLHVGAGTFQPVRVEQIEDHHMHSEWLEVGQDVVDAVAACRARGGRVIAVGTTSVRSLESAARDGELKPFSGDTDIFIYPGRPFHVVDALVTNFHLPESTLLMLVSAFAGYPETMAAYAAAIEHGYRFFSYGDAMFITRNPAPTAPQESAPEDHA

SEQ ID NO: 70833 - protein, 354 aa, Pseudomonas amygdali
  REGION 1..354: note = tr|A0A0P9RU63|A0A0P9RU63_PSEA0 S-adenosylmethionine:tRNA ribosyltransferase-isomerase; OS = Pseudomonas amygdali pv. hibisci OX=251723 GN=queA PE=3; SV = 1
MRVADFTFELPDSLIARHPLAERRSSRLLTLDGPTGALAHRQFTDLLEHLRPSDLMVFNNTRVIPARLFGQKASGGKLEILVERVLDSHRVLAHVRSSKSPKPGSSILIDGGGEAEMVARHDALFELRFAEEVLPLLERVGHMPLPPYIDRPDEGADRERYQTVYAQRAGAVAAPTAGLHFDQPLLEAIAAKGVETAFVTLHVGAGTFQPVRVEQIEDHHMHSEWLEVGQDVVDAVAACRARGGRVIAVGTTSVRSLESAARDGELKPFSGDTDIFIYPGRPFHVVDALVTNFHLPESTLLMLVSAFAGYPETMAAYAAAIEHGYRFFSYGDAMFITRNPAPTAPQESAPEDHA

SEQ ID NO: 70834 - protein, 349 aa, Pseudomonas anguilliseptica
  REGION 1..349: note = tr|A0A1H4P6N2|A0A1H4P6N2_PSEAG S-adenosylmethionine:tRNA ribosyltransferase-isomerase; OS = Pseudomonas anguilliseptica OX=53406 GN=queA PE=3 SV=1
MRVADFNFELPDALIARHPLAERRASRLLVLDGPTGELAHKQFSDLLDYLRPGDLMVFNNTRVIPARLFGQKASGGKLEILVERVLDAHRVLAHVRSSKSPKPGSSILIDGGGEAEMVARHDALFELRFVEEVLPLLERVGHMPLPPYIDRPDEQADRERYQTVYADRAGAVAAPTAGLHFDQQLLAAIAEKGVEQAFVTLHVGAGTFQPVRVERIEDHHMHSEWLEVGQDVVDAVVACRARGGRVIAVGTTSVRSLESAARDGVLKAFSGDTDIFVYPGRPLHVVDALVTNFHLPESTLLMLVSAFAGYPETMAAYQAAIAGEYRFFSYGDAMFITRNPAPRGPEEQL

SEQ ID NO: 70835 - protein, 299 aa, Pseudomonas antarctica
  REGION 1..299: note = tr|A0A172Z7D9|A0A172Z7D9_9PSED S-adenosylmethionine:tRNA ribosyltransferase-isomerase; OS = Pseudomonas antarctica OX=219572 GN=A7J50_4846 PE=3 SV=1
MVFNNTRVIPARLFGQKASGGKLEILVERVLDSHRVLAHVRSSKSPKPRSSILIDGGGEAEMVARHDALFELKFAEEVLPLLERVGHMPLPPYIDRPDEDADRERYQTVYSQRPGAVAAPTAGLHFDQPLLDAIAAKGVESAYVTLHVGAGTFQPVRVDNIEDHHMHSEWLEVSQSVVDAVAACKARGGRVVAVGTTSVRSLESAARDGVLKPFSGDTDIFIFPGRPFHVVDCLVTNFHLPESTLLMLVSAFAGYPETMAAYQAAIANEYRFFSYGDAMFITRNPAPTAPKEAGPEEPL

SEQ ID NO: 70836 - protein, 354 aa, Pseudomonas antarctica
  REGION 1..354: note = tr|A0A1G9XIV6|A0A1G9XIV6_9PSED S-adenosylmethionine:tRNA ribosyltransferase-isomerase; OS = Pseudomonas antarctica OX=219572 GN=queA PE=3 SV=1
MRVADFTFELPDSLIARHPLAERRASRLLTLDGVSGALAHRQFTDLLEHLRPGDLMVFNNTRVIPARLFGQKASGGKLEILVERVLDSHRVLAHVRSSKSPKPGSSILIDGGGEAEMVARHDALFELKFAEEVLPLLERVGHMPLPPYIDRPDEDSDRERYQTVYSQRLGAVAAPTAGLHFDQQLLDAIAAKGVESAYVTLHVGAGTFQPVRVDNIEDHHMHSEWLEVSQEVVDAVAACRARGGRVVAVGTTSVRSLESAARDGVLKPFSGDTDIFIFPGRPFHVVDCLVTNFHLPESTLLMLVSAFAGYPQTMAAYQAAIANEYRFFSYGDAMFITRNPAPTAPKEAGPEEQL

SEQ ID NO: 70837 - protein, 349 aa, Pseudomonas argentinensis
  REGION 1..349: note = tr|A0A1I3HCE1|A0A1I3HCE1_9PSED S-adenosylmethionine:tRNA ribosyltransferase-isomerase; OS = Pseudomonas argentinensis OX=289370 GN=queA PE=3 SV=1
MRVADFHFDLPDGQIARHPLAERRASRLLILDGASGALAHRQFADLLEYLRPGDLMVFNNTRVIPARLFGQKTTGGKLEILVERVLDEHRVLAHVRSSKSPKPGSLIDIDGGARAQMLARHDALFELRFEEAVLPLLERVGHMPLPPYIDRPDEAADRERYQTVYAQKAGAVAAPTAGLHFDAELLAALREKGVESAFVTLHVGAGTFQPVRVERIEDHHMHSEWLEVGQDVVDAVQACRARGGRVVAVGTTSVRSLESAARDGELKPFSGDTDIFIYPGRPFHVVDALVTNFHLPESTLLMLVSAFAGYPETMAAYAQAVAEGYRFFSYGDAMFITRNPAPRGPEASV

SEQ ID NO: 70838 - protein, 349 aa, Pseudomonas arsenicoxydans
  REGION 1..349: note = tr|A0A1H0H8H8|A0A1H0H8H8_9PSED S-adenosylmethionine:tRNA ribosyltransferase-isomerase; OS = Pseudomonas arsenicoxydans OX=702115 GN=queA PE=3 SV=1
MRVADFTFELPDSLIARHPLAERRNSRLLTLDGVSGALAHRQFTDLLEHLRPGDLMVFNNTRVIPARLFGQKASGGKLEILVERVLDSHRVLAHVRSSKSPKPGSKILIDGGGEAEMLARHDALFELGFAEEVLPLLDRVGHMPLPPYIDRPDEGSDRERYQTVYAERLGAVAAPTAGLHFDQPLMEAIAAKGVETAFVTLHVGAGTFQPVRVEKIEDHHMHTEWLEVGQDVVDAVAACRARGGRVVAVGTTSVRSLESAARDGVLKPFSGDTDIFIYPGRPFHVVDALVTNFHLPESTLLMLVSAFAGYPETMAAYKAAVDNEYRFFSYGDAMFITRNPAPRGPEDKE

SEQ ID NO: 70839 - protein, 349 aa, Pseudomonas arsenicoxydans
  REGION 1..349: note = tr|A0A502HPL0|A0A502HPL0_9PSED S-adenosylmethionine:tRNA ribosyltransferase-isomerase; OS = Pseudomonas arsenicoxydans OX=702115 GN=queA PE=3 SV=1
MRVADFTFELPDSLIARHPLAERRNSRLLTLDGVSGALAHRQFTDLLEHLRPGDLMVFNNTRVIPARLFGQKASGGKLEILVERVLDSHRVLAHVRSSKSPKPGSKILIDGGGEAEMLARHDALFELGFAEEVLPLLDRVGHMPLPPYIDRPDEGSDRERYQTVYAERLGAVAAPTAGLHFDQPLMEAIAAKGVETAFVTLHVGAGTFQPVRVEKIEDHHMHSEWLEVGQDVVDAVAACRARGGRVVAVGTTSVRSLESAARDGVLKPFSGDTDIFIYPGRPFHVVDALVTNFHLPESTLLMLVSAFAGYPEAMAAYKAAVEHGYRFFSYGDAMFITRNPAPRGPEDKE

SEQ ID NO: 70840 - protein, 354 aa, Pseudomonas asplenii
  REGION 1..354: note = tr|A0A3S4A6L0|A0A3S4A6L0_9PSED S-adenosylmethionine:tRNA ribosyltransferase-isomerase; OS = Pseudomonas asplenii OX=53407 GN=queA PE=3 SV=1
MRVADFTFELPDSLIARHPLAERRLSRLLTLDGPSGALAHRQFTDLLEHLRPGDLMVFNNTRVIPARLFGQKASGGKLEILVERVLDTHRVLAHVRSSKSPKPGSKILIDGGGEAEMLARHDTLFELGFAEEVLPLLERVGHMPLPPYIDRPDEGADRERYQTVYAERLGAVAAPTAGLHFDQPLLDAIAAKGVETAFVTLHVGAGTFQPVRVERLEDHHMHHEWLEVSQEVVDAVAACRARGGRVIAVGTTSVRSLESAARDGVLKPFSGDTDIFIFPGRPFHVVDALVTNFHLPESTLLMLVSAFAGYPETMAAYKAAVDNGYRFFSYGDAMFITRNPAPAAPKDRAPEDQA

SEQ ID NO: 70841 - protein, 354 aa, Pseudomonas asplenii
  REGION 1..354: note = tr|A0A1H1P359|A0A1H1P359_9PSED S-adenosylmethionine:tRNA ribosyltransferase-isomerase; OS = Pseudomonas asplenii OX=53407 GN=queA PE=3 SV=1
MRVADFTFELPDSLIARHPLAERRNSRLLTLDGPSGALAHRQFTDLLEYLRPGDLMVFNNTRVIPARLFGQKASGGKLEILVERVLDSHRVLAHVRSSKSPKPGSKILIEGGGEAEMLARHDTLFELGFAEEVLPLLERVGHMPLPPYIDRPDEGADRERYQTVYAERLGAVAAPTAGLHFDQPLLEAIAAKGVETAFVTLHVGAGTFQPVRVERIEDHHMHNEWLEVTQDVVDAVAACRARGGRVVAVGTTSVRSLESAARDGVLKPFSGDTDIFIYPGRPFHVVDALVTNFHLPESTLLMLVSAFAGYPETMAAYQAAVDNGYRFFSYGDAMFITRNPAPTGPQESAPEEQA

SEQ ID NO: 70842 - protein, 354 aa, unidentified
  source 1..354: note = Pseudomonas asturiensis
  REGION 1..354: note = tr|A0A1M7LNI9|A0A1M7LNI9_9PSED S-adenosylmethionine:tRNA ribosyltransferase-isomerase; OS = Pseudomonas asturiensis OX=1190415 GN=queA PE=3 SV=1
MRVADFTFELPDSLIARHPLAERRSSRLLTLDGVSGALAHRQFTDLLEHLRPGDLMVFNNTRVIPARLFGQKASGGKLEILVERVLDSHRVLAHVRSSKSPKPGSSILIDGGGEAEMVARHDALFELRFAEEVLPLLDRVGHMPLPPYIDRPDEGADRERYQTVYAQRAGAVAAPTAGLHFDQSLMEAIAAKGVETTFVTLHVGAGTFQPVRVEQIEDHHMHTEWLEVGQDVVDAVAACRARGGRVIAVGTTSVRSLESAARDGVLKPFSGDTDIFIYPGRPFHVVDALVTNFHLPESTLLMLVSAFAGYPETMAAYAAAIEHGYRFFSYGDAMFITRNPAPTAPQESVPEDHA

SEQ ID NO: 70843 - protein, 354 aa, Pseudomonas avellanae
  REGION 1..354: note = tr|A0A261WJU9|A0A261WJU9_9PSED S-adenosylmethionine:tRNA ribosyltransferase-isomerase; OS = Pseudomonas avellanae OX=46257 GN=queA PE=3 SV=1
MRVADFTFELPDSLIARHPLAERRSSRLLTLDGPTGALAHRQFTDLLEHLRSGDLMVFNNTRVIPARLFGQKASGGKLEILVERVLDGHRVLAHVRASKSPKPGSSILIDGGGEAEMVARHDALFELRFAEEVLPLLDRVGHMPLPPYIDRPDEGADRERYQTVYAQRAGAVAAPTAGLHFDQPLMEAIAAKGVETAFVTLHVGAGTFQPVRVEQIEDHHMHSEWLEVSQDVVDAVAACRARGGRVIAVGTTSVRSLESAARDGHLKPFSGDTDIFIYPGRPFHVVDALVTNFHLPESTLLMLVSAFAGYPETMAAYAAAIEHGYRFFSYGDAMFITRNPAPTAPQESAPEDHA

SEQ ID NO: 70844 - protein, 354 aa, Pseudomonas avellanae
  REGION 1..354: note = tr|A0A2S3TJU2|A0A2S3TJU2_9PSED S-adenosylmethionine:tRNA ribosyltransferase-isomerase; OS = Pseudomonas avellanae OX=46257 GN=queA PE=3 SV=1
MRVADFTFELPDSLIARHPLAERRSSRLLTLDGPTGALAHRQFTDLLEHLRSGDLMVFNNTRVIPARLFGQKASGGKLEILVERVLDSHRVLAHVRASKSPKPGSSILIDGGGEAEMVARHDALFELRFAEEVLPLLDRVGHMPLPPYIDRPDEGADRERYQTVYAQRAGAVAAPTAGLHFDQPLMEAIAAKGVETAFVTLHVGAGTFQPVRVEQIEDHHMHSEWLEVSQDVVDAVAACRARGGRVIAVGTTSVRSLESAARDGHLKPFSGDTDIFIYPGRPFHVVDALVTNFHLPESTLLMLVSAFAGYPETMAAYAAAIEHGYRFFSYGDAMFITRNPAPTAPQESAPEDHA

SEQ ID NO: 70845 - protein, 349 aa, Pseudomonas azotoformans
  REGION 1..349: note = tr|A0A3M5MHL1|A0A3M5MHL1_PSEAZ S-adenosylmethionine:tRNA ribosyltransferase-isomerase; OS = Pseudomonas azotoformans OX=47878 GN=queA PE=3 SV=1
MRVADFTFELPDSLIARHPLAERRASRLLTLDGPSGALAHRQFTDLLEHLRPGDLMVFNNTRVIPARLFGQKASGGKLEILVERVLDSHRVLAHVRSSKSPKPGSSILIEGGGEAEMVARHDALFELKFAEEVLPLLERVGHMPLPPYIDRPDEDADRERYQTVYSQRLGAVAAPTAGLHFDQPLLDAIAAKGVDTAYVTLHVGAGTFQPVRVDNIEDHHMHSEWLEVSQDVVDAVAACKARGGRVVAVGTTSVRSLESAARDGVLKPFSGDTDIFIFPGRPFHVVDCLVTNFHLPESTLLMLVSAFAGYPETMAAYQAAIANEYRFFSYGDAMFITRNPAPRGPEDNL

SEQ ID NO: 70846 - protein, 349 aa, Pseudomonas azotoformans
  REGION 1..349: note = tr|A0A127HRF5|A0A127HRF5_PSEAZ S-adenosylmethionine:tRNA ribosyltransferase-isomerase; OS = Pseudomonas azotoformans OX=47878 GN=queA PE=3 SV=1
MRVADFTFELPDSLIARHPLAERRASRLLTLDGVSGALAHRQFTDLLEHLRPGDLMVFNNTRVIPARLFGQKASGGKLEILVERVLDSHRVLAHVRSSKSPKPGSSILIDGGGEAEMVARHDALFELKFAEEVLPLLERVGHMPLPPYIDRPDEDSDRERYQTVYSQRLGAVAAPTAGLHFDQPLLDAIAAKGVETAYVTLHVGAGTFQPVRVDNIEDHHMHSEWLEVSQDVVDAVAACKARGGRVVAVGTTSVRSLESAARDGVLKPFSGDTDIFIFPGRPFHVVDCLVTNFHLPESTLLMLVSAFAGYPETMAAYQAAIANEYRFFSYGDAMFITRNPAPRGPEGTL

SEQ ID NO: 70847 - protein, 354 aa, Pseudomonas baetica
  REGION 1..354: note = tr|A0A2N0DHV3|A0A2N0DHV3_9PSED S-adenosylmethionine:tRNA ribosyltransferase-isomerase; OS = Pseudomonas baetica OX=674054 GN=queA PE=3 SV=1
MRVADFTFELPDSLIARHPLAERRGSRLLTLDGVSGALAHRQFTDLLEHLRPGDLMVFNNTRVIPARLFGQKASGGKLEILIERVLDAHRVLAHVRSSKSPKPGSKILIDGGGEAEMLARHDALFELGFDEEVLPLLDRVGHMPLPPYIDRPDEGSDRERYQTVYAERLGAVAAPTAGLHFDQPLMEAIAAKGVETAFVTLHVGAGTFQPVRVDKIEDHHMHSEWLEVGQDVVDAVAACRARGGRVIAVGTTSVRSLESAARDGVLKPFSGDTDIFIYPGRPFHVVDALVTNFHLPESTLLMLVSAFAGYPETMAAYKAAVDNGYRFFSYGDAMFITRNPAPTAPKQTGPEETE

SEQ ID NO: 70848 - protein, 348 aa, Pseudomonas balearica
  REGION 1..348: note = tr|A0A1G9SY74|A0A1G9SY74_9PSED S-adenosylmethionine:tRNA ribosyltransferase-isomerase; OS = Pseudomonas balearica DSM 6083 OX=1123016 GN=queA PE=3; SV = 1
MQVADFFFELPESLIARFPLAERRASRLLVLEGPSGALSHRRFADLLDYVRPGDLMVFNDTRVIPARLFGRKATGGQLEILVERVLDTQRVLAHVRASKSPKAGSSILIDGGGEAQVLGRQESLFELGFSEPVLPLLERVGHMPLPPYIDRPDEGSDRERYQTVYAQRAGAVAAPTAGLHFDEAMLAALREQGVATAYVTLHVGAGTFQPVRVERIEDHHMHSEWLEVGQAVVDAVAECRARGGRVIAVGTTSVRSLETAARSGQLQPFAGETDIFIYPGKPFHVVDALVTNFHLPESTLLMLVSAFAGYRETMAAYAEAVREGYRFFSYGDAMFITRNPAARGPEDR

SEQ ID NO: 70849 - protein, 354 aa, unidentified
  source 1..354: note = Pseudomonas batumici
  REGION 1..354: note = tr|A0A0C2I484|A0A0C2I484_9PSED S-adenosylmethionine:tRNA ribosyltransferase-isomerase; OS = Pseudomonas batumici OX=226910 GN=queA PE=3 SV=1
MRVADFTFELPDSLIARHPLAERRLSRLLTLDGPSGALAHRQFTDLLEYLRPGDLMVFNNTRVIPARLFGQKASGGKLEILVERVLDTHRVLAHVRSSKSPKPGSKILIEGGGEAEMLARHDTLFELGFDEEVLPLLERVGHMPLPPYIDRPDEGADRERYQTVYAERLGAVAAPTAGLHFDQPLLDAIAAKGVETAFVTLHVGAGTFQPVRVERLEDHHMHHEWLEVSQEVVDAVAACRARGGRVIAVGTTSVRSLESAARDGVLKPFSGDTDIFIYPGRPFHVVDALVTNFHLPESTLLMLVSAFAGYPETMAAYKAAVDNGYRFFSYGDAMFITRNPAPAAPKDRAPEDQA

SEQ ID NO: 70850 - protein, 349 aa, Pseudomonas bauzanensis
  REGION 1..349: note = tr|A0A031MI55|A0A031MI55_9PSED S-adenosylmethionine:tRNA ribosyltransferase-isomerase; OS = Pseudomonas bauzanensis OX=653930 GN=queA PE=3 SV=1
MRVSDFQFDLPDRLIARHPLAERRASRLLCLDGPSDELAHRQFADLLEYLRPGDLMVFNNTRVIPARLFGRKETGGQLEILVERVLDNRRVLAHVRSSKSPKPGSRILLEGDSAATMLARHDALFELEFDEPVLPLLDRVGHMPLPPYIDRPDETADRERYQTVYAQKAGAVAAPTAGLHFDNELLQAIEARGVATAQVTLHVGAGTFQPVRVERIEDHHMHSEWLEVSQQVVDAVNACKARGGRVIAVGTTSVRSLESAARDGQLKAFSGDTDIFIYPGRPFHVVDALVTNFHLPESTLLMLVSAFAGYRQTMAAYRAAVDNDYRFFSYGDAMFITRNPAACGPEDMQ

SEQ ID NO: 70851 - protein, 349 aa, Pseudomonas bauzanensis
  REGION 1..349: note = tr|A0A4U0YPS8|A0A4U0YPS8_9PSED S-adenosylmethionine:tRNA ribosyltransferase-isomerase; OS = Pseudomonas bauzanensis OX=653930 GN=queA PE=3 SV=1
MRVSDFQFDLPDRLIARHPLAERRASRLLCLDGPSGELAHRQFADLLEYLRPGDLMVFNNTRVIPARLFGRKETGGQLEILVERVLDNRRVLAHVRSSKSPKPGSRILLEGDSAATMLARHDALFELEFDEPVLPLLDRVGHMPLPPYIDRPDETADRERYQTVYAQKAGAVAAPTAGLHFDNELLQAIEARGVATAQVTLHVGAGTFQPVRVERIEDHHMHSEWLEVSQQVVDAVNACKARGGRVIAVGTTSVRSLESAARDGQLKAFSGDTDIFIYPGRPFHVVDALVTNFHLPESTLLMLVSAFAGYRQTMAAYRAAVDNDYRFFSYGDAMFITRNPAACGPEDMQ

SEQ ID NO: 70852 - protein, 349 aa, Pseudomonas benzenivorans
  REGION 1..349: note = tr|A0A1G7XTD9|A0A1G7XTD9_9PSED S-adenosylmethionine:tRNA ribosyltransferase-isomerase; OS = Pseudomonas benzenivorans OX=556533 GN=queA PE=3 SV=1
MRVADFHFELPESLIARHPLAERRASRLLVLDGVSGELAHRGFGDLLEYLRPGDLMVFNNTRVIPARLFGQKASGGKLEVLVERVLDSHRVLAHVRSSKSPKPGSTILLDGGGEAQMLARHDALFELRFAEEVLPLLERVGHMPLPPYIDRPDDAADRERYQTVYAERAGAVAAPTAGLHFDQDLLAAIAERGVETAFVTLHVGAGTFQPVRVERIEDHHMHSEWLEVGQDVVDAVAACRARGGRVIAVGTTSVRSLESAARDGVLRPFNGDTDIFIYPGRPFHVVDAMVTNFHLPESTLLMLVSAFAGYPETMAAYQSAVAEGYRFFSYGDAMFITRNPAPRGPEDQL

SEQ ID NO: 70853 - protein, 349 aa, Pseudomonas borbori
  REGION 1..349: note = tr|A0A1I5VJV4|A0A1I5VJV4_9PSED S-adenosylmethionine:tRNA ribosyltransferase-isomerase; OS = Pseudomonas borbori OX=289003 GN=queA PE=3 SV=1
MRVADFDFELPDALIARHPLAERRASRLLVLNGPSGALAHRQFSDLLEYLRPGDLMVFNNTRVIPARLFGQKASGGKLEVLVERVLDSHRVLAHVRSSKSPKPGSMILLDGGGEAQMLARHGALFELRFAEAVLPLLERVGHMPLPPYIDRPDDAADRERYQTVYAERTGAVAAPTAGLHFDQALLASIAGMGVESAFVTLHVGAGTFQPVRVERIEDHHMHSEWLEVGQEVVDAVAACRARGGRVVAVGTTSVRSLESAARDGVLKAFSGDTDIFIYPGRPLHVVDALVTNFHLPESTLLMLVSAFAGYPETMAAYKSAVAEGYRFFSYGDAMFITRNPAPRGPEDHL

SEQ ID NO: 70854 - protein, 349 aa, Pseudomonas brassicacearum
  REGION 1..349: note = tr|A0A423HYQ4|A0A423HYQ4_9PSED S-adenosylmethionine:tRNA ribosyltransferase-isomerase; OS = Pseudomonas brassicacearum OX=930166 GN=queA PE=3 SV=1
MRVADFTFELPDSLIARHPLAERRNSRLLTLDGVSGALAHRQFTDLLEHLRPGDLMVFNNTRVIPARLFGQKASGGKLEILVERVLDSHRVLAHVRSSKSPKPGSKILIDGGGEAEMLARHDALFELGFAEEVLPLLDRVGHMPLPPYIDRPDEGSDRERYQTVYAERLGAVAAPTAGLHFDQPLMEAIAAKGVETAFVTLHVGAGTFQPVRVEKIEDHHMHSEWLEVGQDVVDAVAACRARGGRVVAVGTTSVRSLESAARDGVLKPFSGDTDIFIYPGRPFHVVDALVTNFHLPESTLLMLVSAFAGYPEAMAAYKAAVEHGYRFFSYGDAMFITRNPAPRGPEETE

SEQ ID NO: 70855 - protein, 349 aa, Pseudomonas brassicacearum
  REGION 1..349: note = tr|A0A423FU17|A0A423FU17_9PSED S-adenosylmethionine:tRNA ribosyltransferase-isomerase; OS = Pseudomonas brassicacearum OX=930166 GN=queA PE=3 SV=1
MRVADFTFELPDSLIARHPLAERRASRLLTLDGVSGAMAHRQFTDLLEHLRPGDLMVFNNTRVIPARLFGQKASGGKLEILVERVLDSHRVLAHVRSSKSPKPGSSILIDGGGEAVMVARHDALFELEFAEEVLPLLDRVGHMPLPPYIDRPDEGSDRERYQTVYAERLGAVAAPTAGLHFDQPLLEAIAAKGVETTFVTLHVGAGTFQPVRVERIEDHHMHSEWLEVSQDVVDAVAACRARGGRVVAVGTTSVRSLESAARDGVLKPFSGDTDIFIYPGRPFHVVDALVTNFHLPESTLLMLVSAFAGYPEAMAAYKAAVEQGYRFFSYGDAMFITRNPAPRGPEETV

SEQ ID NO: 70856 - protein, 294 aa, Pseudomonas brenneri
  REGION 1..294: note = tr|A0A4R6YMZ8|A0A4R6YMZ8_9PSED S-adenosylmethionine:tRNA ribosyltransferase-isomerase; OS = Pseudomonas brenneri OX=129817 GN=queA PE=3 SV=1
MVFNNTRVIPARLFGQKASGGKLEILVERVLDSHRVLAHVRSSKSPKPGSSILIDGGGEAQMVARHDALFELKFAEEVLPLLERVGHMPLPPYIDRPDEDSDRERYQTVYSQRLGAVAAPTAGLHFDQPLLDAIAAKGVETAYVTLHVGAGTFQPVRVDNIEDHHMHSEWLEVSQDVVDAVNACKARGGRVVAVGTTSVRSLESAARDGVLKPFSGDTDIFIYPGRPFHVVDCLVTNFHLPESTLLMLVSAFAGYPETMAAYQAAIDNGYRFFSYGDAMFITRNPAPRGPEEQL

SEQ ID NO: 70857 - protein, 349 aa, Pseudomonas brenneri
  REGION 1..349: note = tr|A0A5B2UIV8|A0A5B2UIV8_9PSED S-adenosylmethionine:tRNA ribosyltransferase-isomerase; OS = Pseudomonas brenneri OX=129817 GN=queA PE=3 SV=1
MRVADFTFELPDSLIARHPLAERRASRLLTLDGVSGALAHRQFTDLLEHLSPGDLMVFNNTRVIPARLFGQKASGGKLEILVERVLDSHRVLAHVRSSKSPKPGSSILIDGGGEAEMVARHDALFELKFAEEVLPLLERVGHMPLPPYIDRPDEDSDRERYQTVYSQRLGAVAAPTAGLHFDQPLLDAIAAKGVETAYVTLHVGAGTFQPVRVDNIEDHHMHSEWLEVSQDVVDAVNACKARGGRVVAVGTTSVRSLESAARDGVLKPFSGDTDIFIYPGRPFHVVDCLVTNFHLPESTLLMLVSAFAGYPETMAAYQAAIDNGYRFFSYGDAMFITRNPAPRGPEEQL

SEQ ID NO: 70858 - protein, 354 aa, unidentified
  source 1..354: note = Pseudomonas canadensis
  REGION 1..354: note = tr|A0A423EVP0|A0A423EVP0_9PSED S-adenosylmethionine:tRNA ribosyltransferase-isomerase; OS = Pseudomonas canadensis OX=915099 GN=queA PE=3 SV=1
MRVADFTFELPDSLIARHPLAERRASRLLTLDGVSGVLAHRQFTDLLEHLRPGDLMVFNNTRVIPARLFGQKASGGKLEILVERVLDSHRVLAHVRSSKSPKPGSSILIDGGGEAEMVARHDALFELKFAEEVLPLLERVGHMPLPPYIDRPDEDSDRERYQTVYSQRLGAVAAPTAGLHFDQPLLDAIAAKGVETAYVTLHVGAGTFQPVRVDNIEDHHMHSEWLEVSQEVVDAVAACKARGGRVVAVGTTSVRSLESAARDGVLKPFSGDTDIFIFPGRPFHVVDCLVTNFHLPESTLLMLVSAFAGYPETMAAYQAAIANEYRFFSYGDAMFITRNPAPTAPKEAGPEEQS

SEQ ID NO: 70859 - protein, 267 aa, Pseudomonas cannabina
  REGION 1..267: note = tr|A0A3M3L4J3|A0A3M3L4J3_PSECA S-adenosylmethionine:tRNA ribosyltransferase-isomerase (Fragment) OS=Pseudomonas cannabina OX=86840; GN = ALQ64_05638 PE=3 SV=1
MMRVADFIFELPDSLIARHPLAERRSSRLLTLDGPTGALAHRQFTDLLEHVRTGDLMVFNNTRVIPARLFGQKASGGKLEILVERVLDSHRVLAHVRASKSPKPGSSILIDGGGEAEMVARHDTLFELRFAEEVLPLLDRVGHMPLPSYIDRPDEGADRERYQTVYAERAGAVAAPTAGLHFDQPLLDAIAAKGVETAFVTLHVGAGTFQPVRVEQIEDHHMHSEWLEVSQSVVDAVAACRARGGRVIAVGTTSVRSLESAARDGVL

SEQ ID NO: 70860 - protein, 354 aa, Pseudomonas cannabina
  REGION 1..354: note = tr|A0A3M3PSA1|A0A3M3PSA1_PSECA S-adenosylmethionine:tRNA ribosyltransferase-isomerase; OS = Pseudomonas cannabina OX=86840 GN=queA PE=3 SV=1
MRVADFTFELPDSLIARHPLAERRSSRLLTLDGPTGALAHRQFTDLLEHVRLGDLMVFNNTRVIPARLFGQKASGGKLEILVERVLDSHRVLAHVRASKSPKPGSSILIDGGGEAEMVARHDTLFELRFAEEVLPLLDRVGHMPLPPYIDRPDEGADRERYQTVYAERAGAVAAPTAGLHFDQPLLDAIAAKGVETAFVTLHVGAGTFQPVRVEQIEDHHMHSEWLEVSQSVVDAVAACRARGGRVIAVGTTSVRSLESAARDGVLKPFSGDTDIFIYPGRPFHVVDALVTNFHLPESTLLMLVSAFAGYPETMAAYAAAVEHGYRFFSYGDAMFITRNPAPTAPQESAPEDHA

SEQ ID NO: 70861 - protein, 349 aa, unidentified
  source 1..349: note = Pseudomonas capeferrum
  REGION 1..349: note = tr|A0A084CBZ2|A0A084CBZ2_9PSED S-adenosylmethionine:tRNA ribosyltransferase-isomerase; OS = Pseudomonas capeferrum OX=1495066 GN=queA PE=3 SV=1
MRVADFSFELPDSLIARHPLAERHGSRLLVLDGPSGALVHQQFTDLLDYLRPGDLMVFNNTRVIPARLFGQKASGGKLEVLVERVLDSHRVLAHVRSSKAPKVGAQILIDGGGEAEMVARHETLFELRFTEEVLPLLERVGHMPLPPYIDRPDEGADRERYQTVYAERAGAVAAPTAGLHFDQALLEQIAAKGVERAFVTLHVGAGTFQPVRVDKIEDHHMHKEWLEVSQDVVDAVEACRARGGRVVAVGTTSVRSLESAARDGVLKAFSGDTDIFIYPGRPFHVVDALVTNFHLPESTLLMLVSAFAGYPETMAAYAAAVEQGYRFFSYGDAMFITRNPAPRGPEDQA

SEQ ID NO: 70862 - protein, 354 aa, Pseudomonas caricapapayae
  REGION 1..354: note = tr|A0A3M6F1W2|A0A3M6F1W2_9PSED S-adenosylmethionine:tRNA ribosyltransferase-isomerase; OS = Pseudomonas caricapapayae OX=46678 GN=queA PE=3 SV=1
MRVADFTFELPDSLIARHPLAERRSSRLLTLDGPTGALAHRQFADLLEHLRSGDLMVFNNTRVIPARLFGQKASGGKLEILVERVLDSHRVLAHVRSSKSPKPGSSILIDGGGEAEMVARHDALFELRFAEEVLPLLERVGHMPLPPYIDRPDESADRERYQTVYAQRAGAVAAPTAGLHFDQPLMEAIAAKGVETAFVTLHVGAGTFQPVRVEQIEDHHMHSEWLEVSQDVVDAVAACRARGGRVIAVGTTSVRSLESAARDGQLKPFSGDTDIFIYPGRPFHVVDALVTNFHLPESTLLMLVSAFAGYPETMAAYAAAIEHGYRFFSYGDAMFITRNPAPTAPQESAPEDHA

SEQ ID NO: 70863 - protein, 354 aa, Pseudomonas caricapapayae
  REGION 1..354: note = tr|A0A0P9KMI8|A0A0P9KMI8_9PSED S-adenosylmethionine:tRNA ribosyltransferase-isomerase; OS = Pseudomonas caricapapayae OX=46678 GN=queA PE=3 SV=1
MRVADFTFELPDSLIARHPLAERRSSRLLTLDGPTGALAHRQFADLLEHLRSGDLMVFNNTRVIPARLFGQKASGGKLEILVERVLDSHRVLAHVRSSKSPKPGSSILIDGGGEAEMVARRDALFELRFAEEVLPLLERVGHMPLPPYIDRPDESADRERYQTVYAQRAGAVAAPTAGLHFDQPLMEAIAAKGVETAFVTLHVGAGTFQPVRVEQIEDHHMHSEWLEVSQDVVDAVAACRARGGRVIAVGTTSVRSLESAARDGQLKPFSGDTDIFIYPGRPFHVVDALVTNFHLPESTLLMLVSAFAGYPETMAAYAAAIEHGYRFFSYGDAMFITRNPAPTAPQESAPEDHA

SEQ ID NO: 70864 - protein, 349 aa, unidentified
  source 1..349: note = Pseudomonas caspiana
  REGION 1..349: note = tr|A0A502JFV1|A0A502JFV1_9PSED S-adenosylmethionine:tRNA ribosyltransferase-isomerase; OS = Pseudomonas caspiana OX=1451454 GN=queA PE=3 SV=1
MRVADFTFELPDSLIARHPLAERRNSRLLTLDGVSGALAHRQFTDLLEHLRPGDLMVFNNTRVIPARLFGQKASGGKLEILVERVLDSHRVLAHVRSSKSPKPGSKILIDGGGEAEMLARHDALFELGFAEEVLPLLDRVGHMPLPPYIDRPDEGSDRERYQTVYAERLGAVAAPTAGLHFDQPLMEAIAAKGVETAFVTLHVGAGTFQPVRVEKIEDHHMHSEWLEVGQDVVDAVEACRARGGRVVAVGTTSVRSLESAARDGVLKPFSGDTDIFIYPGRPFHVVDALVTNFHLPESTLLMLVSAFAGYPEAMAAYKAAVEHEYRFFSYGDAMFITRNPAPRGPEETE

SEQ ID NO: 70865 - protein, 354 aa, unidentified
  source 1..354: note = Pseudomonas caspiana
  REGION 1..354: note = tr|A0A1Y3P8W8|A0A1Y3P8W8_9PSED S-adenosylmethionine:tRNA ribosyltransferase-isomerase; OS = Pseudomonas caspiana OX=1451454 GN=queA PE=3 SV=1
MRVADFTFELPDSLIARHPLAERRSSRLLTLDGVTGALGHEHFSDLLEHVRPGDLMVFNNTRVIPARLFGQKASGGKLEILVERVLDTHSVLAHVRSSKSPKPGSMIVIDGGGEAEMVVRHDTLFELRFTEPVLPLLERVGHMPLPPYIDRPDDSADRERYQTVYAQRAGAVAAPTAGLHFDQPLLDAMKAKGVEMAFVTLHVGAGTFQPVRVEKLEDHHMHSEWLEVGQDVVDAVAACRERGGRVIAVGTTSVRSLESAARDGVLKPFSGDTDIFIFPGRPFHVVDALVTNFHLPESTLLMLVSAFAGYPETMAAYKAAVENGYRFFSYGDAMFITRNPAPTAPKASGPEDHA

SEQ ID NO: 70866 - protein, 349 aa, Pseudomonas cedrina
  REGION 1..349: note = tr|A0A1V2KL60|A0A1V2KL60_PSECE S-adenosylmethionine:tRNA ribosyltransferase-isomerase; OS = Pseudomonas cedrina subsp. cedrina OX=76762 GN=queA; PE = 3 SV=1
MRVADFTFELPDSLIARHPLAERRASRLLTLDGPSGALAHRQFTDLLEHLRPGDLMVFNNTRVIPARLFGQKASGGKLEILVERVLDSHRVLAHVRSSKSPKPGSSILIDGGGEAEMVARHDALFELRFAEEVLPLLERVGHMPLPPYIDRPDEDADRERYQTVYSQRLGAVAAPTAGLHFDQPLLDAIAAKGVESAYVTLHVGAGTFQPVRVENIEDHHMHSEWLEVSQDVVDAVNACKARGGRVVAVGTTSVRSLESAARDGVLKPFSGDTDIFIFPGRPFHVVDCLVTNFHLPESTLLMLVSAFAGYPETMAAYQAAIANEYRFFSYGDAMFITRNPAPRGLEEQL

SEQ ID NO: 70867 - protein, 349 aa, Pseudomonas cedrina
  REGION 1..349: note = tr|A0A2S9D764|A0A2S9D764_PSECE S-adenosylmethionine:tRNA ribosyltransferase-isomerase; OS = Pseudomonas cedrina OX=651740 GN=queA PE=3 SV=1
MRVADFTFELPDSLIARHPLAERRASRLLTLDGPSGALAHRQFTDLLEHLRPGDLMVFNNTRVIPARLFGQKASGGKLEILVERVLDSHRVLAHVRSSKSPKPGSSILIEGGGETEMVARHDALFELKFAEEVLPLLERVGHMPLPPYIDRPDEDADRERYQTVYSQRLGAVAAPTAGLHFDQPLLDAIAAKGVDTAYVTLHVGAGTFQPVRVDNIEDHHMHSEWLEVSQDVVDAVAACKARGGRVVAVGTTSVRSLESAARDGVLKPFSGDTDIFIFPGRPFHVVDCLVTNFHLPESTLLMLVSAFAGYPETMAAYQAAIANEYRFFSYGDAMFITRNPAPRGPEDNL

SEQ ID NO: 70868 - protein, 354 aa, unidentified
  source 1..354: note = Pseudomonas cerasi
  REGION 1..354: note = tr|A0A193SN46|A0A193SN46_9PSED S-adenosylmethionine:tRNA ribosyltransferase-isomerase; OS = Pseudomonas cerasi OX=1583341 GN=queA PE=3 SV=1
MRVADFTFELPDSLIARHPLAERRSSRLLTLDGPTGALAHRQFTDLLEHLRPGDLMVFNNTRVIPARLFGQKASGGKLEILVERVLDSHRVLAHVRSSKSPKPGSSILIDGGGEAEMVARHDALFELRFAEEVLPLLERVGHMPLPPYIDRPDEGADRERYQTVYAQRAGAVAAPTAGLHFDQPLLEAIAAKGVETAFVTLHVGAGTFQPVRVEQIEDHHMHSEWLEVGQDVVDAVAACRARGGRVVAVGTTSVRSLESAARDGELKPFSGDTDIFIYPGRPFHVVDALVTNFHLPESTLLMLVSAFAGYPETMAAYAAAIEHGYRFFSYGDAMFITRNPAPTAPQESAPEDHA

SEQ ID NO: 70869 - protein, 347 aa, unidentified
  source 1..347: note = Pseudomonas chengduensis
  REGION 1..347: note = tr|A0A1G6KGM6|A0A1G6KGM6_9PSED S-adenosylmethionine:tRNA ribosyltransferase-isomerase; OS = Pseudomonas chengduensis OX=489632 GN=queA PE=3 SV=1
MRVADFHFDLPESLIARHPLAERRASRLLQLDGPSGELRHGQFTDVLEQLRPGDLMVFNNTRVIPARLFGQKASGGKLEVLVERVLDQYRVLAHVRSSKSPKPGSRILIEGGGEAEMVARHDALFELRFAEPVLPLLERVGHMPLPPYIDRPDDEADRERYQTVYAQRAGAVAAPTAGLHFDDELLAAIRAKGVDTAFVTLHVGAGTFQPVRVERIEDHHMHSEWLEVGQDVVDAVAACRARGGRVVAVGTTSVRSLETAARDGELKPFSGDTDIFIYPGRPFHVVDALVTNFHLPESTLLMLVSAFAGYAETMAAYRAAVEQGYRFFSYGDAMFITRNPAARGPEV

SEQ ID NO: 70870 - protein, 349 aa, unidentified
  source 1..349: note = Pseudomonas chloritidismutans
  REGION 1..349: note = tr|V4S7D0|V4S7D0_PSECO S-adenosylmethionine:tRNA ribosyltransferase-isomerase OS=Pseudomonas chloritidismutans AW-1 OX=1263865 GN=queA PE=3 SV=1
MQVADFFFQLPDALIARHPLAERRASRLLVLEGETGKLSHRNFADLLDHVRPGDLMVFNNTRVIPARLFGQKATGGKLEILVERVVGNRSVLAHVRSSKSPKAGSKILLDGGGEAEMIARHDALFELEFDEDVLPLLERIGHMPLPPYIDRPDDAADRERYQTVYAQRAGAVAAPTAGLHFDEALLQMLRESGVETAYVTLHVGAGTFQPVRVERIEEHHMHREWLEVGQDVVDAVAACRSRGGRVIAVGTTSVRSLETAARDGELKPFSGDTDIFIYPGKSFHVVDALVTNFHLPESTLLMLVSAFAGYPETMEAYAEAVAQRYRFFSYGDAMFITRNPAPRGPEETQ

SEQ ID NO: 70871 - protein, 349 aa, Pseudomonas chlororaphis
  REGION 1..349: note = tr|A0A3G7K6K2|A0A3G7K6K2_9PSED S-adenosylmethionine:tRNA ribosyltransferase-isomerase; OS = Pseudomonas chlororaphis subsp. aurantiaca OX=86192; GN = queA PE=3 SV=1
MRVADFTFELPDSLIARHPLAERRASRLLTLDGVTGALAHRQFTDLLEHLRPGDLMVFNNTRVIPARLFGQKASGGKLEILVERVLDSHRVLAHVRSSKSPKPGSKILIEGGGEAEMLARHDTLFELGFAEEVLPLLERVGHMPLPPYIDRPDEDSDRERYQTVYSERLGAVAAPTAGLHFDQPLLEAIAAKGVETAFVTLHVGAGTFQPVRVERIEDHHMHNEWLEVSQGVVDAVAACRARGGRVVAVGTTSVRSLESAARDGVLKPFSGDTDIFIYPGRPFHVVDALVTNFHLPESTLLMLVSAFAGYPEAMAAYKAAVEHGYRFFSYGDAMFITRNPAPRGPEETA

SEQ ID NO: 70872 - protein, 349 aa, Pseudomonas chlororaphis
  REGION 1..349: note = tr|A0A3G7C9A3|A0A3G7C9A3_9PSED S-adenosylmethionine:tRNA ribosyltransferase-isomerase; OS = Pseudomonas chlororaphis subsp. piscium OX=1513890; GN = queA PE=3 SV=1
MRVADFTFELPDSLIARHPLAERRASRLLTLDGVTGALAHRQFTDLLEHLRPGDLMVFNNTRVIPARLFGQKASGGKLEILVERVLDSHRVLAHVRSSKSPKPGSKILIEGGGEAEMLARHDTLFELGFAEEVLPLLERVGHMPLPPYIDRPDEDSDRERYQTVYSERLGAVAAPTAGLHFDQPLLEAIAVKGVETAFVTLHVGAGTFQPVRVERIEDHHMHNEWLEVSQDVVDAVAACRARGGRVVAVGTTSVRSLESAARDGVLKPFSGDTDIFIYPGRPFHVVDALVTNFHLPESTLLMLVSAFAGYPEAMAAYKAAVEHGYRFFSYGDAMFITRNPAPRGPEDQA

SEQ ID NO: 70873 - protein, 249 aa, Pseudomonas cichorii
  REGION 1..249: note = tr|A0A3M3TCM1|A0A3M3TCM1_PSECI S-adenosylmethionine:tRNA ribosyltransferase-isomerase (Fragment) OS=Pseudomonas cichorii OX=36746 GN=ALQ47_05179; PE = 3 SV=1
MMRVADFTFDLPDSLIARHPLAERRSSRLLTLDGVSGALAHRQFTDLLEYLRSGDLMIFNNTRVIPARLFGQKASGGKLEILVERVLDSHRVLAHVRSSKSPKPGSSILINGGGEAEMVARHDTLFELRFAEEVLPLLDRVGHMPLPPYIDRPDEGADRERYQTVYAERAGAVAAPTAGLHFDEPLLEAIAAKGVETAFVTLHVGAGTFQPVRVDRIEDHHMHNEWLEVSQEVVDAVAACRARGGRVIA

SEQ ID NO: 70874 - protein, 354 aa, Pseudomonas cichorii
  REGION 1..354: note = tr|A0A3M4W4T6|A0A3M4W4T6_PSECI S-adenosylmethionine:tRNA ribosyltransferase-isomerase; OS = Pseudomonas cichorii OX=36746 GN=queA PE=3 SV=1
MRVADFTFDLPDSLIARHPLAERRSSRLLTLDGVSGALAHRQFTDLLEHLRSGDLMIFNNTRVIPARLFGQKASGGKLEILVERVLDSHRVLAHVRSSKSPKPGSSIVIDGGGEAEMVARHDTLFELRFAEEVLPLLDRVGHMPLPPYIDRPDEGADRERYQTVYAQRAGAVAAPTAGLHFDEPLLEAIAAKGVETAFVTLHVGAGTFQPVRVDRIEDHHMHNEWLEVSLEVVDAVAACRARGGRVIAVGTTSVRSLESAARDGVLKPFSGDTDIFIYPGRPFHVVDALVTNFHLPESTLLMLVSAFAGYPETMAAYKAAIEHGYRFFSYGDAMFITRNPAPTAPQESASEDQA

SEQ ID NO: 70875 - protein, 347 aa, Pseudomonas citronellolis
  REGION 1..347: note = tr|A0A1A9KHU0|A0A1A9KHU0_9PSED S-adenosylmethionine:tRNA ribosyltransferase-isomerase; OS = Pseudomonas citronellolis OX=53408 GN=queA PE=3 SV=1
MRVADFHFDLPEALIARHPLAERRASRLLVLDGPSGALSHRHFADLLEYLRPGDLMVFNNTRVIPARLFGQKESGGKLEILVERVLDSRRVLAHVRSSKSPKPGSKILIDGGAEAQMLQRHDALFELGFAEDVLPLLERVGHMPLPPYIDRPDEAADRERYQTVYAERAGAVAAPTAGLHFDEGLLQAIREKGVDTAFVTLHVGAGTFQPVRVEKIEDHHMHSEWLEVDQDVVDAVAACRARGGRVIAVGTTSVRSLESAARDGQLKPFSGDTDIFLYPGRPFHVVDALVTNFHLPESTLLMLVSAFAGYPQTMAAYAAAVEHEYRFFSYGDAMFITRNPAPRGPED

SEQ ID NO: 70876 - protein, 347 aa, Pseudomonas citronellolis
  REGION 1..347: note = tr|A0A4Z0IHP1|A0A4Z0IHP1_9PSED S-adenosylmethionine:tRNA ribosyltransferase-isomerase; OS = Pseudomonas citronellolis OX=53408 GN=queA PE=3 SV=1
MRVADFHFDLPEALIARHPLAERRASRLLVLDGPSGALSHRHFADLLEYLRPGDLMVFNNTRVIPARLFGQKESGGKLEILVERVLDSRRVLAHVRSSKSPKPGSKILIDGGAEAQMLQRHDALFELGFAEDVLPLLERVGHMPLPPYIDRPDEAADRERYQTVYAERAGAVAAPTAGLHFDEGLLQAIREKGVDTAFVTLHVGAGTFQPVRVEKIEDHHMHSEWLEVGQDVVDAVAACRARGGRVIAVGTTSVRSLESAARDGQLKPFSGDTDIFLYPGRPFHVVDALVTNFHLPESTLLMLVSAFAGYPQTMAAYAAAVEHEYRFFSYGDAMFITRNPAPRGPED

SEQ ID NO: 70877 - protein, 354 aa, unidentified
  source 1..354: note = Pseudomonas coleopterorum
  REGION 1..354: note = tr|A0A1H5EBY1|A0A1H5EBY1_9PSED S-adenosylmethionine:tRNA ribosyltransferase-isomerase; OS = Pseudomonas coleopterorum OX=1605838 GN=queA PE=3 SV=1
MRVADFSFELPDSLIARHPLAERHGSRLLVLDGPSGALDHRQFTDLPGFLRPGDLMVFNNTRVIPARVFGQKASGGKLEILVERVLDSHRVLAHVRSSKSPKPGSMILIDGGGEAEMVARHDALFELRFNEEVLPLLDKVGHMPLPPYIDRPDDTADRERYQTVYAEKAGAVAAPTAGLHFDEALLAQIEAMGVETAFVTLHVGAGTFQPVRVEKLEDHHMHKEWLEVSQDVVDAVQACKARGGRVVAVGTTSVRSLESAARDGVLKPFSGDTDIFIFPGRPFHVVDALVTNFHLPESTLLMLVSAFAGYPEAMAAYAAAVANEYRFFSYGDAMFITRNPAPRGPSEAAPGDQA

SEQ ID NO: 70878 - protein, 347 aa, Pseudomonas composti
  REGION 1..347: note = tr|A0A1I5LMS5|A0A1I5LMS5_9PSED S-adenosylmethionine:tRNA ribosyltransferase-isomerase; OS = Pseudomonas composti OX=658457 GN=queA PE=3 SV=1
MRVADFHFDLPESLIARHPLAERRASRLLQVDGPSGELRHGQFTDVLEQLHPGDLMVFNNTRVIPARLFGQKASGGKLEVLVERVLDQYRVLAHVRSSKSPKPGSQILIEGGGEAEMVARHDTLFELRFAELVLPLLERVGHMPLPPYIDRPDDEADRERYQTVYAQKAGAVAAPTAGLHFDDELLAAIRAKGVETVFVTLHVGAGTFQPVRVERIEDHHMHSEWLEVGQDVVDAVAACRARGGRVIAVGTTSVRSLETAARDGELKPFSGDTDIFIYPGRPFHVVDALVTNFHLPESTLLMLVSAFAGYPETMAAYREAVAQGYRFFSYGDAMFITRNPAARGPEV

SEQ ID NO: 70879 - protein, 354 aa, Pseudomonas congelans
  REGION 1..354: note = tr|A0A0P9PNH1|A0A0P9PNH1_9PSED S-adenosylmethionine:tRNA ribosyltransferase-isomerase; OS = Pseudomonas congelans OX=200452 GN=queA PE=3 SV=1
MRVADFTFELPDSLIARHPLAERRSSRLLTLDGPTGALAHRQFTDLLEHLRPGDLMVFNNTRVIPARLFGQKASGGKLEILVERVLDSHRVLAHVRSSKSPKPGSSILIDGGGEAEMVARHDALFELRFAEEVLPLLERVGHMPLPPYIDRPDEGADRERYQTVYAQRAGAVAAPTAGLHFDQPLLEAIAAKGVETAFVTLHVGAGTFQPVRVEQIEDHHMHSEWLEVGQDVVDAVAACRARGGRVIAVGTTSVRSLESAARDGVLKPFSGDTDIFIYPGRPFHVVDALVTNFHLPESTLLMLVSAFAGYPETMAAYAAAIEHGYRFFSYGDAMFITRNPAPTAPQESAPEDHA

SEQ ID NO: 70880 - protein, 326 aa, unidentified
  source 1..326: note = Pseudomonas coronafaciens
  REGION 1..326: note = tr|A0A3M5I8U6|A0A3M5I8U6_9PSED S-adenosylmethionine:tRNA ribosyltransferase-isomerase (Fragment) OS=Pseudomonas coronafaciens pv. oryzae; OX = 235277 GN=ALP55_04355 PE= 3 SV=1
MMRVADFTFELPDSLIARHPLAERRSSRLLTLDGPTGALAHRQFTDLLEHLRSGDLMVFNNTRVIPARLFGQKTSGGKLEILVERVLDSHRVLAHVRSSKSPKPGSSILIDGGGEAEMVARHDALFELRFAEEVLPLLDRVGHMPLPPYIDRPDEGSDRERYQTVYAQRAGAVAAPTAGLHFDQPLLDAIAAKGVETAFVTLHVGAGTFQPVRVEQIEDHHMHSEWLEVSQDVVDAVAACRARGGRVIAVGTTSVRSLESAARDGELKPFSGDTDIFIYPGRPFHVVDALVTNFHLPESTLLMLVSAFAGYPETMAAYAAAVEHGY

SEQ ID NO: 70881 - protein, 354 aa, unidentified
  source 1..354: note = Pseudomonas coronafaciens
  REGION 1..354: note = tr|A0A0Q0FCP0|A0A0Q0FCP0_9PSED S-adenosylmethionine:tRNA ribosyltransferase-isomerase; OS = Pseudomonas coronafaciens pv. zizaniae OX=251700; GN = queA PE=3 SV=1
MRVADFTFELPDSLIARHPLAERRSSRLLTLDGPTGALAHRQFTDLLEHLRSGDLMVFNNTRVIPARLFGQKTSGGKLEILVERVLDSHRVLAHVRSSKSPKPGSSILIDGGGEAEMVARHDALFELRFAEEVLPLLDRVGHMPLPPYIDRPDEGSDRERYQTVYAQRAGAVAAPTAGLHFDQPLLDAIAAKGVETAFVTLHVGAGTFQPVRVEQIEDHHMHSEWLEVSQDVVDAVAACRARGGRVIAVGTTSVRSLESAARDGELKPFSGDTDIFIYPGRPFHVVDALVTNFHLPESTLLMLVSAFAGYPETMAAYAAAVEHGYRFFSYGDAMFITRNPAPTAPQESAPEDHA

SEQ ID NO: 70882 - protein, 349 aa, Pseudomonas corrugata
  REGION 1..349: note = tr|A0A3M3E6E0|A0A3M3E6E0_9PSED S-adenosylmethionine:tRNA ribosyltransferase-isomerase; OS = Pseudomonas corrugata OX=47879 GN=queA PE=3 SV=1
MRVADFTFELPDSLIARHPLAERRASRLLTLDGVSGAMAHRQFTDLLEHLRPGDLMVFNNTRVIPARLFGQKASGGKLEILVERVLDSHRVLAHVRSSKSPKPGSSILIDGGGEAVMVARHDALFELAFAEEVLPLLDRVGHMPLPPYIDRPDEGSDRERYQTVYAERLGAVAAPTAGLHFDQPLLEAIAAKGVETTFVTLHVGAGTFQPVRVERIEDHHMHSEWLEVSQDVVDAVAACRARGGRVVAVGTTSVRSLESAARDGVLKPFSGDTDIFIYPGRPFHVVDALVTNFHLPESTLLMLVSAFAGYPEAMAAYKAAVEHGYRFFSYGDAMFITRNPAPRGPEETV

SEQ ID NO: 70883 - protein, 354 aa, Pseudomonas costantinii
  REGION 1..354: note = tr|A0A1S2UTQ2|A0A1S2UTQ2_9PSED S-adenosylmethionine:tRNA ribosyltransferase-isomerase; OS = Pseudomonas costantinii OX=168469 GN=queA PE=3 SV=1
MRVADFTFELPDSLIARHPLAERRASRLLTLDGVSGALAHRQFTDLLEHLRPGDLMVFNNTRVIPARLFGQKASGGKLEILVERVLDSHRVLAHVRSSKSPKPGSSILIDGGGEAEMVARHDALFELKFAEEVLPLLERVGHMPLPPYIDRPDEDSDRERYQTVYSQRLGAVAAPTAGLHFDQPLLDAIAAKGVESAYVTLHVGAGTFQPVRVENIEDHHMHSEWLEVSQEVVDAVAACKARGGRVVAVGTTSVRSLESAARDGVLKPFSGDTDIFIFPGRPFHVVDCLVTNFHLPESTLLMLVSAFAGYPETMAAYQAAIDNEYRFFSYGDAMFITRNPAPTAPKEAGPEEQL

SEQ ID NO: 70884 - protein, 349 aa, Pseudomonas cremoricolorata
  REGION 1..349: note = tr|A0A089WLT3|A0A089WLT3_9PSED S-adenosylmethionine:tRNA ribosyltransferase-isomerase; OS = Pseudomonas cremoricolorata OX=157783 GN=queA PE=3 SV=1
MRVADFSFELPDSLIARHPLAERHGSRLLVLDGPSGALAHRQFTDLLEYLRPGDLMVFNNTRVIPARLFGQKASGGKLEVLVERVLDSHRVLAHVRASKAPKVGTQLLIDGGGEAEMVARHDTLFELRFSEEVLPLLERVGHMPLPPYIDRPDEGADRERYQTVYAERAGAVAAPTAGLHFDQHLLAQIAAKGVEQAFVTLHVGAGTFQPVRVDNIEDHHMHKEWLEVSQDVVDAVAACRARGGRVIAVGTTSVRSLESAARDGQLKAFSGDTDIFIYPGRPFHVVDALVTNFHLPESTLLMLVSAFAGYPQTMAAYAAAVAEGYRFFSYGDAMFITRNPAPRGPEDQA

SEQ ID NO: 70885 - protein, 349 aa, Pseudomonas cuatrocienegasensis
  REGION 1..349: note = tr|A0A1H9E714|A0A1H9E714_9PSED S-adenosylmethionine:tRNA ribosyltransferase-isomerase; OS = Pseudomonas cuatrocienegasensis OX=543360 GN=queA PE=3; SV = 1
MRVADFHFELPDALIARYPLAERRASRLLVLDGPTGTLAHRQFSDLLEYLRPGDLMVFNNTRVIPARLFGQKASGGKLEVLVERVLDSHRVLAHVRASKSPKPGSMILIDGGGEAEMVARHDALFELRFSEEVLPLLERVGHMPLPPYIDRADDSADRERYQTVYAERAGAVAAPTAGLHFDQALLASIAEMGVATAFVTLHVGAGTFQPVRVERIEDHHMHSEWLEVDQTVVDAVAACRARGGRVIAVGTTSVRSLESAARSGELQVFSGDTDIFIYPGRPLHVVDALVTNFHLPESTLLMLVSAFAGYPETMAAYQAAVAEGYRFFSYGDAMFITRNPAPRGPEDVL

SEQ ID NO: 70886 - protein, 349 aa, unidentified
  source 1..349: note = Pseudomonas daroniae
  REGION 1..349: note = tr|A0A4Q9QLS3|A0A4Q9QLS3_9PSED S-adenosylmethionine:tRNA ribosyltransferase-isomerase; OS = Pseudomonas daroniae OX=2487519 GN=queA PE=3 SV=1
MRVADFHFDLPDEQIARHPLAERRASRLLILDGISGALAHRHFADLLEYLRPGDLMVFNNTRVIPARLFGQKASGGKLEVLVERVLDQHRVLAHVRASKSPKPGSMILIDGGAQAQMVTRHDALFELRFDEAVLPLLERVGHMPLPPYIDRADEASDRERYQTVYAQHAGAVAAPTAGLHFDRELLAAIAEKGVESAFVTLHVGAGTFQPVRVERIEDHVMHSEWLQVDAAVVDAVAACRARGGRVVAVGTTSVRALESAAQGGELRPFSGDTDIFIYPGRPLHVVDALVTNFHLPESTLLMLVSAFAGYAETMAAYAQAVAEGYRFFSYGDAMFITRNPAPRGPEEHL

SEQ ID NO: 70887 - protein, 353 aa, Pseudomonas deceptionensis
  REGION 1..353: note = tr|A0A0J6JD28|A0A0J6JD28_PSEDM S-adenosylmethionine:tRNA ribosyltransferase-isomerase; OS = Pseudomonas deceptionensis OX=882211 GN=queA PE=3 SV=1
MRVADFTFELPDSLIARHPLAERRNSRLLTLDGESGVLAHRQFTDLLEHLRPGDLMVFNNTRVIPARLFGQKASGGKLEILIERVLDSHRVLAHVRSSKSPKPGSKILIDGGGEAEMLARHDALFELAFAEEVLPLLDRVGHMPLPPYIDRPDEGSDRERYQTVYAERLGAVAAPTAGLHFDEPLMQAIAAKGVETAFVTLHVGAGTFQPVRVERLEDHHMHTEWLEVGQDVVDAVAACRARGGRVIAVGTTSVRSLESAARDGVLKPFSGDTDIFIFPGRPFHVVDALVTNFHLPESTLLMLVSAFAGYPETMAAYKAAVEHGYRFFSYGDAMFITRNPAPTAPAPAPEDQA

SEQ ID NO: 70888 - protein, 347 aa, Pseudomonas delhiensis
  REGION 1..347: note = tr|A0A239DQE7|A0A239DQE7_9PSED S-adenosylmethionine:tRNA ribosyltransferase-isomerase; OS = Pseudomonas delhiensis OX=366289 GN=queA PE=3 SV=1
MRVADFHFDLPEALIARHPLAERRASRLLVLDGPTGELSHRHFTDLLEYLRPGDLMVFNNTRVIPARLFGQKASGGKLEILVERVLDSRRVLAHVRSSKSPKPGSKILIDGGAEAQMLQRHDALFELGFAEDVLPLLERVGHMPLPPYIDRPDEDADRERYQTVYAERAGAVAAPTAGLHFDEGLLAAIREKGVDTAFVTLHVGAGTFQPVRVEKIEDHHMHSEWLEVGQDVVDAVAACRARGGRVIAVGTTSVRSLESAARDGQLKPFSGDTDIFLYPGRPFHVVDALVTNFHLPESTLLMLVSAFAGYPQTMAAYAAAVAHEYRFFSYGDAMFITRNPAPRGPED

SEQ ID NO: 70889 - protein, 347 aa, unidentified
  source 1..347: note = Pseudomonas denitrificans
  REGION 1..347: note = tr|A0A5J6R316|A0A5J6R316_PSEDE tRNA preQ1(34) S-adenosylmethionine ribosyltransferase-isomerase QueA; OS = Pseudomonas denitrificans OX=43306 GN=queA PE=4 SV=1
MRVADFHFDLPEALIARHPLPERRSSRLLVLDGPSGELSHRQFADILGFLKPGDLMVFNNTRVIPARLFGQKASGGKLEILVERVLDSHRVLAHVRSSKSPKPGSKILIDGGGEAEMLQRHDALFELGFSEDVLPLLERVGHMPLPPYIDRPDEDADRERYQTVYAERAGAVAAPTAGLHFDEALLESIRAKGVDTAFVTLHVGAGTFQPVRVERIEDHHMHNEWLEVSQDVVDAVAACKARGGRVVAVGTTSVRSLESAARDGVLKPFSGDTDIFIFPGRPFHVVDALVTNFHLPESTLLMLVSAFAGYPETMAAYAAAVEQGYRFFSYGDAMFITRNPAPRGPED

SEQ ID NO: 70890 - protein, 349 aa, unidentified
  source 1..349: note = Pseudomonas donghuensis
  REGION 1..349: note = tr|A0A2M9VPX1|A0A2M9VPX1_9PSED S-adenosylmethionine:tRNA ribosyltransferase-isomerase; OS = Pseudomonas donghuensis OX=1163398 GN=queA PE=3 SV=1
MRVADFSFELPDSLIARHPLAQRHSSRLLTLDGPSGALAHRQFTDLLEHLRPGDLMVFNNTRVIPARLFGQKASGGKLEILVERVLDSHRVLAHVRSSKAPKPGTLIVIDGGGEAEMVARHDALFELRFAEEVLALLDRVGHMPLPPYIDRPDEGADRERYQTVYAERAGAVAAPTAGLHFDEELLAKIAAKGVETAFVTLHVGAGTFQPVRVERIEDHHMHKEWLEVGQDVVDAVAACRARGGRVIAVGTTSVRSLESAARDGVLKAFSGDTDIFIFPGRPFHVVDALVTNFHLPESTLLMLVSAFAGYPETMAAYAAAVENGYRFFSYGDAMFITRNPAPRGPEDQA

SEQ ID NO: 70891 - protein, 349 aa, unidentified
  source 1..349: note = Pseudomonas dryadis
  REGION 1..349: note = tr|A0A4Q9R4W3|A0A4Q9R4W3_9PSED S-adenosylmethionine:tRNA ribosyltransferase-isomerase; OS = Pseudomonas dryadis OX=2487520 GN=queA PE=3 SV=1
MRVADFHFELPDALIARHPLAERRASRLLILDGPSGALAHRQFADLLDYLRPGDLMVFNNTRVIPARLFGRKASGGKLEVLVERVLDQHRVLAHVRSSKSPRPGSTILLEGGAEAQMLARHDALFELRFDEPVLPLLERVGHMPLPPYIDRADEAADRERYQTVYARHAGAVAAPTAGLHFDRALLDAIAAKGVESAFVTLHVGAGTFQPVRVERLEDHVMHSEWLEVDAAVVEAVAACRARGGRVVAVGTTSVRALESAARDGQLRPFSGDTDIFIFPGRPLHVVDALVTNFHLPESTLLMLVSAFAGYPETMAAYGQAVAEGYRFFSYGDAMFITRNPAPRGPEDHL

SEQ ID NO: 70892 - protein, 347 aa, Pseudomonas duriflava
  REGION 1..347: note = tr|A0A562QP33|A0A562QP33_9PSED S-adenosylmethionine:tRNA ribosyltransferase-isomerase; OS = Pseudomonas duriflava OX=459528 GN=queA PE=3 SV=1
MQVSDFYFELPETLIARHPLPERRASRLLVLDGPSGAIQHQHFSDLLDYLRPEDVMIFNDTRVIPARLFGQKESGGKLEILVERVLDEHRVLAHVRSSKSPKPGSYIVVEGGGRAEMLARHDALFELRFDEAVLPLLDRAGHMPLPPYIDRPDEEADRERYQTVYARKAGAVAAPTAGLHFDEAMLAAIREKGIETEFVTLHVGAGTFQPVRVARIEDHHMHREWLQVSQSVVDAVTRCQARGGRVIAVGTTSVRALESAARDGQLKPFSGDTDIFLYPGRPFHVVEGLITNFHLPESTLLMLVSAFAGYTQTMAAYAAAVENQYRFFSYGDAMFVTRNPGAKGPES

SEQ ID NO: 70893 - protein, 353 aa, unidentified
  source 1..353: note = Pseudomonas endophytica
  REGION 1..353: note = tr|A0A0Q0SR40|A0A0Q0SR40_9PSED S-adenosylmethionine:tRNA ribosyltransferase-isomerase; OS = Pseudomonas endophytica OX=1563157 GN=queA PE=3 SV=1
MRVADFTFELPDSLIARHPLAERRNSRLLTLDGESGALAHRQFTDLLEHLRPGDLMVFNNTRVIPARLFGQKASGGKLEILVERVLDSHRVLAHVRSSKSPKPGSTILIDGGGEAQMLARHDALFELGFTDEVLPLLDRVGHMPLPPYIDRPDEGSDRERYQTVYAQRLGAVAAPTAGLHFDEPLMQAIAAKGVETAFVTLHVGAGTFQPVRVERLEDHHMHTEWLEVGQEVVDAVAACRARGGRVIAVGTTSVRSLESAARDGVLKPFSGDTDIFIFPGRPFHVVDALVTNFHLPESTLLMLVSAFAGYPETMAAYKAAVEHGYRFFSYGDAMFITRNPAPTAPAPAPEDQA

SEQ ID NO: 70894 - protein, 349 aa, unidentified
  source 1..349: note = Pseudomonas entomophila
  REGION 1..349: note = sp|Q1IEK2|QUEA_PSEE4 S-adenosylmethionine:tRNA ribosyltransferase-isomerase OS=Pseudomonas entomophila (strain L48) OX=384676 GN=queA PE=3 SV=1
MRVADFSFELPDSLIARHPLAERHGSRLLVLDGPSGELAHKQFTDLLEYLRPGDLMVFNNTRVIPARLFGQKASGGKLEVLVERVLDSHRVLAHVRASKAPKEGAQILIDGGGEAEMVARHDTLFELRFSEEVLPLLERVGHMPLPPYIDRPDEGADRERYQTVYAERAGAVAAPTAGLHFDEALLEKIAAKGVERAFVTLHVGAGTFQPVRVDKIEDHTMHKEWLEVSQDVVDAVAACRARGGRVIAVGTTSVRSLESAARDGVLKAFSGDTDIFIFPGRPFHVVDCLVTNFHLPESTLLMLVSAFAGYPETMAAYAAAVEQGYRFFSYGDAMFITRNPAPRGPEDQA

SEQ ID NO: 70895 - protein, 349 aa, unidentified
  source 1..349: note = Pseudomonas entomophila
  REGION 1..349: note = tr|A0A3Q8U5R6|A0A3Q8U5R6_9PSED S-adenosylmethionine:tRNA ribosyltransferase-isomerase; OS = Pseudomonas entomophila OX=312306 GN=queA PE=3 SV=1
MRVADFSFELPDSLIARHPLAERHGSRLLVLDGQSGALAHQQFTDLLDYLRPGDLMVFNNTRVIPARLFGQKASGGKLEVLVERVLDSHRVLAHVRASKAPKEGAVILIDGGGEAEMVARHDTLFELRFTEEVLPLLERVGHMPLPPYIDRPDEGADRERYQTVYAERAGAVAAPTAGLHFDEALLEKIAAKGVERAFVTLHVGAGTFQPVRVDKIEDHHMHKEWLEVSQDVVDAVEACRARGGRVIAVGTTSVRSLESAARDGVLKAFSGDTDIFIFPGRPFHVVDCLVTNFHLPESTLLMLVSAFAGYPETMAAYAAAVANGYRFFSYGDAMFITRNPAPRGPEDQA

SEQ ID NO: 70896 - protein, 349 aa, Pseudomonas extremaustralis
  REGION 1..349: note = tr|A0A5C5QGD8|A0A5C5QGD8_9PSED S-adenosylmethionine:tRNA ribosyltransferase-isomerase; OS = Pseudomonas extremaustralis OX=359110 GN=queA PE=3 SV=1
MRVADFTFELPDSLIARHPLAERRASRLLTLDGPSGALAHRQFTDLLEHLRPGDLMVFNNTRVIPARLFGQKASGGKLEILVERVLDSHRVLAHVRSSKSPKPGSTLLIDGGGEAEMVARHDALFELKFAEEVLPLLERVGHMPLPPYIDRPDEDADRERYQTVYSQRLGAVAAPTAGLHFDQPLLDAIAAKGVESAYVTLHVGAGTFQPVRVDNIEDHHMHSEWLEVSQDVVDAVNACKARGGRVIAVGTTSVRSLESAARDGVLKPFSGDTDIFIYPGRPFHVVDALVTNFHLPESTLLMLVSAFAGYPETMAAYQAAIDNGYRFFSYGDAMFITRNPAPRGPEEQL

SEQ ID NO: 70897 - protein, 349 aa, Pseudomonas extremorientalis
  REGION 1..349: note = tr|A0A1H0QGQ5|A0A1H0QGQ5_9PSED S-adenosylmethionine:tRNA ribosyltransferase-isomerase; OS = Pseudomonas extremorientalis OX=169669 GN=queA PE=3 SV=1
MRVADFTFELPDSLIARHPLAERRASRLLTLDGVSGALAHRQFTDLLEHLRPGDLMVFNNTRVIPARLFGQKASGGKLEILVERVLDSHRVLAHVRSSKSPKPGSSILIDGGGEAEMVARHDALFELKFAEEVLPLLERVGHMPLPPYIDRPDEDSDRERYQTVYSQRLGAVAAPTAGLHFDQPLLDAIAAKGVETAYVTLHVGAGTFQPVRVDNIEDHHMHSEWLEVSQDVVDAVAACKARGGRVIAVGTTSVRSLESAARDGVLKPFSGDTDIFIYPGRPFHVVDCLVTNFHLPESTLLMLVSAFAGYPETMAAYQAAIDNGYRFFSYGDAMFITRNPAPRGPEEQL

SEQ ID NO: 70898 - protein, 264 aa, Pseudomonas ficuserectae
  REGION 1..264: note = tr|A0A0P9TX60|A0A0P9TX60_9PSED S-adenosylmethionine:tRNA ribosyltransferase-isomerase; OS = Pseudomonas ficuserectae OX=53410 GN=ALO69_00165 PE=3; SV = 1
  VARIANT 189..190: note = Xaa can be any naturally occurring amino acid
MRVADFTFELPDSLIARHPLAERRSSRLLTLDGPTGALAHRQFTDLLEHLRPGDLMVFNNTRVIPARLFGQKASGGKLEILVERVLDSHRVLAHVRSSKSPKPGSSILIDGGGEAEMVARHDALFELRFAEEVLPLLERVGHMPLPPYIDRPDEGADRERYQTVYAQRAGAVAAPTAGLHFDQPLLEAXXWASRLRSSRCTSARVRSSRCASSRSKITTCTASGWKLARTWSMPWLHAVRGAEGWLPSGPPACARWRVPRVMAN

SEQ ID NO: 70899 - protein, 266 aa, Pseudomonas ficuserectae
  REGION 1..266: note = tr|A0A3M5CWY3|A0A3M5CWY3_9PSED S-adenosylmethionine:tRNA ribosyltransferase-isomerase; OS = Pseudomonas ficuserectae OX=53410 GN=ALP67_03330 PE=3; SV = 1
  VARIANT 190: note = Xaa can be any naturally occurring amino acid
MRVADFTFELPDSLIARHPLAERRSSRLLTLDGPTGALAHRQFTDLLEHLRPGDLMVFNNTRVIPARLFGQKASGGKLEILVERVLDSHRVLAHVRSSKSPKPGSSILIDGGGEAEMVARHDALFELRFAEEVLPLLERVGHMPLPPYIDRPDEGADRERYQTVYAQRAGAVAAPTAGLHFDQPLLEAIXPPRASRLRSSRCTSARVRSSRCASSRSKITTCTASGWKLARTWSMPWLHAVRGAEGWLPSGPPACARWRVPRVMAN

SEQ ID NO: 70900 - protein, 349 aa, Pseudomonas flavescens
  REGION 1..349: note = tr|A0A1G8KW95|A0A1G8KW95_9PSED S-adenosylmethionine:tRNA ribosyltransferase-isomerase; OS = Pseudomonas flavescens OX=29435 GN=queA PE=3 SV=1
MRVTDFHFDLPDEQIARHPLAERRASRLLILDGASGALAHRHFADLLEYLRPGDLMVFNNTRVIPARLFGQKASGGKLEVLIERVLDEHRVLAHVRASKSPKPGTTILIEGGAQAQMLARHDALFELRFDEAVLPLLERVGHMPLPPYIDRADEASDRERYQTVYARHAGAVAAPTAGLHFDRELLAAIAEKGVESAFVTLHVGAGTFQPVRVERIEDHVMHSEWLQVEATVVDAVAACRARGGRVVAVGTTSVRALESAARDGELRPFSGDTDIFIYPGRPLHVVDALVTNFHLPESTLLMLVSAFAGYAETMAAYAQAVADGYRFFSYGDAMFITRNPAPRGPEEHL

SEQ ID NO: 70901 - protein, 349 aa, unidentified
  source 1..349: note = Pseudomonas flexibilis
  REGION 1..349: note = tr|A0A0B3BXE9|A0A0B3BXE9_9PSED S-adenosylmethionine:tRNA ribosyltransferase-isomerase; OS = Pseudomonas flexibilis OX=706570 GN=queA PE=3 SV=1
MRVSDFHFDLPDALIARHPLAQRRASRLLVLDGPSGALAHRQFADLLGYLRPGDLMVFNNTRVIPARLFGRKATGGQLEILIERVLDEHRALAHVRASKSPKPGSRILLEGGGEAEMLARHDALFELRFDQPLLPLLERIGHMPLPPYIDRPDDTADRERYQTVYAERAGAVAAPTAGLHFDEPLLEAIREKGVETAFVTLHVGAGTFQPVRVERIEEHHMHREWLEVSQDVVDAVNACKARGGRVIAVGTTSVRSLESAAREGKIKPFSGDTDIFLYPGKPFHVVDALVTNFHLPESTLLMLVSAFAGYPETMAAYRAAVEEGYRFFSYGDAMFITRNPAPRGPEDHP

SEQ ID NO: 70902 - protein, 349 aa, unidentified
  source 1..349: note = Pseudomonas flexibilis
  REGION 1..349: note = tr|A0A1N6NP17|A0A1N6NP17_9PSED S-adenosylmethionine:tRNA ribosyltransferase-isomerase; OS = Pseudomonas flexibilis OX=706570 GN=queA PE=3 SV=1
MRVSDFHFDLPDALIARHPLAQRRASRLLVLDGPSGALAHRQFADLLGYLRPGDLMVFNNTRVIPARLFGRKATGGQLEILIERVLDEHRALAHVRASKSPKPGSRILLEGGGEAEMLARHDALFELRFDQPLLPLLERIGHMPLPPYIDRPDDTADRERYQTVYAERAGAVAAPTAGLHFDEPLLDAIREKGVETAFVTLHVGAGTFQPVRVERIEEHHMHREWLEVSQDVVDAVNACKARGGRVIAVGTTSVRSLESAAREGKIKPFSGDTDIFLYPGKPFHVVDALVTNFHLPESTLLMLVSAFAGYPETMTAYRAAVEEGYRFFSYGDAMFITRNPAPRGPEDHP

SEQ ID NO: 70903 - protein, 354 aa, unidentified
  source 1..354: note = Pseudomonas floridensis
  REGION 1..354: note = tr|A0A1X0N6S2|A0A1X0N6S2_9PSED S-adenosylmethionine:tRNA ribosyltransferase-isomerase; OS = Pseudomonas floridensis OX=1958950 GN=queA PE=3 SV=1
MRVADFTFDLPDSLIARHPLAERRSSRLLTLDGVSGELAHRQFTDLLEHLRAGDLMVFNNTRVIPARLFGQKASGGKLEILVERVLDSHRVLAHVRSSKSPKPGASILIDGGGEAEMVARHDALFELRFAEEVLPLLERVGHMPLPPYIDRPDDGADRERYQTVYAQRAGAVAAPTAGLHFDQPLMEAIAAKGVETAFVTLHVGAGTFQPVRVEQIEDHHMHSEWLEVSQEVVDAVAACRARGGRVIAVGTTSVRSLESAARDGKLKPFSGDTDIFIYPGRPFHVVDALVTNFHLPESTLLMLVSAFAGYPETMAAYAAAIEHGYRFFSYGDAMFITRNPAPTAPQESVPEDHA

SEQ ID NO: 70904 - protein, 354 aa, Pseudomonas fluorescens
  REGION 1..354: note = sp|Q4K6S8|QUEA_PSEF5 S-adenosylmethionine:tRNA ribosyltransferase-isomerase OS=Pseudomonas fluorescens (strain ATCC BAA-477 / NRRL B-23932 / Pf-5) OX=220664; GN = queAPE=3 SV=1
MRVADFTFELPDSLIARHPLAERRGSRLLTLDGPTGALAHRQFTDLLEHLRPGDLMVFNNTRVIPARLFGQKASGGKLEILVERVLDSHRVLAHVRSSKSPKPGSKILIDGGGEAEMLARHDTLFELGFAEEVLPLLDRVGHMPLPPYIDRPDEGADRERYQTVYAQRLGAVAAPTAGLHFDQPLLEAIAAKGVETAFVTLHVGAGTFQPVRVERIEDHHMHHEWLEVGQDVVDAVAACRARGGRVVAVGTTSVRSLESAARDGVLKPFSGDTDIFIYPGRPFHVVDALVTNFHLPESTLLMLVSAFAGYPETMAAYRAAVENGYRFFSYGDAMFITRNPAPTAPKDLAPEETV

SEQ ID NO: 70905 - protein, 349 aa, Pseudomonas fluorescens
  REGION 1..349: note = tr|A0A165ZE02|A0A165ZE02_PSEFL S-adenosylmethionine:tRNA ribosyltransferase-isomerase; OS = Pseudomonas fluorescens OX=294 GN=queA PE=3 SV=1
MRVADFTFELPDSLIARHPLAERRASRLLTLDGVSGAMAHRQFTDLLEHLRPGDLMVFNNTRVIPARLFGQKASGGKLEILVERVLDSHRVLAHVRSSKSPKPGSSILIDGGGEAVMVARHDALFELEFAEEVLPLLDRVGHMPLPPYIDRPDEGSDRERYQTVYAERLGAVAAPTAGLHFDQPLLEAIAAKGVETAFVTLHVGAGTFQPVRVERIEDHHMHNEWLEVSQEVVDAVAACRARGGRVVAVGTTSVRSLESAARDGVLKPFSGDTDIFIYPGRPFHVVDALVTNFHLPESTLLMLVSAFAGYPEAMAAYKAAVEHGYRFFSYGDAMFITRNPAPRGPEETV

SEQ ID NO: 70906 - protein, 349 aa, unidentified
  source 1..349: note = Pseudomonas formosensis
  REGION 1..349: note = tr|A0A1I6C7X6|A0A1I6C7X6_9PSED S-adenosylmethionine:tRNA ribosyltransferase-isomerase; OS = Pseudomonas formosensis OX=1002526 GN=queA PE=3 SV=1
MRVSDFHFDLPDSLIARHPLAQRRASRLLCLDGPSGTLEHRRFAELLEYLRPGDLMVFNNTRVIPARLFGRKETGGQLEILVERVLDEHRVLAHVRASKSPKPGSRILLADDSQVSMLARHDALFELGFAEPVLPLLDRIGHMPLPPYIDRPDESADRERYQTVYAQRAGAVAAPTAGLHFDSELLAAIRDLGVETAEVTLHVGAGTFQPVRVERIEDHHMHSEWLEVGPDVVAAVQACKARGGRVIAVGTTSVRSLETAAQSGEIAPYSGDTDIFLYPGRPFHVVDALVTNFHLPESTLLMLVSAFAGYRETMAAYRAAVENGYRFFSYGDAMFITRNPDARGPEDEQ

SEQ ID NO: 70907 - protein, 353 aa, Pseudomonas fragi
  REGION 1..353: note = tr|A0A266NNX2|A0A266NNX2_PSEFR S-adenosylmethionine:tRNA ribosyltransferase-isomerase; OS = Pseudomonas fragi OX=296 GN=queA PE=3 SV=1
MRVADFTFELPDSLIARHPLAERRNSRLLTLDGESGVLAHRQFTDLLEHLCPGDLMVFNNTRVIPARLFGQKASGGKLEILVERVLDSHRVLAHVRSSKSPKPGSKILIDGGGEAEMLARHDALFELGFAEEVLPLLDRVGHMPLPPYIDRPDEGSDRERYQTVYAQRLGAVAAPTAGLHFDEPLMQAIAAKGVETAFVTLHVGAGTFQPVRVERLEDHHMHTEWLEVGQDVVDAVAACRARGGRVIAVGTTSVRSLESAARDGVLKPFSGDTDIFIFPGRPFHVVDALVTNFHLPESTLLMLVSAFAGYPETMAAYKAAVEHGYRFFSYGDAMFITRNPAPTAPAPAPEDQA

SEQ ID NO: 70908 - protein, 353 aa, Pseudomonas fragi
  REGION 1..353: note = tr|A0A267ASF2|A0A267ASF2_PSEFR S-adenosylmethionine:tRNA ribosyltransferase-isomerase; OS = Pseudomonas fragi OX=296 GN=queA PE=3 SV=1
MRVADFTFELPDSLIARHPLAERRNSRLLTLDGESGALAHRQFTDLLEHLRPGDLMVFNNTRVIPARLFGQKASGGKLEILVERVLDSHRVLAHVRSSKSPKPGSKILIDGGGEAEMLARHDALFELGFAEEVLPLLDRVGHMPLPPYIDRPDEGSDRERYQTVYAQRLGAVAAPTAGLHFDEPLMQAIAAKGVETAFVTLHVGAGTFQPVRVERLEDHHMHTEWLEVGQDVVDAVAACRARGGRVIAVGTTSVRSLESAARDGVLKPFSGDTDIFIFPGRPFHVVDALVTNFHLPESTLLMLVSAFAGYPETMAAYKAAVEHGYRFFSYGDAMFITRNPAPTAPAPAPEDQA

SEQ ID NO: 70909 - protein, 354 aa, Pseudomonas frederiksbergensis
  REGION 1..354: note = tr|A0A423HIK0|A0A423HIK0_9PSED S-adenosylmethionine:tRNA ribosyltransferase-isomerase; OS = Pseudomonas frederiksbergensis OX=104087 GN=queA PE=3; SV = 1
MRVADFTFELPDSLIARHPLAERRNSRLLTLDGVSGALAHRQFTDLLEHLRPGDLMVFNNTRVIPARLFGQKASGGKLEILVERVLDSHRVLAHVRSSKSPKPGSKILIDGGGEAEMLARHDALFELGFAEEVLPLLDRVGHMPLPPYIDRPDEGSDRERYQTVYAERLGAVAAPTAGLHFDQPLMEAIAAKGIETAFVTLHVGAGTFQPVRVEKIEDHHMHSEWLEVGQDVVDAVEACRARGGRVVAVGTTSVRSLESAARDGVLKPFSGDTDIFIYPGRPFHVVDALVTNFHLPESTLLMLVSAFAGYPETMAAYKAAVDNEYRFFSYGDAMFITRNPAPTAPKETGPEETE

SEQ ID NO: 70910 - protein, 349 aa, Pseudomonas frederiksbergensis
  REGION 1..349: note = tr|A0A1J0EP22|A0A1J0EP22_9PSED S-adenosylmethionine:tRNA ribosyltransferase-isomerase; OS = Pseudomonas frederiksbergensis OX=104087 GN=queA PE=3; SV = 1
MRVADFTFELPDSLIARHPLAERRGSRLLTLDGLSGALAHRQFTDLLEHLRPGDLMVFNNTRVIPARLFGQKASGGKLEILVERVLDSHRVLAHVRSSKSPKPGSKILIDGGGEAEMLARHDALFELGFAEEVLPLLDRVGHMPLPPYIDRPDEGSDRERYQTVYAERLGAVAAPTAGLHFDQPLLEAIAAKGVETAFVTLHVGAGTFQPVRVEKIEDHHMHSEWLEVGQDVVDAVAACRARGGRVVAVGTTSVRSLESAARDGVLKPFSGDTDIFIYPGRPFHVVDALVTNFHLPESTLLMLVSAFVGYPETMAAYKAAVEHGYRFFSYGDAMFITRNPAPRGPEDQA

SEQ ID NO: 70911 - protein, 349 aa, Pseudomonas fulva
  REGION 1..349: note = tr|F6AB06|F6AB06_PSEF1 S-adenosylmethionine:tRNA ribosyltransferase-isomerase OS=Pseudomonas fulva (strain 12-X) OX=743720 GN=queA PE=3 SV=1
MRVADFHFDLPDEQIARHPLAERRASRLLILDGASGALAHRQFADLLEYLRPGDLMVFNDTRVIPARLFGQKATGGKLEILVERVLDEHRVLAHIRSSKSPKPGSLIDIDGGAQAKMLARHDALFELRFEEPVLALLERVGHMPLPPYIDRPDEDADRERYQTVYAQKAGAVAAPTAGLHFDDALLAALSEKGVERAFVTLHVGAGTFQPVRVERIEDHHMHSEWLEVSQDVVDAVEACRARGGRVVAVGTTSVRSLESAARDGELKPFSGDTDIFIYPGRPFHVVDALVTNFHLPESTLLMLVSAFAGYPETMAAYAEAVAEGYRFFSYGDAMFITRNPAARGPEVSV

SEQ ID NO: 70912 - protein, 349 aa, Pseudomonas fulva
  REGION 1..349: note = tr|A0A0D0JRE1|A0A0D0JRE1_9PSED S-adenosylmethionine:tRNA ribosyltransferase-isomerase; OS = Pseudomonas fulva OX=47880 GN=queA PE=3 SV=1
MRVADFHFELPDEQIARHPLAERRASRLLILDGASGALAHRHFADLLEYLRPGDLMVFNNTRVIPARLFGQKASGGKLEVLIERVLDEHRVLAHVRSSKSPKPGSTIVIEGGAQAQMVARHDALFELRFDEAVLPLLERVGHMPLPPYIDRADEDADRERYQTVYAQKAGAVAAPTAGLHFDDELLAALRERGVESAFVTLHVGAGTFQPVRVERIEDHHMHSEWLEVGQDVVDAVQACRARGGRVVAVGTTSVRSLESAARDGELKPFSGDTDIFIYPGRPFHVVDALVTNFHLPESTLLMLVSAFAGYAETMAAYAQAVAEGYRFFSYGDAMFITRNPAPRGPEDHL

SEQ ID NO: 70913 - protein, 349 aa, unidentified
  source 1..349: note = Pseudomonas furukawaii
  REGION 1..349: note = tr|L8MCU7|L8MCU7_PSEFK S-adenosylmethionine:tRNA ribosyltransferase-isomerase OS=Pseudomonas furukawaii; OX = 1149133 GN=queA PE=3 SV=1
MRVADFHFELPEALIARHPLAERRASRLLVLDGARGELSHRQFPDLLDYLRPGDLMVFNNTRVIPARLFGQKASGGRLEILVERVLDSHRVLAHVRSSKSPKPGTRLLIDGGGEAEMVVRHDALFELRFAEEVLPLLDRVGHMPLPPYIDRPDEEADRERYQTVYARHAGAVAAPTAGLHFDEALLEALAAKGVERAFVTLHVGAGTFQPVRVERIEDHHMHREWLEVGQDVVDAVTACRARGGRVVAVGTTSVRSLESAARDGELKAFSGDTDIFLYPGRPFHVVDALVTNFHLPESTLLMLVSAFAGYPETMAAYAAAVEQGYRFFSYGDAMFITRNPAPRGPEDNA

SEQ ID NO: 70914 - protein, 354 aa, Pseudomonas fuscovaginae
  REGION 1..354: note = tr|A0A0M9GJP8|A0A0M9GJP8_9PSED S-adenosylmethionine:tRNA ribosyltransferase-isomerase; OS = Pseudomonas fuscovaginae OX=50340 GN=queA PE=3 SV=1
MRVADFTFELPDSLIARHPLAERRHSRLLTLDGPSGALAHRQFTDLLEYLHPGDLMVFNNTRVIPARLFGQKASGGKLEILVERVLDSHRVLAHVRSSKSPKPGSKILIEGGGEAEMLARHDALFELGFAEEVLPLLERVGHMPLPPYIDRPDEGADRERYQTVYAERLGAVAAPTAGLHFDQPLLEAIAAKGVETAFVTLHVGAGTFQPVRVERIEDHHMHSEWLEVGQDVVDAVAACRARGGRVIAVGTTSVRSLESAARDGVLKPFSGDTDIFIYPGRPFHVVDALVTNFHLPESTLLMLVSAFAGYPETMAAYQAAVDNGYRFFSYGDAMFITRNPAPTGPQASAPEDQA

SEQ ID NO: 70915 - protein, 354 aa, Pseudomonas fuscovaginae; identical to SEQ ID NO: 70841
  REGION 1..354: note = tr|A0A1H6N7X6|A0A1H6N7X6_9PSED S-adenosylmethionine:tRNA ribosyltransferase-isomerase; OS = Pseudomonas fuscovaginae OX=50340 GN=queA PE=3 SV=1

SEQ ID NO: 70916 - protein, 349 aa, unidentified; identical to SEQ ID NO: 70819
  source 1..349: note = Pseudomonas gallaeciensis
  REGION 1..349: note = tr|A0A395R7M3|A0A395R7M3_9PSED S-adenosylmethionine:tRNA ribosyltransferase-isomerase; OS = Pseudomonas gallaeciensis OX=857227 GN=queA PE=3 SV=1

SEQ ID NO: 70917 - protein, 349 aa, Pseudomonas gessardii
  REGION 1..349: note = tr|A0A1V2IZW3|A0A1V2IZW3_9PSED S-adenosylmethionine:tRNA ribosyltransferase-isomerase; OS = Pseudomonas gessardii OX=78544 GN=queA PE=3 SV=1
MRVADFTFELPDSLIARHPLAERRASRLLTLDGVSGALAHRQFTDLLEHLRPGDLMVFNNTRVIPARLFGQKASGGKLEILVERVLDTHRVLAHVRSSKSPKPGSQILIDGGGEAEMVARHDALFELKFAEDVLPLLERVGHMPLPPYIDRPDEDSDRERYQTVYSERLGAVAAPTAGLHFDQPLLDSIAAKGVETAYVTLHVGAGTFQPVRVENLEDHHMHSEWLEVSQAVVDAVNACKARGGRVVAVGTTSVRSLESAARDGVLKPFSGDTDIFIYPGRPFHVVDALVTNFHLPESTLLMLVSAFAGYPEAMAAYKAAIEQEYRFFSYGDAMFITRNPAPRGPEEQL

SEQ ID NO: 70918 - protein, 354 aa, unidentified
  source 1..354: note = Pseudomonas gingeri
  REGION 1..354: note = tr|A0A2K1FHI5|A0A2K1FHI5_9PSED S-adenosylmethionine:tRNA ribosyltransferase-isomerase; OS = Pseudomonas gingeri NCPPB 3146 = LMG 5327 OX=707248; GN = queA PE=3 SV=1
MRVADFTFELPDSLIARHPLAERRNSRLLTLDGPSGALAHRQFTDLLEHLRPGDLMVFNNTRVIPARLFGQKASGGKLEILIERVLDSHRVLAHVRSSKSPKPGSKILIEGGGEAEMLARHDTLFELGFAEEVLPLLERVGHMPLPPYIDRPDEGSDRERYQTVYAERLGAVAAPTAGLHFDQPLLEAIAAKGVETAFVTLHVGAGTFQPVRVERIEDHHMHNEWLEVSQAVVDAVAACRARAGRVIAVGTTSVRSLESAARDGVLKPFSGDTDIFIYPGRPFHVVDALVTNFHLPESTLLMLVSAFAGYPEAMAAYKAAVDNGYRFFSYGDAMFITRNPAPTGPQESASEDQA

SEQ ID NO: 70919 - protein, 354 aa, Pseudomonas graminis
  REGION 1..354: note = tr|A0A1X0VNA9|A0A1X0VNA9_9PSED S-adenosylmethionine:tRNA ribosyltransferase-isomerase; OS = Pseudomonas graminis OX=158627 GN=queA PE=3 SV=1
MRVADFTFELPDSLIARHPLAERRSSRLLTLDGPTGALAHRQFTDLLEHLRPGDLMVFNNTRVIPARLFGQKSSGGKLEILVERVLDSHRVLAHVRASKSPKPGASILIDGGGEAEMVARHDALFELRFAEEVLPLLDRVGHMPLPPYIDRPDEGADRERYQTVYAQRAGAVAAPTAGLHFDQPLLEAIAAKGVETAFVTLHVGAGTFQPVRVEQIEDHHMHSEWLEVGQDVVDAVAACRARGGRVIAVGTTSVRSLESAARNGELKPFSGDTDIFIYPGRPFHVVDALVTNFHLPESTLLMLVSAFAGYPETMAAYAAAVEHGYRFFSYGDAMFITRNPAPTAPQESAPEDHA

SEQ ID NO: 70920 - protein, 359 aa, Pseudomonas graminis
  REGION 1..359: note = tr|A0A1I0BLW9|A0A1I0BLW9_9PSED S-adenosylmethionine:tRNA ribosyltransferase-isomerase; OS = Pseudomonas graminis OX=158627 GN=queA PE=3 SV=1
MRVADFTFELPDSLIARHPLAERRSSRLLTLDGPSGALAHRQFTDLLEHLRPGDLMVFNNTRVIPARLFGQKASGGKLEILVERVLDQHRVLAHVRSSKSPKPGSTILIDGGGEAEMVARHDALFELRFAELVLPLLERVGHMPLPPYIDRPDDDADRERYQTVYAQRAGAVAAPTAGLHFDQTMMDAIAEKGVETAFVTLHVGAGTFQPVRVERIEDHHMHNEWLEVTQEVVDAVTACRARGGRVIAVGTTSVRSLESAARDGVLKPFSGDTDIFIYPGRPFHVVDALVTNFHLPESTLLMLVSAFAGYPETMAAYAAAVEHGYRFFSYGDAMFITRNPAPTAPGEYTPTESAPEDQA

SEQ ID NO: 70921 - protein, 349 aa, Pseudomonas grimontii
  REGION 1..349: note = tr|A0A1H1BU91|A0A1H1BU91_9PSED S-adenosylmethionine:tRNA ribosyltransferase-isomerase; OS = Pseudomonas grimontii OX=129847 GN=queA PE=3 SV=1
MRVADFTFELPDSLIARHPLAERRASRLLTLDGASGTLAHRQFTDLLEHLRPGDLMVFNNTRVIPARLFGQKASGGKLEILVERVLDNHRVLAHVRSSKSPKPGSSILIDGGGEAEMVARHDALFELRFAEEVLPLLERVGHMPLPPYIDRPDEDSDRERYQTVYSQRLGAVAAPTAGLHFDQLLLDAIAAKGVETAYVTLHVGAGTFQPVRVDNIEDHHMHSEWLEVSQDVVDAVNACKARGGRVVAVGTTSVRSLESAARDGVLKPFSGDTDIFIYPGRPFHVVDCLVTNFHLPESTLLMLVSAFAGYPETMAAYKAAIDNGYRFFSYGDAMFITRNPAPRGPEEQL

SEQ ID NO: 70922 - protein, 351 aa, unidentified
  source 1..351: note = Pseudomonas guangdongensis
  REGION 1..351: note = tr|A0A1H2GJN6|A0A1H2GJN6_9PSED S-adenosylmethionine:tRNA ribosyltransferase-isomerase; OS = Pseudomonas guangdongensis OX=1245526 GN=queA PE=3 SV=1
MRVADFDFELPDELIARHPLAERRASRLLVLDGPSGELRHRQFPDLLDYLRPGDLMVFNDTRVIPARLFGQKASGGRLEILVERLLDEHRVLAHVRASKSPKPGSLIHIDGGGAAEMLARHDALFELRFDEPVLALLERVGHMPLPPYIDRPDEDADRERYQTVYSDKAKAGAVAAPTAGLHFDDALLAAIRERGVDIAFVTLHVGAGTFQPVRVERIEDHHMHSEWLQVGQDVVDAVQACKARGGRVVAVGTTSVRSLESAAQGGVLKPFSGDTDIFLYPGRPFHVVDALVTNFHLPESTLLMLVSAFAGYPETMAAYRAAVAEGYRFFSYGDAMFITRNPAPRGPEETP

SEQ ID NO: 70923 - protein, 349 aa, unidentified
  source 1..349: note = Pseudomonas guariconensis
  REGION 1..349: note = tr|A0A2N5QFJ6|A0A2N5QFJ6_9PSED S-adenosylmethionine:tRNA ribosyltransferase-isomerase; OS = Pseudomonas guariconensis OX=1288410 GN=queA PE=3 SV=1
MRVADFSFELPDSLIARHPLAERHGSRLLVLDGPSGELAHRQFTDLLEYLRPGDLMIFNNTRVIPARLFGQKASGGKLEVLVERVLDSYRVLAHVRASKAPKPGTQILIDGGGQAEMVARHETLFELRFTEEVLPLLDRVGHMPLPPYIDRPDEGADRERYQTVYAERAGAVAAPTAGLHFDEALLERIAAKGVERAFVTLHVGAGTFQPVRVDKIEDHHMHKEWLEVSQEVVDAVQACRARGGRVIAVGTTSVRSLESAARDGQLKAFSGDTDIFIYPGRPFHVVDALVTNFHLPESTLLMLVSAFAGYPETMAAYAAAVEQGYRFFSYGDAMFITRNPAPRGPEDQA

SEQ ID NO: 70924 - protein, 349 aa, unidentified
  source 1..349: note = Pseudomonas guariconensis
  REGION 1..349: note = tr|A0A1G6TRP1|A0A1G6TRP1_9PSED S-adenosylmethionine:tRNA ribosyltransferase-isomerase; OS = Pseudomonas guariconensis OX=1288410 GN=queA PE=3 SV=1
MRVADFSFELPDSLIARHPLAERHGSRLLVLDGPSGELAHRQFTDLLEYLRPGDLMIFNNTRVIPARLFGQKASGGKLEVLVERVLDSYRVLAHVRASKAPKPGTQILIDGGGEAEMVARHETLFELRFTEEVLPLLDRVGHMPLPPYIDRPDEGADRERYQTVYAERAGAVAAPTAGLHFDEALLERIAAKGVERAFVTLHVGAGTFQPVRVDKIEDHHMHKEWLEVSQEVVDAVQACRARGGRVIAVGTTSVRSLESAARDGQLKAFSGDTDIFIYPGRPFHVVDALVTNFHLPESTLLMLVSAFAGYPETMAAYAAAVEQGYRFFSYGDAMFITRNPAPRGPEDQA

SEQ ID NO: 70925 - protein, 347 aa, unidentified
  source 1..347: note = Pseudomonas guguanensis
  REGION 1..347: note = tr|A0A1H0X3E7|A0A1H0X3E7_9PSED S-adenosylmethionine:tRNA ribosyltransferase-isomerase; OS = Pseudomonas guguanensis OX=1198456 GN=queA PE=3 SV=1
MRVADFHFDLPESLIARHPLAERRASRLLQLDGPSGALRHGQFTDLLEQLRPGDLMVFNNTRVIPARLFGQKASGGKLEVLVERVLDQHRVLAHVRSSKSPKPGSQILIDGGGEAEMVARHDALFELRFAEPVLPLLERVGHMPLPPYIDRPDDEADRERYQTVYAEKAGAVAAPTAGLHFDDELLAAIRAKGVETAFVTLHVGAGTFQPVRVERIEDHHMHSEWLEVSQDVVDAVAACRARGGRVVAVGTTSVRSLETAAQSGELKPFSGDTDIFIYPGRPFHVVDALVTNFHLPESTLLMLVSAFAGYAETMAAYRAAVEQGYRFFSYGDAMFITRNPAARGPEV

SEQ ID NO: 70926 - protein, 349 aa, Pseudomonas guineae
  REGION 1..349: note = tr|A0A1I3DN70|A0A1I3DN70_9PSED S-adenosylmethionine:tRNA ribosyltransferase-isomerase; OS = Pseudomonas guineae OX=425504 GN=queA PE=3 SV=1
MRVADFNFELPDALIARHPLAERRASRLLVLDGPTGELAHQQFSDLLDYLRPGDLMVFNNTRVIPARLFGQKASGGKLEVLVERVLDSHRVLAHVRSSKSPKPGSSILIDGGGEAEMVARHDGLFELRFSEEVLPLLERVGHMPLPPYIDRPDEQADRERYQTVYADRAGAVAAPTAGLHFDQQLLSAITEMGVESAFVTLHVGAGTFQPVRVERIEDHHMHTEWLEVGQDVVDAVAACRARGGRVIAVGTTSVRSLESAARDGVLKAFSGDTDIFIYPGRPLHVVDALVTNFHLPESTLLMLVSAFAGYPETMAAYQAAIAGKYRFFSYGDAMFITRNPAPRGPEEQL

SEQ ID NO: 70927 - protein, 353 aa, unidentified
  source 1..353: note = Pseudomonas helleri
  REGION 1..353: note = tr|A0A0J6I7Z1|A0A0J6I7Z1_9PSED S-adenosylmethionine:tRNA ribosyltransferase-isomerase; OS = Pseudomonas helleri OX=1608996 GN=queA PE=3 SV=1
MRVADFTFELPDSLIARHPLAERRNSRLLTLDGESGALAHRQFTDLLEHLRPGDLMVFNNTRVIPARLFGQKASGGKLEILVERVLDSHRVLAHVRSSKSPKPGSKILIDGGGEAEMLARHDALFELGFTDEVLPLLDRVGHMPLPPYIDRPDEGADRERYQTVYAQRLGAVAAPTAGLHFDEPLMQAIAAKGVETAFVTLHVGAGTFQPVRVERLEDHHMHTEWLEVGQDVVDAVAACRARGGRVIAVGTTSVRSLESAARDGVLKPFSGDTDIFIFPGRPFHVVDALVTNFHLPESTLLMLVSAFAGYPETMAAYKAAVEHGYRFFSYGDAMFITRNPAPTAPAPAPEDQA

SEQ ID NO: 70928 - protein, 354 aa, unidentified
  source 1..354: note = Pseudomonas helmanticensis
  REGION 1..354: note = tr|A0A4R7UXM8|A0A4R7UXM8_9PSED S-adenosylmethionine:tRNA ribosyltransferase-isomerase; OS = Pseudomonas helmanticensis OX=1471381 GN=queA PE=3 SV=1
MRVADFTFELPDSLIARHPLAERRGSRLLTLDGPSGALAHRQFTDLLEHLRPGDLMVFNNTRVIPARLFGQKASGGKLEILVERVLDTHRVLAHVRSSKSPKPGSRILIDGGGEAEMLARHDALFELGFAEEVLPLLDRVGHMPLPPYIDRPDEGSDRERYQTVYAEKLGAVAAPTAGLHFDQSLMEAIAAKGVETTFVTLHVGAGTFQPVRVEKLEDHHMHTEWLEVGQDVVDAVAACRARGGRVIAVGTTSVRSLESAARDGVLKPFSGDTDIFIFPGRPFHVVDALVTNFHLPESTLLMLVSAFAGYPETMAAYKAAVDNGYRFFSYGDAMFITRNPAPTAPKETGPEETE

SEQ ID NO: 70929 - protein, 349 aa, unidentified
  source 1..349: note = Pseudomonas hunanensis
  REGION 1..349: note = tr|A0A2I0CCX7|A0A2I0CCX7_9PSED S-adenosylmethionine:tRNA ribosyltransferase-isomerase; OS = Pseudomonas hunanensis OX=1247546 GN=queA PE=3 SV=1
MRVADFSFELPDSLIARHPLAERHGSRLLVLDGPTGALAHRQFPDLLDYLRPGDLMVFNNTRVIPARLFGQKASGGKLEVLVERVLDSHRVLAHVRASKAPKVGAVILIDGGGEAEMVARHDTLFELRFTEEVLPLLDRVGHMPLPPYIDRPDEGADRERYQTVYAQRAGAVAAPTAGLHFDEALLEKIADKGVERAFVTLHVGAGTFQPVRVDKIEDHHMHKEWLEVGQDVVDAIEACRARGGRVIAVGTTSVRSLESAARDGVLKAFSGDTDIFIYPGRPFHVVDALVTNFHLPESTLLMLVSAFAGYPETMAAYAAAVEHGYRFFSYGDAMFITRNPAPRGPEDQA

SEQ ID NO: 70930 - protein, 353 aa, unidentified
  source 1..353: note = Pseudomonas hussainii
  REGION 1..353: note = tr|A0A1H7GID7|A0A1H7GID7_9PSED S-adenosylmethionine:tRNA ribosyltransferase-isomerase; OS = Pseudomonas hussainii OX=1429083 GN=queA PE=3 SV=1
MRVADFQFDLPPAQIAHYPLAERRASRLLVLDGQSGALSHRHFADVLEYLKPGDLMVFNNTRVIPARVFGRKASGGKLEMLVERVVSDTRVLAHVRASKSPKPGTELLLGEEGEEISVTMLGRQGELFELEFPESVLPLLERIGHMPLPPYIERADEQDDRERYQTVYASRAGAVAAPTAGLHFDQALLDALAEKGIERAFVTLHVGAGTFQPVRVEKIEDHHMHSEWLEVSPEVVAQIEACRARGGRVVAVGTTSVRSLETAARSGTLAPYSGETDIFIYPGYRFNVVDALVTNFHLPESTLLMLVSAFAGYPEAMQAYRTAVAEGYRFFSYGDAMFITRNPAPTGPEDERS

SEQ ID NO: 70931 - protein, 347 aa, Pseudomonas indica
  REGION 1..347: note = tr|A0A1G9JI58|A0A1G9JI58_9PSED S-adenosylmethionine:tRNA ribosyltransferase-isomerase; OS = Pseudomonas indica OX=137658 GN=queA PE=3 SV=1
MRVSDFHFDLPESLIARHPLAERRASRLLVLDGPTGSLAHRRFPDLLEYLRPGDLMVFNNTRVIPARLFGQKASGGKLEILIERVLDSHRVLAHVRSSKSPKPGSKILLEGGGEAEMLARHDALFELAFADEVLPLLERVGHMPLPPYIDRPDDAADRERYQTVYAERAGAVAAPTAGLHFDTALLEAIREKGVETAFVTLHVGAGTFQPVRVDRIEDHHMHREWLEVSQDVVDAVAACRALGGRVVAVGTTSVRSLESAARDGALEPFSGDTDIFIFPGYRFRVVDALVTNFHLPESTLLMLVSAFAGYPEAMAAYRAAVEQEYRFFSYGDAMFITRNPAPRGPED

SEQ ID NO: 70932 - protein, 347 aa, unidentified
  source 1..347: note = Pseudomonas indoloxydans
  REGION 1..347: note = tr|A0A2T5PCY0|A0A2T5PCY0_9PSED S-adenosylmethionine:tRNA ribosyltransferase-isomerase; OS = Pseudomonas indoloxydans OX=404407 GN=queA PE=3 SV=1
MRVADFHFDLPESLIARHPLAERRASRLLQLDGPTGALRHGQFTDVLEQLRPGDLMVFNDTRVIPARLFGQKASGGKLEVLVERVLDQYRVLAHVRSSKSPKPGSQILIDGGAEAEMVARHDALFELRFAEPVLPLLERVGHMPLPPYIDRPDDEADRERYQTVYAQKAGAVAAPTAGLHFDDELLAAIRAKGVETAFVTLHVGAGTFQPVRVERIEDHHMHSEWLEVGQDVVDAVAACRARGGRVVAVGTTSVRSLETAARDGELKPFSGDTDIFIYPGRPFHVVDALVTNFHLPESTLLMLVSAFAGYAETMAAYREAVAQGYRFFSYGDAMFITRNPAARGPEV

SEQ ID NO: 70933 - protein, 349 aa, Pseudomonas japonica
  REGION 1..349: note = tr|A0A239D0W7|A0A239D0W7_9PSED S-adenosylmethionine:tRNA ribosyltransferase-isomerase; OS = Pseudomonas japonica OX=256466 GN=queA PE=3 SV=1
MRVADFSFELPDSLIARHPLAERRASRLLVLDGPSGALAHRHFGDLLDYLRPGDLMVFNNTRVIPARLFGQKASGGKLEILVERVLDSHRVLAHVRSSKAPKPGTQILVDGGGEAEMVARHDTLFELRFTEEVLPLLDRVGHMPLPPYIDRPDEGADRERYQTVYAERAGAVAAPTAGLHFDEELLAKIAEKGVDTAFVTLHVGAGTFQPVRVERIEDHHMHKEWLEVGQDVVDAVAACRARGGRVVAVGTTSVRSLESAARDGVLKPFSGDTDIFIFPGRPFHVVDALVTNFHLPESTLLMLVSAFAGYPETMAAYAAAVANEYRFFSYGDAMFITRNPAPRGPEDQA

SEQ ID NO: 70934 - protein, 354 aa, Pseudomonas jessenii
  REGION 1..354: note = tr|A0A5C4KZG2|A0A5C4KZG2_9PSED S-adenosylmethionine:tRNA ribosyltransferase-isomerase; OS = Pseudomonas jessenii OX=77298 GN=queA PE=3 SV=1
MRVADFTFELPDSLIARHPLAERRGSRLLTLDGPSGALAHRQFTDLLEHLRPGDLMVFNNTRVIPARLFGQKASGGKLEILIERVLDSHRVLAHVRSSKSPKPGSKILIDGGGEAEMLARHDALFELGFAEEVLPLLDRVGHMPLPPYIDRPDEGSDRERYQTVYAQRLGAVAAPTAGLHFDQPLMEAIAAKGVETAFVTLHVGAGTFQPVRVDKIEDHHMHSEWLEVGQDVVDAVAACRARGGRVIAVGTTSVRSLESAARDGVLKPFSGDTDIFIYPGRPFHVVDALVTNFHLPESTLLMLVSAFAGYPETMAAYKAAVDNGYRFFSYGDAMFITRNPAPTAPEHTGPEETE

SEQ ID NO: 70935 - protein, 354 aa, Pseudomonas jessenii
  REGION 1..354: note = tr|A0A370S7U0|A0A370S7U0_9PSED S-adenosylmethionine:tRNA ribosyltransferase-isomerase; OS = Pseudomonas jessenii OX=77298 GN=queA PE=3 SV=1
MRVADFTFELPDSLIARHPLAERRGSRLLTLDGVSGALAHRQFTDLLEHLRSGDLMVFNNTRVIPARLFGQKASGGKLEILIERVLDTHRVLAHVRSSKSPKPGSKILIDGGGEAEMLARHDALFELGFDEEVLPLLDRVGHMPLPPYIDRPDEGSDRERYQTVYAERLGAVAAPTAGLHFDQALMEAIAAKGVETTFVTLHVGAGTFQPVRVEKLEDHHMHTEWLEVGQDVVDAVAACRARGGRVIAVGTTSVRSLESAARDGVLKPFSGDTDIFIFPGRPFHVVDALVTNFHLPESTLLMLVSAFAGYPETMAAYKAAVENGYRFFSYGDAMFITRNPAPTAPSESDPEETV

SEQ ID NO: 70936 - protein, 347 aa, Pseudomonas jinjuensis
  REGION 1..347: note = tr|A0A1H0QX04|A0A1H0QX04_9PSED S-adenosylmethionine:tRNA ribosyltransferase-isomerase; OS = Pseudomonas jinjuensis OX=198616 GN=queA PE=3 SV=1
MRVADFHFDLPDNLIARHPLAERRASRLLVLDGPSGELAHRQFADVLELLRPGDLIVFNNTRVIPARLFGQKASGGKLEILVERVLDSHRVLAHVRSSKSPKPGSTILIEGGGEAEMLQRHDALFELRFAEEVLPLLERVGHMPLPPYIDRPDEADDRERYQTVYAERAGAVAAPTAGLHFDEALLEAIRAKGVETAFVTLHVGAGTFQPVRVERIEEHRMHHEWLEVGQDVVDAVAACRARGGRVVAVGTTSVRSLESAARDGELKPFSGDTDIFIYPGRPFHVVDALVTNFHLPESTLLMLVSAFAGYPETMAAYATAVEQGYRFFSYGDAMFITRNPAPRGPEV

SEQ ID NO: 70937 - protein, 349 aa, unidentified
  source 1..349: note = Pseudomonas kairouanensis
  REGION 1..349: note = tr|A0A4Z0AIQ8|A0A4Z0AIQ8_9PSED S-adenosylmethionine:tRNA ribosyltransferase-isomerase; OS = Pseudomonas kairouanensis OX=2293832 GN=queA PE=3 SV=1
MRVADFTFELPDSLIARHPLAERRASRLLTLDGVSGALEHRQFTDLLEHLRPGDLMVFNNTRVIPARLFGQKASGGKLEILVERVLDSHRVLAHVRSSKSPKPGSKILIDGGGEAEMLARHDALFELKFAEEVLPLLERVGHMPLPPYIDRPDEDSDRERYQTVYSQRLGAVAAPTAGLHFDQPLLDAIAAKGVETAYVTLHVGAGTFQPVRVDNIEDHHMHSEWLEVTQEVVDAVAACKARGGRVVAVGTTSVRSLESAARDGVLKPFSGDTDIFIFPGRPFHVVDCLVTNFHLPESTLLMLVSAFAGYPETMAAYQAAIANEYRFFSYGDAMFITRNPAPRGPEEQL

SEQ ID NO: 70938 - protein, 349 aa, Pseudomonas kilonensis
  REGION 1..349: note = tr|A0A2U1BWL2|A0A2U1BWL2_9PSED S-adenosylmethionine:tRNA ribosyltransferase-isomerase; OS = Pseudomonas kilonensis OX=132476 GN=queA PE=3 SV=1
MRVADFTFELPDSLIARHPLAERRASRLLTLDGVSGAMAHRQFTDLLEHLRPGDLMVFNNTRVIPARLFGQKASGGKLEILVERVLDSHRVLAHVRSSKSPKPGSSILIDGGGEARMVARHDALFELEFAEEVLPLLDRVGHMPLPPYIDRPDEGSDRERYQTVYAERLGAVAAPTAGLHFDQPLLEAIAAKGVETAFVTLHVGAGTFQPVRVERIEDHHMHNEWLEVSQEVVDAVAACRARAGRVVAVGTTSVRSLESAARDGVLKPFSGDTDIFIYPGRPFHVVDALVTNFHLPESTLLMLVSAFAGYPEAMAAYKAAVEHGYRFFSYGDAMFITRNPAPRGPEETV

SEQ ID NO: 70939 - protein, 349 aa, Pseudomonas kilonensis
  REGION 1..349: note = tr|A0A1H5GZW1|A0A1H5GZW1_9PSED S-adenosylmethionine:tRNA ribosyltransferase-isomerase; OS = Pseudomonas kilonensis OX=132476 GN=queA PE=3 SV=1
MRVADFTFELPDSLIARHPLAERRASRLLTLDGVSGAMAHRQFTDLLEHLRPGDLMVFNNTRVIPARLFGQKASGGKLEILVERVLDSHRVLAHVRSSKSPKPGSSILIDGGGEARMVARHDALFELAFAEEVLPLLDRVGHMPLPPYIDRPDEGSDRERYQTVYAERLGAVAAPTAGLHFDQPLLEAIAAKGVETAFVTLHVGAGTFQPVRVERIEDHHMHNEWLEVSQEVVDAVAACRARGGRVVAVGTTSVRSLESAARDGVLKPFSGDTDIFIYPGRPFHVVDALVTNFHLPESTLLMLVSAFAGYPEAMAAYKAAVEHGYRFFSYGDAMFITRNPAPRGPEETV

SEQ ID NO: 70940 - protein, 347 aa, Pseudomonas knackmussii
  REGION 1..347: note = tr|A0A024HD39|A0A024HD39_PSEKB S-adenosylmethionine:tRNA ribosyltransferase-isomerase; OS = Pseudomonas knackmussii (strain DSM 6978 / LMG 23759 / B13) OX=1301098 GN=qu eA PE=3 SV=1
MRVADFHFDLPEALIARHPLAERRASRLLVLDGPSGTLSHRHFADLLEYLRPGDLMVFNNTRVIPARLFGQKASGGKLEILVERVLDQRRVLAHVRSSKSPKPGSKILIDGGGEAEMLQRHDALFELAFSEDVLPLLERVGHMPLPPYIDRPDEAADRERYQTVYAERAGAVAAPTAGLHFDQALLEAIRDKGVETAFVTLHVGAGTFQPVRVERIEDHHMHSEWLEVSQDVVDAVAACRARGGRVVAVGTTSVRSLESAARDGTLKPFSGDTDIFLFPGRPFHVVDALVTNFHLPESTLLMLVSAFAGYPETMAAYAAAVEQQYRFFSYGDAMFITRNPAPRGPED

SEQ ID NO: 70941 - protein, 354 aa, Pseudomonas koreensis
  REGION 1..354: note = tr|A0A2R4Q1B6|A0A2R4Q1B6_9PSED S-adenosylmethionine:tRNA ribosyltransferase-isomerase; OS = Pseudomonas koreensis OX=198620 GN=queA PE=3 SV=1
MRVADFTFELPDSLIARHPLAERRGSRLLTLDGPSGALAHRQFTDLLEHLRPGDLMVFNNTRVIPARLFGQKASGGKLEILIERVLDTHRVLAHVRSSKSPKPGSKILIDGGGEAEMLARHDALFELGFAEEVLPLLDRVGHMPLPPYIDRPDEGSDRERYQTVYAQRLGAVAAPTAGLHFDQPLMEAIAAKGVETAFVTLHVGAGTFQPVRVDKIEDHHMHSEWLEVGQDVVDAVAACRERGGRVIAVGTTSVRSLESAARDGVLKPFSGDTDIFIYPGRPFHVVDALVTNFHLPESTLLMLVSAFAGYPETMAAYKAAVDNGYRFFSYGDAMFITRNPAPTAPEHTGPEETE

SEQ ID NO: 70942 - protein, 354 aa, Pseudomonas koreensis
  REGION 1..354: note = tr|A0A1A9JKT4|A0A1A9JKT4_9PSED S-adenosylmethionine:tRNA ribosyltransferase-isomerase; OS = Pseudomonas koreensis OX=198620 GN=queA PE=3 SV=1
MRVADFTFELPDSLIARHPLAERRASRLLTLDGVSGALAHRQFTDLLEHLRPGDLMVFNNTRVIPARLFGQKASGGKLEILIERVLDTHRVLAHVRSSKSPKPGTKILIDGGGEAEMLARHDALFELGFDEEVLPLLDRVGHMPLPPYIDRPDEGSDRERYQTVYAQRLGAVAAPTAGLHFDQPLMEAIAAKGVETAFVTLHVGAGTFQPVRVDKIEDHHMHSEWLEVGQDVVDAVAACRARGGRVIAVGTTSVRSLESAARDGVLKPFSGDTDIFIYPGRPFHVVDALVTNFHLPESTLLMLVSAFAGYPETMAAYKAAVDNGYRFFSYGDAMFITRNPAPTAPEQTGPEETE

SEQ ID NO: 70943 - protein, 354 aa, unidentified
  source 1..354: note = Pseudomonas kribbensis
  REGION 1..354: note = tr|A0A345RVJ8|A0A345RVJ8_9PSED S-adenosylmethionine:tRNA ribosyltransferase-isomerase; OS = Pseudomonas kribbensis OX=1628086 GN=queA PE=3 SV=1
MRVADFTFELPDSLIARHPLAERRGSRLLTLDGVSGALAHRQFTDLLEHLRPGDLMVFNNTRVIPARLFGQKASGGKLEILIERVLDTHRVLAHVRSSKSPKPGSKILIDGGGEAEMLARHDALFELGFSEEVLPLLDRVGHMPLPPYIDRPDEGSDRERYQTVYAEKLGAVAAPTAGLHFDQTLMEAIAAKGVETAFVTLHVGAGTFQPVRVEKIEDHHMHSEWLEVGQDVVDAVAACRARGGRVIAVGTTSVRSLESAARDGVLKPFSGDTDIFIYPGRPFHVVDALVTNFHLPESTLLMLVSAFAGYPETMAAYKAAVDNGYRFFSYGDAMFITRNPAPTAPEQTGPEETE

SEQ ID NO: 70944 - protein, 354 aa, unidentified
  source 1..354: note = Pseudomonas kribbensis
  REGION 1..354: note = tr|A0A4Y8VA20|A0A4Y8VA20_9PSED S-adenosylmethionine:tRNA ribosyltransferase-isomerase; OS = Pseudomonas kribbensis OX=1628086 GN=queA PE=3 SV=1
MRVADFTFELPDSLIARHPLAERRGSRLLTLDGVSGALAHRQFTDLLEHLRPGDLMVFNNTRVIPARLFGQKASGGKLEILIERVLDTHRVLAHVRSSKSPKPGSKILIDGGGEAEMLARHDALFELGFSEEVLPLLDRVGHMPLPPYIDRPDEGSDRERYQTVYAEKLGAVAAPTAGLHFDQTLMEAIAAKGVETAFVTLHVGAGTFQPVRVEKIEDHHMHTEWLEVGQDVVDAVAACRARGGRVIAVGTTSVRSLESAARDGVLKPFSGDTDIFIYPGRPFHVVDALVTNFHLPESTLLMLVSAFAGYPETMAAYKAAVDNGYRFFSYGDAMFITRNPAPTAPEQTGPEETE

SEQ ID NO: 70945 - protein, 349 aa, unidentified
  source 1..349: note = Pseudomonas kunmingensis
  REGION 1..349: note = tr|A0A2N8SCA6|A0A2N8SCA6_9PSED S-adenosylmethionine:tRNA ribosyltransferase-isomerase; OS = Pseudomonas kunmingensis OX=1211807 GN=queA PE=3 SV=1
MQVADFFFQLPDALIARHPLAERRASRLLVLEGETGKLSHRNFADLLDHVRPGDLMVFNNTRVIPARLFGQKATGGKLEILVERVVGNRSVLAHVRSSKSPKAGSKILLDGGGEAEMIARHDALFELEFDEDVLPLLERIGHMPLPPYIDRPDDVADRERYQTVYAQRAGAVAAPTAGLHFDEALLQTLRESGVETAYVTLHVGAGTFQPVRVGRIEEHHMHREWLEVGQDVVDAVAACRSRGGRVIAVGTTSVRSLETAARDGELKPFSGDTDIFIYPGKSFHVVDALVTNFHLPESTLLMLVSAFAGYPETMAAYAEAVAQRYRFFSYGDAMFITRNPAPRGPEETQ

SEQ ID NO: 70946 - protein, 349 aa, unidentified
  source 1..349: note = Pseudomonas kuykendallii
  REGION 1..349: note = tr|A0A2W5D5S4|A0A2W5D5S4_9PSED S-adenosylmethionine:tRNA ribosyltransferase-isomerase; OS = Pseudomonas kuykendallii OX=1007099 GN=queA PE=3 SV=1
MRVSDFHFDLPESLIARYPLAERRASRLLVLDGESGALAHRRFTDLLDHLRPGDLMVFNDTRVIPARLFGQKASGGKLEILVERVLDEYRVLAHVRSSKSPKPGTEILVEGGGRAEMLARHDALFELRFDEPVLALLDRVGHMPLPPYIVRADDAADRERYQTVYAQRSGAVAAPTAGLHFDEALLESIRAKGVETAFVTLHVGAGTFQPVRVERIEDHPMHREWLEVSQDVVDAVAACRARGGRVIAVGTTSVRSLESAARDGQLKAFSGDTDIFIYPGRPFHVVDALVTNFHLPESTLLMLVSAFAGYPETMAAYAAAVENGYRFFSYGDAMYITRNPAARGPEDFA

SEQ ID NO: 70947 - protein, 349 aa, unidentified
  source 1..349: note = Pseudomonas kuykendallii
  REGION 1..349: note = tr|A0A1H2XJA7|A0A1H2XJA7_9PSED S-adenosylmethionine:tRNA ribosyltransferase-isomerase; OS = Pseudomonas kuykendallii OX=1007099 GN=queA PE=3 SV=1
MRVSDFHFDLPESLIARYPLAERRASRLLVLDGESGALAHRRFTDLLDHLRPGDLMVFNDTRVIPARLFGQKASGGKLEILVERVLDEYRVLAHVRSSKSPKPGTEILVEGGGRAEMLARHDALFELRFDEPALALLDRVGHMPLPPYIVRADDAADRERYQTVYAQRSGAVAAPTAGLHFDEALLESIRAKGVETAFVTLHVGAGTFQPVRVERIEDHPMHREWLEVSQGVVDAVAACRARGGRVIAVGTTSVRSLESAARDGQLKAFSGDTDIFIYPGRPFHVIDALVTNFHLPESTLLMLVSAFAGYPETMAAYAAAVENGYRFFSYGDAMYITRNPAARGPEDFA

SEQ ID NO: 70948 - protein, 349 aa, unidentified
  source 1..349: note = Pseudomonas lactis
  REGION 1..349: note = tr|A0A0R3CS40|A0A0R3CS40_9PSED S-adenosylmethionine:tRNA ribosyltransferase-isomerase; OS = Pseudomonas lactis OX=1615674 GN=queA PE=3 SV=1
MRVADFTFELPDSLIARHPLAERRASRLLTLDGVSGALAHRQFTDLLEHLRPGDLMVFNNTRVIPARLFGQKASGGKLEILVERVLDSHRVLAHVRSSKSPKPGSSILIEGGGEAEMVARHDALFELKFAEEVLPLLERVGHMPLPPYIDRPDEDADRERYQTVYSQRLGAVAAPTAGLHFDQPLLDAIAAKGVDTAYVTLHVGAGTFQPVRVDNIEDHHMHSEWLEVSQDVVDAVAACKARGGRVVAVGTTSVRSLESAARDGVLKPFSGDTDIFIFPGRPFHVVDCLVTNFHLPESTLLMLVSAFAGYPETMAAYQAAIANEYRFFSYGDAMFITRNPAPRGPEDNL

SEQ ID NO: 70949 - protein, 349 aa, unidentified; identical to SEQ ID NO: 70845
  source 1..349: note = Pseudomonas lactis
  REGION 1..349: note = tr|I4KBZ5|I4KBZ5_9PSED S-adenosylmethionine:tRNA ribosyltransferase-isomerase OS=Pseudomonas lactis; OX = 1615674 GN=queA PE=3 SV=1

SEQ ID NO: 70950 - protein, 354 aa, unidentified
  source 1..354: note = Pseudomonas laurylsulfatiphila
  REGION 1..354: note = tr|A0A2S6FGX5|A0A2S6FGX5_9PSED S-adenosylmethionine:tRNA ribosyltransferase-isomerase; OS = Pseudomonas laurylsulfatiphila OX=2011015 GN=queA PE=3; SV = 1
MRVADFTFELPDSLIARHPLAERRNSRLLTLDGVSGALAHRQFTDLLEHLRPGDLMVFNNTRVIPARLFGQKASGGKLEILVERVLDSHRVLAHVRSSKSPKPGSKILIDGGGEAEMLARHDALFELGFTEEVLPLLDRVGHMPLPPYIDRPDEGADRERYQTVYAERLGAVAAPTAGLHFDQVLMEAIAAKGVETAFVTLHVGAGTFQPVRVEKIEDHHMHSEWLEVGQDVVDAVAACRARGGRVVAVGTTSVRSLESAARDGVLKPFSGDTDIFIYPGRPFHVVDALVTNFHLPESTLLMLVSAFAGYPETMAAYKAAVDNGYRFFSYGDAMFITRNPAPTAPKESGPEETV

SEQ ID NO: 70951 - protein, 354 aa, unidentified
  source 1..354: note = Pseudomonas laurylsulfativorans
  REGION 1..354: note = tr|A0A2S3VS48|A0A2S3VS48_9PSED S-adenosylmethionine:tRNA ribosyltransferase-isomerase; OS = Pseudomonas laurylsulfativorans OX=1943631 GN=queA PE=3; SV = 1
MRVADFTFELPDSLIARHPLAERRNSRLLTLDGVSGALAHRQFTDLLEHLRPGDLMVFNNTRVIPARLFGQKASGGKLEILVERVLDSHRVLAHVRSSKSPKPGSKILIDGGGEAEMLARHDALFELGFAEEVLPLLDRVGHMPLPPYIDRPDEGADRERYQTVYAERLGAVAAPTAGLHFDQVLMEAIAAKGVETAFVTLHVGAGTFQPVRVEKLEDHHMHSEWLEVGQDVVDAVAACRARGGRVVAVGTTSVRSLESAARDGVLKPFSGDTDIFIYPGRPFHVVDALVTNFHLPESTLLMLVSAFAGYPETMAAYKAAVDNGYRFFSYGDAMFITRNPAPTAPKESGPEETV

SEQ ID NO: 70952 - protein, 349 aa, Pseudomonas libanensis
  REGION 1..349: note = tr|A0A0R2YDI2|A0A0R2YDI2_9PSED S-adenosylmethionine:tRNA ribosyltransferase-isomerase; OS = Pseudomonas libanensis OX=75588 GN=queA PE=3 SV=1
MRVADFTFELPDSLIARHPLAERRASRLLTLDGVSGVLAHRQFTDLLEHLRPGDLMVFNNTRVIPARLFGQKASGGKLEILVERVLDSHRVLAHVRSSKSPKPGSLILIDGGGEAEMVARHDALFELRFAEEVLPLLERVGHMPLPPYIDRPDEDSDRERYQTVYSQRLGAVAAPTAGLHFDQPLLDAIAAKGVESAYVTLHVGAGTFQPVRVENIEDHHMHSEWLEVSQDVVDAVNACKARGGRVVAVGTTSVRSLESAARDGVLKPFSGDTDIFIYPGRPFHVVDCLVTNFHLPESTLLMLVSAFAGYPETMAAYQAAIANEYRFFSYGDAMFITRNPAPRGPEDNL

SEQ ID NO: 70953 - protein, 349 aa, Pseudomonas lini
  REGION 1..349: note = tr|A0A0J6KCJ4|A0A0J6KCJ4_9PSED S-adenosylmethionine:tRNA ribosyltransferase-isomerase; OS = Pseudomonas lini OX=163011 GN=queA PE=3 SV=1
MRVADFTFELPDSLIARHPLAERRGSRLLTLDGVSGALAHRQFTDLLEHLRPGDLMVFNNTRVIPARLFGQKASGGKLEILVERVLDSHRVLAHVRSSKSPKPGSKILIDGGGEAEMLARHDALFELGFAEEVLPLLDRVGHMPLPPYIDRPDEGSDRERYQTVYAERLGAVAAPTAGLHFDQPLMEAIAAKGIETAFVTLHVGAGTFQPVRVEKIEDHHMHSEWLEVGQDVVDAVEACRARGGRVVAVGTTSVRSLESAARDGVLKPFSGDTDIFIYPGRPFHVVDALVTNFHLPESTLLMLVSAFAGYPETMAAYKAAVDNEYRFFSYGDAMFITRNPAPRGPEETE

SEQ ID NO: 70954 - protein, 354 aa, Pseudomonas lini
  REGION 1..354: note = tr|A0A423IUQ6|A0A423IUQ6_9PSED S-adenosylmethionine:tRNA ribosyltransferase-isomerase; OS = Pseudomonas lini OX=163011 GN=queA PE=3 SV=1
MRVADFTFELPDSLIARHPLAERRNSRLLTLDGVSGALAHRQFTDLLEHLRPGDLMVFNNTRVIPARLFGQKASGGKLEILVERVLDSHRVLAHVRSSKSPKPGSKILIDGGGEAEMLARHDALFELGFAEEVLPLLDRVGHMPLPPYIDRPDEGSDRERYQTVYAERLGAVAAPTAGLHFDQPLMEAIAAKGVETAFVTLHVGAGTFQPVRVEKIEDHHMHSEWLEVGQDVVDAVEACRARGGRVVAVGTTSVRSLESAARDGVLKPFSGDTDIFIYPGRPFHVVDALVTNFHLPESTLLMLVSAFAGYPETMAAYKAAVDNEYRFFSYGDAMFITRNPAPTAPKETGPEETE

SEQ ID NO: 70955 - protein, 351 aa, unidentified
  source 1..351: note = Pseudomonas linyingensis
  REGION 1..351: note = tr|A0A1H6S954|A0A1H6S954_9PSED S-adenosylmethionine:tRNA ribosyltransferase-isomerase; OS = Pseudomonas linyingensis OX=915471 GN=queA PE=3 SV=1
MRVADFHFELPDPLIARHPLAERRASRLLVLDGPSGQLSHRHFPDLLEYLRPGDLMVFNDTRVIPARLFGHKASGGKLEILVERVLDSHRVLAHVRASKAPKPGMQILIDGGGAAEMVVRHAALFELRFAEPVLPLLERVGHMPLPPYIDRPDEDADRERYQTVYSDQAKAGAVAAPTAGLHFDDALLAAIRAKGVDTAFVTLHVGAGTFQPVRVERIEDHHMHSEWLEVGQEVVDAVSACKARGGRVVAVGTTSVRSLESAARDGVLRPFSGDTDIFIYPGRPFHVVDALVTNFHLPESTLLMLVSAFAGYPETMAAYRAAVAEGYRFFSYGDAMFITRNPAPRGPEETP

SEQ ID NO: 70956 - protein, 349 aa, Pseudomonas litoralis
  REGION 1..349: note = tr|A0A1H1UKC4|A0A1H1UKC4_9PSED S-adenosylmethionine:tRNA ribosyltransferase-isomerase; OS = Pseudomonas litoralis OX=797277 GN=queA PE=3 SV=1
MRVSDFQFDLPDRLIARHPLAERRSSRLLCLDGLSGELVHRQFADLLEYLRPGDLMVFNNTRVIPARLFGRKETGGQLEVLVERVLDERRVLAHVRSSKSPKPGSRIVFEEASGATMLARHDALFELEFDEPVLPLLDRIGHMPLPPYIDRPDESADRERYQTVYAHKAGAVAAPTAGLHFDNELLQAIEGKGVATAQVTLHVGAGTFQPVRVERIEDHHMHSEWLEVSQQVVDAVNACKARGGRVIAVGTTSVRSLESAARDGVLKPFSGDTDIFIYPGRPFHVVDALVTNFHLPESTLLMLVSAFAGYPQTMAAYQAAVDNDYRFFSYGDAMFITRNPAAQGPEEAQ

SEQ ID NO: 70957 - protein, 353 aa, Pseudomonas lundensis
  REGION 1..353: note = tr|A0A266NBU3|A0A266NBU3_9PSED S-adenosylmethionine:tRNA ribosyltransferase-isomerase; OS = Pseudomonas lundensis OX=86185 GN=queA PE=3 SV=1
MRVADFTFELPDSLIARHPLAERRNSRLLTLDGESGALAHRQFADLLEHLQLGDLMVFNNTRVIPARLFGQKASGGKLEILVERVLDSHRVLAHVRSSKSPKPGSKILIDGGGEAEMLARHDALFELGFAEEVLPLLDRVGHMPLPPYIDRPDEGSDRERYQTVYAQRLGAVAAPTAGLHFDEPLMQAIAAKGVETAFVTLHVGAGTFQPVRVERLEDHHMHTEWLEVGQDVVDAVAACRARGGRVIAVGTTSVRSLESAARDGTLKPFSGDTDIFIFPGRPFHVVDALVTNFHLPESTLLMLVSAFAGYPETMAAYKAAVEHGYRFFSYGDAMFITRNPAPTAPAPAPEDQA

SEQ ID NO: 70958 - protein, 353 aa, Pseudomonas lundensis
  REGION 1..353: note = tr|A0A1D9IJ68|A0A1D9IJ68_9PSED S-adenosylmethionine:tRNA ribosyltransferase-isomerase; OS = Pseudomonas lundensis OX=86185 GN=queA PE=3 SV=1
MRVADFTFELPDSLIARHPLAERRNSRLLTLDGESGALAHRQFTDLLEHLRSGDLMVFNNTRVIPARLFGQKASGGKLEILVERVLDSHRVLAHVRSSKSPKPGSKILIDGGGEAQMLARHDALFELGFAEEVLPLLDRVGHMPLPPYIDRPDEGSDRERYQTVYAQRLGAVAAPTAGLHFDEPLMQAIAAKGVETAFVTLHVGAGTFQPVRVERLEDHHMHTEWLEVGQEVVDAVAACRARGGRVIAVGTTSVRSLESAARDGTLKPFSGDTDIFIFPGRPFHVVDALVTNFHLPESTLLMLVSAFAGYPETMAAYKAAVEQGYRFFSYGDAMFITRNPAPTAPAPAPEDQA

SEQ ID NO: 70959 - protein, 349 aa, Pseudomonas lurida
  REGION 1..349: note = tr|A0A2R3I1X6|A0A2R3I1X6_9PSED S-adenosylmethionine:tRNA ribosyltransferase-isomerase; OS = Pseudomonas lurida OX=244566 GN=queA PE=3 SV=1
MRVADFTFELPDSLIARHPLAERRASRLLTLDGVSGALAHRQFTDLLEHLRPGDLMVFNNTRVIPARLFGQKASGGKLEILVERVLDSHRVLAHVRSSKSPKPGSSILIDGGGEAEMVARHDALFELKFAEEVLPLLERVGHMPLPPYIDRPDEDSDRERYQTVYSQRPGAVAAPTAGLHFDQPLLDAIAAKGVETAYVTLHVGAGTFQPVRVDNIEDHHMHSEWLEVSQDVVGAVQACKARGGRVVAVGTTSVRSLESAARDGVLKPFSGDTDIFIYPGRPFHVVDCLVTNFHLPESTLLMLVSAFAGYPETMAAYQAAIDNGYRFFSYGDAMFITRNPAPRGPEEQL

SEQ ID NO: 70960 - protein, 349 aa, Pseudomonas lurida
  REGION 1..349: note = tr|A0A2A9DIX7|A0A2A9DIX7_9PSED S-adenosylmethionine:tRNA ribosyltransferase-isomerase; OS = Pseudomonas lurida OX=244566 GN=queA PE=3 SV=1
MRVADFTFELPDSLIARHPLAERRASRLLTLDGVSGALAHRQFTDLLEHLRPGDLMVFNNTRVIPARLFGQKASGGKLEILVERVLDSHRVLAHVRSSKSPKPGSSILIDGGGEAEMVARHDALFELKFAEEVLPLLERVGHMPLPPYIDRPDEDSDRERYQTVYSQRPGAVAAPTAGLHFDQPLLDAIAAKGVETAYVTLHVGAGTFQPVRVDNIEDHHMHSEWLEVSQDVVDAVQACKARGGRVVAVGTTSVRSLESAARDGVLKPFSGDTDIFIYPGRPFHVVDCLVTNFHLPESTLLMLVSAFAGYPETMAAYQAAIDNGYRFFSYGDAMFITRNPAPRGPEEQL

SEQ ID NO: 70961 - protein, 359 aa, Pseudomonas lutea
  REGION 1..359: note = tr|A0A098T324|A0A098T324_9PSED S-adenosylmethionine:tRNA ribosyltransferase-isomerase; OS = Pseudomonas lutea OX=243924 GN=queA PE=3 SV=1
MRVADFTFELPDSLIARHPLAERRSSRLLTLDGPSGALAHRQFTDLLEHLRPGDLMVFNNTRVIPARLFGQKASGGKLEILVERVLDQHRVLAHVRSSKSPKPGSAILIDGGGEAEMVARHDALFELSFAEPVLPLLERVGHMPLPPYIDRPDDDADRERYQTVYAQRAGAVAAPTAGLHFDQTMMNAIADKGIETAFVTLHVGAGTFQPVRVERIEDHHMHNEWLEVTQEVVDAVAACRARGGRVIAVGTTSVRSLESAARDGVLKPFSGDTDIFIYPGRPFHVVDALVTNFHLPESTLLMLVSAFAGYPETMAAYAAAVEHGYRFFSYGDAMFITRNPAPTAPEESTSTESAPEDQA

SEQ ID NO: 70962 - protein, 347 aa, Pseudomonas luteola
  REGION 1..347: note = tr|A0A2X2EAV0|A0A2X2EAV0_PSELU S-adenosylmethionine:tRNA ribosyltransferase-isomerase; OS = Pseudomonas luteola OX=47886 GN=queA PE=3 SV=1
MQVSDFYFELPESLIARHPLSERRASRLLVLDGPSGAINHQQFSDLLDYLRPEDLMIFNDTRVIPARLFGQKASGGKLEILVERVLDEFRVLAHVRSSKSPKPGAVIHIEGGGEAEMLARHDALFELRFAEPVLGLLERIGHMPLPPYIDRPDEEEDRERYQTVYARNAGAVAAPTAGLHFDEAMLQAIREKGIETEFVTLHVGAGTFQPVRVDRIEDHHMHREWLQVSQAVVDAVERCKGRGGRVIAVGTTSVRSLESAARDGQLKAFSGDTDIFLYPGKPFHVVDALVTNFHLPESTLLMLVSAFAGYPETMAAYAAAVEQNYRFFSYGDAMFITRNPNAKGPES

SEQ ID NO: 70963 - protein, 347 aa, Pseudomonas luteola
  REGION 1..347: note = tr|A0A3R8WBE4|A0A3R8WBE4_PSELU S-adenosylmethionine:tRNA ribosyltransferase-isomerase; OS = Pseudomonas luteola OX=47886 GN=queA PE=3 SV=1
MQVSDFYFELPESLIARHPLSERRASRLLVLDGPSGAINHQQFSDLLDYLRPEDLMIFNDTRVIPARLFGQKASGGKLEILVERVLDEFRVLAHVRSSKSPKPGAVIHVEGGGEAEMLARHDALFELRFAEPVLGLLERVGHMPLPPYIDRPDDEEDRERYQTVYARNAGAVAAPTAGLHFDEAMLQAIREKGIETEFVTLHVGAGTFQPVRVDRIEDHHMHREWLQVSQAVVDAVERCKGRGGRVIAVGTTSVRSLESAARVGQLKAFSGDTDIFLYPGKPFHVVDALVTNFHLPESTLLMLVSAFAGYPETMAAYAAAVEQNYRFFSYGDAMFITRNPNAKGPES

SEQ ID NO: 70964 - protein, 349 aa, Pseudomonas mandelii
  REGION 1..349: note = tr|A0A255WVX8|A0A255WVX8_9PSED S-adenosylmethionine:tRNA ribosyltransferase-isomerase; OS = Pseudomonas mandelii OX=75612 GN=queA PE=3 SV=1
  VARIANT 323: note = Xaa can be any naturally occurring amino acid
MRVADFTFELPDSLIARHPLAERRASRLLTLDGVSGALAHRQFTDLLEHLRPGDLMVFNNTRVIPARLFGQKASGGKLEILVERVLDSHRVLAHVRSSKSPKPGSKILIDGGGEAEMLARHDALFELGFAEEVLPLLERVGHMPLPPYIDRPDEDADRERYQTVYSQRPGAVAAPTAGLHFDQPLLDAIAAKGVESAYVTLHVGAGTFQPVRVEKIEDHHMHSEWLEVGQSVVDAVAACKARGGRVVAVGTTSVRSLESAARDGVLKPFSGDTDIFIFPGRPFHVVDCLVTNFHLPESTLLMLVSAFAGYPETMAAYQAAMEXEYRFFSYGDAMFITRNPAPRGPEDKE

SEQ ID NO: 70965 - protein, 349 aa, Pseudomonas mandelii
  REGION 1..349: note = tr|A0A059KVI8|A0A059KVI8_9PSED S-adenosylmethionine:tRNA ribosyltransferase-isomerase; OS = Pseudomonas mandelii PD30 OX=1419583 GN=queA PE=3 SV=1
MRVADFTFELPDSLIARHPLAERRNSRLLTLDGVSGALAHRQFTDLLEHLRPGDLMVFNNTRVIPARLFGQKASGGKLEILVERVLDSHRVLAHVRSSKSPKPGSKILIDGGGEAEMLARHDALFELGFAEEVLPLLDRVGHMPLPPYIDRPDEGSDRERYQTVYAERLGAVAAPTAGLHFDQPLMEAIAAKGVETAFVTLHVGAGTFQPVRVEKIEDHHMHSEWLEVGQDVVDAVEACRARGGRVVAVGTTSVRSLESAARDGVLKPFSGDTDIFIYPGRPFHVVDALVTNFHLPESTLLMLVSAFAGYPETMAAYKAAVDNEYRFFSYGDAMFITRNPAPRGPEETE

SEQ ID NO: 70966 - protein, 349 aa, Pseudomonas marginalis
  REGION 1..349: note = tr|A0A3M5PNK5|A0A3M5PNK5_PSEMA S-adenosylmethionine:tRNA ribosyltransferase-isomerase; OS = Pseudomonas marginalis pv. marginalis OX=97473 GN=queA; PE = 3 SV=1
MRVADFTFELPDSLIARHPLAERRASRLLTLDGVSGALAHRQFTDLLEHLRPGDLMVFNNTRVIPARLFGQKASGGKLEILVERVLDTHRVLAHVRSSKSPKPGSSILIDGGGEAEMVARHDALFELKFAEEVLPLLERVGHMPLPPYIDRPDEDSDRERYQTVYSQRLGAVAAPTAGLHFDQPLLDAIAAKGVETAYVTLHVGAGTFQPVRVDNIEDHHMHSEWLEVSQDVVDAVAACKARGGRVVAVGTTSVRSLESAARDGVLKPFSGDTDIFIFPGRPFHVVDCLVTNFHLPESTLLMLVSAFAGYPETMAAYQAAIDNGYRFFSYGDAMFITRNPAPRGPEETL

SEQ ID NO: 70967 - protein, 354 aa, Pseudomonas marginalis
  REGION 1..354: note = tr|A0A0W0LT67|A0A0W0LT67_PSEMA S-adenosylmethionine:tRNA ribosyltransferase-isomerase; OS = Pseudomonas marginalis ICMP 11289 OX=1198318 GN=queA; PE = 3 SV=1
MRVADFTFDLPDSLIARHPLAERRSSRLLTLDGVSGALAHRQFTDLLEHLRPGDLMVFNNTRVIPARLFGQKASGGKLEILVERVLDSHRVLAHVRSSKSPKPGSSILIDGGGEAEMVARHDALFELRFAEEVLPLLDRVGHMPLPPYIDRPDEGADRERYQTVYAERAGAVAAPTAGLHFDQPLLEAIAAKGVETTFVTLHVGAGTFQPVRVEQIEDHHMHTEWLEVGQDVVDAVAACRARGGRVIAVGTTSVRSLESAARDGVLKPFSGDTDIFIYPGRPFHVVDALVTNFHLPESTLLMLVSAFAGYPETMAAYAAAIEHGYRFFSYGDAMFITRNPAPTAPQESVPEDHA

SEQ ID NO: 70968 - protein, 376 aa, Pseudomonas marincola
  REGION 1..376: note = tr|A0A1I7DCI6|A0A1I7DCI6_9PSED S-adenosylmethionine:tRNA ribosyltransferase-isomerase; OS = Pseudomonas marincola OX=437900 GN=queA PE=3 SV=1
MPLVNALRGQFLHFPLNFCALLYDPPAMRVADFRFELPETLIARHPLAERRASRLLTLDGPTGEINHRQFADVLDHLQPGDLMVFNNTRVIPARLFGQKASGGKLEVLVERVLDAYRVLAHVRSSKSPKPGSMILIDGGGEAEMLARHDALFELRFNEPVLPLLERVGHMPLPPYIDRPDEAADRERYQTVYAERAGAVAAPTAGLHFDQPLMEAIAAKGVSTAFVTLHVGAGTFQPVRVERIEDHHMHTEWLEVSQEVVDAVAACRARGGRVVAVGTTSVRSLESAARDGVLKPFSGDTDIFIYPGRPFHVVDALVTNFHLSESTLLMLVSAFAGYPETMAAYKSAVAEAYRFFSYGDAMFITRNPAARGPEEQV

SEQ ID NO: 70969 - protein, 349 aa, Pseudomonas mediterranea
  REGION 1..349: note = tr|A0A0A4GJF5|A0A0A4GJF5_9PSED S-adenosylmethionine:tRNA ribosyltransferase-isomerase; OS = Pseudomonas mediterranea CFBP 5447 OX=1348058 GN=queA; PE = 3 SV=1
MRVADFTFELPDSLIARHPLAERRASRLLTLDGVSGAMAHRQFTDLLEHLRPGDLMVFNNTRVIPARLFGQKASGGKLEILVERVLDSHRVLAHVRSSKSPKPGSSILIDGGGEAVMVARHDALFELKFAEEVLPLLDRVGHMPLPPYIDRPDEGSDRERYQTVYAERLGAVAAPTAGLHFDQPLLEAIAAKGVETTFVTLHVGAGTFQPVRVERIEDHHMHSEWLEVSQDVVDAVAACRARGGRVVAVGTTSVRSLESAARDGVLKPFSGDTDIFIYPGRPFHVVDALVTNFHLPESTLLMLVSAFAGYPEAMAAYKAAVEHGYRFFSYGDAMFITRNPAPRGPEETV

SEQ ID NO: 70970 - protein, 354 aa, unidentified; identical to SEQ ID NO: 70868
  source 1..354: note = Pseudomonas meliae
  REGION 1..354: note = tr|A0A0P9U7F3|A0A0P9U7F3_9PSED S-adenosylmethionine:tRNA ribosyltransferase-isomerase; OS = Pseudomonas meliae OX=86176 GN=queA PE=3 SV=1

SEQ ID NO: 70971 - protein, 347 aa, Pseudomonas mendocina
  REGION 1..347: note = sp|A4XY53|QUEA_PSEMY S-adenosylmethionine:tRNA ribosyltransferase-isomerase OS=Pseudomonas mendocina (strain ymp) OX=399739 GN=queA PE=3 SV=1
MRVADFHFDLPESLIARHPLAERRASRLLQLDGPSGALRHGQFTDLLEQLRPGDLMVFNNTRVIPARLFGQKASGGRLEVLVERVLDQHRVLAHVRSSKSPKPGSQILIEGGGEAEMVARHDALFELRFAEPVLPLLERVGHMPLPPYIDRPDDEADRERYQTVYAEKAGAVAAPTAGLHFDDELLAAIRAKGVETAFVTLHVGAGTFQPVRVERIEDHHMHSEWLEVSQEVVDAVAACRARGGRVVAVGTTSVRSLETAAQSSELKPFSGDTDIFIYPGRPFHVVDALVTNFHLPESTLLMLVSAFAGYAETMAAYRAAVEQGYRFFSYGDAMFITRNPAARGPEV

SEQ ID NO: 70972 - protein, 347 aa, Pseudomonas mendocina
  REGION 1..347: note = tr|A0A379IRF1|A0A379IRF1_PSEME S-adenosylmethionine:tRNA ribosyltransferase-isomerase; OS = Pseudomonas mendocina OX=300 GN=queA PE=3 SV=1
MRVADFHFDLPESLIARHPLAERRASRLLQLDGPSGALRHGQFTDVLEQLRPGDLMVFNNTRVIPARLFGQKASGGKLEILVERVLDQHRVLAHVRSSKSPKPGSQILIEGGGEAEMVARHNALFELRFAEPVLALLERVGHMPLPPYIDRPDEEADRERYQTVYAEKAGAVAAPTAGLHFDDELLAAIRAKGVETAFVTLHVGAGTFQPVRVKRIEDHHMHSEWLEVSQDVVDAVAACRARCGRVVAVGTTSVRSLETAARDGELKPFSGDTDIFIYPGRPFHVVDALVTNFHLPESTLLMLVSAFAGYSETMAAYREAVAQGYRFFSYGDAMFITRNPAARGPEV

SEQ ID NO: 70973 - protein, 349 aa, Pseudomonas migulae
  REGION 1..349: note = tr|A0A1H5G2V3|A0A1H5G2V3_9PSED S-adenosylmethionine:tRNA ribosyltransferase-isomerase; OS = Pseudomonas migulae OX=78543 GN=queA PE=3 SV=1
MRVADFTFELPDSLIARHPLAERRNSRLLTLDGVSGALAHRQFTDLLEHLRPGDLMVFNNTRVIPARLFGQKASGGKLEILVERVLDSHRVLAHVRSSKSPKPGSKILIDGGGEAEMLARHDALFELGFSEEVLPLLDRVGHMPLPPYIDRPDEGSDRERYQTVYAERLGAVAAPTAGLHFDQPLMEAIAAKGVETAFVTLHVGAGTFQPVRVEKIEDHHMHSEWLEVGQDVVDAVAACRARGGRVVAVGTTSVRSLESAARDGVLKPFSGDTDIFIYPGRPFHVVDALVTNFHLPESTLLMLVSAFAGYPEAMAAYKAAVEHEYRFFSYGDAMFITRNPAPRGPEETE

SEQ ID NO: 70974 - protein, 354 aa, Pseudomonas mohnii
  REGION 1..354: note = tr|A0A1H4Y409|A0A1H4Y409_9PSED S-adenosylmethionine:tRNA ribosyltransferase-isomerase; OS = Pseudomonas mohnii OX=395600 GN=queA PE=3 SV=1
MRVADFTFELPDSLIARHPLAERRNSRLLTLDGVSGALAHRQFTDLLEHLRPGDLMVFNNTRVIPARLFGQKASGGKLEILVERVLDSHRVLAHVRSSKSPKPGSKILIDGGGEAEMLARHDALFELGFAEEVLPLLDRVGHMPLPPYIDRPDEGSDRERYQTVYAQRLGAVAAPTAGLHFDQPLMEAIAAKGVETAFVTLHVGAGTFQPVRVDKIEDHHMHSEWLEVGQDVVDAVAACRARGGRVVAVGTTSVRSLESAARDGVLKPFSGDTDIFIYPGRPFHVVDALVTNFHLPESTLLMLVSAFAGYPETMAAYKAAVDNGYRFFSYGDAMFITRNPAPTAPKESGPEETV

SEQ ID NO: 70975 - protein, 349 aa, Pseudomonas monteilii
  REGION 1..349: note = tr|V9UV99|V9UV99_9PSED S-adenosylmethionine:tRNA ribosyltransferase-isomerase OS=Pseudomonas monteilii SB3101 OX=1435058 GN=queA PE=3 SV=1
MRVADFSFELPDSLIARHPLAERHGSRLLVLDGPTGALAHRQFPDLLEYLRPGDLMVFNNTRVIPARLFGQKASGGKLEVLVERVLDSHRVLAHVRASKAPKVGAVILIDGGGEAEMVARHDTLFELRFTEEVLPLLDRVGHMPLPPYIDRPDEGADRERYQTVYAERAGAVAAPTAGLHFDEALLEKIAAKGVERAFVTLHVGAGTFQPVRVDKIEDHHMHKEWLEVSQEVVDAIEACRARGGRVIAVGTTSVRSLESAARDGVLKAFSGDTDIFIYPGRPFHVVDALVTNFHLPESTLLMLVSAFAGYPETMAAYAAAVEQGYRFFSYGDAMFITRNPAPRGPEDQA

SEQ ID NO: 70976 - protein, 349 aa, Pseudomonas monteilii; identical to SEQ ID NO: 70975
  REGION 1..349: note = tr|A0A136QKI5|A0A136QKI5_9PSED S-adenosylmethionine:tRNA ribosyltransferase-isomerase; OS = Pseudomonas monteilii OX=76759 GN=queA PE=3 SV=1

SEQ ID NO: 70977 - protein, 354 aa, Pseudomonas moorei
  REGION 1..354: note = tr|A0A1H0Y3X1|A0A1H0Y3X1_9PSED S-adenosylmethionine:tRNA ribosyltransferase-isomerase; OS = Pseudomonas moorei OX=395599 GN=queA PE=3 SV=1
MRVADFTFELPDSLIARHPLAERRNSRLLTLDGVSGALAHRQFTDLLEHLRPGDLMVFNNTRVIPARLFGQKASGGKLEILVERVLDSHRVLAHVRSSKSPKPGSKILIDGGGEAEMLARHDALFELGFAEEVLPLLDRVGHMPLPPYIDRPDEGADRERYQTVYAERLGAVAAPTAGLHFDQPLLEAIAAKGVETAFVTLHVGAGTFQPVRVDKIEDHHMHSEWLEVGQDVVDAVAACRARGGRVVAVGTTSVRSLESAARDGVLKPFSGDTDIFIYPGRPFHVVDALVTNFHLPESTLLMLVSAFAGYPETMAAYKAAVDNGYRFFSYGDAMFITRNPAPTAPKESGPEETV

SEQ ID NO: 70978 - protein, 354 aa, Pseudomonas moorei
  REGION 1..354: note = tr|A0A4Q7H4B0|A0A4Q7H4B0_9PSED S-adenosylmethionine:tRNA ribosyltransferase-isomerase; OS = Pseudomonas moorei OX=395599 GN=queA PE=3 SV=1
MRVADFTFELPDSLIARHPLAERRNSRLLTLDGVSGALAHRQFTDLLEHLRPGDLMVFNNTRVIPARLFGQKASGGKLEILVERVLDSHRVLAHVRSSKSPKPGSKILIDGGGEAEMLARHDALFELGFAEEVLPLLDRVGHMPLPPYIDRPDEGSDRERYQTVYAERLGAVAAPTAGLHFDQPLMEAIAAKGVETAFVTLHVGAGTFQPVRVDKIEDHHMHSEWLEVGQDVVDAVAACRARGGRVVAVGTTSVRSLESAARDGVLKPFSGDTDIFIYPGRPFHVVDALVTNFHLPESTLLMLVSAFAGYPETMAAYKAAVDNGYRFFSYGDAMFITRNPAPTAPKESGPEETV

SEQ ID NO: 70979 - protein, 354 aa, Pseudomonas moraviensis
  REGION 1..354: note = tr|V8R365|V8R365_9PSED S-adenosylmethionine:tRNA ribosyltransferase-isomerase OS=Pseudomonas moraviensis R28-S OX=1395516 GN=queA PE=3 SV=1
MRVADFTFELPDSLIARHPLAERRGSRLLTLDGPSGALAHRQFTDLLEHLRPGDLMVFNNTRVIPARLFGQKASGGKLEILIERVLDAHRVLAHVRSSKSPKPGSKILIDGGGEAEMLARHDALFELGFAEEVLPLLDRVGHMPLPPYIDRPDEGSDRERYQTVYAQRLGAVAAPTAGLHFDEPLMQAIAAKGVETAFVTLHVGAGTFQPVRVEKIEDHHMHSEWLEVGQDVVDAVAACRARGGRVIAVGTTSVRSLESAARDGVLKPFSGDTDIFIYPGRPFHVVDALVTNFHLPESTLLMLVSAFAGYPETMAAYKAAVENGYRFFSYGDAMFITRNPAPTAPEQTGPEETE

SEQ ID NO: 70980 - protein, 354 aa, Pseudomonas moraviensis; identical to SEQ ID NO: 70979
  REGION 1..354: note = tr|A0A1Q3I7B6|A0A1Q3I7B6_9PSED S-adenosylmethionine:tRNA ribosyltransferase-isomerase; OS = Pseudomonas moraviensis OX=321662 GN=queA PE=3 SV=1

SEQ ID NO: 70981 - protein, 349 aa, Pseudomonas mosselii
  REGION 1..349: note = tr|A0A290GZF5|A0A290GZF5_9PSED S-adenosylmethionine:tRNA ribosyltransferase-isomerase; OS = Pseudomonas mosselii OX=78327 GN=queA PE=3 SV=1
MRVADFSFELPDSLIARHPLAERHGSRLLVLDGPSGELAHKQFTDLLDYLRPGDLMVFNNTRVIPARLFGQKASGGKLEVLVERVLDSHRVLAHVRASKAPKEGTQILIDGGGEAEMVARHDTLFELRFSEEVLPLLERVGHMPLPPYIDRPDEGADRERYQTVYAERAGAVAAPTAGLHFDEELLAKIAAKGVERAFVTLHVGAGTFQPVRVDKIEDHTMHKEWLEVSQDVVDAVAACRARGGRVIAVGTTSVRSLESAARDGELKAFSGDTDIFIFPGRPFHVVDCLVTNFHLPESTLLMLVSAFAGYPETMAAYAAAVENGYRFFSYGDAMFITRNPAPRGPEDQA

SEQ ID NO: 70982 - protein, 349 aa, Pseudomonas mosselii
  REGION 1..349: note = tr|A0A2V4M456|A0A2V4M456_9PSED S-adenosylmethionine:tRNA ribosyltransferase-isomerase; OS = Pseudomonas mosselii OX=78327 GN=queA PE=3 SV=1
MRVADFSFELPDSLIARHPLAERHGSRLLVLDGPSGTLAHKQFTDLLEYLRPGDLMVFNNTRVIPARLFGQKASGGKLEVLVERVLDSHRVLAHVRASKAPKEGTQILIDGGGEAEMVARHDTLFELRFSEEVLPLLERVGHMPLPPYIDRPDEGADRERYQTVYAERAGAVAAPTAGLHFDEALLAKIAAKGVERAFVTLHVGAGTFQPVRVDKIEDHTMHKEWLEVSQDVVDAVAACRARGGRVIAVGTTSVRSLESAARDGELKAFSGDTDIFIFPGRPFHVVDCLVTNFHLPESTLLMLVSAFAGYPETMAAYAAAVENGYRFFSYGDAMFITRNPAPRGPEDQA

SEQ ID NO: 70983 - protein, 354 aa, Pseudomonas mucidolens
  REGION 1..354: note = tr|A0A1H2NEL3|A0A1H2NEL3_9PSED S-adenosylmethionine:tRNA ribosyltransferase-isomerase; OS = Pseudomonas mucidolens OX=46679 GN=queA PE=3 SV=1
MRVADFTFELPDSLIARHPLAERRASRLLTLDGVSGALAHRQFTDLLEHLRPGDLMVFNNTRVIPARLFGQKASGGKLEILVERVLDSHRVLAHVRSSKSPKPGSSILIEGGGEAQMVARHDALFELKFAEEVLPLLERVGHMPLPPYIDRPDEDADRERYQTVYSERLGAVAAPTAGLHFDQPLLESIAAKGVETAYVTLHVGAGTFQPVRVDNIEDHHMHSEWLEVSQQVVDAVNACRARGGRVVAVGTTSVRSLESAARDGVLKPFSGDTDIFIYPGRPFHVVDALVTNFHLPESTLLMLVSAFAGYPQTMAAYQAAIDNGYRFFSYGDAMFITRNPAPTAPKEPGPEEQV

SEQ ID NO: 70984 - protein, 349 aa, unidentified
  source 1..349: note = Pseudomonas nabeulensis
  REGION 1..349: note = tr|A0A4Z0AWY6|A0A4Z0AWY6_9PSED S-adenosylmethionine:tRNA ribosyltransferase-isomerase; OS = Pseudomonas nabeulensis OX=2293833 GN=queA PE=3 SV=1
MRVADFTFELPDSLIARHPLAERRASRLLTLDGVSGALAHRQFTDLLEHLRPGDLMVFNNTRVIPARLFGQKASGGKLEILVERVLDSHRVLAHVRSSKSPKPGASILIDGGGEAEMVARHDALFELKFAEEVLPLLERVGHMPLPPYIDRPDEDSDRERYQTVYSQRLGAVAAPTAGLHFDQPLLDAIAAKGVETAYVTLHVGAGTFQPVRVDNIEDHHMHSEWLEVTQEVVDAVTACKARGGRVVAVGTTSVRSLESAARDGVLKPFSGDTDIFIFPGRPFHVVDCLVTNFHLPESTLLMLVSAFAGYPETMAAYQAAIDNGYRFFSYGDAMFITRNPAPRGPEEQL

SEQ ID NO: 70985 - protein, 347 aa, Pseudomonas nitroreducens
  REGION 1..347: note = tr|A0A2D0AD84|A0A2D0AD84_9PSED S-adenosylmethionine:tRNA ribosyltransferase-isomerase; OS = Pseudomonas nitroreducens OX=46680 GN=queA PE=3 SV=1
MRVADFHFDLPEALIARHPLPERRSSRLLVLDGPSGELSHRQFADILGFLRPGDLMVFNNTRVIPARLFGQKASGGKLEILVERVLDSHRVLAHVRSSKSPKPGSKILIDGGGEAEMLQRHDALFELGFSEDVLPLLERVGHMPLPPYIDRPDEDADRERYQTVYAERAGAVAAPTAGLHFDEALLESIRAKGVETAFVTLHVGAGTFQPVRVERIEDHHMHNEWLEVSQDVVDAVAACRARGGRVVAVGTTSVRSLESAARDGVLKPFSGDTDIFIFPGRPFHVVDALVTNFHLPESTLLMLVSAFAGYPETMAAYAAAVEQGYRFFSYGDAMFITRNPAPRGPED

SEQ ID NO: 70986 - protein, 347 aa, Pseudomonas nitroreducens
  REGION 1..347: note = tr|A0A239C5D2|A0A239C5D2_9PSED S-adenosylmethionine:tRNA ribosyltransferase-isomerase; OS = Pseudomonas nitroreducens OX=46680 GN=queA PE=3 SV=1
MRVADFHFDLPEALIARHPLPERRSSRLLVLDGASGELSHRQFADILGFLQPGDLMVFNNTRVIPARLFGQKASGGKLEILVERVLDSHRVLAHVRSSKSPKPGSKILIDGGGEAEMLQRHDALFELGFSEDVLPLLERVGHMPLPPYIDRPDEDADRERYQTVYAERAGAVAAPTAGLHFDEALLESIRAKGVETAFVTLHVGAGTFQPVRVERIEDHHMHNEWLEVSQEVVDAVAACKARGGRVVAVGTTSVRSLESAARDGVLKPFSGDTDIFIFPGRPFHVVDALVTNFHLPESTLLMLVSAFAGYPETMAAYAAAVEQGYRFFSYGDAMFITRNPAPRGPED

SEQ ID NO: 70987 - protein, 349 aa, unidentified
  source 1..349: note = Pseudomonas oceani
  REGION 1..349: note = tr|A0A2P4ETF2|A0A2P4ETF2_9PSED S-adenosylmethionine:tRNA ribosyltransferase-isomerase; OS = Pseudomonas oceani OX=1708783 GN=queA PE=3 SV=1
MRLSDFHFELPDELIARHPLAERRGSRLLCLDGPTGQLAHRQFVDLLEYLRPGDLMVFNNTRVIPARLFGRKQTGGVLEVLVERVLDEYRVLAHIRASKSPKAGSRILIDGGAEAEMVARHDALFELRFAEPVLPLLQRVGHMPLPPYIDRPDDEADRERYQTVYAKREGAVAAPTAGLHFDRALLDAIAKLGVDTAEVTLHVGAGTFQPVRVEKIEEHVMHQEWLEVTPEVVAAVEACKARGGRVIAVGTTSVRSLESAARDGVLKPFSGDTDIFLYPGKPFHVVDALITNFHLPESTLLMLVSAFAGYPETMAAYHTAVAEKYRFFSYGDAMFITRNPAPTGPEVSS

SEQ ID NO: 70988 - protein, 347 aa, Pseudomonas oleovorans
  REGION 1..347: note = tr|A0A061D0R6|A0A061D0R6_PSEOL S-adenosylmethionine:tRNA ribosyltransferase-isomerase; OS = Pseudomonas oleovorans OX=301 GN=queA PE=3 SV=1
MRVADFHFDLPESLIARHPLAERRASRLLQLDGPSGELRHGQFTDVLEQLRPGDLMVFNNTRVIPARLFGQKASGGKLEVLVERVLDQYRVLAHVRSSKSPKPGSQILIDGGGEAEMVARHDALFELRFAEPVLPLLERVGHMPLPPYIDRPDDEADRERYQTVYAQKAGAVAAPTAGLHFDDELLAAIRAKGVETAFVTLHVGAGTFQPVRVERIEDHHMHSEWLEVGQDVVDAVAACRARGGRVVAVGTTSVRSLETAARDGELKPFSGDTDIFIYPGRPFHVVDALVTNFHLPESTLLMLVSAFAGYAETMAAYREAVAQGYRFFSYGDAMFITRNPAARGPEV

SEQ ID NO: 70989 - protein, 347 aa, Pseudomonas oleovorans
  REGION 1..347: note = tr|A0A3R8WBL8|A0A3R8WBL8_PSEOL S-adenosylmethionine:tRNA ribosyltransferase-isomerase; OS = Pseudomonas oleovorans OX=301 GN=queA PE=3 SV=1
MRVADFHFDLPESLIARHPLAERRASRLLQLDGPSGELRHGQFTDVLEQLRPGDLMVFNNTRVIPARLFGQKASGGKLEVLVERVLDQYRVLAHVRSSKSPKPGSQILIDGGGEAEMVARHDALFELRFAEPVLPLLERVGHMPLPPYIDRPDDEADRERYQTVYAQKAGAVAAPTAGLHFDDELLAAIRAKGVDAAFVTLHVGAGTFQPVRVERIEDHHMHSEWLEVGQDVVDAVAACRARGGRVVAVGTTSVRSLETAARDGELKPFSGDTDIFIYPGRPFHVVDALVTNFHLPESTLLMLVSAFAGYPETMAAYREAVAQGYRFFSYGDAMFITRNPAARGPEV

SEQ ID NO: 70990 - protein, 349 aa, Pseudomonas orientalis
  REGION 1..349: note = tr|A0A3G7XM97|A0A3G7XM97_9PSED S-adenosylmethionine:tRNA ribosyltransferase-isomerase; OS = Pseudomonas orientalis OX=76758 GN=queA PE=3 SV=1
MRVADFTFELPDSLIARHPLAERRASRLLTLDGPSGALAHRQFTDLLEHLRPGDLMVFNNTRVIPARLFGQKASGGKLEILVERVLDSHRVLAHVRSSKSPKPGSSILIDGGGEAEMVARHDALFELKFAEEVLPLLERVGHMPLPPYIDRPDEDADRERYQTVYSQRLGAVAAPTAGLHFDQPLLDAIAAKGVESAYVTLHVGAGTFQPVRVEYIEDHHMHSEWLEVSQDVVDAVNACKARGGRVVAVGTTSVRSLESAARDGVLKPFSGDTDIFIFPGRPFHVVDCLVTNFHLPESTLLMLVSAFAGYPETMAAYQAAIANEYRFFSYGDAMFITRNPAPRGPEDNL

SEQ ID NO: 70991 - protein, 349 aa, Pseudomonas orientalis
  REGION 1..349: note = tr|A0A0R2ZW66|A0A0R2ZW66_9PSED S-adenosylmethionine:tRNA ribosyltransferase-isomerase; OS = Pseudomonas orientalis OX=76758 GN=queA PE=3 SV=1
MRVADFTFELPDSLIARHPLAERRASRLLTLDGPSGALAHRQFTDLLEHLRPGDLMVFNNTRVIPARLFGQKASGGKLEILVERVLDSHRVLAHVRSSKSPKPGSSILIDGGGEAQMVARHDALFELRFAEEVLPLLERVGHMPLPPYIDRPDEDADRERYQTVYSQRLGAVAAPTAGLHFDQPLLDAIAAKGVESAYVTLHVGAGTFQPVRVENIEDHHMHSEWLEVSQDVVDAVNACKARGGRVVAVGTTSVRSLESAARDGVLKPFSGDTDIFIFPGRPFHVVDCLVTNFHLPESTLLMLVSAFAGYPETMAAYQAAIANEYRFFSYGDAMFITRNPAPRGPEEQL

SEQ ID NO: 70992 - protein, 351 aa, unidentified
  source 1..351: note = Pseudomonas oryzae
  REGION 1..351: note = tr|A0A1H1L6R0|A0A1H1L6R0_9PSED S-adenosylmethionine:tRNA ribosyltransferase-isomerase; OS = Pseudomonas oryzae OX=1392877 GN=queA PE=3 SV=1
MRVADFHFELPDQLIARHPLAERRASRLLVLDGPSGELSHRQFPDLLGYLRPGDLMVFNDTRVIPARLFGQKASGGRLEILVERLLDSHRVLAHVRASKSPKPGSLIHIDGGGAAEMLARHDALFELRFAEPALELLERVGHMPLPPYIDRPDEAADRERYQTVYSDKGKAGAVAAPTAGLHFDDALLAAIRAKGVDTAFVTLHVGAGTFQPVRVERIEDHHMHSEWLQVGQDVVDAVAACRARGGRVIAVGTTSVRSLESAARDGVLKPFSGDTDIFLYPGRPFHVVDALVTNFHLPESTLLMLVSAFAGYPETMAAYRAAVAEGYRFFSYGDAMFITRNPAPRGPEETP

SEQ ID NO: 70993 - protein, 347 aa, Pseudomonas oryzihabitans
  REGION 1..347: note = tr|A0A0U4XQW8|A0A0U4XQW8_9PSED S-adenosylmethionine:tRNA ribosyltransferase-isomerase; OS = Pseudomonas oryzihabitans OX=47885 GN=queA PE=3 SV=1
MHVADFHFDLPESLIARHPLAERRGSRLLVLDGPTGELNHRHFGDLLGYLQPGDLMVFNDTRVIPARLFGQKASGGKLEILVERVLDEERVLAHVRSSKSPKPGSRILIDGGAEAEMVARHEALFELKFAEPVLPLLERVGHMPLPPYIDRPDEAEDRERYQTVYARNAGAVAAPTAGLHFDEPLLDAIRAKGVATAFVTLHVGAGTFQPVRVERIEDHHMHREWLQVDQAVVDAVAACRARGGRVIAVGTTSVRSLESASRDGQLKAFSGETDIFLYPGRPFHVVDALVTNFHLPESTLLMLVSAFAGYRETMAAYATAVAEGYRFFSYGDAMFITRNPGAQGPES

SEQ ID NO: 70994 - protein, 347 aa, Pseudomonas oryzihabitans
  REGION 1..347: note = tr|A0A2Z5A968|A0A2Z5A968_9PSED S-adenosylmethionine:tRNA ribosyltransferase-isomerase; OS = Pseudomonas oryzihabitans OX=47885 GN=queA PE=3 SV=1
MHVADFHFDLPESLIARHPLAERRGSRLLVLDGPSGELSHRHFADLLGYLRPGDLMVFNDTRVIPARLFGQKASGGKLEILVERVLDEERVLAHVRSSKSPKPGSRILIDGGAEAEMVARHEALFELKFAEPVLPLLERVGHMPLPPYIDRPDEAEDRERYQTVYARNAGAVAAPTAGLHFDEPLLEAIRAKGVATAFVTLHVGAGTFQPVRVERIEDHHMHREWLQVDPAVVDAVAACRARGGRVIAVGTTSVRSLESAARDGELQAFAGETDIFLYPGRPFHVVDALVTNFHLPESTLLMLVSAFAGYRETMTAYATAVAEGYRFFSYGDAMFITRNPGAQGPES

SEQ ID NO: 70995 - protein, 349 aa, Pseudomonas otitidis
  REGION 1..349: note = tr|A0A1I0UDY7|A0A1I0UDY7_9PSED S-adenosylmethionine:tRNA ribosyltransferase-isomerase; OS = Pseudomonas otitidis OX=319939 GN=queA PE=3 SV=1
MRVADFHFDLPEHLIARHPLSERRASRLLVLDGASGEMAHRGFADLLDYLRPGDLMVFNNTRVIPARLFGQKASGGKLEILVERVLDSHRVLAHVRSSKSPKPGSTILIDGGAEATMLARHDALFELGFAEEVLPLLERVGHMPLPPYIDRPDEDADRERYQTVYAQHAGAVAAPTAGLHFDQALLDAIAAKGVERAFVTLHVGAGTFQPVRVERIEDHHMHSEWLEVKQDVVDAVAACRARGGRVIAVGTTSVRSLESAARDGQLKPFSGDTDIFLYPGRPFHVVDALVTNFHLPESTLLMLVSAFAGYPETMAAYGAAVEQGYRFFSYGDAMFITRNPAPRGPEDLA

SEQ ID NO: 70996 - protein, 349 aa, Pseudomonas pachastrellae; identical to SEQ ID NO: 70817
  REGION 1..349: note = tr|A0A1S8DEE7|A0A1S8DEE7_9PSED S-adenosylmethionine:tRNA ribosyltransferase-isomerase; OS = Pseudomonas pachastrellae OX=254161 GN=queA PE=3 SV=1

SEQ ID NO: 70997 - protein, 354 aa, Pseudomonas palleroniana
  REGION 1..354: note = tr|A0A2L1JAU9|A0A2L1JAU9_9PSED S-adenosylmethionine:tRNA ribosyltransferase-isomerase; OS = Pseudomonas palleroniana OX=191390 GN=queA PE=3 SV=1
MRVADFTFELPDSLIARHPLAERRASRLLTLDGVSGALAHRQFTDLLEHLRPGDLMVFNNTRVIPARLFGQKASGGKLEILVERVLDSHRVLAHVRSSKSPKPGSVILIDGGGEAEMVARHDALFELKFAEEVLPLLERVGHMPLPPYIDRPDEDADRERYQTVYSQRPGAVAAPTAGLHFDQPLLEAIAAKGVETAYVTLHVGAGTFQPVRVDNIEDHHMHSEWLEVSQDVVDAVNACKARGGRVVAVGTTSVRSLESAARDGVLKPFSGDTDIFIYPGRPFHVVDCLVTNFHLPESTLLMLVSAFAGYPETMAAYQAAIANEYRFFSYGDAMFITRNPAPTAPGEAGPEEQP

SEQ ID NO: 70998 - protein, 354 aa, Pseudomonas palleroniana
  REGION 1..354: note = tr|A0A1H5M2D6|A0A1H5M2D6_9PSED S-adenosylmethionine:tRNA ribosyltransferase-isomerase; OS = Pseudomonas palleroniana OX=191390 GN=queA PE=3 SV=1
MRVADFTFELPDSLIARHPLAERRASRLLTLDGVSGALAHRQFTDLLEHLRPGDLMVFNNTRVIPARLFGQKASGGKLEILVERVLDSHRVLAHVRSSKSPKPGSAILIDGGGEAEMVARHDALFELKFAEEVLPLLERVGHMPLPPYIDRPDEDADRERYQTVYSQRPGAVAAPTAGLHFDQPLLEAIAAKGVETAYVTLHVGAGTFQPVRVDNIEDHHMHSEWLEVGQDVVDAVNACKARGGRVVAVGTTSVRSLESAARDGVLKPFSGDTDIFIYPGRPFHVVDCLVTNFHLPESTLLMLVSAFAGYPETMAAYQAAIANEYRFFSYGDAMFITRNPAPTAPGEAGPEEQP

SEQ ID NO: 70999 - protein, 349 aa, Pseudomonas panacis
  REGION 1..349: note = tr|A0A1H4IKH0|A0A1H4IKH0_PSEPA S-adenosylmethionine:tRNA ribosyltransferase-isomerase; OS = Pseudomonas panacis OX=307251 GN=queA PE=3 SV=1
MRVADFTFELPDSLIARHPLAERRASRLLTLDGLSGALAHRQFTDLLEHLRPGDLMVFNNTRVIPARLFGQKASGGKLEILVERVLDSHRVLAHVRSSKSPKPGSTLLIDGGGEAEMVARHDALFELKFAEEVLPLLERVGHMPLPPYIDRPDEDADRERYQTVYSQRLGAVAAPTAGLHFDQPLLDAIAAKGVESAYVTLHVGAGTFQPVRVDNIEDHHMHSEWLEVSQDVVDAVYACKARGGRVIAVGTTSVRSLESAARDGVLKPFSGDTDIFIYPGRPFHVVDALVTNFHLPESTLLMLVSAFAGYPETMAAYQAAIDNGYRFFSYGDAMFITRNPAPRGPEEQL

SEQ ID NO: 71000 - protein, 347 aa, Pseudomonas panipatensis
  REGION 1..347: note = tr|A0A1G8DW07|A0A1G8DW07_9PSED S-adenosylmethionine:tRNA ribosyltransferase-isomerase; OS = Pseudomonas panipatensis OX=428992 GN=queA PE=3 SV=1
MRVADFHFDLPEALIARHPLAERRASRLLVLDGPSGTLSHRQFTDLLEYLEPGDLMVFNNTRVIPARLFGQKASGGKLEILVERVLDNRRVLAHVRSSKSPKPGSTILIDGGGEAEMLQRHDALFELGFAEDVLPLLERVGHMPLPPYIDRPDEDADRERYQTVYAERAGAVAAPTAGLHFDQGLLDAIREKGVETAFVTLHVGAGTFQPVRVERIEDHHMHREWLEVSQQVVDAVAACRARGGRVIAVGTTSVRSLESAARDGQLKPFSGDTDIFLYPGRPFHVVDALVTNFHLPESTLLMLVSAFAGYPETMAAYAAAVEQQYRFFSYGDAMFITRNPAPRGPED

SEQ ID NO: 71001 - protein, 354 aa, Pseudomonas parafulva; identical to SEQ ID NO: 70934
  REGION 1..354: note = tr|A0A497UEH8|A0A497UEH8_9PSED S-adenosylmethionine:tRNA ribosyltransferase-isomerase; OS = Pseudomonas parafulva OX=157782 GN=queA PE=3 SV=1

SEQ ID NO: 71002 - protein, 349 aa, Pseudomonas parafulva
  REGION 1..349: note = tr|A0A0A7JGH5|A0A0A7JGH5_9PSED S-adenosylmethionine:tRNA ribosyltransferase-isomerase; OS = Pseudomonas parafulva OX=157782 GN=queA PE=3 SV=1
MRVADFSFELPDSLIARHPLAERHGSRLLVLDGPSGELAHRRFTDLLEYLRPGDLMVFNNTRVIPARLFGQKASGGKLEMLIERVLDSHRVLAHVRASKALKVGATVLIDGGGEAEMVARHETLFELRFSEEVLPLLDRVGHMPLPPYIDRPDEGADRERYQTVYAERAGAVAAPTAGLHFDEALLAQISAKGVARAFVTLHVGAGTFQPVRVDKIEDHHMHKEWLEVSQDVVDAIDACRARGGRVIAVGTTSVRSLESAARDGVLKAFSGDTDIFIYPGRPFHVVDALVTNFHLPESTLLMLVSAFAGYPETMAAYAAAVEQGYRFFSYGDAMFITRNPAPRGPEDQA

SEQ ID NO: 71003 - protein, 349 aa, unidentified
  source 1..349: note = Pseudomonas paralactis
  REGION 1..349: note = tr|A0A0R3AA87|A0A0R3AA87_9PSED S-adenosylmethionine:tRNA ribosyltransferase-isomerase; OS = Pseudomonas paralactis OX=1615673 GN=queA PE=3 SV=1
MRVADFTFELPDSLIARHPLAERRASRLLTLDGPSGALAHRQFTDLLEHLRPGDLMVFNNTRVIPARLFGQKASGGKLEILVERVLDSHRVLAHVRSSKSPKPGSNILIDGGGEARMVARHDALFELEFAEEVLPLLDRVGHMPLPPYIDRPDEDADRERYQTVYSQRLGAVAAPTAGLHFDQPLLDAIAAKGVETAYVTLHVGAGTFQPVRVENIEDHHMHSEWLEVSQDVVDAVNACKARGGRVVAVGTTSVRSLESAARDGVLKPFSGDTDIFIFPGRPFHVVDCLVTNFHLPESTLLMLVSAFAGYPQTMAAYQAAIANEYRFFSYGDAMFITRNPAPRGPEDNL

SEQ ID NO: 71004 - protein, 349 aa, Pseudomonas pelagia
  REGION 1..349: note = tr|A0A2A4AYL1|A0A2A4AYL1_9PSED S-adenosylmethionine:tRNA ribosyltransferase-isomerase; OS = Pseudomonas pelagia OX=553151 GN=queA PE=3 SV=1
MRVSDFQFDLPDRLIARHPLAERRASRLLCLDGPSGALEHRHFADLLDYLRPGDLMVFNNTRVIPARLFGRKESGGQLEVLVERVLDGRRVLAHVRSSKSPKPGSRIVLDDGTLATMLARHDALFELEFAEDVLPLLERIGHMPLPPYIDRADEAADRERYQTVYAARAGAVAAPTAGLHFDQALLQAIADQGVETVQVTLHVGAGTFQPVRVERIEDHHMHSEWLEVSQNVVDAVRACKARGGRVIAVGTTSVRSLETAARSGEIEPFAGDTNIFIYPGRPFHVVDALVTNFHLPESTLLMLVSAFAGYAETMAAYRAAVDNEYRFFSYGDAMFITRNPAAAGPEDAA

SEQ ID NO: 71005 - protein, 349 aa, Pseudomonas peli
  REGION 1..349: note = tr|A0A1G4Q183|A0A1G4Q183_9PSED S-adenosylmethionine:tRNA ribosyltransferase-isomerase; OS = Pseudomonas peli OX=592361 GN=queA PE=3 SV=1
MRVADFNFELPDALIARHPLAERRASRLLVLDGPTGELAHKQFSDLLDYLRPGDLMVFNNTRVIPARLFGQKASGGKLEILVERVLDSQRVLAHVRSSKSPKPGSIILIDGGGEAEMVARHDALFELRFAEDVLPLLERVGHMPLPPYIDRPDEQADRERYQTVYADRAGAVAAPTAGLHFDQQLLAAIAEKGVEQAFVTLHVGAGTFQPVRVERIEDHHMHSEWLEVSQDVVDAVAACRARGGRVIAVGTTSVRSLESAARDGVLKAFSGDTDIFIYPGRPLHVVDALVTNFHLPESTLLMLVSAFAGYPETMAAYQAAIAGEYRFFSYGDAMFITRNPAPRGPGEQL

SEQ ID NO: 71006 - protein, 349 aa, Pseudomonas plecoglossicida
  REGION 1..349: note = tr|S2JXW6|S2JXW6_9PSED S-adenosylmethionine:tRNA ribosyltransferase-isomerase OS=Pseudomonas plecoglossicida NB2011 OX=1330531 GN=queA PE=3 SV=1
MRVADFSFELPDSLIARHPLAERHGSRLLVLDGPSGALAHKQFTDLLDFLRPGDLMVFNNTRVIPARLFGQKASGGKLEVLVERVLDSHRVLAHVRASKAPKEGAVILIDGGGEAEMVARHDTLFELRFTEEVLPLLERVGHMPLPPYIDRPDEGADRERYQTVYAERAGAVAAPTAGLHFDEALLEKIAAKGVERAFVTLHVGAGTFQPVRVDKIEDHHMHKEWLEVSQDVVDAIAACRARSGRVVAVGTTSVRSLESAARDGVLKAFSGDTDIFIYPGRPFHVVDALVTNFHLPESTLLMLVSAFAGYPETMAAYAAAVEQGYRFFSYGDAMFITRNPAPRGPEDQA

SEQ ID NO: 71007 - protein, 349 aa, Pseudomonas plecoglossicida; identical to SEQ ID NO: 70975
  REGION 1..349: note = tr|A0A099MVV1|A0A099MVV1_9PSED S-adenosylmethionine:tRNA ribosyltransferase-isomerase; OS = Pseudomonas plecoglossicida OX=70775 GN=queA PE=3 SV=1

SEQ ID NO: 71008 - protein, 349 aa, Pseudomonas poae
  REGION 1..349: note = tr|A0A2A9H3B7|A0A2A9H3B7_9PSED S-adenosylmethionine:tRNA ribosyltransferase-isomerase; OS = Pseudomonas poae OX=200451 GN=queA PE=3 SV=1
MRVADFTFELPDSLIARHPLAERRASRLLTLDGVSGTLAHRQFTDLLEHLHPGDLMVFNNTRVIPARLFGQKASGGKLEILVERVLDSHRVLAHVRSSKSPKPGSSILIEGGGEAEMVARHDALFELRFAEEVLPLLERVGHMPLPPYIDRPDEDSDRERYQTVYSQRLGAVAAPTAGLHFDQLLLDAIAAKGVETAYVTLHVGAGTFQPVRVDNIEDHHMHSEWLEVSQDVVDAVSACKARGGRVVAVGTTSVRSLESAARDGVLKPFSGDTDIFIYPGRPFHVVDCLVTNFHLPESTLLMLVSAFAGYPETMAAYKAAIDNGYRFFSYGDAMFITRNPAPRGPEEQL

SEQ ID NO: 71009 - protein, 349 aa, Pseudomonas poae
  REGION 1..349: note = tr|A0A1H0KUH8|A0A1H0KUH8_9PSED S-adenosylmethionine:tRNA ribosyltransferase-isomerase; OS = Pseudomonas poae OX=200451 GN=queA PE=3 SV=1
MRVADFTFDLPDSLIARHPLAERRASRLLTLDGVSGALAHRQFTDLLEHLRPGDLMVFNNTRVIPARLFGQKASGGKLEILVERVLDSHRVLAHVRSSKSPKPGSSILIDGGGEAEMVARHDALFELKFAEEVLPLLERVGHMPLPPYIDRPDDEADRERYQTVYSQRLGAVAAPTAGLHFDQPLLDAIAAKGVESAYVTLHVGAGTFQPVRVDNIEDHHMHSEWLEVSQDVVDAVAACKARGGRVVAVGTTSVRSLESAARDGVLKPFSGDTDIFIYPGRPFHVVDCLVTNFHLPESTLLMLVSAFAGYPETMAAYQAAIANEYRFFSYGDAMFITRNPAPRGPEEQS

SEQ ID NO: 71010 - protein, 347 aa, Pseudomonas pohangensis
  REGION 1..347: note = tr|A0A1H2GMX0|A0A1H2GMX0_9PSED S-adenosylmethionine:tRNA ribosyltransferase-isomerase; OS = Pseudomonas pohangensis OX=364197 GN=queA PE=3 SV=1
MRVSDFHFDLPESLIASHPLAERRGSRLLVLDDPASAARHKAFADLPDYLNPGDLLVFNNTRVIPARLFGHKASGGKLEILVERVLDQHRVLAHVRSSKSPKPGTLIHIEGGGEAQMLARQDALFELRFAEEVLPLLERVGHMPLPPYIDRPDEAADRERYQTVYAEKSGAVAAPTAGLHFDQPMLDSLRAKGVETAFVTLHVGAGTFQPVRVERIEDHHMHSEWLEVSQAVVDAVAACKARGGRVVAVGTTSVRSLETAARSGELQAYCGDTDIFIFPGYRFRVVDALVTNFHLPESTLLMLVSAFSGYPQIMAAYAAAVEQQYRFFSYGDAMFLTRNPQATGPQD

SEQ ID NO: 71011 - protein, 354 aa, unidentified
  source 1..354: note = Pseudomonas prosekii
  REGION 1..354: note = tr|A0A2U2D2D7|A0A2U2D2D7_9PSED S-adenosylmethionine:tRNA ribosyltransferase-isomerase; OS = Pseudomonas prosekii OX=1148509 GN=queA PE=3 SV=1
MRVADFTFELPDSLIARHPLAERRGSRLLTLDGVSGALAHRQFTDLLEHLRPGDLMVFNNTRVIPARLFGQKASGGKLEILVERVLDSHRVLAHVRSSKSPKPGSKILIDGGGEAEMLARHDALFELAFAEEVLPLLDRVGHMPLPPYIDRPDEGSDRERYQTVYAERLGAVAAPTAGLHFDQPLMEAIAAKGIETTFVTLHVGAGTFQPVRVEKLEDHHMHTEWLEVGQDVVDAVAACRARGGRVVAVGTTSVRSLESAARDGVLKPFSGDTDIFIFPGRPFHVVDALVTNFHLPESTLLMLVSAFAGYPETMAAYKAAVEHGYRFFSYGDAMFITRNPAPTAPKESGPEETE

SEQ ID NO: 71012 - protein, 354 aa, unidentified
  source 1..354: note = Pseudomonas prosekii
  REGION 1..354: note = tr|A0A3L8CRU2|A0A3L8CRU2_9PSED S-adenosylmethionine:tRNA ribosyltransferase-isomerase; OS = Pseudomonas prosekii OX=1148509 GN=queA PE=3 SV=1
MRVADFTFELPDSLIARHPLAERRGSRLLTLDGVSGALAHRQFTDLLEHLRPGDLMVFNNTRVIPARLFGQKASGGKLEILVERVLDSHRVLAHVRSSKSPKRGSKILIDGGGEAEMLARHDALFELAFAEEVLPLLDRVGHMPLPPYIDRPDEGSDRERYQTVYAERLGAVAAPTAGLHFDQPLMEAIAAKGIETTFVTLHVGAGTFQPVRVEKLEDHHMHTEWLEVGQDVVDAVAACRARGGRVVAVGTTSVRSLESAARDGVLKPFSGDTDIFIFPGRPFHVVDALVTNFHLPESTLLMLVSAFAGYPETMAAYKAAVEHGYRFFSYGDAMFITRNPAPTAPKESGPEETE

SEQ ID NO: 71013 - protein, 354 aa, unidentified; identical to SEQ ID NO: 70904
  source 1..354: note = Pseudomonas protegens
  REGION 1..354: note = tr|A0A2C9ESY6|A0A2C9ESY6_PSEPH S-adenosylmethionine:tRNA ribosyltransferase-isomerase; OS = Pseudomonas protegens (strain DSM 19095 / LMG 27888 / CHA0) OX=1124983 GN=qu eA PE=3 SV=1

SEQ ID NO: 71014 - protein, 354 aa, unidentified
  source 1..354: note = Pseudomonas protegens
  REGION 1..354: note = tr|A0A2J7U8F7|A0A2J7U8F7_9PSED S-adenosylmethionine:tRNA ribosyltransferase-isomerase; OS = Pseudomonas protegens OX=380021 GN=queA PE=3 SV=1
MRVADFTFELPDSLIARHPLAERRGSRLLTLDGPTGALAHRQFTDLLEHLRPGDLMVFNNTRVIPARLFGQKASGGKLEILIERVLDSHRVLAHVRSSKSPKPGSKILIDGGGEAEMLARHDTLFELGFAEEVLPLLDRVGHMPLPPYIDRPDEGADRERYQTVYAQRLGAVAAPTAGLHFDQPLLEAIAAKGVETAFVTLHVGAGTFQPVRVERIEDHHMHHEWLEVGQDVVDAVAACRARGGRVVAVGTTSVRSLESAARDGVLKPFSGDTDIFIYPGRPFHVVDALVTNFHLPESTLLMLVSAFAGYPETMAAYRAAVENGYRFFSYGDAMFITRNPAPTAPKDLAPEETV

SEQ ID NO: 71015 - protein, 347 aa, Pseudomonas pseudoalcaligenes; identical to SEQ ID NO: 70988
  REGION 1..347: note = tr|W6RJ66|W6RJ66_PSEP5 S-adenosylmethionine:tRNA ribosyltransferase-isomerase OS=Pseudomonas pseudoalcaligenes (strain CECT 5344) OX=1182590 GN=queA; PE = 3 SV=1

SEQ ID NO: 71016 - protein, 353 aa, Pseudomonas psychrophila
  REGION 1..353: note = tr|A0A3N1ZLN1|A0A3N1ZLN1_9PSED S-adenosylmethionine:tRNA ribosyltransferase-isomerase; OS = Pseudomonas psychrophila OX=122355 GN=queA PE=3 SV=1
MRVADFTFELPDSLIARHPLAERRNSRLLTLDGQSGALAHRQFTDLLEHLRPGDLMVFNNTRVIPARLFGQKASGGKLEILVERVLDSHRVLAHVRSSKSPKPGSKILIDGGGEAEMLARHDALFELGFTDEVLPLLDRVGHMPLPPYIDRPDEGADRERYQTVYAQRLGAVAAPTAGLHFDEPLMQAIAAKGVETAFVTLHVGAGTFQPVRVERLEDHHMHTEWLEVGQDVVDAVAACRARGGRVIAVGTTSVRSLESAARDGVLKPFSGDTDIFIFPGRPFHVVDALVTNFHLPESTLLMLVSAFAGYPETMAAYQAAVEHGYRFFSYGDAMFITRNPAPTAPAPAPEDQA

SEQ ID NO: 71017 - protein, 353 aa, Pseudomonas psychrophila
  REGION 1..353: note = tr|S6HWQ3|S6HWQ3_9PSED S-adenosylmethionine:tRNA ribosyltransferase-isomerase OS=Pseudomonas psychrophila; OX = 122355 GN=queA PE=3 SV=1
MRVADFTFELPDSLIARHPLAERRNSRLLTLDGESGALAHRQFTDLLEHLRPGDLMVFNNTRVIPARLFGQKASGGKLEILVERVLDSHRVLAHVRSSKSPKPGSKILIDGGGEAEMLARHDALFELGFTEEVLPLLDRVGHMPLPPYIDRPDEGSDRERYQTVYAQRLGAVAAPTAGLHFDEPLMQAIAAKGVETAFVTLHVGAGTFQPVRVERLEDHHMHTEWLEVGQDVVDAVAACRARGGRVIAVGTTSVRSLESAARDGVLKPFSGDTDIFIFPGRPFHVVDALVTNFHLPESTLLMLVSAFAGYPETMAAYKAAVEHGYRFFSYGDAMFITRNPAPTAPAPAPEDQA

SEQ ID NO: 71018 - protein, 347 aa, Pseudomonas psychrotolerans
  REGION 1..347: note = tr|A0A1G5N6L0|A0A1G5N6L0_9PSED S-adenosylmethionine:tRNA ribosyltransferase-isomerase; OS = Pseudomonas psychrotolerans OX=237610 GN=queA PE=3 SV=1
MHVADFHFDLPESLIARHPLAERRGSRLLVLDGPSGELSHCHFADLLGYLRPGDLMVFNDTRVIPARLFGQKASGGKLEILVERVLDEERVLAHVRSSKSPKPGGRILIDGGAEAEMVARHEALFELKFAEPVLPLLERVGHMPLPPYIDRPDEAEDRERYQTVYARNAGAVAAPTAGLHFDEPLLEAIRAKGVATAFVTLHVGAGTFQPVRVERIEDHHMHREWLQVDQAVVDAVAACRAQGGRVIAVGTTSVRSLESAARDGELKAFAGETDIFLYPGRPFHVVDALVTNFHLPESTLLMLVSAFAGYRETMAAYATAVAEGYRFFSYGDAMFITRNPGAQGPES

SEQ ID NO: 71019 - protein, 347 aa, Pseudomonas psychrotolerans
  REGION 1..347: note = tr|A0A4Y5WAV2|A0A4Y5WAV2_9PSED S-adenosylmethionine:tRNA ribosyltransferase-isomerase; OS = Pseudomonas psychrotolerans OX=237610 GN=queA PE=3 SV=1
MHVADFHFDLPESLIARHPLAERRGSRLLVLDGPSGELSHRHFADLLGYLQPGDLMVFNDTRVIPARLFGQKASGGKLEILVERVLDEERVLAHVRSSKSPKPGSRILIDGGAEAEMVARHDALFELKFAEPVLPLLERVGHMPLPPYIDRPDEAEDRERYQTVYARNAGAVAAPTAGLHFDEPLLEAIRAKGVATAFVTLHVGAGTFQPVRVERIEDHHMHREWLQVDQGVVDAVAACRARGGRVIAVGTTSVRSLESAARDGELKAFAGETDIFLYPGRPFHVVDALVTNFHLPESTLLMLVSAFAGYRETMAAYATAVAEGYRFFSYGDAMFITRNPGAQGPES

SEQ ID NO: 71020 - protein, 373 aa, unidentified
  source 1..373: note = Pseudomonas punonensis
  REGION 1..373: note = tr|A0A1M6WWV6|A0A1M6WWV6_9PSED S-adenosylmethionine:tRNA ribosyltransferase-isomerase; OS = Pseudomonas punonensis OX=1220495 GN=queA PE=3 SV=1
MHLRGQITGIPVSCSALQYDTFSIMRVADFHFDLPDAQIARHPLSERRASRLLIVDGASGALAHRQFADLLEYLRPGDLMVFNNTRVIPARLFGQKATGGKLEILIERVLDEHRVLAHVRSSKSPKPGSMIEIDGGGQAQMLARHDALFELGFDEPVLPLLERVGHMPLPPYIDRPDEDADRERYQTVYAQKAGAVAAPTAGLHFDEELLAALREKGVESVFVTLHVGAGTFQPVRVERIEDHHMHSEWLEVSQDVVDAVQACRARGGRVVAVGTTSVRSLESAARDGELKPFSGDTDIFIYPGRPFHVVDALVTNFHLPESTLLMLVSAFAGYPETMAAYAEAVAEGYRFFSYGDAMFITRNPAPRGPEDSV

SEQ ID NO: 71021 - protein, 349 aa, Pseudomonas putida
  REGION 1..349: note = sp|Q88PL8|QUEA_PSEPK S-adenosylmethionine:tRNA ribosyltransferase-isomerase OS=Pseudomonas putida (strain ATCC 47054 / DSM 6125 / NCIMB 11950 / KT2440) OX=160488; GN = queA PE=3 SV=1
MRVADFSFELPDSLIARHPLAERHGSRLLVLDGPTGALAHRQFPDLLDYLRPGDLMVFNNTRVIPARLFGQKASGGKLEVLVERVLDSHRVLAHVRASKAPKVGAVILIDGGGEAEMVARHDTLFELRFTEEVLPLLDRVGHMPLPPYIDRPDEGADRERYQTVYAQRAGAVAAPTAGLHFDEALLEKIADKGVERAFVTLHVGAGTFQPVRVDKIEDHHMHKEWLEVGQDVVDAIEACRARGGRVIAVGTTSVRSLESAARDGVLKAFSGDTDIFIYPGRPFHVVDCLVTNFHLPESTLLMLVSAFAGYPETMAAYAAAVEHGYRFFSYGDAMFITRNPAPRGPEDQA

SEQ ID NO: 71022 - protein, 349 aa, Pseudomonas putida
  REGION 1..349: note = tr|A0A1X1AAG7|A0A1X1AAG7_PSEPU S-adenosylmethionine:tRNA ribosyltransferase-isomerase; OS = Pseudomonas putida OX=303 GN=queA PE=3 SV=1
MRVADFSFELPDSLIARHPLAERHGSRLLVLDGPTGALAHRQFPDLLDYLRPGDLMVFNNTRVIPARLFGQKASGGKLEVLVERVLDSHRVLAHVRASKAPKVGAVILIDGGGEAEMVARHDTLFELRFTEEVLPLLDRVGHMPLPPYIDRPDEGADRERYQTVYAQRAGAVAAPTAGLHFDEALLEKIAAKGVERAFVTLHVGAGTFQPVRVDKIEDHHMHKEWLEVGQDVVDAIEACRARGGRVIAVGTTSVRSLESAARDGVLKAFSGDTDIFIYPGRPFHVVDALVTNFHLPESTLLMLVSAFAGYPETMAAYAAAVEHGYRFFSYGDAMFITRNPAPRGPEDQA

SEQ ID NO: 71023 - protein, 349 aa, unidentified
  source 1..349: note = Pseudomonas reidholzensis
  REGION 1..349: note = tr|A0A383RZQ4|A0A383RZQ4_9PSED S-adenosylmethionine:tRNA ribosyltransferase-isomerase; OS = Pseudomonas reidholzensis OX=1785162 GN=queA PE=3 SV=1
MRVADFSFELPDSLIARHPLAERHGSRLLVLDGPSGALAHQQFTDLLAYLRPGDLMVFNNTRVIPARLFGQKASGGKLEVLVERVLDSHRVLAHVRASKAPKVGAQILIDGGGEAEMVARHDTLFELRFTEEVLPLLDRVGHMPLPPYIDRPDEGADRERYQTVYAERAGAVAAPTAGLHFDQALLDKIAAKGVERAFVTLHVGAGTFQPVRVDKIEDHHMHKEWLEVSQDVVDAVEACRARGGRVVAVGTTSVRSLESAARDGQLKAFSGDTDIFIFPGRPFHVVDALVTNFHLPESTLLMLVSAFAGYPETMAAYAAAVEQGYRFFSYGDAMFITRNPAPRGPEDQA

SEQ ID NO: 71024 - protein, 354 aa, Pseudomonas reinekei
  REGION 1..354: note = tr|A0A1H0LNE2|A0A1H0LNE2_9PSED S-adenosylmethionine:tRNA ribosyltransferase-isomerase; OS = Pseudomonas reinekei OX=395598 GN=queA PE=3 SV=1
MRVADFTFELPDSLIARHPLAERRNSRLLTLDGVSGALAHRQFTDLLEHLRPGDLMVFNNTRVIPARLFGQKASGGKLEILVERVLDSHRVLAHVRSSKSPKPGSKILIDGGGEAEMLARHDALFELGFAEEVLPLLDRVGHMPLPPYIDRPDEGSDRERYQTVYAQRLGAVAAPTAGLHFDQPLLEAIAAKGIETAFVTLHVGAGTFQPVRVEKLEDHHMHTEWLEVGQDVVDAVAACRARGGRVVAVGTTSVRSLESAARDGVLKPFSGDTDIFIYPGRPFHVVDALVTNFHLPESTLLMLVSAFAGYPETMAAYKAAVGNGYRFFSYGDAMFITRNPAPTAPKESGPEETV

SEQ ID NO: 71025 - protein, 349 aa, Pseudomonas resinovorans
  REGION 1..349: note = tr|S6AS34|S6AS34_PSERE S-adenosylmethionine:tRNA ribosyltransferase-isomerase OS=Pseudomonas resinovorans NBRC 106553 OX=1245471 GN=queA PE=3 SV=1
MRVADFHFELPEALIARHPLAERRASRLLVLNGETAELSHRHFADLLEYLREGDLMVFNNTRVIPARLFGQKASGGKLEILVERVLDSHRVLAHVRSSKSPKPGTTLLIDGGGEAEMIARHDALFELKFAEEVLPLLERVGHMPLPPYIDRPDDEADRERYQTVYARHAGAVAAPTAGLHFDQALLDAIAAKGVEKAFVTLHVGAGTFQPVRVERIEDHHMHQEWLEVGQDVVDAVAACRARGGRVIAVGTTSVRSLESAARDGQLKAFSGDTDIFLYPGRPFHVVDALVTNFHLPESTLLMLVSAFAGYPETMAAYAAAVEQGYRFFSYGDAMFITRNPAPRGPEDQA

SEQ ID NO: 71026 - protein, 354 aa, Pseudomonas rhizosphaerae
  REGION 1..354: note = tr|A0A089YJE8|A0A089YJE8_9PSED S-adenosylmethionine:tRNA ribosyltransferase-isomerase; OS = Pseudomonas rhizosphaerae OX=216142 GN=queA PE=3 SV=1
MRVADFSFELPDSLIARHPLAERHGSRLLVLDGLSGALDHRQFTDLPGFLRPGDLMVFNNTRVIPARVFGQKASGGKLEILVERVLDSHRVLAHVRSSKSPKPGSMILIDGGGEAEMVARHDALFELRFNEEVLPLLDKVGHMPLPPYIDRPDDTADRERYQTVYAEKAGAVAAPTAGLHFDKALLAQIEAMGVETAFVTLHVGAGTFQPVRVEKLEDHHMHKEWLEVSQDVVDAVQACKARGGRVVAVGTTSVRSLESAARDGVLKPFSGDTDIFIFPGRPFHVVDALVTNFHLPESTLLMLVSAFAGYPEAMAAYAAAVANEYRFFSYGDAMFITRNPAPRGPSEAAPGDQA

SEQ ID NO: 71027 - protein, 349 aa, Pseudomonas rhodesiae
  REGION 1..349: note = tr|A0A5C5NS00|A0A5C5NS00_9PSED S-adenosylmethionine:tRNA ribosyltransferase-isomerase; OS = Pseudomonas rhodesiae OX=76760 GN=queA PE=3 SV=1
MRVADFTFELPDSLIARHPLAERHASRLLTLDGPSGALAHRQFTDLLEHLRPDDLMVFNNTRVIPARLFGQKASGGKLEILVERVLDSHRVLAHVRSSKSPKPGSSLLIDGGGEAEMVARHDALFELKFAEEVLPLLERVGHMPLPPYIDRPDEDADRERYQTVYSQRLGAVAAPTAGLHFDQPLLEAIAAKGVETAYVTLHVGAGTFQPVRVENIEDHHMHSEWLEVTQDVVDAVNACKSRGGRVIAVGTTSVRSLESAARDGVLKPFSGDTDIFIYPGRPFHVVDCLVTNFHLPESTLLMLVSAFAGYPETMAAYQAAIENGYRFFSYGDAMFITRNPAPRGPEEQL

SEQ ID NO: 71028 - protein, 349 aa, Pseudomonas sabulinigri
  REGION 1..349: note = tr|A0A1H1RCB1|A0A1H1RCB1_9PSED S-adenosylmethionine:tRNA ribosyltransferase-isomerase; OS = Pseudomonas sabulinigri OX=472181 GN=queA PE=3 SV=1
MRLSDFAFDLPDELIARHPLAERRGSRLLCLDGPSGELSHRRFVDLLEYLQPGDLMVFNNTRVIPARLFGRKETGGQLEVLVERVLDEHRVLAHIRSSKSPKPGSKILLEGDASAEMVARHAALFELRFAEPVLPLLDRVGHMPLPPYIDRADDSADRERYQTVYAKRQGAVAAPTAGLHFDAGMLQAIRDKGVETAEVTLHVGAGTFQPVRVERIEEHVMHQEWLEVGPEVVAAVEQCKARGGRVIAVGTTSVRSLESAARDGVLKPFSGDTDIFLYPGRPFHVVDALVTNFHLPESTLLMLVSAFAGYPETMAAYAAAVAERYRFFSYGDAMFITRNPAPRGPEVSQ

SEQ ID NO: 71029 - protein, 351 aa, unidentified
  source 1..351: note = Pseudomonas sagittaria
  REGION 1..351: note = tr|A0A1I5NZV5|A0A1I5NZV5_9PSED S-adenosylmethionine:tRNA ribosyltransferase-isomerase; OS = Pseudomonas sagittaria OX=1135990 GN=queA PE=3 SV=1
MRVADFHFELPDLLIARHPLAERRASRLLVLDGPSGQLSHRHFPDLLEYLRPGDLMVFNDTRVIPARLFGHKASGGKLEILVERVLDSQRVLAHVRASKAPKPGMRILIDGGGEAEMLVRHDALFELRFAEPVLPLLERVGHMPLPPYIDRPDEDADRERYQTVYSDQSKAGAVAAPTAGLHFDDALLAAIRAKGVATAFVTLHVGAGTFQPVRVERIEDHHMHSEWLEVGQDVVDAVAACKARGGRVVAVGTTSVRSLESAARDGVLKPFSGDTDIFIYPGRPFHVVDALVTNFHLPESTLLMLVSAFAGYPETMAAYRAAVAAGYRFFSYGDAMFITRNPAARGPEETP

SEQ ID NO: 71030 - protein, 349 aa, unidentified
  source 1..349: note = Pseudomonas salegens
  REGION 1..349: note = tr|A0A1H2GVU9|A0A1H2GVU9_9PSED S-adenosylmethionine:tRNA ribosyltransferase-isomerase; OS = Pseudomonas salegens OX=1434072 GN=queA PE=3 SV=1
MRVRDFHFELPERLIAHHPLAERRGSRLLCLDGPTGALAHRQFVDLLDQLQPGDLMVFNNTRVIPARLFGRKATGGQLEILVERVLDSHRVLAHVRASKSPKPGSEILLEDGSRVEMLGRKDALFELGFADEVLPLLERIGHMPLPPYIDRPDETADRERYQTVYAQKAGAVAAPTAGLHFDKALLAAIKTKGVEMAEVTLHVGAGTFQPVRVERIEEHHMHSEWLDVSPEVVAAVDACKARGGRVIAVGTTSVRSLETAAQSGTLQPFSGDTDIFLYPGRPFHVVDALVTNFHLPESTLLMLVSAFAGYPETMAAYAAAVDQGYRFFSYGDAMFITRNPAPSGPEDVS

SEQ ID NO: 71031 - protein, 299 aa, Pseudomonas salomonii
  REGION 1..299: note = tr|A0A1H3T9Y2|A0A1H3T9Y2_9PSED S-adenosylmethionine:tRNA ribosyltransferase-isomerase; OS = Pseudomonas salomonii OX=191391 GN=queA PE=3 SV=1
MVFNNTRVIPARLFGQKASGGKLEILVERVLDSHRVLAHVRSSKSPKPGSSILIDGGGEAEMVARHDALFELKFAEEVLPLLERVGHMPLPPYIDRPDEDSDRERYQTVYSQRLGAVAAPTAGLHFDQPLLDAIAAKGVESAYVTLHVGAGTFQPVRVDNIEDHHMHSEWLEVSQDVVDAVAACKARGGRVVAVGTTSVRSLESAARDGVLKPFSGDTDIFIFPGRPFHVVDCLVTNFHLPESTLLMLVSAFAGYPETMAAYKAAIDNGYRFFSYGDAMFITRNPAPTAPKEAGHEEQL

SEQ ID NO: 71032 - protein, 354 aa, Pseudomonas salomonii
  REGION 1..354: note = tr|A0A3M4Q7Z1|A0A3M4Q7Z1_9PSED S-adenosylmethionine:tRNA ribosyltransferase-isomerase; OS = Pseudomonas salomonii OX=191391 GN=queA PE=3 SV=1
MRVADFTFELPDSLIARHPLAERRASRLLTLDGVSGALAHRQFTDLLEHLRPGDLMVFNNTRVIPARLFGQKASGGKLEILVERVLDSHRVLAHVRSSKSPKPGSSILIDGGGEAEMVARHDALFELKFAEEVLPLLERVGHMPLPPYIDRPDEDSDRERYQTVYSQRLGAVAAPTAGLHFDQPLLDAIAAKGVESAYVTLHVGAGTFQPVRVDNIEDHHMHSEWLEVSQDVVDAVAACKARGGRVVAVGTTSVRSLESAARDGVLKPFSGDTDIFIFPGRPFHVVDCLVTNFHLPESTLLMLVSAFAGYPETMAAYKAAIDNGYRFFSYGDAMFITRNPAPTAPKEAGHEEQL

SEQ ID NO: 71033 - protein, 354 aa, Pseudomonas saponiphila
  REGION 1..354: note = tr|A0A1H4K7W3|A0A1H4K7W3_9PSED S-adenosylmethionine:tRNA ribosyltransferase-isomerase; OS = Pseudomonas saponiphila OX=556534 GN=queA PE=3 SV=1
MRVADFTFELPDSLIARHPLAERRGSRLLTLDGPTGALAHRQFTDLLEHLRPGDLMVFNNTRVIPARLFGQKASGGKLEILIERVLDSHRVLAHVRSSKSPKPGSKILIEGGGEAEMLARHDTLFELGFAEEVLPLLDRVGHMPLPPYIDRPDEGADRERYQTVYAQRLGAVAAPTAGLHFDQPLLEAIAAKGVETAFVTLHVGAGTFQPVRVERIEDHHMHHEWLEVGQDVVDAVAACRARGGRVVAVGTTSVRSLESAARDGVLKPFSGDTDIFIYPGRPFHVVDALVTNFHLPESTLLMLVSAFAGYPETMAAYRAAVENGYRFFSYGDAMFITRNPAPTAPKDLAPEETV

SEQ ID NO: 71034 - protein, 349 aa, unidentified
  source 1..349: note = Pseudomonas saudimassiliensis
  REGION 1..349: note = tr|A0A078MA36|A0A078MA36_9PSED S-adenosylmethionine:tRNA ribosyltransferase-isomerase; OS = Pseudomonas saudimassiliensis OX=1461581 GN=queA PE=3; SV = 1
MRVSDFQFELPDRLIARHPLAERRASRLLCLDGPSGELAHRQFADLLEYLRPGDLMVFNNTRVIPARLFGRKETGGQLEILVERVLDNRRVLAHVRSSKSPKPGSRILLEGDSTATMVARHDALFELEFDEPVLPLLDRVGHMPLPPYIDRPDESADRERYQTVYAQRAGAVAAPTAGLHFDQELLQAIAAKGVATAQVTLHVGAGTFQPVRVERIEDHHMHSEWLEVGQDVVDAVHACKARGGRVIAVGTTSVRSLETAARDGQLKAFSGDTDIFIYPGRPFHVVDALVTNFHLPESTLLMLVSAFAGYPETMAAYQAAVDHDYRFFSYGDAMFITRNPAACGPEDVQ

SEQ ID NO: 71035 - protein, 349 aa, unidentified
  source 1..349: note = Pseudomonas saudiphocaensis
  REGION 1..349: note = tr|A0A078LNF0|A0A078LNF0_9PSED S-adenosylmethionine:tRNA ribosyltransferase-isomerase; OS = Pseudomonas saudiphocaensis OX=1499686 GN=queA PE=3 SV=1
MQVSAFSFELPDSLIARHPLAERRASRLLVLDGPTGRMAHQGFADLLEHVRPGDLMVFNNTRVIPARLFGQKDTGGRLEVLVERVLDSNRVLAHIRSSKSPKPGSRIQIDGGGEALMLARHDALFELEFAEEVLPLLERVGHMPLPPYIDRPDDSADRERYQTVYARHTGAVAAPTAGLHFDAALLDALRDKGVETAFVTLHVGAGTFQPVRVERIEDHHMHSEWLQVGQDVVDAVLACRERGGRVIAVGTTSVRSLESAARDGTLKAFSGDTDIFIYPGRPFHVVDALVTNFHLPESTLLMLVSAFAGYPETMAAYAEAVAEGYRFFSYGDAMFITRNPAPRGPEETQ

SEQ ID NO: 71036 - protein, 349 aa, unidentified
  source 1..349: note = Pseudomonas saudiphocaensis
  REGION 1..349: note = tr|A0A427EEQ0|A0A427EEQ0_9PSED S-adenosylmethionine:tRNA ribosyltransferase-isomerase; OS = Pseudomonas saudiphocaensis OX=1499686 GN=queA PE=3 SV=1
MQVSAFSFELPDSLIARHPLAERRASRLLVLDGPTGRMAHQGFADLLEHVRPGDLMVFNNTRVIPARLFGQKDTGGRLEVLVERVLDSNRVLAHIRSSKSPKPGSRIQIDGGGEALMLARHDALFELEFAEEVLPLLERVGHMPLPPYIDRPDDSADRERYQTVYARHTGAVAAPTAGLHFDAALLDALRDKGVETAFVTLHVGAGTFQPVRVERIEDHHMHSEWLQVGQDVVDAVLACRERGGRVIAVGTTSVRSLESAARDGTLKAFSGDTDIFIYPGRPFHVVDALVTNFHLPESTLLMLVSAFAGYPETMEAYAEAVAEGYRFFSYGDAMFITRNPAPRGPEETQ

SEQ ID NO: 71037 - protein, 190 aa, Pseudomonas savastanoi
  REGION 1..190: note = tr|A0A3M5X4J4|A0A3M5X4J4_PSESG S-adenosylmethionine:tRNA ribosyltransferase-isomerase (Fragment) OS=Pseudomonas savastanoi pv. glycinea OX=318; GN = ALQ66_04635 PE=3 SV =1
MMRVADFTFELPDSLIARHPLVERRSSRLLTLDGPTGALAHRQFTDLLEHLRPGDLMVFNNTRVIPARLFGQKASGGKLEILVERVQDSHRVLAHVRSSKSPKPGSSILIDGGGEAEMVARHDALFELRFAEEVLPLLERVGHMPLPPYIDRPDEGADRERYQTVYAQRAGAVAAPTAGLHFDQPLLEAI

SEQ ID NO: 71038 - protein, 354 aa, Pseudomonas savastanoi
  REGION 1..354: note = sp|Q48M15|QUEA_PSE14 S-adenosylmethionine:tRNA ribosyltransferase-isomerase OS=Pseudomonas savastanoi pv. phaseolicola (strain 1448A / Race 6) OX=264730 GN=queA; PE = 3SV=1
MRVADFTFELPDSLIARHPLAERRSSRLLTLDGPTGALAHRQFTDLLEHLRPGDLMVFNNTRVIPARLFGQKASGGKLEILVERVLDSHRVLAHVRSSKSPKPGSSILIDGGGEAEMVARHHALFELRFAEEVLPLLERVGHMPLPPYIDRPDEGADRERYQTVYAQRAGAVAAPTAGLHFDQPLLEAIAAKGVETAFVTLHVGAGTFQPVRVEQIEDHHMHSEWLEVGQDVVDAVAACRARGGRVIAVGTTSVRSLESAARDGELKSFSGDTDIFIYPGRPFHVVDALVTNFHLPESTLLMLVSAFAGYPETMAAYAGAIEHGYRFFSYGDAMFITRNPAPTAPQESAPEDHA

SEQ ID NO: 71039 - protein, 349 aa, Pseudomonas segetis
  REGION 1..349: note = tr|A0A238ZH65|A0A238ZH65_9PSED S-adenosylmethionine:tRNA ribosyltransferase-isomerase; OS = Pseudomonas segetis OX=298908 GN=queA PE=3 SV=1
MRVADFHFDLPEALIARHPLTERRASRLLTVDGPSGALGHRQFSDLLEFLRPGDLMVFNNTRVIPARLFGQKASGGKLEILVERVLDSHRVLAHVRSSKSPKPGSSILLEGGGEAEMVARHDALFELRFAEEVLPLLERVGHMPLPPYIDRPDDAADRERYQTVYAQRAGAVAAPTAGLHFDEALMAAIADKGIETAFVTLHVGAGTFQPVRVERIEDHHMHSEWLEVGQDVVDAVAACRARGGRVIAVGTTSVRSLETAARDGELKPFSGDTDIFIYPGRPFHVVDALVTNFHLPESTLLMLVSAFAGYPETMAAYQSAVAEGYRFFSYGDAMFITRNPAARGPEDHV

SEQ ID NO: 71040 - protein, 349 aa, Pseudomonas seleniipraecipitans
  REGION 1..349: note = tr|A0A1G7JA60|A0A1G7JA60_9PSED S-adenosylmethionine:tRNA ribosyltransferase-isomerase; OS = Pseudomonas seleniipraecipitans OX=640205 GN=queA PE=3; SV = 1
MRVADFHFDLPDEQIARHPLAERRASRLLVLDGASGALADRHFADLLEYLRPGDLMVFNNTRVIPARLFGQKASGGKLEVLVERVLDEYRVLAHVRASKSPKAGTMIVLEGGAQAQMVARHDALFELRFDEAVLPLLERVGHMPLPPYIDRADQASDRERYQTVYAQKAGAVAAPTAGLHFDGELLASLRERGVESAFVTLHVGAGTFQPVRVERIEDHHMHSEWLEVSQDVVDAVQACRARGGRVVAVGTTSVRSLESAARDGELKPFTGDTDIFIYPGRPFHVVDALVTNFHLPESTLLMLVSAFAGYAETMAAYAQAVAEGYRFFSYGDAMFITRNPAPRGPEEFL

SEQ ID NO: 71041 - protein, 347 aa, unidentified
  source 1..347: note = Pseudomonas sihuiensis
  REGION 1..347: note = tr|A0A1H2M4Y3|A0A1H2M4Y3_9PSED S-adenosylmethionine:tRNA ribosyltransferase-isomerase; OS = Pseudomonas sihuiensis OX=1274359 GN=queA PE=3 SV=1
MRVADFHFDLPESLIARHPLAERRASRLLQLDGPTGALRHGQFTDVLEQLRPGDLMVFNDTRVIPARLFGQKASGGKLEVLVERVLDQYRVLAHVRSSKSPKPGSQILIDGGAEAEMVARHDALFELRFAEPVLPLLERVGHMPLPPYIDRPDDEADRERYQTVYAQKAGAVAAPTAGLHFDDELLAAIRAKGVETAFVTLHVGAGTFQPVRVERIEDHHMHSEWLEVGQGVVDAVAACRARGGRVVAVGTTSVRSLETAARDGELKPFSGDTDIFIYPGRPFHVVDALVTNFHLPESTLLMLVSAFAGYPETMAAYREAVAQGYRFFSYGDAMFITRNPAARGPEV

SEQ ID NO: 71042 - protein, 349 aa, unidentified
  source 1..349: note = Pseudomonas silesiensis
  REGION 1..349: note = tr|A0A191YZD6|A0A191YZD6_9PSED S-adenosylmethionine:tRNA ribosyltransferase-isomerase; OS = Pseudomonas silesiensis OX=1853130 GN=queA PE=3 SV=1
MRVADFTFELPDSLIARHPLAERRNSRLLTLDGVSGALAHRQFTDLLEHLRPGDLMVFNNTRVIPARLFGQKASGGKLEILVERVLDSHRVLAHVRSSKSPKPGSKILIDGGGEAEMLARHDALFELGFAEEVLPLLDRVGHMPLPPYIDRPDEGSDRERYQTVYAERLGAVAAPTAGLHFDQPLMEAIAAKGVETAFVTLHVGAGTFQPVRVEKIEDHHMHSEWLEVGQDVVDAVAACRARGGRVVAVGTTSVRSLESAARDGVLKPFSGDTDIFIYPGRPFHVVDALVTNFHLPESTLLMLVSAFAGYPEAMAAYKAAVEHGYRFFSYGDAMFITRNPAPRGPEETV

SEQ ID NO: 71043 - protein, 347 aa, Pseudomonas simiae
  REGION 1..347: note = tr|A0A1N7URC0|A0A1N7URC0_9PSED S-adenosylmethionine:tRNA ribosyltransferase-isomerase; OS = Pseudomonas simiae OX=321846 GN=queA PE=3 SV=1
MRVADFTFELPDSLIARHPLAERRASRLLTLDGVSGALAHRQFTDLLEHLRPGDLMVFNNTRVIPARLFGQKASGGKLEILVERVLDSHRVLAHVRSSKSPKPGSSILIDGGGEAEMVARHDALFELRFAEEVLPLLERVGHMPLPPYIDRPDEDSDRERYQTVYSQRLGAVAAPTAGLHFDQPLLDAIAAKGVETAYVTLHVGAGTFQPVRVDNIEDHHMHSEWLEVSQDVVDAVAACKARGGRVVAVGTTSVRSLESAARDGVLKPFSGDTDIFIYPGRPFHVVDCLVTNFHLPESTLLMLVSAFAGYPETMAAYQAAIANEYRFFSYGDAMFITRNPAPRGPEE

SEQ ID NO: 71044 - protein, 347 aa, Pseudomonas simiae
  REGION 1..347: note = tr|A0A2T0HVD9|A0A2T0HVD9_9PSED S-adenosylmethionine:tRNA ribosyltransferase-isomerase; OS = Pseudomonas simiae OX=321846 GN=queA PE=3 SV=1
MRVADFTFELPDSLIARHPLAERRASRLLTLDGVSGALAHRQFTDLLEHLRPGDLMVFNNTRVIPARLFGQKASGGKLEILVERVLDSHRVLAHVRSSKSPKPGSSILIDGGGEAEMVARHDALFELRFAEEVLPLLERVGHMPLPPYIDRPDEDSDRERYQTVYSQRLGAVAAPTAGLHFDQPLLDAIAAKGVETAYVTLHVGAGTFQPVRVDNIEDHHMHSEWLEVSQDVVDAVVACKARGGRVVAVGTTSVRSLESAARDGVLKPFSGDTDIFIYPGRPFHVVDCLVTNFHLPESTLLMLVSAFAGYPETMAAYQAAIANEYRFFSYGDAMFITRNPAPRGPEE

SEQ ID NO: 71045 - protein, 349 aa, unidentified
  source 1..349: note = Pseudomonas soli
  REGION 1..349: note = tr|A0A2V4I8A5|A0A2V4I8A5_9PSED S-adenosylmethionine:tRNA ribosyltransferase-isomerase; OS = Pseudomonas soli OX=1306993 GN=queA PE=3 SV=1
MRVADFSFELPDSLIARHPLAERHGSRLLVLDGPSGELAHKQFTDLLDYLRPGDLMVFNNTRVIPARLFGQKASGGKLEVLVERVLDSHRVLAHVRASKAPKEGAQILIDGGGEAEMVARHDTLFELRFSEEVLPLLERVGHMPLPPYIDRPDEGADRERYQTVYAQRAGAVAAPTAGLHFDEALLEKIAAKGVERAFVTLHVGAGTFQPVRVDKIEDHTMHKEWLEVGQDVVDAVQACRARGGRVIAVGTTSVRSLESAARDGELKAFSGDTDIFIFPGRPFHVVDCLVTNFHLPESTLLMLVSAFAGYPETMAAYAAAVANGYRFFSYGDAMFITRNPAPRGPEDQA

SEQ ID NO: 71046 - protein, 349 aa, unidentified
  source 1..349: note = Pseudomonas soli
  REGION 1..349: note = tr|A0A1H9NIM3|A0A1H9NIM3_9PSED S-adenosylmethionine:tRNA ribosyltransferase-isomerase; OS = Pseudomonas soli OX=1306993 GN=queA PE=3 SV=1
MRVADFSFELPDSLIARHPLVERHGSRLLVLDGPSGELAHKQFTDLLDYLRPGDLMVFNNTRVIPARLFGQKASGGKLEVLVERVLDNHRVLAHVRASKAPKEGAQILIDGGGEAEMVARHDTLFELRFSEEVLPLLERVGHMPLPPYIDRPDEGADRERYQTVYAQRAGAVAAPTAGLHFDEALLEKIAAKGVERAFVTLHVGAGTFQPVRVDKIEDHTMHKEWLEVSQDVVDAVQACRARGGRVVAVGTTSVRSLESAARDGELKAFSGDTDIFIFPGRPFHVVDCLVTNFHLPESTLLMLVSAFAGYPETMAAYAAAVANGYRFFSYGDAMFITRNPAPRGPEDQA

SEQ ID NO: 71047 - protein, 349 aa, unidentified
  source 1..349: note = Pseudomonas songnenensis
  REGION 1..349: note = tr|A0A482UDC4|A0A482UDC4_9PSED S-adenosylmethionine:tRNA ribosyltransferase-isomerase; OS = Pseudomonas songnenensis OX=1176259 GN=queA PE=3 SV=1
MQVADFFFQLPDALIARHPLAERRASRLLVLDGETGKLSHRNFAELLEYVRPGDLMVFNNTRVIPARLFGQKATGGKLEILVERVLGSRRVLAHIRSSKSPKAGSRILLDGGGEAEMVARHDALFELEFDEDVLSLLERIGHMPLPPYIDRPDDAADRERYQTVYAQRAGAVAAPTAGLHFDEALLDSLREVGVETAYVTLHVGAGTFQPVRVERIEEHHMHREWLEVTQEVVDAVAACRARGGRVIAVGTTSVRSLETAAHDGELKPFSGDTDIFIYPGKTFHVVDALVTNFHLPESTLLMLVSAFAGYPETMAAYAEAVAQRYRFFSYGDAMFITRNPAPRGPEESQ

SEQ ID NO: 71048 - protein, 354 aa, Pseudomonas sp.
  REGION 1..354: note = tr|A0A399PVT8|A0A399PVT8_9PSED S-adenosylmethionine:tRNA ribosyltransferase-isomerase; OS = Pseudomonas sp. 91RF OX=2292261 GN=queA PE=3 SV=1
MRVADFTFELPDSLIARHPLAERRGSRLLTLDGVSGALAHRQFTDLLEHLRPGDLMVFNNTRVIPARLFGQKESGGKLEILIERVLDTHRVLAHVRSSKSPKPGSKILIDGGGEAEMLARHDALFELGFSEEVLPLLDRVGHMPLPPYIDRPDEGSDRERYQTVYAEKLGAVAAPTAGLHFDQTLMEAIAAKGVETAFVTLHVGAGTFQPVRVEKIEDHHMHTEWLEVGQDVVDAVAACRTRGGRVIAVGTTSVRSLESAARDGVLKPFSGDTDIFIYPGRPFHVVDALVTNFHLPESTLLMLVSAFAGYPETMAAYKAAVDNGYRFFSYGDAMFITRNPAPTAPEQTGPEETE

SEQ ID NO: 71049 - protein, 349 aa, Pseudomonas sp.
  REGION 1..349: note = tr|A0A0T6V7Z4|A0A0T6V7Z4_9PSED S-adenosylmethionine:tRNA ribosyltransferase-isomerase; OS = Pseudomonas sp. TTU2014-105ASC OX=1729726 GN=queA PE=3; SV = 1
MQVADFSFQLPDALIARHPLEERRASRLLVLDGETGRLAHRNFANLLEYVRPGDLMVFNNTRVIPARLFGQKATGGKLEILVERVLGSRSVLAHIRSSKSPRSGSKILLDGGGEAEMVARHDALFELEFDEDVLPLLERIGHMPLPPYIDRPDDAADRERYQTVYAQREGAVAAPTAGLHFDKAMLEALREARVETAYVTLHVGAGTFQPVRVERIEEHHMHREWLEVDQGVVDAVTACRARGGRVIAVGTTSVRSLETAARDGQLKPFSGDTDIFIYPGKTFHVVDALVTNFHLPESTLLMLVSAFAGYPETMAAYAEAVSQRYRFFSYGDAMFITRNPAPRGPEEKQ

SEQ ID NO: 71050 - protein, 373 aa, Pseudomonas straminea
  REGION 1..373: note = tr|A0A1I1V6M1|A0A1I1V6M1_PSEOC S-adenosylmethionine:tRNA ribosyltransferase-isomerase; OS = Pseudomonas straminea OX=47882 GN=queA PE=3 SV=1
MRSRGHLQGIPVSCSALQYDTLPIMRVADFHFDLPDERIARHPLAERRASRLLILDGASGALAHRQFADLLEYLRPGDLMVFNNTRVIPARLFGQKATGGKLEILVERVLDEHRVLAHIRSSKSPKPGSLIDIDGGAQAQMLARHDALFELRFEEPVLPLLERVGHMPLPPYIDRPDDAADRERYQTVYAQKAGAVAAPTAGLHFDDELLAALREKGVESAFVTLHVGAGTFQPVRVERIEDHHMHSEWLEVSQDVVDAVEACRARGGRVVAVGTTSVRSLESAARDGELKPFSGDTDIFIYPGRPFHVVDALVTNFHLPESTLLMLVSAFAGYPETMAAYAEAVAEGYRFFSYGDAMFITRNPAARGPEVSV

SEQ ID NO: 71051 - protein, 349 aa, Pseudomonas stutzeri
  REGION 1..349: note = tr|A0A061JT12|A0A061JT12_PSEST S-adenosylmethionine:tRNA ribosyltransferase-isomerase; OS = Pseudomonas stutzeri KOS6 OX=1218352 GN=queA PE=3 SV=1
MQVADFSFQLPDALIARHPLAERRASRLLVLEGETGQLSHRQFADLLEYVRPGDLMVFNDTRVIPARLFGRKATGGKLEVLVERVLGSRSVLAHIRSSKSPKVGARILLDGGGEVEMIARHDALFELAFDEDVLPLLERIGHMPLPPYIDRADDIADRERYQTVYAQRAGAVAAPTAGLHFDEALLQALRDGGVETAYVTLHVGAGTFQPVRVERIEEHHMHREWLEVTQAVVDAVAACRARGGRVIAVGTTSVRSLETAARDGELKPFSGDTDIFIYPGKAFHVVDALVTNFHLPESTLLMLVSAFAGYPETMAAYAEAVAQGYRFFSYGDAMFITRNPAARGPEENQ

SEQ ID NO: 71052 - protein, 349 aa, Pseudomonas stutzeri
  REGION 1..349: note = tr|I4JLV6|I4JLV6_PSEST S-adenosylmethionine:tRNA ribosyltransferase-isomerase OS=Pseudomonas stutzeri TS44; OX = 477228 GN=queA PE=3 SV=1
MQVSDFSFQLPDSLIARHPLAERRASRLLVLDGETGRLAHRHFVDLLEYVRPGDLMVFNNTRVIAARLFGRKASGGKLEILVERVLDSHRVLAHVRASKSPKPGSVIVLDGGGEAVMLARHDALFELRFGDEVLPLLERIGHMPLPPYIDRADEQADRERYQTVYAQHAGAVAAPTAGLHFDAALLAALQDKGVQTAFVTLHVGAGTFQPVRVERIEDHHMHREWLEVGQGVVEAVAACRARGGRVIAVGTTSVRSLETAARSGELRPFSGDTDIFIYPGKTFHVVDALVTNFHLPESTLLMLVAAFAGYRETMAAYAEAVREGYRFFSYGDAMFITRNQAARGPEENQ

SEQ ID NO: 71053 - protein, 294 aa, Pseudomonas synxantha
  REGION 1..294: note = tr|A0A419UNP0|A0A419UNP0_9PSED S-adenosylmethionine:tRNA ribosyltransferase-isomerase; OS = Pseudomonas synxantha OX=47883 GN=queA PE=3 SV=1
MVFNNTRVIPARLFGQKASGGKLEILVERVLDSHRVLAHVRSSKSPKPGSSILIEGGGEAEMVARHDALFELKFAEEVLPLLERVGHMPLPPYIDRPDEDADRERYQTVYSQRLGAVAAPTAGLHFDQPLLDAIAAKGVDTAYVTLHVGAGTFQPVRVDNIEDHHMHSEWLEVSQDVVDAVAACKARGGRVVAVGTTSVRSLESAARDGVLKPFSGDTDIFIFPGRPFHVVDCLVTNFHLPESTLLMLVSAFAGYPETMAAYQAAIANEYRFFSYGDAMFITRNPAPRGPEDNL

SEQ ID NO: 71054 - protein, 349 aa, Pseudomonas synxantha
  REGION 1..349: note = tr|A0A0R2ZBA2|A0A0R2ZBA2_9PSED S-adenosylmethionine:tRNA ribosyltransferase-isomerase; OS = Pseudomonas synxantha OX=47883 GN=queA PE=3 SV=1
MRVADFTFELPDSLIARHPLAERRASRLLTLDGPSGALAHRQFTDLLEHLRPGDLMVFNNTRVIPARLFGQKASGGKLEILVERVLDSHRVLAHVRSSKSPKPGSSLLIDGGGEAEMVARHDALFELKFAEEVLPLLERVGHMPLPPYIDRPDEDSDRERYQTVYSQRLGAVAAPTAGLHFDQPLLDAIAAKGVETAYVTLHVGAGTFQPVRVENIEDHHMHSEWLEVSQDVVDAVNACKARGGRVVAVGTTSVRSLESAARDGVLKPFSGDTDIFIFPGRPFHVVDCLVTNFHLPESTLLMLVSAFAGYPETMAAYQAAIANEYRFFSYGDAMFITRNPAPRGPEDNL

SEQ ID NO: 71055 - protein, 354 aa, Pseudomonas syringae
  REGION 1..354: note = sp|Q9L6W9|QUEA_PSESM S-adenosylmethionine:tRNA ribosyltransferase-isomerase OS=Pseudomonas syringae pv. tomato (strain ATCC BAA-871 / DC3000) OX=223283 GN=queA; PE = 3SV=1
MRVADFTFELPDSLIARHPLAERRSSRLLTLDGPTGALAHRQFTDLLEHLRSGDLMVFNNTRVIPARLFGQKASGGKLEILVERVLDSHRVLAHVRASKSPKPGSSILIDGGGEAEMVARHDALFELRFAEEVLPLLDRVGHMPLPPYIDRPDEGADRERYQTVYAQRAGAVAAPTAGLHFDQPLMEAIAAKGVETAFVTLHVGAGTFQPVRVEQIEDHHMHSEWLEVSQDVVDAVAACRARGGRVIAVGTTSVRSLESAARDGQLKPFSGDTDIFIYPGRPFHVVDALVTNFHLPESTLLMLVSAFAGYPETMAAYAAAIEHGYRFFSYGDAMFITRNPAPTAPQESAPEDHA

SEQ ID NO: 71056 - protein, 354 aa, Pseudomonas syringae
  REGION 1..354: note = tr|A0A2S3TXW7|A0A2S3TXW7_9PSED S-adenosylmethionine:tRNA ribosyltransferase-isomerase; OS = Pseudomonas syringae group genomosp. 3 OX=251701; GN = queA PE=3 SV=1
MRVADFTFELPDSLIARHPLAERRSSRLLTLDGPTGALAHRQFTDLLEHLRSGDLMVFNNTRVIPARLFGQKASGGKLEILVERVLDSHRVLAHVRASKSPKPGSSILIDGGGEAEMVARHDALFELRFAEEVLPLLDRVGHMPLPPYIDRPDEGADRERYQTVYAQRAGAVAAPTAGLHFDQPLMEAIAAKGVETAFVTLHVGAGTFQPVRVEQIEDHHMHSEWLEVSQDVVDAVAACRARGGQVIAVGTTSVRSLESAARDGQLKPFSGDTDIFIYPGRPFHVVDALVTNFHLPESTLLMLVSAFAGYPETMAAYAAAIEHGYRFFSYGDAMFITRNPAPTAPQESAPEDHA

SEQ ID NO: 71057 - protein, 349 aa, Pseudomonas taeanensis
  REGION 1..349: note = tr|A0A0A1YL52|A0A0A1YL52_9PSED S-adenosylmethionine:tRNA ribosyltransferase-isomerase; OS = Pseudomonas taeanensis MS-3 OX=1395571 GN=queA PE=3 SV=1
MRVADFHFELPDSLIARHPLAERHASRLLVLDGPSGALAHRQFPDLLEYLRPGDLMVFNNTRVIPARLFGQKASGGKLEVLVERVLDSHRVLAHVRASKSPKPGSTILIDGGGEARMLARHDALFELGFSEEVLPLLERVGHMPLPPYIDRADDAADRERYQTVYAERAGAVAAPTAGLHFDKDLLAAIAAKGVETAFVTLHVGAGTFQPVRVERIEDHLMHSEWLEVDQAVVDAVSACRARGGRVIAVGTTSVRSLESAARDGVLKSFSGDTDIFIYPGRPLHVVDALVTNFHLPESTLLMLVSAFAGYPETMAAYQSAIAERYRFFSYGDAMFITRNPAPRGPEDQV

SEQ ID NO: 71058 - protein, 353 aa, Pseudomonas taetrolens
  REGION 1..353: note = tr|A0A0J6GWS0|A0A0J6GWS0_PSETA S-adenosylmethionine:tRNA ribosyltransferase-isomerase; OS = Pseudomonas taetrolens OX=47884 GN=queA PE=3 SV=1
MRVADFTFELPDSLIARHPLAERRNSRLLTLDGQSGALAHRQFTDLLEHLRSGDLMVFNNTRVIPARLFGQKASGGKLEILVERVLDSHRVLAHVRSSKSPKPGSKILIDGGGEAEMLARHDALFELGFAEEVLPLLDRVGHMPLPPYIDRPDEGSDRERYQTVYAQRLGAVAAPTAGLHFDEPLMQAIAAKGVETAFVTLHVGAGTFQPVRVERLEDHHMHTEWLEVGQDVVDAVAACRARGGRVIAVGTTSVRSLESAARDGVLKPFSGDTDIFIFPGRPFHVVDALVTNFHLPESTLLMLVSAFAGYPETMAAYKAAVEHGYRFFSYGDAMFITRNPAPTAPAPAPEDQA

SEQ ID NO: 71059 - protein, 349 aa, Pseudomonas taiwanensis; identical to SEQ ID NO: 70975
  REGION 1..349: note = tr|V7D4V7|V7D4V7_9PSED S-adenosylmethionine:tRNA ribosyltransferase-isomerase OS=Pseudomonas taiwanensis SJ9 OX=1388762 GN=queA PE=3 SV=1

SEQ ID NO: 71060 - protein, 349 aa, Pseudomonas thivervalensis; identical to SEQ ID NO: 70905
  REGION 1..349: note = tr|A0A176NJM2|A0A176NJM2_9PSED S-adenosylmethionine:tRNA ribosyltransferase-isomerase; OS = Pseudomonas thivervalensis OX=86265 GN=queA PE=3 SV=1

SEQ ID NO: 71061 - protein, 349 aa, Pseudomonas tolaasii
  REGION 1..349: note = tr|A0A2N0E0A7|A0A2N0E0A7_PSETO S-adenosylmethionine:tRNA ribosyltransferase-isomerase; OS = Pseudomonas tolaasii NCPPB 2192 OX=564423 GN=queA PE=3; SV = 1
MRVADFTFELPDSLIARHPLAERRASRLLTLDGVSGALAHRQFTDLLEHLRPGDLMVFNNTRVIPARLFGQKASGGKLEILVERVLDSHRVLAHVRSSKSPKPGSSILIDGGGEAEMVARHDALFELKFAEEVLPLLERVGHMPLPPYIDRPDEDADRERYQTVYSQRLGAVAAPTAGLHFDQPLLDAIAAKGVETAYVTLHVGAGTFQPVRVDKIEDHHMHSEWLEVSQEVVDAVAACKARGGRVVAVGTTSVRSLESAARDGVLKPFSGDTDIFIFPGRPFHVVDCLVTNFHLPESTLLMLVSAFAGYPETMAAYQAAIANEYRFFSYGDAMFITRNPAPRGPEETL

SEQ ID NO: 71062 - protein, 347 aa, Pseudomonas toyotomiensis
  REGION 1..347: note = tr|A0A1I5XAM9|A0A1I5XAM9_9PSED S-adenosylmethionine:tRNA ribosyltransferase-isomerase; OS = Pseudomonas toyotomiensis OX=554344 GN=queA PE=3 SV=1
MRVADFHFDLPESLIARHPLAERRASRLLQLDGPSGELRHGQFTDVLEQLRPGDLMVFNNTRVIPARLFGQKASGGKLEVLVERVLDQYRVLAHVRSSKSPKPGSQILIDGGGEAEMVARHDALFELRFAEPVLPLLERVGHMPLPPYIDRPDDEADRERYQTVYAQKAGAVAAPTAGLHFDDELLAAIRAKGVDTAFVTLHVGAGTFQPVRVERIEDHHMHSEWLAVGQDVVDAVAACRARGGRVVAVGTTSVRSLETAARDGELKPFSGDTDIFIYPGRPFHVVDALVTNFHLPESTLLMLVSAFAGYPETMAAYREAVAQGYRFFSYGDAMFITRNPAARGPEV

SEQ ID NO: 71063 - protein, 354 aa, Pseudomonas tremae; identical to SEQ ID NO: 70881
  REGION 1..354: note = tr|A0A0Q0CLA5|A0A0Q0CLA5_9PSED S-adenosylmethionine:tRNA ribosyltransferase-isomerase; OS = Pseudomonas tremae OX=200454 GN=queA PE=3 SV=1

SEQ ID NO: 71064 - protein, 349 aa, Pseudomonas trivialis
  REGION 1..349: note = tr|A0A0H5AF07|A0A0H5AF07_9PSED S-adenosylmethionine:tRNA ribosyltransferase-isomerase; OS = Pseudomonas trivialis OX=200450 GN=queA PE=3 SV=1
MRVADFTFELPDSLIARHPLAERRASRLLTLDGVSGALAHRQFTDLLEHLRPGDLMVFNNTRVIPARLFGQKASGGKLEILVERVLDSHRVLAHVRSSKSPKPGSVILIDGGGEAEMVARHDALFELRFAEEVLPLLERVGHMPLPPYIDRPDEDADRERYQTVYSQRPGAVAAPTAGLHFDQPLLDAIAAKGVETAYVTLHVGAGTFQPVRVDNIEDHHMHSEWLEVSQDVVDAVNACKARGGRVVAVGTTSVRSLESAARDGVLKPFSGDTDIFIYPGRPFHVVDCLVTNFHLPESTLLMLVSAFAGYPETMAAYQAAIANEYRFFSYGDAMFITRNPAPRGPEETL

SEQ ID NO: 71065 - protein, 349 aa, Pseudomonas trivialis
  REGION 1..349: note = tr|A0A0R2ZT80|A0A0R2ZT80_9PSED S-adenosylmethionine:tRNA ribosyltransferase-isomerase; OS = Pseudomonas trivialis OX=200450 GN=queA PE=3 SV=1
MRVADFTFELPDSLIARHPLAERRASRLLTLDGVSGALAHRQFTDLLEHLRPGDLMVFNNTRVIPARLFGQKASGGKLEILVERVLDSHRVLAHVRSSKSPKPGSSILIDGGGEAEMVARHDALFELKFAEEVLPLLERVGHMPLPPYIDRPDEDADRERYQTVYSQRLGAVAAPTAGLHFDQPLLDAIAAKGVDSAYVTLHVGAGTFQPVRVDNIEDHHMHSEWLEVSQDVVDAVAACKARGGRVVAVGTTSVRSLESAARDGVLKPFSGDTDIFIYPGRPFHVVDCLVTNFHLPESTLLMLVSAFAGYPETMAAYQAAIANEYRFFSYGDAMFITRNPAPRGPEEQP

SEQ ID NO: 71066 - protein, 349 aa, Pseudomonas umsongensis
  REGION 1..349: note = tr|A0A1H1PW12|A0A1H1PW12_9PSED S-adenosylmethionine:tRNA ribosyltransferase-isomerase; OS = Pseudomonas umsongensis OX=198618 GN=queA PE=3 SV=1
MRVADFTFELPDSLIARHPLAERRGSRLLTLDGVSGALAHRQFTDLLEHLRSGDLMVFNNTRVIPARLFGQKASGGKLEILVERVLDSHRVLAHVRSSKSPKPGSKILIDGGGEAEMLARHDALFELGFAEEVLPLLDRVGHMPLPPYIDRPDEGSDRERYQTVYAQRLGAVAAPTAGLHFDQVLMEAIAAKGVETAFVTLHVGAGTFQPVRVEKIEDHHMHTEWLEVGQDVVDAVAACRARGGRVVAVGTTSVRSLESAARDGVLKPFSGDTDIFIYPGRPFHVVDALVTNFHLPESTLLMLVSAFAGYPETMAAYKAAVDNEYRFFSYGDAMFITRNPAPRGPEDKE

SEQ ID NO: 71067 - protein, 349 aa, Pseudomonas vancouverensis
  REGION 1..349: note = tr|A0A1H2P942|A0A1H2P942_9PSED S-adenosylmethionine:tRNA ribosyltransferase-isomerase; OS = Pseudomonas vancouverensis OX=95300 GN=queA PE=3 SV=1
MRVADFTFELPDSLIARHPLAERRGSRLLTLDGVSGALAHRQFTDLLEHLRPGDLMVFNNTRVIPARLFGQKASGGKLEILVERVLDSHRVLAHVRSSKSPKPGSKILIDGGGEAEMLARHDALFELGFTEEVLPLLDRVGHMPLPPYIDRPDEGADRERYQTVYAQRLGAVAAPTAGLHFDQVLMEAIAAKGVETAFVTLHVGAGTFQPVRVEKIEDHHMHSEWLEVGQDVVDAVAACRARGGRVVAVGTTSVRSLESAARDGVLKPFSGDTDIFIYPGRPFHVVDALVTNFHLPESTLLMLVSAFAGYPETMAAYKAAVDNEYRFFSYGDAMFITRNPAPRGPEDKE

SEQ ID NO: 71068 - protein, 349 aa, Pseudomonas veronii
  REGION 1..349: note = tr|A0A1D3K3C2|A0A1D3K3C2_9PSED S-adenosylmethionine:tRNA ribosyltransferase-isomerase; OS = Pseudomonas veronii 1YdBTEX2 OX=1295141 GN=queA PE=3; SV = 1
MRVADFTFELPDSLIARHPLAERRASRLLTLDGLSGALAHRQFTDLLEHLRPGDLMVFNNTRVIPARLFGQKASGGKLEILVERVLDSHRVLAHVRSSKSPKPGSTLLIDGGGEAEMVARHDALFELKFAEEVLPLLERVGHMPLPPYIDRPDEDADRERYQTVYSQRLGAVAAPTAGLHFDQPLLDAIAAKGVESAYVTLHVGAGTFQPVRVDNIEDHHMHSEWLEVSQDVVDAVNACKARGGRVIAVGTTSVRSLESAARDGVLKPFSGDTDIFIYPGRPFHVVDALVTNFHLPESTLLMLVSAFAGYPETMAAYQAAIDNGYRFFSYGDAMFITRNPAPRGPEEQL

SEQ ID NO: 71069 - protein, 349 aa, Pseudomonas veronii; identical to SEQ ID NO: 71068
  REGION 1..349: note = tr|A0A439EA80|A0A439EA80_9PSED S-adenosylmethionine:tRNA ribosyltransferase-isomerase; OS = Pseudomonas veronii OX=76761 GN=queA PE=3 SV=1

SEQ ID NO: 71070 - protein, 353 aa, unidentified
  source 1..353: note = Pseudomonas versuta
  REGION 1..353: note = tr|A0A0M3UD76|A0A0M3UD76_9PSED S-adenosylmethionine:tRNA ribosyltransferase-isomerase; OS = Pseudomonas versuta OX=1788301 GN=queA PE=3 SV=1
MRVADFTFELPDSLIARHPLAERRNSRLLTLDGESGALAHRQFTDLLEHLRPGDLMVFNNTRVIPARLFGQKASGGKLEILVERVLDSHRVLAHVRSSKSPKPGSKILIDGGGEAQMLARHDALFELGFAEEVLPLLDRVGHMPLPPYIDRPDEGSDRERYQTVYAERLGAVAAPTAGLHFDEPLMQAIAAKGVETTFVTLHVGAGTFQPVRVERLEDHHMHTEWLEVGQDVVDAVAACRARGGRVIAVGTTSVRSLESAARDGVLKPFSGDTDIFIFPGRPFHVVDALVTNFHLPESTLLMLVSAFAGYPETMAAYKAAVEHGYRFFSYGDAMFITRNPAPTAPAPAPEDQA

SEQ ID NO: 71071 - protein, 354 aa, Pseudomonas viridiflava
  REGION 1..354: note = tr|A0A3M4NT71|A0A3M4NT71_PSEVI S-adenosylmethionine:tRNA ribosyltransferase-isomerase; OS = Pseudomonas viridiflava OX=33069 GN=queA PE=3 SV=1
MRVADFTFELPDSLIARHPLAERRSSRLLTLDGPTGALAHRQFTDLLEHLRPGDLMVFNNTRVIPARLFGQKASGGKLEILVERVLDSHRVLAHVRSSKSPKPGSSILIDGGGEAEMVTRHDALFELRFAEEVLPLLERVGHMPLPPYIERPDEGADRERYQTVYAQRAGAVAAPTAGLHFDQPLLEAIAAKGVETAFVTLHVGAGTFQPVRVEQIEDHHMHSEWLEVGQDVVDAVAACRARGGRVIAVGTTSVRSLESAARDGELKPFSGDTDIFIYPGRPFHVVDALVTNFHLPESTLLMLVSAFAGYPETMAAYAAAIEHGYRFFSYGDAMFITRNPAPTAPQESAPEDHA

SEQ ID NO: 71072 - protein, 354 aa, Pseudomonas viridiflava
  REGION 1..354: note = tr|A0A4U3DPC3|A0A4U3DPC3_PSEVI S-adenosylmethionine:tRNA ribosyltransferase-isomerase; OS = Pseudomonas viridiflava OX=33069 GN=queA PE=3 SV=1
MRVADFTFDLPDSLIARHPLAERRSSRLLTLDGVSGALAHRQFTDLLEHLRPGDLMVFNNTRVIPARLFGQKASGGKLEILVERVLDSHRVLAHVRSSKSPKPGSSILIDGGGEAEMVARHDALFELRFAEEVLPLLDRVGHMPLPPYIDRPDEGADRERYQTVYAERAGAVAAPTAGLHFDQPLLEAIAAKGVETTFVTLHVGAGTFQPVRVKQIEDHHMHTEWLEVGQDVVDAVAACRARGGRVIAVGTTSVRSLESAARDGVLKPFSGDTDIFIYPGRPFHVVDALVTNFHLPESTLLMLVSAFAGYPETMAAYAAAIEHGYRFFSYGDAMFITRNPAPTAPQESVPEDHA

SEQ ID NO: 71073 - protein, 349 aa, Pseudomonas vranovensis
  REGION 1..349: note = tr|A0A423E0D1|A0A423E0D1_9PSED S-adenosylmethionine:tRNA ribosyltransferase-isomerase; OS = Pseudomonas vranovensis OX=321661 GN=queA PE=3 SV=1
MRVADFSFELPDSLIARHPLAQRHSSRLLTLDGPSGALAHRQFTDLLEHLRPGDLMVFNNTRVIPARLFGQKASGGKLEILVERVLDSHRVLAHVRSSKAPKPGTQILIDGGGEAEMFARHDALFELRFAEEVLPLLDRVGHMPLPPYIDRPDEGADRERYQTVYAERAGAVAAPTAGLHFDEELLAKIAAKGVETAFVTLHVGAGTFQPVRVERIEDHHMHKEWLEVGQDVVDAVAACRARGGRVVAVGTTSVRSLESAARDGELKAFSGDTDIFIFPGRPFHVVDALVTNFHLPESTLLMLVSAFAGYPETMAAYAAAVEHGYRFFSYGDAMFITRNPAPRGPEDQA

SEQ ID NO: 71074 - protein, 349 aa, unidentified
  source 1..349: note = Pseudomonas wadenswilerensis
  REGION 1..349: note = tr|A0A380T4L8|A0A380T4L8_9PSED S-adenosylmethionine:tRNA ribosyltransferase-isomerase; OS = Pseudomonas wadenswilerensis OX=1785161 GN=queA PE=3; SV = 1
MRVADFSFELPDSLIARHPLAQRHSSRLLTLDGPSGALAHRQFTDLLEHLRPGDLMVFNNTRVIPARLFGQKASGGKLEILVERVLDSHRVLAHVRSSKAPKPGTPIVIDGGGEAEMVARHDALFELRFAEEVLPLLDRVGHMPLPPYIDRPDEGADRERYQTVYAERAGAVAAPTAGLHFDEELLAKIAAKGVETAFVTLHVGAGTFQPVRVERIEDHHMHKEWLEVGQDVVDAVAACRARGGRVVAVGTTSVRSLESAARDGELKAFSGDTDIFIFPGRPFHVVDALVTNFHLPESTLLMLVSAFAGYPETMAAYAAAVENGYRFFSYGDAMFITRNPAPRGPEDQA

SEQ ID NO: 71075 - protein, 353 aa, unidentified
  source 1..353: note = Pseudomonas weihenstephanensis
  REGION 1..353: note = tr|A0A0J6ITC2|A0A0J6ITC2_9PSED S-adenosylmethionine:tRNA ribosyltransferase-isomerase; OS = Pseudomonas weihenstephanensis OX=1608994 GN=queA PE=3; SV = 1
MRVADFTFELPDSLIARHPLAERRNSRLLTLDGESGALAHRQFTDLLEHLRSGDLMVFNNTRVIPARLFGQKASGGKLEILVERVLDSHRVLAHVRSSKSPKPGSKILIDGGGEAQMLARHDALFELGFAEEVLPLLDRVGHMPLPPYIDRPDEGSDRERYQTVYAQRLGAVAAPTAGLHFDEPLMQAIAAKGVETAFVTLHVGAGTFQPVRVERLEDHHMHTEWLEVGQDVVDAVAACRARGGRVIAVGTTSVRSLESAARDGVLKPFSGDTDIFIFPGRPFHVVDALVTNFHLPESTLLMLVSAFAGYPETMAAYQAAVEHGYRFFSYGDAMFITRNPAPTAPAPAPEDQA

SEQ ID NO: 71076 - protein, 349 aa, Pseudomonas xanthomarina
  REGION 1..349: note = tr|A0A098FKG5|A0A098FKG5_9PSED S-adenosylmethionine:tRNA ribosyltransferase-isomerase; OS = Pseudomonas xanthomarina OX=271420 GN=queA PE=3 SV=1
MQVADFFFQLPDALIARHPLAERRASRLLVLEGETGKLSHRNFADLLDHVRPGDLMVFNNTRVIPARLFGQKASGGKLEILVERVVGNRSVLAHVRSSKSPKAGSKILLDGGGEAEMIARHDALFELEFDEDVLPLLERIGHMPLPPYIDRPDAAADRERYQTVYAQRAGAVAAPTAGLHFDEALLQTLRESGVETAYVTLHVGAGTFQPVRVERIEEHHMHREWLEVGQDVVDAVAACRSRGGRVIAVGTTSVRSLETAARDGELKPFSGDTDIFIYPGKSFHVVDALVTNFHLPESTLLMLVSAFAGYPETMAAYAEAVAQRYRFFSYGDAMFITRNPAPRGPEETQ

SEQ ID NO: 71077 - protein, 349 aa, Pseudomonas xanthomarina
  REGION 1..349: note = tr|A0A1M5SGA5|A0A1M5SGA5_9PSED S-adenosylmethionine:tRNA ribosyltransferase-isomerase; OS = Pseudomonas xanthomarina DSM 18231 OX=1403346 GN=queA; PE = 3 SV=1
MQVSAFSFDLPDSLIARHPLAERRGSRLLTLDGPTGLLGHHSFAELLDCVRPGDLMVFNNTRVIPARLFGQKATGGKVEVLVERVLDDRRALAHIRSSKSPKPGGRIHIDGGGDALMLARHDALFELEFNEDVLPLLERVGHMPLPPYIDRPDEAADRERYQTVYAQRVGAVAAPTAGLHFDAQLLAALRDKGVESAFVTLHVGAGTFQPVRVERIEEHHMHREWLEVDQGVVDAVAACRARGGRVVAVGTTSVRSLESAARDGVLKPFSGDTDIFLYPGKPFHVVDALVTNFHLPESTLLMLVSAFAGYPETMAAYAEAIASGYRFFSYGDAMFITRNPAPRGPEDSQ

SEQ ID NO: 71078 - protein, 348 aa, Pseudomonas xinjiangensis
  REGION 1..348: note = tr|A0A1H1LJD9|A0A1H1LJD9_9PSED S-adenosylmethionine:tRNA ribosyltransferase-isomerase; OS = Pseudomonas xinjiangensis OX=487184 GN=queA PE=3 SV=1
MRVSDFRFELPDELIARHPLAERSASRLLCLDGPTGAFMHRQFVDLLDCLRAGDLMVFNNTRVIPARLFGRKETGGQVEILVERVLDGFRVLAHIRASKSPKPGSRILFDDGASAEMLARHDALFELRFEQPVLPLMERVGHMPLPPYIDRPDESSDRERYQTVYAERAGAVAAPTAGLHFDKALLEAIRAKGVSTAQVTLHVGAGTFQPVRVERIEDHHMHSEWLEVDESVVEAVKACKARGGRVIAVGTTSVRSLETAARDGNIQPFSGDTDIFIYPGRPFNVVDALVTNFHLPESTLLMLVSAFAGYSETLAAYREAVEQRYRFFSYGDAMFITRNPAAAGPEDL

SEQ ID NO: 71079 - protein, 349 aa, unidentified
  source 1..349: note = Pseudomonas yamanorum
  REGION 1..349: note = tr|A0A143GNH3|A0A143GNH3_9PSED S-adenosylmethionine:tRNA ribosyltransferase-isomerase; OS = Pseudomonas yamanorum OX=515393 GN=queA PE=3 SV=1
MRVADFTFELPDSLIARHPLAERRASRLLTLDGVSGALAHRQFTDLLEHLRPGDLMVFNNTRVIPARLFGQKSSGGKLEILVERVLDSHRVLAHVRSSKSPKPGSKILIDGGGEAEMLARHDALFELGFAEEVLPLLERVGHMPLPPYIDRPDEDSDRERYQTVYSQRLGAVAAPTAGLHFDQPLLDAIAAKGVETAYVTLHVGAGTFQPVRVDNIEDHHMHSEWLEVSQEVVDAVDACKARGGRVVAVGTTSVRSLESAARDGVLKPFSGDTDIFIYPGRPFHVVDALVTNFHLPESTLLMLVSAFAGYPETMAAYQAAIDNGYRFFSYGDAMFITRNPAPRGPEEQS

SEQ ID NO: 71080 - protein, 349 aa, unidentified
  source 1..349: note = Pseudomonas yamanorum
  REGION 1..349: note = tr|A0A1H2FSE8|A0A1H2FSE8_9PSED S-adenosylmethionine:tRNA ribosyltransferase-isomerase; OS = Pseudomonas yamanorum OX=515393 GN=queA PE=3 SV=1
MRVADFTFELPDSLIARHPLAERRASRLLTLDGVSGALAHRQFTDLLEHLRPGDLMVFNNTRVIPARLFGQKASGGKLEILVERVLDSHRVLAHVRSSKSPKPGSKILIDGGGEAEMLARHDALFELGFAEEVLPLLERVGHMPLPPYIDRPDEDSDRERYQTVYSQRLGAVAAPTAGLHFDQPLLDAIAAKGVETAYVTLHVGAGTFQPVRVDNIEDHHMHSEWLEVSQEVVDAVDACKARGGRVVAVGTTSVRSLESAARDGVLKPFSGDTDIFIYPGRPFHVVDALVTNFHLPESTLLMLVSAFAGYPETMAAYQAAIDNGYRFFSYGDAMFITRNPAPRGPEEQS

SEQ ID NO: 71081 - protein, 349 aa, unidentified
  source 1..349: note = Pseudomonas yangmingensis
  REGION 1..349: note = tr|A0A1I4R6K7|A0A1I4R6K7_9PSED S-adenosylmethionine:tRNA ribosyltransferase-isomerase; OS = Pseudomonas yangmingensis OX=1720063 GN=queA PE=3 SV=1
MHVSDFHFDLPDNLIARHPLAERRASRLLCLDGPSGALAHRQFVDLLDYLRPGDLMVFNDTRVIPARLFGRKESGGQLEILVERVLDGQRVLAHVRSSKSPKPGSLILLEDGTPVRMLARHGALFELGFDTDVLALLERVGHMPLPPYIDRPDETADRERYQTVYADKAGAVAAPTAGLHFDRELLAAIESMGVQTARVTLHVGAGTFQPVRVERIEEHHMHSEWLEVSAGVVEAVRACKARGGRVIAVGTTSVRSLETAAQSGEIAPYTGDTDIFLYPGKRFNVVDALVTNFHLPESTLLMLVAAFAGYPQAMAAYRAAVEQQYRFFSYGDAMFITRNPAPQGPEDRS

SEQ ID NO: 71082 - protein, 347 aa, unidentified; identical to SEQ ID NO: 70962
  source 1..347: note = Pseudomonas zeshuii
  REGION 1..347: note = tr|A0A1M6ASR0|A0A1M6ASR0_9PSED S-adenosylmethionine:tRNA ribosyltransferase-isomerase; OS = Pseudomonas zeshuii OX=1076620 GN=queA PE=3 SV=1

SEQ ID NO: 71083 - protein, 349 aa, unidentified
  source 1..349: note = Pseudomonas zhaodongensis
  REGION 1..349: note = tr|A0A365Q0D7|A0A365Q0D7_9PSED S-adenosylmethionine:tRNA ribosyltransferase-isomerase; OS = Pseudomonas zhaodongensis OX=1176257 GN=queA PE=3 SV=1
MQVSAFSFDLPDSLIARYPLAERRASRLLTLDGPTGSLGHHGFVQLLDYLRPGDLMVFNNTRVIPARLFGQKDTGGKVEVLIERVLDGRRVLAHIRSSKSPKAGARIHIDGGGEALMLARQDTLFELEFEEDVLPLLERVGHMPLPPYIDRPDDVADRERYQTVYAQRAGAVAAPTAGLHFDTELLAALRDKGVESAFVTLHVGAGTFQPVRVDRIEEHHMHREWLEVDQGVVDAVAACHARGGRVVAVGTTSVRSLESAARDGVLKPFSGDTDIFLYPGKPFHVVDALVTNFHLPESTLLMLVSAFAGYPETMAAYAEAIAKGYRFFSYGDAMFITRNPAPRGPEDSQ

SEQ ID NO: 71084 - protein, 349 aa, unidentified
  source 1..349: note = Pseudomonas zhaodongensis
  REGION 1..349: note = tr|A0A3M2I037|A0A3M2I037_9PSED S-adenosylmethionine:tRNA ribosyltransferase-isomerase; OS = Pseudomonas zhaodongensis OX=1176257 GN=queA PE=3 SV=1
MQVSDFSFQLPDSQIARHPLAERRASRLLVLDGPSGRLEHRRFADLLDHLRPGDLMVFNNTRVIPARLFGQKDTGGKVEVLVERVLDGSRVMAHIRSSKSPKPGGIINIDGGGRALMMARHDALFELDFGEDVLALLERVGHMPLPPYIDRPDETADRERYQTVYAQRAGAVAAPTAGLHFDAELLAALKSKGVDSTFVTLHVGAGTFQPVRVERIEEHHMHREWLEVGQDVVEAVAACRDRGGRVVAVGTTSVRSLESAARDGVLRPFSGDTDIFLYPGKPFHVVDALVTNFHLPESTLLMLVSAFAGYPETMAAYAEAIAEGYRFFSYGDAMFITRNPAPRGPEDSQ

SEQ ID NO: 71085 - protein, 370 aa, Pseudonocardia asaccharolytica
  REGION 1..370: note = tr|A0A511D1H8|A0A511D1H8_9PSEU S-adenosylmethionine:tRNA ribosyltransferase-isomerase; OS = Pseudonocardia asaccharolytica DSM 44247 = NBRC 16224; OX = 1123024 GN=PA7_2477 0 PE=3 SV=1
MTAATRFELPPELSATEPPEARGAARDDVRLLVARPTGSIRHRRFRDLPTALVPGDLVVVNTSPTAPAAVDALRGDGRGVTVHISGPVPGGPEEFVVELRSPGGERVSDGRAGEQIELPGNGSVVLRGGHPDEAVRAGSRLWRARFDIGADLMGWLHRHGRPISYSYLRRHWPLSAFQTIFARPGTADGHPFPSAEMPSAARPFTHPVLAALAARGVGVAEIVLHTGVSSLEADEVPLPERYRVPPATADAVNATRAAGGRVVAVGTTVTRALETVAAADRTVRAGAGWTDLVLGPDRPARIVGGLITGWHEPQASHLLLLEAVAGGELVARAYAAALAERYRWHEFGDTCLLFGPDRLLPATTTTDRIR

SEQ ID NO: 71086 - protein, 358 aa, unidentified
  source 1..358: note = Pseudonocardia cypriaca
  REGION 1..358: note = tr|A0A543FXQ4|A0A543FXQ4_9PSEU S-adenosylmethionine:tRNA ribosyltransferase-isomerase; OS = Pseudonocardia cypriaca OX=882449 GN=FB388_5802 PE=3; SV = 1
MSSASTTFTMPPELSAAEPPEARGLDRDEVRLLVARERSPVRHTTFRALPSVLRRGDLVVVNTSDTEPAAVDGHRADGRPVTVHVSGPAPDQLHVVELRTPDGQRVADGVAGEGIALPCGVVATLLTGHPDPRVATGSRLWRARIPVAGGLRAWLAEAGRPIRYSYVDRRWPIDAYRTVFARSDGEFGSAEMPSAGRPFTSGILNALHARGVGVARIVLHTGVSSLEAGEVPLPERYRVPPETADAVNAVRAAGGRVVAVGTTTTRALETAAAPDGFVTASDGWTHLVLGPDRPARVVDGLVTGWHEPQASHLLLLEAVAGARLVSRAYAAALEHRYRWHEFGDSCLLLPAQSVRRSG

SEQ ID NO: 71087 - protein, 355 aa, Pseudonocardia dioxanivorans
  REGION 1..355: note = tr|F4CU12|F4CU12_PSEUX S-adenosylmethionine:tRNA ribosyltransferase-isomerase OS=Pseudonocardia dioxanivorans (strain ATCC 55486 / DSM 44775 / JCM 13855 / CB1190) OX =675635 GN=Psed_1174 PE=3 SV=1
MTVSFVLPDGLSATAPPESRGVPRDGVRLLVARAGRPVRHRRFRDLAASLAPGDLVVVNTSTTVPAAVAGTRGDGRPVVLHVSGPVPGAPDRWVVELRTPGRERVHDGRPGEVVTLPAGAHAVLVAAHPDLGATTSRLWRAIVETGTPGRGLADWLELHGRPITYPYLGTVPPIEAFRTVLARPVRGFASAEMPSAGRPFTGAVLDRLAARGVGVAELVLHTGVSSPEVGEPPLPERFRVPARTADAVNRTRAVGGRVVAVGTTVTRALETVADEDGTVRAGSGWTDLVLGPHRPARVTTGLVTGWHEPQASHLLLLEAVAGRELVAAAYGAALAEGYLWHEFGDSCLLLPRHGR

SEQ ID NO: 71088 - protein, 426 aa, Pseudonocardia endophytica
  REGION 1..426: note = tr|A0A4R1HRS1|A0A4R1HRS1_9PSEU S-adenosylmethionine:tRNA ribosyltransferase-isomerase; OS = Pseudonocardia endophytica OX=401976 GN=EV378_1101 PE=3; SV = 1
MRRGDPGRGAGAGRAANRPTEGWAGAGPAGGEQPGRTAASAARAEPWRRAQAATRFTVPPQLSADRPPEARGLARDEVRLLVAAAHRPIRHTRFTGLPAALRPGDLIVVNTSDTEPAALDGVREDGRPVVVHVSGPDPDGGDAIGGDRSGIAGSDGPGRADRAGSIVVELRSPDGERVGDGRAGETVTLPAGAVLRLVAGYPDRSTTSGNRLWRATLPVEGGLPGYLAAVGRPIRYGYLRAPRPLQDYRTVVASRTPGELAGAEMPSAARPLSGRVLDGLRARGVGLATITLHAGVSSPEADEVPLPERYRVPAGTAAAVNATRAAGRRVVAVGTTVTRALETVASPDGTVRSGEGWTDLVLGPDRPVRTVTGLVTGWHEPEASHLLLLEAVAGPRLVGRAYRSALGRGYLWHEFGDSCLVLPALG

SEQ ID NO: 71089 - protein, 358 aa, unidentified
  source 1..358: note = Pseudonocardia hierapolitana
  REGION 1..358: note = tr|A0A561SMY8|A0A561SMY8_9PSEU S-adenosylmethionine:tRNA ribosyltransferase-isomerase; OS = Pseudonocardia hierapolitana OX=1128676 GN=FHX44_112118; PE = 3 SV=1
MTASATTFTVPPELSATEPPEARGLARDEVRLLVARGRSPVRHTTFRSLPAALRRGDLVVVNTSDTEPAAVDGHRADGTPVTVHVSGPAPDNLHVVELRTPDGQRVTDGNAGEGIALPCGVVATLLTGHPDPRIATGSRLWRARIPVAGGLRSWLAEFGRPIRYSYVHRQWPLDAYRTVFARAEAEFGSAEMPSAGRPFTVAVLTALHARGVRVARIVLHTGVSSPEVGEPPLPERYRVPPETADAVNATRAAGGRVVTVGTTTTRALETVAAPDGHVTAGAGWTHLVLGPDRPARVVDGLVTGWHEPEASHLLLLEAVAGARLVSRAYAAAVEHRYRWHEFGDSCLLLPAQSTRRSG

SEQ ID NO: 71090 - protein, 351 aa, Pseudonocardia hydrocarbonoxydans
  REGION 1..351: note = tr|A0A4Y3WUQ3|A0A4Y3WUQ3_9PSEU S-adenosylmethionine:tRNA ribosyltransferase-isomerase; OS = Pseudonocardia hydrocarbonoxydans OX=76726; GN = PHY01_45610 PE=3 SV=1
MTRARPATRFAAGPSATRPPAVRDGVRLMVAGDQVTHHRFRDLPAALEPGDLVVVNTSDTEPAAVPGRRADGRPVVLHVSGPARTGGLVVELRTPGGDRVTDAVAGEPVALPAGVVAVLHAAVPGAAPGRLWRATMPVEGGPGRYLAAVGRPIRYSYVPREWPIAEYRTVFATPVPGEFGSAEMPSAGRPFTPAVLDALRGRGVRTAEVVLHTGVSSPEADEVPLPERFRVPAATADTVNATRAAGGRVVAVGTTVTRALETAADARGTVTAAAGWTELVLGPDRPARVVDGLVTGWHEPEASHLLLLEAVAGAELVGRAYAASGERPYRWHEFGDSCLLLPAREVGRRAR

SEQ ID NO: 71091 - protein, 354 aa, Pseudonocardia kunmingensis
  REGION 1..354: note = tr|A0A543CYM3|A0A543CYM3_9PSEU S-adenosylmethionine:tRNA ribosyltransferase-isomerase; OS = Pseudonocardia kunmingensis OX=630975 GN=FB558_8062; PE = 3 SV=1
MTAPTRRTGRPAAEPPEERGIARDEVRLLVARERGPLRHTTFRALPTALRRGDLVVVNTSDTEPAAVDGLRADGSAVTLHVSGPAPDDLHVVELRTPDGRTVTDGVAGESVHLPCGVVAALVTGHPDPRAVSGSGPWRARIPVAGGLRPWLACTGRPISSCGSPRWPLESYRTMFSRPEPEFGSAEMPSAGRPFTPEVLYGLRARGVGVARLVLHAGLSSPAAGAAPLPERYRVPPATADAVNAAHAGGGRVVAVGATVARALETVADPSGRVTAGAGWTHLLLGARRGPRVVDGLLTGWHDPAAAHLMALLDAVAGARLVDRAYAAAVEHGYRWHEFGDSCLLLSTCPAHRVR

SEQ ID NO: 71092 - protein, 356 aa, Pseudonocardia sp.
  REGION 1..356: note = tr|A0A292YUI5|A0A292YUI5_9PSEU S-adenosylmethionine:tRNA ribosyltransferase-isomerase; OS = Pseudonocardia sp. N23 OX=1987376 GN=TOK_1611 PE=3 SV=1
MMTAPLSFVLPDRLSATEPPEARGVPRDGVRLLVARPGVPVRHRRFRDLPSALAPGDVLVVNTSTTAPAAVDGTRADGRPVTVHVSGPVPDDPGRWVVELRTPDRERVHDGSPGEVLTLPCGAAAVLVAAYPDPRAATSRLWCATIGAGGSLPAWLERIGRPITYSHLRTAPSIADFRTVVSRPDRDFAGTGFPSAEMPSAGRPLTRDVLRRLAARGVGVAEVVLHTGVSSLEAGETPLPERYRVPARTADAVNAARAARRRVVAVGTTVTRALETVAAEDGSVRAGSGWTDLVLGPGRPARTVDGLVTGWHEPQASHLLLLEAVAGRDTVAAAYEAALAEGYLWHEFGDSCLLLA

SEQ ID NO: 71093 - protein, 361 aa, Pseudonocardia sp.
  REGION 1..361: note = tr|A0A1Q4DLJ5|A0A1Q4DLJ5_9PSEU S-adenosylmethionine:tRNA ribosyltransferase-isomerase; OS = Pseudonocardia sp. 73-21 OX=1895809 GN=BGP03_15590 PE=3; SV = 1
MRATTTFVLPPELEADAPPPTRDGVRLLVARSRRPLRHVRFTDLPSALVPGDLLVVNTSDTEPAAVDGHRDDGRPVVLHVSGPTPAGRRFPARESADLRARVDTFLVELRTPDGRRVRDGRPGEVVHLPRGVDAELVTTGRIREARIAVEGDVRAWLAAVGRPVRYAHLREHPPLTEYRTVFAEPTGEFASAESPSAGRPFTPTVLEGLRTRGVGVARLVLHTGVSSLEEDEVPLPERYRVPAATADAVNRTRAAGGRIVAVGTTATRALETVAEPDGSVRAGAGWTDLVLGPDRPARVVDGLVTGWHEPQASHLLLLEAVAGPRLVGRAYAAAVERGYRWHEFGDSCLLLPGPGAVGRTP

SEQ ID NO: 71094 - protein, 352 aa, Pseudonocardia sulfidoxydans
  REGION 1..352: note = tr|A0A511DA84|A0A511DA84_9PSEU S-adenosylmethionine:tRNA ribosyltransferase-isomerase; OS = Pseudonocardia sulfidoxydans NBRC 16205 OX=1223511; GN = PSU4_06790 PE=3 SV=1
MTVSFVLPDRLSATEPPEARGLPRDGVRLLVARPGAPVRHRRFRDLPSALAPGDLLVVNTSSTAPAAVDGTRSDGRPVTVHISGPVPEVPDRWVVELRTPGRERVHDGRSGEVVTLPGGAHAVLVAAHPDPAAVTSRLWRAMIVTDGPFLRWLERVGRPITYSYLRAAPGIADFRTVVAKPGREFPSAEMPSAGRPLTRDVLARLAARGVGVAGIVLHTGVSSLEAGETPLPERYRVPTRTADAVNAARAAGSRIVAVGTTVTRALETVAADDGSVRAGSGWTELVLGPDRPARTVDGLVTGWHEPQASHLLLLEAVAGPETVAAAYGAALAEGYLWHEFGDSCLLLARTRS

SEQ ID NO: 71095 - protein, 338 aa, unidentified
  source 1..338: note = Pseudonocardiaceae bacterium
  REGION 1..338: note = tr|A0A419HAE1|A0A419HAE1_9PSEU S-adenosylmethionine:tRNA ribosyltransferase-isomerase; OS = Pseudonocardiaceae bacterium YIM PH 21723 OX=2340915; GN = D5S17_35190 PE=3 SV= 1
MTVHFELPTELNASEPPEARGLTRDGVRLLVADGAGVVHARFHQLDEFLRPGDLLVVNTSGTLAAAVPVRRASEEIVLHFSTELDDGDWVVELRTGPDGAAPLLDGVRGERLALPGGGVATLVAPHGDQERLWRTRIDRDVFDLLAGHGRPIRYRYVPESWPIENYQTVFALEPGSAEMPSAARPFTTELVTRLVAKGVLIAPILLHTGVSSQETGEPPQAERYRVPAHTARLVGYVRRGGGRVIAVGTTAARALESAVDTDGTVHAGAGWTDLVLGPDRPARVVSGLITGLHAPEASHLLLLEAAAGPRVVQEAYRAAVTKRYLWHEFGDVSLLFQA

SEQ ID NO: 71096 - protein, 348 aa, unidentified
  source 1..348: note = Pseudonocardiaceae bacterium
  REGION 1..348: note = tr|A0A431NEF1|A0A431NEF1_9PSEU S-adenosylmethionine:tRNA ribosyltransferase-isomerase; OS = Pseudonocardiaceae bacterium OX=1873463 GN=EKK42_14205; PE = 3 SV=1
MTLSFVLPDRLSAAEPPEARGVPRDGVRLLVARPGLPVRHRRFRDLPSALAPGDLLVVNTSSTAPAAVDGTRSDGRPVTVHVSGPVPDVPDRWVVELRTPGRERVHDGRSGEVVTLPGGAHAVLVAAHPDPSAATSRLWRAMIATDGPFLRWLERIGGPITYSYLRAAPGIGDFRTVVAKPGREFPSVEMPSAGRPLTRDVLARLAARGVGVAEIVLHTGVSSLEAGETPLPERYRVPARTADAVNTARAAGRRIVAVGTTVTRALETVAADDGSVRAGSGWTELVLGPDRPARTVDGLVTGWHEPQASHLLLLEAVAGGETVAAAYGSALAEGYLWHEFGDSCLLLA

SEQ ID NO: 71097 - protein, 359 aa, unidentified
  source 1..359: note = Pseudonocardiales bacterium
  REGION 1..359: note = tr|A0A2W6C500|A0A2W6C500_9PSEU S-adenosylmethionine:tRNA ribosyltransferase-isomerase; OS = Pseudonocardiales bacterium OX=2201155 GN=DLM60_15710; PE = 3 SV=1
MTSGLSTATGRASTPRPRTRFTLAQDSDATGPPERRGVARDGVRLLVVRPGRLDHLLFHDLPGQLDPGALVVVNTSATVPAALNARRQDGRRAVVHVSTRLPGGAWVVELRRPDGAGPELDTTTGERLRLPGGLTLRLGALYPDPTAETGRLRLAEPAPTVPLLDYLAQHGRPIGYRHLTGRYPLADHQTVYATQPGSAEMASAGRPFTPTLLVRLMAAGVTVAPIVLHAGVSSPELGEPPLPERFDVPSGTARLVNSARAAGRRVVAVGTTVVRALESAAGVDATVRAASGWTDLVIGPDRPVRVVNGLVTGLHAPEASHLLLLEAVAGPDTVAAAYDAAVQHHYLWHEFGDSTLFLP

SEQ ID NO: 71098 - protein, 255 aa, unidentified
  source 1..255: note = Pseudonocardiales bacterium
  REGION 1..255: note = tr|A0A2W6DR56|A0A2W6DR56_9PSEU S-adenosylmethionine:tRNA ribosyltransferase-isomerase (Fragment) OS=Pseudonocardiales bacterium OX=2201155; GN = DLM59_05130 PE=3 SV=1
WVVELRRPLATGSAPSYADRTGAVVTVPGGAVLRVLASHPAGAARSRLWVAEVSTPAPLGAWLAEYGEPIRYSHVDGRWPLAAYRTTYGDVPGSAEMPSAGRALTPELLDRLRSRDVEVQTLVLHCGVSSLEGGDPPYAEWYSVPAPTATAVAAARGEGRRVIAVGTTVVRALESAVDASGVVRAGAGWTDLVITPERGVTAVDGLLTGWHEPAASHLWMLAALAGHELLCDSYRSALDNGYRWHEFGDVHLLLP

SEQ ID NO: 71099 - protein, 350 aa, unidentified
  source 1..350: note = Pseudooceanicola antarcticus
  REGION 1..350: note = tr|A0A285J694|A0A285J694_9RHOB S-adenosylmethionine:tRNA ribosyltransferase-isomerase; OS = Pseudooceanicola antarcticus OX=1247613 GN=queA PE=3; SV = 1
MQLSDFDFDLPEGLIATRPARPRSSARLLVAEGETIRDAVVRDLGDFLRPGDRLVLNDTKVIPARLSGLRRRSSEQGETEARIEVTLLEPRAEGTWAALLKPLKKVRDGEVIRFTERLSARVESREEGQALLRFEAEGDFDSALAEAGQMPLPPYIAALRAPDEQDKQDYQTVWAQNSGAVAAPTASLHFDEELLARLAARGIAFTHVTLHVGAGTFLPVKVEDVTTHKMHAEWGEVTETAAAEIAATKAAGGRVIPVGTTALRLIESAARESGAIAPWRGETDIFIYPGFTFAVADALMTNFHLPKSTLMMLVSALMGPEAIRQIYAHAIEEKYRFFSYGDASLLIPQP

SEQ ID NO: 71100 - protein, 348 aa, unidentified
  source 1..348: note = Pseudooceanicola atlanticus
  REGION 1..348: note = tr|A0A0A0EGL0|A0A0A0EGL0_9RHOB S-adenosylmethionine:tRNA ribosyltransferase-isomerase; OS = Pseudooceanicola atlanticus OX=1461694 GN=queA PE=3 SV=1
MQLSDFDFDLPEGLIATRPARPRSSARLLVAEGDAIHDQVVTDLVTWLRPGDRLVLNDTRVIPARLGGVRGRSSAQGPVEARIEATLLEPTPEGHWMAMLKPLKKVREGEVIRFSPELSAELVAKKDGQGELKFNLTGDDFDRALAEAGAMPLPPYIAALRAPDEQDKDDYQTVWARNSGAVAAPTASLHFDAPLLEALAARGVEMTHVTLHVGAGTFLPVKVEDVTTHKMHAEWGEVTAEAAAEIAATREAGHRVIPVGTTALRLIESAARSGRIEPWRGETDIFIYPGFEFHVTDALMTNFHLPKSTLLMLVSALMGQDRVRRIYEHAVGTQYRFFSYGDASLLIP

SEQ ID NO: 71101 - protein, 348 aa, unidentified
  source 1..348: note = Pseudooceanicola batsensis
  REGION 1..348: note = tr|A3U2T0|A3U2T0_PSEBH S-adenosylmethionine:tRNA ribosyltransferase-isomerase OS=Pseudooceanicola batsensis (strain ATCC BAA-863 / DSM 15984 / KCTC 12145 / HTCC2597)OX=252305 GN=queA PE=3 SV=1
MKLSDFDFDLPEGLIATRPARPRSSARLLVAEGDAIHDAVVRDLTDWLRPGDRLVLNDTRVIPARLAGKRARDSDQGPTEARIDVTLLEPRASGHWAALIKPLKKVREGEVIRFSDDLSARLTGRDEGQGLLEFNLKGEDFDRALAEAGAMPLPPYIAAMRPPDDRDKDDYQTVWARRSGAVAAPTASLHFDAPLLDRIAGMGVEMTHVTLHVGAGTFLPVKVEDVTTHRMHAEWGEVTAQAADEIAATRAGGGRIIPVGTTALRLIESAARSGQIGPWRGETDIFIYPGFEFRVTDALMTNFHLPRSTLMMLVSALMGQERIRSVYDHAVARKYRFFSYGDASLLIP

SEQ ID NO: 71102 - protein, 356 aa, unidentified
  source 1..356: note = Pseudooceanicola flagellatus
  REGION 1..356: note = tr|A0A1W2D258|A0A1W2D258_9RHOB S-adenosylmethionine:tRNA ribosyltransferase-isomerase; OS = Pseudooceanicola flagellatus OX=1387277 GN=queA PE=3; SV = 1
MKLADFDFDLPDELIATRPANPRSSARLLVAQGDGIHDAVVTDLLAWLRPGDRLVLNDTRVIPARLSGLRERDGVEGLTQARIEVTLLDPAADGCWMALLKPLKKVRDGEEITFSPDLSATVEARKDGQARLRFNLTGSDFDTALAEAGAMPLPPYIAAKRPADEQDKTDYQTVWAKRPGAVAAPTASLHFDSELLALLREGGIQFTHVTLHVGAGTFLPVKVEDVTTHRMHAEWGEVTEEAAAEIAATRAAGGRVIPVGTTALRLIESAAADGEIRAWSGDTDIFIYPGYEFRITDALMTNFHLPKSTLLMLVSALMGQDTIRHIYAHAVEAEYRFFSYGDASLLLPPCKSDAEG

SEQ ID NO: 71103 - protein, 362 aa, unidentified
  source 1..362: note = Pseudooceanicola lipolyticus
  REGION 1..362: note = tr|A0A2M8J305|A0A2M8J305_9RHOB S-adenosylmethionine:tRNA ribosyltransferase-isomerase; OS = Pseudooceanicola lipolyticus OX=2029104 GN=queA PE=3; SV = 1
MKLADFDFDLPEDLIADRPAVPRSASRLLVAEPEAITDARFTDLARWLRPGDRLVLNDTAVIPARLSGQRHRSGAQGETAARIEVTLLEPRTDGRWAALLKPLKKVKVGEEIRFGETLAARLEAVEDGQGLLRFNLAGDEFDAALAQAGEMPLPPYIAARRGADDRDRTDYQTVFARVPGAVAAPTASLHFDQALLNRLAGMGIGFTYVTLHVGAGTFLPVKVEDVTTHKMHAEWGEVTDTAAAEIAATQAAGGRVIPVGTTALRLIESAARGGTIAPWRGKTDIFIYPGFRFQVTDALITNFHLPKSTLLMLVAALIGHDRVRRIYDHAVAARYRFFSYGDASLLIPGDGPERNGQDQADL

SEQ ID NO: 71104 - protein, 350 aa, unidentified
  source 1..350: note = Pseudooceanicola marinus
  REGION 1..350: note = tr|A0A1X6YQ27|A0A1X6YQ27_9RHOB S-adenosylmethionine:tRNA ribosyltransferase-isomerase; OS = Pseudooceanicola marinus OX=396013 GN=queA PE=3 SV=1
MQLSDFDFDLPEELIATRPARPRSSARLLVAEGDRITDAIVRDLGDYLRPGDRLVLNDTKVIPARLSGTRRRSSDQGETEARIEVTLLEPRAEGTWAALLKPLKKIREGEIIRFTPRLSARLEAKEEGQGILSFEADGDFDAALAEAGQMPLPPYIAALRAPDAQDKQDYQTVWARNTGAVAAPTASLHFDDELLARLKEKGVELTYVTLHVGAGTFLPVKVEDVEKHRMHAEWGHVSEAAAAEIAATKAAGGRVIPVGTTALRLIESAARDSGAIAPWRGETDIFIYPGFTFAVADALMTNFHLPKSTLMMLVSALMGTDRVRAIYDHAIARNYRFFSYGDASLLIPAS

SEQ ID NO: 71105 - protein, 348 aa, unidentified
  source 1..348: note = Pseudooceanicola nitratireducens
  REGION 1..348: note = tr|A0A1I1MKC8|A0A1I1MKC8_9RHOB S-adenosylmethionine:tRNA ribosyltransferase-isomerase; OS = Pseudooceanicola nitratireducens OX=517719 GN=queA PE=3; SV = 1
MQLSDFDFDLPEGLIATRPARPRSSARLLVSEGRAIHDCIVRDLTDWLRPGDRLVLNDTRVIPARLSGTRSRDGVEGTTQARIEVTLLEPRPNGHWAALLKPLKKIREGEVIRFSDALSATLIAKDGGQGVLEFNLTGDDFDTALAQAGAMPLPPYIAALRAPDDQDKDDYQTIWARQSGAVAAPTASLHFDDPLLQRIADMGVEITYVTLHVGAGTFLPVKVDDVTTHKMHAEWGEVTDEAAAQIRATKASGGRVIPVGTTALRLIESAARGGQIVPWQGETDIFIYPGFTFHVTDALMTNFHLPKSTLMMLVSALVGQERIRKIYAHAVRQEYRFFSYGDASLLIP

SEQ ID NO: 71106 - protein, 348 aa, unidentified
  source 1..348: note = Pseudooceanicola sp.
  REGION 1..348: note = tr|A0A2E3H142|A0A2E3H142_9RHOB S-adenosylmethionine:tRNA ribosyltransferase-isomerase; OS = Pseudooceanicola sp. OX=1914328 GN=queA PE=3 SV=1
MQLSDFDFDLPEALIATRPARPRSSARLLVAEGDRISDAVVRDLTDWLRPGDRLVLTDARVTPARLSGIRARDGAEGRTEARIDVTLLEPKPDGRWSALLKPLRKVREGEEIRFSDDLSAHLVAKAEGQGILAFNLAGDDFDAALSAAGAMPLPPYIAALRAPDAQDREDYQTVWARHSGAVAAPTASLHFDDALLARIADMGVATTHVTLHVGAGTFLPVKVADVTTHRMHAEWGEVTPRAAAEIAATKAAGGRVIPIGTTALRLIESAARDGTIRPWRGETDIFIYPGFTFHVTDALMTNFHLPKSTLLMLVSALVGHDRIRAVYDHAVSAQYRFFSYGDASLLIP

SEQ ID NO: 71107 - protein, 350 aa, unidentified
  source 1..350: note = Pseudooceanicola sp.
  REGION 1..350: note = tr|A0A2E2P4Z1|A0A2E2P4Z1_9RHOB S-adenosylmethionine:tRNA ribosyltransferase-isomerase; OS = Pseudooceanicola sp. OX=1914328 GN=queA PE=3 SV=1
MKLTDFDFDLPEDLIATRPAVPRTSARLLLAQGPALSDRRVSDLPDILRPGDRLVLNDTRVIPARLSGKRFRSGTVGDTSARIEVTLLEPRADGTWAALLKPLKKLRVGETVEFTGGLSATLTGVQDGQGLLRFNLVGEDFDAALAKAGQMPLPPYIAQRRPADERDRTDYQTVFARNPGAVAAPTASLHFDDELLAALAARGVAFSHVTLHVGAGTFLPVKVDDVTRHKMHAEWGEVGETAAQEIAQTRREGGRVIPVGTTALRLIETAARGGEIAPWTGETEIFIYPGFTFHATDALMTNFHLPKSTLLMLVSALIGHDRMNAIYAHAVAERYRFFSYGDSSLLIPGD

SEQ ID NO: 71108 - protein, 348 aa, unidentified
  source 1..348: note = Pseudooctadecabacter jejudonensis
  REGION 1..348: note = tr|A0A1Y5R9N0|A0A1Y5R9N0_9RHOB S-adenosylmethionine:tRNA ribosyltransferase-isomerase; OS = Pseudooctadecabacter jejudonensis OX=1391910 GN=queA; PE = 3 SV=1
MKLSEFNFDLPERLIATRPARPRTSAKLLVAEGADTRDLTVADLGSVLRAGDRLVLNDTKVIPARLFGTRTRVSAHGDGVAKIEVTLLEPRAGGAWAALVKPLRKVREGEEIVFSPDLSAVFEGRVEDQALLRFNCAGSDFDAALNAAGAMPLPPYIAAKRAADAQDKEDYQTIWADKSGAVAAPTASLHFEQWLLDDLGAMGVGFTHVTLHVGAGTFLPVKVDDVSEHKMHAEWGQITQAAADEIMATKAAGGRVIPVGTTALRLIESAGRSGVLRAWEGETDIFITPGFAFQIADGLMTNFHLPKSTLMMLVSALMGIERIREIYAHAIENEYRFFSYGDSSILLP

SEQ ID NO: 71109 - protein, 349 aa, unidentified
  source 1..349: note = Pseudopedobacter saltans
  REGION 1..349: note = tr|F0SC98|F0SC98_PSESL S-adenosylmethionine:tRNA ribosyltransferase-isomerase OS=Pseudopedobacter saltans (strain ATCC 51119 / DSM 12145 / JCM 21818 / LMG 10337 / NB RC 100064 / NCIMB 13643) OX=762903 GN=queA PE=3
MKLSQFKFHLPDSLIAHYPAETRDESRLMVLHKDTGEIEHKLFKDVLGYFDDKDVMILNNTKVFPARLYGNKEKTGATIEVFLLRELNKELRLWDVLVDPARKIRVGNKLYFGDDDLLVAEVVDNTTSRGRTIRFLFDGTDEEFRQNIEILGETPLPKYIKRKPTAEDKERYQTIFAKNEGAVAAPTAGLHFSRELMKRLELKGVEFAEVTLHVGLGTFRQVEVEDLTKHKMDSEQFIIAEKDANIVNKAIEEKRRICAVGTTVMRAVESAVSASRTLKPMNDWTSKFIFPPYDFSIANSMITNFHTPESTLLMMVSAFGGYEHVMHAYEVAVKEKYRFYSYGDAMLII

SEQ ID NO: 71110 - protein, 411 aa, unidentified
  source 1..411: note = Pseudopedobacter saltans
  REGION 1..411: note = tr|A0A2W5GXV0|A0A2W5GXV0_9SPHI S-adenosylmethionine:tRNA ribosyltransferase-isomerase; OS = Pseudopedobacter saltans OX=151895 GN=DI598_10225 PE=3; SV = 1
MHPKDISIQDYTYELPDSRIAKYPLPQRDASKLLVFNTDHSIQENTYAHISDYIPENSFLVFNNTKVVEARIFFQKSTGSSIEIFCLEPDDRYSDITSAMLETGEVYWKCLVGGAKKWKEGALTRNFEGKNGDVELAVEKVEKRNDYFLVHLYWSDKTLSFAEVLHYAGIIPLPPYLNRETEVSDNERYQTVYAKYDGSVAAPTAGLHFTENVLDSLKKKNCHYDFVTLHVGAGTFKPVKAEHMADHEMHYEAMDISLTFLKNLLSNIAKDHNIVTVGTTSMRTIESLYWIGVQAFQGKLEPLNIEVLQWAPYENPSNISAEESIGSLIDWMQMQHIERIFAKTQIIIAPGYQLKIVNGLVTNFHQPQSTLILLVSAIVGDYWKTIYQYAMEHEFRFLSYGDGSLLWKQKK

SEQ ID NO: 71111 - protein, 348 aa, unidentified
  source 1..348: note = Pseudopelagicola gijangensis
  REGION 1..348: note = tr|A0A1M6ELY7|A0A1M6ELY7_9RHOB S-adenosylmethionine:tRNA ribosyltransferase-isomerase; OS = Pseudopelagicola gijangensis OX=1470563 GN=queA PE=3; SV = 1
MKLADFDFDLPEALIATRPANPRSSARLLVANGDQITDGAVSDLVDWLRPGDRLVLNDTKVIPARLTGFRTRSGPEGDTRSKIEVTLLEPNAEGTWSALVKPLRKIREGEKVVFSDTLAATLIAKTDGQAHLQFDLAGEDFDAALADAGAMPLPPYIAAKRAADEQDKTDYQTVWARHSGAVAAPTASLHFDPPLLERLKAKGVTFTYVTLHVGAGTFLPVKVDDVTTHKMHSEWGQVSRQAAAEIAATKVAGGRVIPVGTTALRLIESATRDGAMKAWEGGTDIFIYPGFEFRIADALMTNFHLPKSTLMMLVSALMGQDQIRHIYAHAIAEKYRFFSYGDASLLLP

SEQ ID NO: 71112 - protein, 351 aa, unidentified
  source 1..351: note = Pseudopuniceibacterium sediminis
  REGION 1..351: note = tr|A0A399J5X8|A0A399J5X8_9RHOB S-adenosylmethionine:tRNA ribosyltransferase-isomerase; OS = Pseudopuniceibacterium sediminis OX=2211117 GN=queA; PE = 3 SV=1
MHLSDFDFDLPERLIATRPAKPRSSARLLVAQGDTITDAVVRDLGDWLRPGDRLVLNDTKVIPARLSGVRARTSDAGDTQAQIEVTLLEPRADGTWAALLKPLRKVREGEVIRFSARLSAVLEAKQDGQGLLRFDLTGEDFDAALAEAGNMPLPPYIAALRAPDAQDKDDYQTVWAKNTGAVAAPTASLHFDDDLLGRLRAMGVGFTHVTLHVGAGTFLPVKVEDVTTHKMHAEWGEVSDVAAAEIAATKAAGGRVIPVGTTALRLIESAAQASGAIAPWQGETDIFIYPGFRFAVSDALMTNFHLPKSTLMMLVSALMGPDVIRQIYAHAVTENYRFFSYGDASLLIPRA

SEQ ID NO: 71113 - protein, 349 aa, Pseudoramibacter alactolyticus
  REGION 1..349: note = tr|E6ME00|E6ME00_9FIRM S-adenosylmethionine:tRNA ribosyltransferase-isomerase OS=Pseudoramibacter alactolyticus ATCC 23263 OX=887929 GN=queA PE=3 SV=1
METLRTEDFYYDLPERLIAQTPAEKRDDSRLMAINRATDAIEDRHFHDIIDYLNPGDLLVMNDTKVLPARIFGRKADTGARVELLLLTRLDDYRWETMVKPGRKARPGTTLDFYDAAGARVLRGTIEKTVDGGLRVIRFEYDGVFEAILDVIGTMPLPPYIHETLEDQSRYQTVYAEHDGSAAAPTAGLHFTDALLGAIAAKGVGLAKVTLHVGIGTFRPVKAANIREHHMHSERYLVPKETAEAIAATKTAGGRIIAVGTTTVRTLESVARDHDGKIVAAGGSTDIFIYPGFHWQVVDALITNFHLPESTLLMLVSSFYDRKKILAAYQHAIDENYRFFSFGDAMFLY

SEQ ID NO: 71114 - protein, 361 aa, unidentified
  source 1..361: note = Pseudorhizobium pelagicum
  REGION 1..361: note = tr|A0A081MI86|A0A081MI86_9RHIZ S-adenosylmethionine:tRNA ribosyltransferase-isomerase; OS = Pseudorhizobium pelagicum OX=1509405 GN=queA PE=3 SV=1
MRVDLFDFDLPDDNIALRPASPRDSARLLVVQPEPSAALEDHHVRDLPGMLRAGDALVFNDTRVIPAQLEGQRVREGGAELPVSATLHMRAGPERWKAFARPGKRIKVGDRILFGHGGDACLLGTLNATVESKGEGGEITLLFDLSGPALDEAIMAVGHIPLPPYIADKRPEDERDQIDYQTIYARERGAVAAPTAGLHFTPELFDALDAAGIERHFVTLHVGAGTFLPVKADDTDEHKMHAEIGHVSAETAERLNAVRARGGRIVSVGTTSLRLLESAAADDGRIEPWSGQTDIFITPGYRFKAVDVLMTNFHLPKSTLFMLVSAFSGFETMKNAYDYAIRSGYRFYSYGDSSLLFRKMT

SEQ ID NO: 71115 - protein, 352 aa, unidentified
  source 1..352: note = Pseudorhodobacter antarcticus
  REGION 1..352: note = tr|A0A1H8BQ43|A0A1H8BQ43_9RHOB S-adenosylmethionine:tRNA ribosyltransferase-isomerase; OS = Pseudorhodobacter antarcticus OX=1077947 GN=queA PE=3; SV = 1
MKLDDFDFDLPEALIATRPARPRTSARLLVVQGDDLHDRHVFDLPSLLRAGDRLVLNNTRVIPARLIGARHRASAQGPVSAKIEITLMEPDARGGWRAMAKPLRKLMVGEDILFAGGLTATVAEKSDSDLRLTFNQTGDNFDAALQAAGTMPLPPYIAAKRAPDAQDNDDYQTVFATRAGAVAAPTASLHFDDALLAQLAAMGVTTTEVTLHVGAGTFLPVKVDDVTTHKMHAEWGEVTPRAVAEINATRAAGGRIIPVGTTALRLIESAARATGRVEPWVGETDIFIYPGFAFQTTDALMTNFHLPKSTLLMLVAALMGQGRMQTAYAHAVAKQYRFFSYGDASLLIAAPS

SEQ ID NO: 71116 - protein, 359 aa, Pseudorhodobacter sp.
  REGION 1..359: note = tr|A0A4P8EHZ3|A0A4P8EHZ3_9RHOB S-adenosylmethionine:tRNA ribosyltransferase-isomerase; OS = Pseudorhodobacter sp. S12M18 OX=2500533 GN=queA PE=3; SV = 1
MKLDDFDFDLPEELIATRPARPRTAARMLVVEGDGLADRHVFDLPKLLRKGDRLVLNNTRVIPARLIGARHRDSAQGPVSAKIEVTLMEPDAQGGWRAMAKPLRKLLVGEEIVFTGGLTATVAEKSETDLRLTFNHAGADFDAALQAAGTMPLPPYIAAKRAPDMQDNHDYQTVFARNSGAVAAPTASLHFDDALLAELAAMGVEMTEVTLHVGAGTFLPVKVEDVTSHKMHAEWGEVTPQAAAEINATRAAGGRVIPVGTTALRLIESAARETGKVAPWQGETDIFIYPGFQFHATDALMTNFHLPKSTLLMLVAALMGQSRMQTAYAHAVAQNYRFFSYGDASLLIADGVNPPVRSA

SEQ ID NO: 71117 - protein, 343 aa, Pseudorhodobacter sp.
  REGION 1..343: note = tr|A0A2M8N3C0|A0A2M8N3C0_9RHOB S-adenosylmethionine:tRNA ribosyltransferase-isomerase; OS = Pseudorhodobacter sp. MZDSW-24AT OX=2052957 GN=queA; PE = 3 SV=1
MKLSDFDFDLPEALIATRPARPRPSARLLLAQGEGMRDLHVRDLIEVLQPGDRLVLNNTRVIPARLTGQRTRGEAVAKIEITLMEPSVTGWRAMAKPLRKVAVGEEIVFSPELSARVAEKSDTDLRLEFNLTGDDFDAALAQAGAMPLPPYIAAKRAPDAQDADDYQTVFARHKGAVAAPTASLHFDGPLLEALREKGVQFTEVTLHVGAGTFLPVKVEDVATHKMHAEWGQVTPAAAAQINATRAAGGRVIPVGTTALRLIETAARSGQVEPWEGPTDIFIYPGFTFHATDALMTNFHLPKSTLLMLVSALMGKARMDRIYAHAIAERYRFFSYGDASLLIP

SEQ ID NO: 71118 - protein, 368 aa, Pseudorhodoferax soli
  REGION 1..368: note = tr|A0A368XU45|A0A368XU45_9BURK S-adenosylmethionine:tRNA ribosyltransferase-isomerase; OS = Pseudorhodoferax soli OX=545864 GN=queA PE=3 SV=1
MRSYTLSDFDFSLPPELVAQHPACERSASRLLDGRSSPATDRVFRELPGLLQAGDLLVFNDTQVIKARLFGEKPSGGKLELLVERVLVGNQVVAHMKVSKKPPVGTVLHMAGGFTAQLLGRWPEDDGPLFRLAFTGPAGETPHDLMAAHGHVPLPPYITHTDSAEDAQRYQTVFARAPGAVAAPTAALHFDEAVLAALDARGVGRASVTLHVGAGTFQPVKTEDLDDHRMHSEWYAIPPATLAALERTRTNGGRILAVGTTTVRTLESWAQSGQTEGETSIFIRPGHRFQVVDLLLTNFHLPKSTLMMLVSAFAGYEHIMGLYRHAIAQGYRFFSYGDAMLLEGAWSAEMRARAGASGGASRGAGEAV

SEQ ID NO: 71119 - protein, 355 aa, Pseudorhodoferax sp.
  REGION 1..355: note = tr|A0A0Q4XKD0|A0A0Q4XKD0_9BURK S-adenosylmethionine:tRNA ribosyltransferase-isomerase; OS = Pseudorhodoferax sp. Leaf267 OX=1736316 GN=queA PE=3; SV = 1
MRSFTLSDFDFDLPPALVAQHPALERSASRLLDGTAATPIDRIFRELPTLLRAGDLLVFNDTQVVKARLFGEKPTGGKLELLVERVLQGQEVVCHMKVSKKPAVGTTLQMVGGFRATLLGRWPADDGPLFRFAFESDQGEDPYALMARCGHVPLPPYITHADSSEDERRYQTVFARVPGAVAAPTAALHFDEALLAALDARGVQRANVTLHVGAGTFQPVKTENIAEHHMHAERYEVPPATQQAIADCKARGGRVVAVGTTTVRTLESWAKSGEPRGDTTIFITPGFAFRHVDVLVTNFHLPKSTLMMLVSAFAGYEHVMALYRHAVHEGYRFFSYGDAMLLERASTIDQTTVQR

SEQ ID NO: 71120 - protein, 391 aa, Pseudorhodoferax sp.
  REGION 1..391: note = tr|A0A0S9NY18|A0A0S9NY18_9BURK S-adenosylmethionine:tRNA ribosyltransferase-isomerase; OS = Pseudorhodoferax sp. Leaf274 OX=1736318 GN=queA PE=3; SV = 1
MGESRPFLERARPALKPMRSYTLSDFDFTLPPELVAQHPAAERSASRLLDGRGPSPTDRIFRTLPALLNPGDLLVFNDTQVVKARLFGEKPSGGKLELLVERVLTGQQSAGPPQALLPPSGGGPAAGRTWGHGEVVAHMKVSKKPPVGTLLRMAGGFTARLLGRWPDEDGALFRLAFTGPAGETPHALMAAHGHVPLPPYITHSDSAEDAQRYQTVFARAPGAVAAPTAALHFDEGVLAALEARGVGRASVTLHVGAGTFQPVKTEDLDAHRMHSEWYAIPPATLAALERTRAQGGRILAVGTTTVRTLESWAQTGRTEGETNIFIRPGHRFQVVDLLLTNFHLPKSTLMMLVSAFAGYEHIMGLYRHAIDQGYRFFSYGDAMLLERLPAA

SEQ ID NO: 71121 - protein, 361 aa, unidentified
  source 1..361: note = Pseudorhodoplanes sinuspersici
  REGION 1..361: note = tr|A0A1W6ZVW6|A0A1W6ZVW6_9RHIZ S-adenosylmethionine:tRNA ribosyltransferase-isomerase; OS = Pseudorhodoplanes sinuspersici OX=1235591 GN=queA PE=3; SV = 1
MQTSLFDFDLPAENIALRPASPRDAARLMVVWPGQSPETEDKIVRDLPDLLQAGDALVVNDTKVIPARLFGRRIGRGEEPKIEATLHKRIDGSRWRAFVKPAKRLQAGDIVRFGDEGKVCFLGQLDATVEDKGEGGEVTLSFAFHGAILDQAIAERGAMPLPPYIASKRPADERDLTDYQTMFADEEGSVAAPTAALHFTPSLIERLIANGIQLHRLTLHVGAGTFLPVKGEDTAEHKMHSEWGEIDETTANALNAVRAKGGRIVPVGTTALRLLESAADESGTVRPFCGETDIFITPGYRFRAADLMMTNFHLPRSTLFMLVSAFAGLDTMQRAYAHAIATGYRFYSYGDACLLHPAEQR

SEQ ID NO: 71122 - protein, 354 aa, unidentified
  source 1..354: note = Pseudoroseicyclus aestuarii
  REGION 1..354: note = tr|A0A318SWU8|A0A318SWU8_9RHOB S-adenosylmethionine:tRNA ribosyltransferase-isomerase; OS = Pseudoroseicyclus aestuarii OX=1795041 GN=queA PE=3 SV=1
MSGPGLTLEDFDFDLPEELIATRPARPRSSARLLVAEGGSGIKDRHVADLPDILRPGDRLVLNDTRVIPARLSGIRRRSGETGQTEARIEATLLGPRADGCWNAMIKPLKKLRIGETVDFGQGLTAELVARDAAQGVLRFSEAGEAFDAALDRAGSMPLPPYIAAKRAPDDEDRTDYQTVWADRPGAVAAPTASLHFDQPLLDALAARGIGFTRVTLHVGAGTFLPVKVDRIEDHRMHAEWGEVTEEAAVQIAATRAARGRIIAVGTTALRLIETAGQGGFIQPWRGETDIFIRPGYRFQVAHGLMTNFHLPKSTLMMLVSALMGMDRVRGIYDHALAERYRFFSYGDASLLLP

SEQ ID NO: 71123 - protein, 352 aa, Pseudoruegeria aquimaris
  REGION 1..352: note = tr|A0A1Y5R996|A0A1Y5R996_9RHOB S-adenosylmethionine:tRNA ribosyltransferase-isomerase; OS = Pseudoruegeria aquimaris OX=393663 GN=queA PE=3 SV=1
MKLSDFDFDLPEELIATRPAVPRTSARLLHATAGRLTDRHVFDLPEILRPGDRLVLNDTKVIPARLEGLRHRESAQGPVSARISVTLLEPRPDGGWLALIRPLKKVAIGETIHFGEVLCARLTDKSEGEAVLAFDRTGADFDAALQAVGAMPLPPYIAAKRAADAQDKVDYQTVWARNSGAVAAPTASLHFDEALLAALAARGVAFTHVTLHVGAGTFLPVKVDDVSQHKMHSEWGAVSEQAAQEIAETKAAGGRIIPVGTTALRLIETAARESGTVRPWEGPTDIFITPGFTFRATDALMTNFHLPKSTLMMLVSALMGMERMRAVYAHAIAQRYRFFSYGDSSLLCPNEP

SEQ ID NO: 71124 - protein, 350 aa, unidentified
  source 1..350: note = Pseudoruegeria haliotis
  REGION 1..350: note = tr|A0A2T0RNI5|A0A2T0RNI5_9RHOB S-adenosylmethionine:tRNA ribosyltransferase-isomerase; OS = Pseudoruegeria haliotis OX=1280846 GN=queA PE=3 SV=1
MLLSDFDFDLPEELIATRPANPRTHARFLVALGAATEDAQVLDLPRYLRPGDRLVLNNTKVIPARLSGLRRRQGEQGPTEARIEVTLLEPQGDGSWQALVKPAKKVRDGEGIHFAPGFSATVTGRSEGQLNLSFSLDGEDFDAALEAAGVMPLPPYIAARRAADAQDRTDYQTVFARHSGAVAAPTASLHFDEALLREIASMGVDFTEVTLHVGAGTFLPVKVDDVSRHRMHSEWGEVTEAAAEDINATRAAGGRIIPVGTTACRLIESAAAGDGIVPWQGETDIFIRPGYRFRIADGLMTNFHLPKSTLMMLVSALMGRERMMQIYDHAIAERYRFFSYGDASLLLPKV

SEQ ID NO: 71125 - protein, 350 aa, Pseudoruegeria lutimaris
  REGION 1..350: note = tr|A0A1G8J890|A0A1G8J890_9RHOB S-adenosylmethionine:tRNA ribosyltransferase-isomerase; OS = Pseudoruegeria lutimaris OX=571298 GN=queA PE=3 SV=1
MKLSDFDFELPEELIATRPATPRSSARLLVAQGERTVDSHVHDLPDFLRPGDRLVLNNTRVIPARLSGVRRRDGEQGPTEARIEVTLLEPQGDGSWNVLAKPAKKVRDGEEIHFAPGFSARVTGRVEGQLNLAFSLEGDDFDAALDAAGFMPLPPYIAARRAADAQDRTDYQTVFARHSGAVAAPTASLHFDRPLLERIAAMGVDFTEVTLHVGAGTFLPVKVDDVREHKMHSEWGEVPDAAAAEINATRAAGGRIIPVGTTACRLIESAAGADGIHPWSGETDIFIRPGYEFRIADGLMTNFHLPKSTLMMLVSALMGRDRMMALYEHAIAERYRFFSYGDASLLLPKG

SEQ ID NO: 71126 - protein, 358 aa, Pseudoruegeria sp.
  REGION 1..358: note = tr|A0A1X4J0Q8|A0A1X4J0Q8_9RHOB S-adenosylmethionine:tRNA ribosyltransferase-isomerase; OS = Pseudoruegeria sp. SK021 OX=1933035 GN=queA PE=3 SV=1
MTLDDFDFDLPDALIATRPVKPRSSARLLVATDTGIEDRHVFDLPEVLRPGDRLVLNDTKVLPARLSGTRHRIGADGTGVARIEVTLLDPQGDGTWQALVKPLRKIRDGEDIVFNDQFSAKIVGRGDGGLVHLALSAEGDALTELLDATGSMPLPPYIASKRAADAQDKDDYQTVFARHIGAVAAPTASLHFDQDLLDALARRGVTFSHVTLHVGAGTFLPVKVEDPRNHKMHSEWGEVSAQAAAEIAATRAAGGRIIPVGTTALRLIETAARETGQVAPWSGPTDIFIYPGFSFRASDALMTNFHLPKSTLMMLVSALMGTDRVRQIYAHALERQYRFFSYGDASILFPKDPPTAAL

SEQ ID NO: 71127 - protein, 349 aa, Pseudosphingobacterium domesticum
  REGION 1..349: note = tr|A0A1H7LJ83|A0A1H7LJ83_9SPHI S-adenosylmethionine:tRNA ribosyltransferase-isomerase; OS = Pseudosphingobacterium domesticum OX=407022 GN=queA; PE = 3 SV=1
MKLSQFKFNLPDSLIAHEPSETRDEARLMVLDRKTGAIEHKIFKDVLNYFDEHDVMILNNTKVFPARLYGNKEKTGATIEVFLLRELNKELRLWDVLVDPARKIRVGNKLYFGDNDLLVAEVVDNTTSRGRTIRFLFDGTDDEFRRNIEILGETPLPKYIKRRPTPEDKFRYQTIFAKNEGAVAAPTAGLHFSRELMKRLELKGIEFAEVTLHVGLGTFRQVEVEDLTKHKMDSEQFIIEQKDADVVNKAIADKRRVCAVGTTSMRSIESAVSANKTLKAANDWTSKFIFPPYDFSIANSMITNFHTPESTLLMMICAFGGYENVMNAYEIAVKEKYRFYSYGDAMLII

SEQ ID NO: 71128 - protein, 345 aa, Pseudospirillum japonicum
  REGION 1..345: note = tr|A0A1H6SLE7|A0A1H6SLE7_9GAMM S-adenosylmethionine:tRNA ribosyltransferase-isomerase; OS = Pseudospirillum japonicum OX=64971 GN=queA PE=3 SV=1
MQLSDFSFDLPEHLIARYPCPERTGSRLLVLKGSELQDQQFPDLLQHVRAGDLMVFNDTRVIPARLFGHKDTGGKIEILIERLQGTQQALAHIRASKAPKAGTQLHLAQGVCLQCLGREGDLFQLEVVGDTPLLDILYAQGHMPLPPYIDREDERLDKERYQTVYGRHAGAVAAPTAGLHFDQALLDALTAKGVEVAFVTLHVGAGTFQPVRVHDIQTHQMHKEWICVSEAVVAQVKATKARGGRVIAVGTTSVRCLETASAGGTLQAYQGDTQIFIYPGYQWQLVDLLVTNFHLPESTLLMLVASFAGHQHTLAAYQHAVAHQYRFFSYGDAMLVYPASQSPQA

SEQ ID NO: 71129 - protein, 330 aa, unidentified
  source 1..330: note = Pseudothermotoga hypogea
  REGION 1..330: note = tr|A0A0X1KSE9|A0A0X1KSE9_9THEM S-adenosylmethionine:tRNA ribosyltransferase-isomerase; OS = Pseudothermotoga hypogea DSM 11164 = NBRC 106472; OX = 1123384 GN=queA PE=3 SV= 1
MKVSDFDYELPEELIAQTPIEPRDSSRLMVVHRASGSIEHRIFREILEYLTCNDVLVLNNSKVIPARLFGQLENRQVEILLVQKVNERVWKCLVRPGKKIKPKVVVQLNEGILARCLDKCEEGMRLIEFSVNDEELLRMGEAPIPPYVRTKIPLERYQTVYAKVAGSVAAPTAGFHFTETLLERIRSLGVKIVEITLHVGIGTFRPVKTENVEEHRMHAERYSIPLDVVETIEKAKSEGGRIIAVGTTVARTLETFARTNLREGETDLFIYPPFEFKIVDALITNFHLPRSTLLMLVAAFAGYELTMKAYKEAVEKRYRFYSFGDAMFIL

SEQ ID NO: 71130 - protein, 329 aa, unidentified
  source 1..329: note = Pseudothermotoga lettingae
  REGION 1..329: note = tr|A8F4Z3|A8F4Z3_PSELT S-adenosylmethionine:tRNA ribosyltransferase-isomerase OS=Pseudothermotoga lettingae (strain ATCC BAA-301 / DSM 14385 / NBRC 107922 / TMO) OX= 416591 GN=queA PE=3 SV=1
MKVSDFDYILPDELIAQNPVEPRDTSRLMILNRKSRNIEHRIFRDIVEYLNPEDLLVLNNTRVIPARLFAKKANSTIEVLLVEKIGTNLWNCMVKPGKKVKPGDILNFETFTAECLSKADQGMRTLKFETTDEDLFKLGEAPLPPYVHSKIPIERYQTIYAKINGAIASPTAGLHFTEELLRKIKSTGVTIAEITLHVGIGTFRPVKTQFVQDHKMHPERYQISQDTVKLVEKTKRSGGRVIATGTTVVRALEEYGINGKLEGETRLFIYPPFNFKIVDAMITNFHLPKSTLLMLVAAFAGYDFIMEAYREAIEKRYRFYSFGDAMFIT

SEQ ID NO: 71131 - protein, 330 aa, unidentified
  source 1..330: note = Pseudothermotoga sp.
  REGION 1..330: note = tr|A0A3D3UYF9|A0A3D3UYF9_9THEM S-adenosylmethionine:tRNA ribosyltransferase-isomerase; OS = Pseudothermotoga sp. OX=2033661 GN=queA PE=3 SV=1
MKVSDFDYELPKELIAQTPIEPRDSSRLMVVHRASGSIEHRIFREILEYLTSNDVLVLNNSKVIPARLFGQLENRQVEILLVQKVNERIWKCLVRPGRKIKPEVVVHLSGGIVARCLDKCEEGMRLIEFNVNDEELLKVGEAPIPPYVRTKIPLERYQTVYAKVAGSVAAPTAGFHFTETLLAKIRSLGVKIVEITLHVGVGTFRPVKAESVEGHRMHAERYSIPLDVVETIERMKSKGGRIIAVGTTVVRTLETFARTNLREGETDLFIYPPFEFKIVDALITNFHLPRSTLLMLVAAFAGYELTMKAYREAVEKRYRFYSFGDAMLIL

SEQ ID NO: 71132 - protein, 329 aa, unidentified
  source 1..329: note = Pseudothermotoga thermarum
  REGION 1..329: note = tr|F7YYW1|F7YYW1_9THEM S-adenosylmethionine:tRNA ribosyltransferase-isomerase OS=Pseudothermotoga thermarum DSM 5069 OX=688269 GN=queA PE=3 SV=1
MKLSNFDYHLPEELIAQHPVEPRDSSRLMVVNRKTKTFEHRIFRDIVEYLYPKDLLVLNNTRVIPARLFAFKNNAKIEVFLVEKVKTSLWKCMVKPGKKVKVGDILDFEGFQGKCIDRLPDGLRLIEFNANDDEILSHGHTPLPPYVKTNVEMERYQTVYAKYNGSVAAPTAGLHFTESLLENIKSKGVKVVELTLHVSVGTFRPVKTEDITKHTIYPEYYSIPDEVVQEINNTKLNGGRVIAVGTTVVRALETYALTKQTAGKTDLFIYPPFEFKIVDCLVTNFHLPKSTLLMLVVAFAGYDLIMNAYQEAIKLRYRFYSFGDAMLII

SEQ ID NO: 71133 - protein, 359 aa, unidentified
  source 1..359: note = Pseudovibrio axinellae
  REGION 1..359: note = tr|A0A165YPR3|A0A165YPR3_9RHOB S-adenosylmethionine:tRNA ribosyltransferase-isomerase; OS = Pseudovibrio axinellae OX=989403 GN=queA_2 PE=3 SV=1
MLVDDFDFDLPAENIALRPASPRDSSRLLVVRPGLDSLLTDDHVVSLPDLLEPGDALVFNDTKVIPAQLLGFRTRDGVTAKVGVTLHQRASSCEWRAFVKPAKKLKVGDRVRFAFDEEGAGSAKLGAEVVEKSEAGDILFRFDRNAGDLDAAIAEVGHIPLPPYIAAKRAEDDQDRTDYQTVYAKYEGAVAAPTAGLHFTDELFAKLEARGIEKHFVTLHVGAGTFLPVKVDKTEDHKMHYEWGEVSAETAAALNEVRRRGNKVVSVGTTSLRILETAADEDGVIQPISKSTDIFITPGYKFRAIDALMTNFHLPKSTLFMLVSAFSGFEEMHKAYGHAIKNGYRFYSYGDSSLLFAKA

SEQ ID NO: 71134 - protein, 356 aa, unidentified
  source 1..356: note = Pseudovibrio axinellae
  REGION 1..356: note = tr|A0A166A8G0|A0A166A8G0_9RHOB S-adenosylmethionine:tRNA ribosyltransferase-isomerase; OS = Pseudovibrio axinellae OX=989403 GN=queA_1 PE=3 SV=1
MNTVTSTLEIPLHQIASEQISPKDAAKLMVVKPEDREPLSDRKIIELPQILRPGDLIVFNDTKVIPTEIRGYRSSGGASQPISMFLSDQKTPDCWTVHLKDDISISKNEKLTFFKGPKTLEAAVKEKTGRVVELQFQQAGLELKEHMARIRNFPEPPFLNQLPHAKPSDKRSYQTVFAKNEGAALTPSASLHFTHRLLKALDTYGISSCNVTLHVGTESLFPSHAVKDDDKALHSEWGEITKAAANKINQVRAMGGRIIAVGTTVMRLLESSTDKSQLTKPFRGTTDIFIKPGFQFRATDALITNFHPLDSTLFLLVSAFSGQNMMLNAYKRAISHNYRFLSFGDSSLLFRASTSA

SEQ ID NO: 71135 - protein, 361 aa, Pseudovibrio denitrificans
  REGION 1..361: note = tr|A0A1I6XCK0|A0A1I6XCK0_9RHOB S-adenosylmethionine:tRNA ribosyltransferase-isomerase; OS = Pseudovibrio denitrificans OX=258256 GN=queA PE=3 SV=1
MLVDDFDFDLPPENIALRPAVPRDSSRLLVVRPDGEQLLTDDQVLSLPDLLEPGDALVFNDTKVIPAQLLGFRTRDGVTAKVGVTLHQRASAKEWRAFVRPAKKLKVGDTVRFAFDEESKDAAELSAVVTEKSEAGDILFEFDRSAGDLDTAIAQVGHIPLPPYIAAKRAEDDQDRKDYQTIYAKHEGAVAAPTAGLHFTDRLFAALEERGIEKHFVTLHVGAGTFLPVKADKTEDHKMHFEYGEISEETAAALNAVRARGNKIVSVGTTSLRILESAVTEEGIINPISQSTDIFITPGYQFKAIDALMTNFHLPRSTLFMLVSALSGMEEMRAAYEHAISSGYRFYSYGDSSLLFKKASK

SEQ ID NO: 71136 - protein, 754 aa, Pseudovibrio sp.; identical to SEQ ID NO: 59861
  REGION 1..754: note = tr|G8PH34|G8PH34_PSEUV Multifunctional fusion protein OS=Pseudovibrio sp. (strain FO-BEG1) OX=911045; GN = tgt PE=3 SV=1

SEQ ID NO: 71137 - protein, 361 aa, Pseudovibrio sp.
  REGION 1..361: note = tr|A0A161XDA3|A0A161XDA3_9RHOB S-adenosylmethionine:tRNA ribosyltransferase-isomerase; OS = Pseudovibrio sp. Ad26 OX=989410 GN=queA PE=3 SV=1
MLVDDFDFDLPPENIALRPAVPRDSSRLLVVRPDGEQLLTDDQVLSLPDLLEPGDALVFNDTKVIPAQLLGFRSRDGVTAKVGVTLHQRASAKEWRAFVRPAKKLKVGDTVRFAFDEESKDTAEFSAVVTEKSEAGDILFEFDRSAGELDAAIAQVGHIPLPPYIAAKRAEDDQDRKDYQTIYAKYEGAVAAPTAGLHFTDQLFAALEKRGIEKHFVTLHVGAGTFLPVKADKTEDHKMHFEYGEISSETAAALNAVRARGNKIVSVGTTSLRILESSVSEDGVINPISQSTDIFITPGYQFKAIDALMTNFHLPRSTLFMLVSALSGMDEMRAAYEHAISTGYRFYSYGDSSLLFKKASK

SEQ ID NO: 71138 - protein, 368 aa, Pseudoxanthobacter soli
  REGION 1..368: note = tr|A0A1M7ZLC4|A0A1M7ZLC4_9RHIZ S-adenosylmethionine:tRNA ribosyltransferase-isomerase; OS = Pseudoxanthobacter soli DSM 19599 OX=1123029 GN=queA; PE = 3 SV=1
MRTDDFDFDLPESAIALRPARPRDAARLLVVRPGGEPELDDRGIRDLVSLLRPGDLLVFNDTRVIPARLDGVRRRDDGAEARIEATLIERLDPSRWVALARPGKRLRVGDVIGFGGNGGEGVEPFAATVAEKNEGGEIVLAFDRGGPDLDRAIALAGRIPLPPYIGNKRADDAADREDYQTVFAREPGAVAAPTASLHLTEDLIERLQETGVEHVFLTLHVGAGTFLPVKAETTEGHRMHSERGVITPDAAARINAARAAGGRIVAVGTTALRLLESAADESGTLHPFDGATDIFITPGYRFRIVDVLMTNFHLPRSTLFMLVCAFAGTDAMRRAYAHAIASGYRFYSYGDGSLLFRDAGAGAPREPT

SEQ ID NO: 71139 - protein, 348 aa, unidentified
  source 1..348: note = Pseudoxanthomonas composti
  REGION 1..348: note = tr|A0A4Q1JYK9|A0A4Q1JYK9_9GAMM S-adenosylmethionine:tRNA ribosyltransferase-isomerase; OS = Pseudoxanthomonas composti OX=2137479 GN=queA PE=3 SV=1
MKKSDFHYDLPPELIAQAPLPERSASRLLVVPSGDAPLADLHVRDLPGQLRAGDLLVFNDTRVIPARLFGQKETGGRVEILIERLLPDNHAHAQIGASKSPKPGGRIDLDAGGSCQVLGREGEFYELRFDVDDALDSWLIKAGQMPLPPYITRAPGQDDQERYQTVFARELGAVAAPTAGLHFDQPLLDQLQAQGVQFGHITLHVGAGTFQAMRVDDVHQHRMHSEWLNVGAELIQKIRRTRAAGGRVIAVGTTVVRALESAMRDGELQPFAGETRIFIFPGYRIRSVDALVTNFHLPESTLLMLVSAFAGKQRILDAYAHAVRAGYRFFSYGDAMLLFPQANGEGAA

SEQ ID NO: 71140 - protein, 360 aa, Pseudoxanthomonas dokdonensis
  REGION 1..360: note = tr|A0A0R0CU14|A0A0R0CU14_9GAMM S-adenosylmethionine:tRNA ribosyltransferase-isomerase; OS = Pseudoxanthomonas dokdonensis OX=344882 GN=queA PE=3; SV = 1
MKKSDFHFELPEALIAQAPLAERSASRMLVVPPADAALVDQHVRDLVDWLRPGDLLVFNDTRVIPARLFGQKDTGGRVEILIERLLPDNHARAQIGASKSPRPGGRIQLDAGGSAEVLGREGEFYQLRFDVPDSLESWLLKAGRLPLPPYIQREAGVDDDERYQTVFARNLGAVAAPTAGLHFDDALLAALRGKGVEFGHVTLHVGAGTFQPVRVDDVRQHHMHSEWLNVGASLVEQVRATRARGGRVVAVGTTVVRALESAWRSSDASPGGELQPFAGETRIFIFPGYRIRSVDALLTNFHLPESTLLMLVSAFAGKQRIFDAYDHAVRERYRFFSYGDAMLLFPAQHPEPTPAGSHTD

SEQ ID NO: 71141 - protein, 361 aa, Pseudoxanthomonas indica
  REGION 1..361: note = tr|A0A1T5JAK3|A0A1T5JAK3_9GAMM S-adenosylmethionine:tRNA ribosyltransferase-isomerase; OS = Pseudoxanthomonas indica OX=428993 GN=queA PE=3 SV=1
MLTYNAPPCQASAQPRFPVKKSDFHFDLPDELIAQAPLAERSASRLLVVPAGEGEFVDRHVRDLDEWLRPGDLLVFNDTRVIPARLFGQKSTGGRVEILIERLLPDNVARAQIGASKSPKPGGRIQLDEGGEAEVLDREGEFYTLRFHVPGALESWLLQAGRLPLPPYIQREAGRDDDERYQTVFARELGAVAAPTAGLHFDEALLQALRERGIEFGHVTLHVGAGTFQPVRVDDVREHHMHSEWLNVGAALIEQIHATRARGGRVIAVGTTVVRALESAMRDGQLQPFAGETQIFIFPGYRIRSVDALITNFHLPESTLLMLVSAFAGKDRVFAAYRHAVEQRYRFFSYGDAMLLFPSLS

SEQ ID NO: 71142 - protein, 347 aa, Pseudoxanthomonas sp.
  REGION 1..347: note = tr|A0A4V2HCX6|A0A4V2HCX6_9GAMM S-adenosylmethionine:tRNA ribosyltransferase-isomerase; OS = Pseudoxanthomonas sp. NML171200 OX=2480816 GN=queA PE=3; SV = 1
MKKSDFHYDLPPELIAQAPLPERSASRLLVVPPGDAPLADLHVRDLPGQLRAGDLLVFNDTRVIPARLFGQKDTGGRVEILIERLLPDNRAHAQIGASKSPKPGGLIALDAGGHCEVLGREGEFYELRFEVGDALDSWLLRAGRMPLPPYITREPGQDDDERYQTVFARELGAVAAPTAGLHFDEALLERLKAQGVQFGHITLHVGAGTFQAMRVDDVREHRMHSEWLNVGAELVQQIRRTRAAGGRVIAVGTTVVRALESATREGQLQPFAGETRIFIFPGYRITSVDALITNFHLPESTLLMLVSAFAGKARILQAYRHAVEQGYRFFSYGDAMLLFPQAQEVSA

SEQ ID NO: 71143 - protein, 343 aa, Pseudoxanthomonas sp.
  REGION 1..343: note = tr|A0A3R8MS11|A0A3R8MS11_9GAMM S-adenosylmethionine:tRNA ribosyltransferase-isomerase; OS = Pseudoxanthomonas sp. SGD-10 OX=2493089 GN=queA PE=3; SV = 1
MKKSDFHYDLPEELIAQAPLAERSASRMLVVPPGEGDFADLHVRDLPDLLQPGDLLVFNDTRVIPARLFGQKESGGRVEILIERLLPDEQARVQMRASKSPKPGSRIVLDGGGQAEVLGREDAFFVVRFEVGEPLEQWLARVGRLPLPPYIQREPDAADAERYQTVFAREVGAVAAPTAGLHFDHALLQRLRERGVEFGHVTLHVGAGTFQPMRVEDVREHTMHSEWLNVGAELVAQVRRTRAAGGRVIAVGTTVVRALESAMRDGQLQPFAGETRIFIFPGYKVRSVDALVTNFHLPESTLLMLVSAFAGKERIFAAYRHAVERRYRFFSYGDAMLLWGLKD

SEQ ID NO: 71144 - protein, 348 aa, Pseudoxanthomonas spadix
  REGION 1..348: note = tr|G7URQ4|G7URQ4_PSEUP S-adenosylmethionine:tRNA ribosyltransferase-isomerase OS=Pseudoxanthomonas spadix (strain BD-a59) OX=1045855 GN=queA PE=3 SV=1
MKKSDFRYDLPPELIAQAPLPERSASRLLVVPPGQAALLDLYMRELPSQLRAGDLLVFNDTRVIPARLFGQKDTGGRVEILIERLLPDNRAQAQIGASKSPKPGGHIALDAGGSCEVLSREGEFYQLRFDVEDALDSWLLKAGRMPLPPYITREPGQDDDERYQTVFAREPGAVAAPTAGLHFDQPLLDTLKAQGVQFGHVTLHVGAGTFQAMRVEDVREHRMHSEWLNVGAKLVQQIRRIRAAGGRVIAVGTTVVRALESAMRDGELQPFAGETCIFIFPGYRIASVDALITNFHLPESTLLMLVSAFAGRQRILEAYAHAVAQRYRFFSYGDAMLLFPQADPRRCA

SEQ ID NO: 71145 - protein, 365 aa, Pseudoxanthomonas spadix
  REGION 1..365: note = tr|A0A3M6Q064|A0A3M6Q064_9GAMM S-adenosylmethionine:tRNA ribosyltransferase-isomerase; OS = Pseudoxanthomonas spadix OX=415229 GN=queA PE=3 SV=1
MSCRCAYNTRLPFTRAALKKSDFRYDLPPELIAQAPLPERSASRLLVVPPGQAALLDLYMRDLPSQLRAGDLLVFNDTRVIPARLFGQKDTGGRVEILIERLLPDNRAQAQIGASKSPKPGGHIALDAGGSCEVLSREGEFYQLRFDVEDALDSWLLKAGRMPLPPYITREPGQDDDERYQTVFAREPGAVAAPTAGLHFDQPLLDTLKAQGVQFGHVTLHVGAGTFQAMRVEDVREHRMHSEWLNVGAKLVQQIRRTRAAGGRVIAVGTTVVRALESAMRDGELQPFAGETCIFIFPGYRIASVDALITNFHLPESTLLMLVSAFAGRQRILEAYAHAVAQRYRFFSYGDAMLLFPQADPRRCA

SEQ ID NO: 71146 - protein, 343 aa, Pseudoxanthomonas suwonensis
  REGION 1..343: note = tr|E6WSA5|E6WSA5_PSEUU S-adenosylmethionine:tRNA ribosyltransferase-isomerase OS=Pseudoxanthomonas suwonensis (strain 11-1) OX=743721 GN=queA PE=3 SV=1
MKKSDFHYDLPEELIAQAPLAERSASRMLVVPPGEGEFADMHVRDLPELLQPGDLLVFNDTRVIPARLFGQKESGGRVEILIERLLPDAQARVQMRASKSPRPGSRIVLDGGGQAEVVGRDDAFFVVRFELDEPLEQWLARVGRLPLPPYIQRQPDAADAERYQTVFAREVGAVAAPTAGLHFDHALLQRLRERGVEFGHVTLHVGAGTFQPVRVEDVREHTMHSEWLNVGAELVAQIRRTRAAGGRVIAVGTTVVRALESAMRDGQLQPFAGETRIFIFPGYRIRSVDALVTNFHLPESTLLMLVSAFAGQERIFAAYRHAVEQRYRFFSYGDAMLLWGLED

SEQ ID NO: 71147 - protein, 353 aa, Pseudoxanthomonas suwonensis
  REGION 1..353: note = tr|A0A0E3UPC3|A0A0E3UPC3_9GAMM S-adenosylmethionine:tRNA ribosyltransferase-isomerase; OS = Pseudoxanthomonas suwonensis OX=314722 GN=queA PE=3 SV=1
MKKSDFHYDLPEELIAQAPLAERSASRLLVVPPSIGPFSDLHVRDLPGLLQPGDLLVFNDTRVIPARLFGQKDSGGRVEILIERLLPDEQARAQVRASKSPKAGSRIALDGGGEAEVLGRDGEFYRLCFEVEDGLEPWLLKVGRLPLPPYIRREPGQDDTERYQTVFAKQVGAVAAPTAGLHFDEPLLAALRERGVRFGHVTLHVGAGTFQPVRVEDVRQHTMHSEWLNVGAELVAQVRRTREAGGRVIAVGTTVVRALESAWHRSEARPEGELRPFAGETRIFIFPGYRIRSVDALLTNFHLPESTLLMLVSAFAGKQRVFDAYRHAVEQRYRFFSYGDAMLLYPPDDAPER

SEQ ID NO: 71148 - protein, 343 aa, Pseudoxanthomonas taiwanensis
  REGION 1..343: note = tr|A0A562D3H6|A0A562D3H6_9GAMM S-adenosylmethionine:tRNA ribosyltransferase-isomerase; OS = Pseudoxanthomonas taiwanensis J19 OX=935569 GN=queA; PE = 3 SV=1
MKKSDFHYDLPEELIAQAPLAERSASRMLVVPPGEGDFADLHVRDLPDLLQPGDLLVFNDTRVIPARLFGQKESGGRVEILIERLLPDAQARVQMRASKSPKPGSRIVLDGGGQAEVLGREDAFFVVRFEVGELRLRGLARVGRLPLPPYIQREPDAADAERYQTVFAREVGAVAAPTAGLHFDHALLQRLRERGVEFGHVTLHVGAGTFQPMRVEDVREHTMHSEWLNVGAELVAQVRRTRAAGGRVIAVGTTVVRALESAMRDGQLQPFAGETRIFIFPGYKVRSVDALVTNFHLPESTLLMLVSAFAGKERIFAAYRHAVERRYRFFSYGDAMLLWGLKD

SEQ ID NO: 71149 - protein, 346 aa, unidentified
  source 1..346: note = Pseudoxanthomonas wuyuanensis
  REGION 1..346: note = tr|A0A286D768|A0A286D768_9GAMM S-adenosylmethionine:tRNA ribosyltransferase-isomerase; OS = Pseudoxanthomonas wuyuanensis OX=1073196 GN=queA PE=3; SV = 1
MKKSDFHFELPPSLIAQAPLAERSASRLLVVPPGDAALVDGHVRDLPEWLAPGDLLIFNDTRVIPARVFGHKESGGRVEILIERLLPGNVARAQIGASKSPKPGGRIRLDGGGEAEVLGRDGEFYQLRFEVPGSLESWLLKAGRLPLPPYIQREPGRDDDERYQTVFARELGAVAAPTAGLHFDDRLLARLRERGVEFGHVTLHVGAGTFQPVRVDDIHQHQMHSEWLNVGAQLIEQVRAARARGGRVVAVGTTVVRALESAMHDGELKPFAGETRIFIFPGYRIRSVDALVTNFHLPESTLLMLVSAFAGKERVLAAYAHAVRQKYRFFSYGDAMLLFPQAGTQG

SEQ ID NO: 71150 - protein, 349 aa, Pseudozobellia sp.
  REGION 1..349: note = tr|A0A2E5BAU3|A0A2E5BAU3_9FLAO S-adenosylmethionine:tRNA ribosyltransferase-isomerase; OS = Pseudozobellia sp. OX=2024854 GN=queA PE=3 SV=1
MKLSNFNFELPNNLLAEYPAENRDESKLMVIHRETGKIEHKMFKDLINYFDEGDVMVLNNTKVFPARLYGNKEKTGARIEVFLLRELNEEQRLWDVLVDPARKIRIGNKLYFGDDETLVAEVIDNTTSRGRTLRFLYDGSYLDFRRKLRDLGQTPLPKYIKRDVEPEDEERYQTIYAKYEGAVAAPTAGLHFSKHLLKRLEIKGIDFAEVTLHVGLGTFNPVEVEDLSKHKMDSEELVIDEKAIETVNKAKSAKKKVCAVGTTVMRGLESAVSSEQTLNTFDGWTNKFIFPPYDFSIANCMITNFHLPKSTLLMMVSAFMGHDLMKKAYKEAILEQYKFYSYGDAMLII

SEQ ID NO: 71151 - protein, 349 aa, Pseudozobellia sp.
  REGION 1..349: note = tr|A0A3B0BZW6|A0A3B0BZW6_9FLAO S-adenosylmethionine:tRNA ribosyltransferase-isomerase; OS = Pseudozobellia sp. CCMM003 OX=2419782 GN=queA PE=3 SV=1
MKLSHFNFELPKDLLAEYPTENRDESKLMVIHRDSGKIEHKMFKDLIDYFDEGDVMVLNNTKVFPARLYGNKEKTGARIEVFLLRELNEEQRLWDVLVDPARKIRIGNKLYFGDDESLVAEVIDNTTSRGRTLRFLYDGAYIDFRRKLRELGETPLPKYIKRGVEPEDEERYQTIYAKHEGAVAAPTAGLHFSKHLLKRLEIKGVNFAELTLHVGLGTFNPVEVEDLSKHKMDSEELIIDEKATEVVNRAKEKRKKVCAVGTTAMRGLESAVSSEQTLNTFDGWTNKFIFPPYDFSIANCMITNFHLPKSTLLMMVSAFIGHDLMKRAYKEAILEGYRFYSYGDAMLII

SEQ ID NO: 71152 - protein, 349 aa, Pseudozobellia thermophila
  REGION 1..349: note = tr|A0A1M6JK01|A0A1M6JK01_9FLAO S-adenosylmethionine:tRNA ribosyltransferase-isomerase; OS = Pseudozobellia thermophila OX=192903 GN=queA PE=3 SV=1
MKLSHFNFELPDNLLAEYPAENRDESKLMVIHRETGKIEHKMFKDLIDYFDEGDVMVLNNTKVFPARLYGNKEKTGARIEVFLLRELNEEQRLWDVLVDPARKIRIGNKLYFGEDETLVAEVIDNTTSRGRTLRFLYDGSYLDFRRKLRELGQTPLPKYIKREVEPEDEERYQTIYAKYEGAVAAPTAGLHFSKHLLKRLEIKGVDFAEVTLHVGLGTFNPVEVEDLSKHKMDSEELVIDEKATQIVNNAKKNKRKVCAVGTTVMRGLESAVSSEHTLNTFEGWTNKFIFPPYDFSIANCMITNFHLPKSTLLMMVSAFMGHDLMKKAYKEAILEQYKFYSYGDAMLII

SEQ ID NO: 71153 - protein, 340 aa, Psychrilyobacter sp.
  REGION 1..340: note = tr|A0A369XV84|A0A369XV84_9FUSO S-adenosylmethionine:tRNA ribosyltransferase-isomerase; OS = Psychrilyobacter sp. S5 OX=2283384 GN=queA PE=3 SV=1
MLLSDYDYHLPEELIGQTPTMPRDHSRLLVVDKTKKEIEHKKFYDILDYLNEGDVLVRNSTKVIPARLIGKKESGAVMEVFLLKRLELNRWECLVRRAKKLKLDQTIIFGDGQLKATLKEVKDDGNRILEFTFDGVFEEIIHELGQMPLPPYITEKLEDGDRYQTVYAEKGQSVAAPTAGLHFTEELFEKIAQKGVEVVDVYLEVGLGTFRPVQTENVLEHKMHSETFEVPEKTAEVVNRAKAEGRRIVAVGTTSVRTLESAADSSGKLMATSGDTEIFIYPGYEFKIVDALITNFHLPKSTLLMLVSALSEKDFMFSVYEEAVKEKYEFFSFGDAMFIY

SEQ ID NO: 71154 - protein, 346 aa, Psychrobacillus insolitus
  REGION 1..346: note = tr|A0A2W7PFQ4|A0A2W7PFQ4_9BACI S-adenosylmethionine:tRNA ribosyltransferase-isomerase; OS = Psychrobacillus insolitus OX=1461 GN=queA PE=3 SV=1
MRVEDFDFDLPLELIAQTPLLDRTSSRLLIADYPKNTYKHESFSSILEELQAGDCLVLNDTKVMPARLMGVKEETGAHIEVLLLTQIEGDHWETLVKPSKRVKIGTEITFGEGLLKAVCTEIKDHGGRIFRFVYSGVFFEVLDQLGEMPLPPYIHEKLQDKNRYQTVYAKEQGSAAAPTAGLHFTDALLDDIRAKGIKIAFVTLHVGLGTFRPVSVDSIDDHEMHAEFYRISQETADTINEVKAAGGKIVAVGTTSTRTLESVATKFDGKLQEDSGWTSIFIYPGYDFLCIDGMITNFHLPKSTLVMLVSALTSRDFILSAYNEAIEQRYRFFSFGDAMFIKGRNY

SEQ ID NO: 71155 - protein, 346 aa, unidentified
  source 1..346: note = Psychrobacillus lasiicapitis
  REGION 1..346: note = tr|A0A544T8K2|A0A544T8K2_9BACI S-adenosylmethionine:tRNA ribosyltransferase-isomerase; OS = Psychrobacillus lasiicapitis OX=1636719 GN=queA PE=3; SV = 1
MRVEDFDFNLPEELIAQTPLLDRTSSKLLIADYPKNTFTHTHFSAILDELNEGDCLVLNDTKVMPARLMGVKEETGANVEVLLLTQIEGDHWETLVKPAKRVKIGTTIVFGDGLLRAVCTDIKEHGGRIFRFEYDGVFFEVLDQLGEMPLPPYIHEKLENKDRYQTVYAKEQGSAAAPTAGLHFTENLLEEIQAKGVKIAFVTLHVGLGTFRPVSVDSIDDHEMHSEFYRLSKETANTINEVRAAGGKIVAVGTTSTRTLETVATKFDGVLQEDSGWTSIFIYPGYEFKCIDGMITNFHLPKSTLVMLVSALTSREFILSAYKEAIDLRYRFFSFGDAMFIKGRNY

SEQ ID NO: 71156 - protein, 346 aa, Psychrobacillus psychrodurans
  REGION 1..346: note = tr|A0A1I4WWN6|A0A1I4WWN6_9BACI S-adenosylmethionine:tRNA ribosyltransferase-isomerase; OS = Psychrobacillus psychrodurans OX=126157 GN=queA PE=3; SV = 1
MRVEDFDFELPEELIAQTPLLDRTSSKLLIADFEKQSYTHTHFKEILNELNEGDCLVLNDTKVMPARLMGIKEETGANVEVLLLTQIEGDHWETLVKPAKRVKIGTEITFGEGLLKAVCTGIKDHGGRIFRFEYTGVFFEVLDQLGEMPLPPYIHEKLENKDRYQTVYAKEQGSAAAPTAGLHFTDALLDEIRLKGVKIAFVTLHVGLGTFRPVSVDSIDDHEMHSEFYRITQETADVINKVKAIGGKVVAVGTTSTRTLETVATKFDGQLQADSGWTSIFIYPGYEFKCIDGMITNFHLPKSTLVMLVSALTSRDFILSAYKEAVDLKYRFFSFGDAMFIKGRNY

SEQ ID NO: 71157 - protein, 346 aa, Psychrobacillus psychrotolerans
  REGION 1..346: note = tr|A0A1I5YWW3|A0A1I5YWW3_9BACI S-adenosylmethionine:tRNA ribosyltransferase-isomerase; OS = Psychrobacillus psychrotolerans OX=126156 GN=queA PE=3; SV = 1
MRVEDFDFELPEELIAQTPLLDRTSSKLLIADFVKQSYTHTHFKDILDELQEGDCLVLNDTKVMPARLMGMKKETGANIEVLLLTQIEGDHWETLVKPAKRVKVGTEITFGDGLLKAICTDIKDHGGRIFRFEYTGVFFEVLDQLGEMPLPPYIHEKLENKDRYQTVYAKEQGSAAAPTAGLHFTDALLDDIRSKGVKIAFVTLHVGLGTFRPVSVDSIDDHEMHSEFYRITGETADTINQVKAAGGKIVAVGTTSTRTLETVATKFEGQLQADSGWTSIFIYPGYDFKCIDGMITNFHLPKSTLVMLVSALTSREFMLSAYKEAVDLKYRFFSFGDAMFIKGRNY

SEQ ID NO: 71158 - protein, 346 aa, unidentified
  source 1..346: note = Psychrobacillus soli
  REGION 1..346: note = tr|A0A544TBM4|A0A544TBM4_9BACI S-adenosylmethionine:tRNA ribosyltransferase-isomerase; OS = Psychrobacillus soli OX=1543965 GN=queA PE=3 SV=1
MRVEDFDFDLPEELIAQTPLLDRTSSKLLIADYPKKAYTHNHFSAILDELNEGDCLVLNDTKVMPARLMGVKEETGANVEVLLLTQIEGDHWETLVKPAKRVKIGTTIVFGDGLLRAVCTDIKEHGGRIFRFEYDGVFFEVLDQLGEMPLPPYIHEKLENKDRYQTVYAKEQGSAAAPTAGLHFTENLLSDIRAKGVKIAFVTLHVGLGTFRPVSVDSIDDHEMHSEFYRLSKETANTINEVKEAGGKIVAVGTTSTRTLETVASKFNGQLQEDSGWTSIFIYPGYEFKCIDGMITNFHLPKSTLVMLVSALTSRDFILSAYKEAIDLRYRFFSFGDAMFIKGRNY

SEQ ID NO: 71159 - protein, 346 aa, Psychrobacillus sp.
  REGION 1..346: note = tr|A0A1H9SJB7|A0A1H9SJB7_9BACI S-adenosylmethionine:tRNA ribosyltransferase-isomerase; OS = Psychrobacillus sp. OK032 OX=1884358 GN=queA PE=3 SV=1
MRVEDFDFELPEELIAQTPLLDRTSSKLLVADFPKKTYTHTHFSAILDDLKAGDCLVLNDTKVMPARLMGVKEETGANVEVLLLTQIEGDHWETLVKPAKRVKIGTTIVFGDGLLRAVCTEIKEHGGRIFRFEYAGVFFEVLDQLGEMPLPPYIHEKLENKDRYQTVYAKEQGSAAAPTAGLHFTENLLDEIKAKGVKIAFVTLHVGLGTFRPVSVDSIDDHEMHSEFYRLSKETANTINEVKATGGKIVAVGTTSTRTLETVATKFDGVLQEDSGWTSIFIYPGYEFKCIDGMITNFHLPKSTLVMLVSALTSRDFILSAYKEAIDLRYRFFSFGDAMFIKGRNF

SEQ ID NO: 71160 - protein, 346 aa, Psychrobacillus sp.
  REGION 1..346: note = tr|A0A544TP31|A0A544TP31_9BACI S-adenosylmethionine:tRNA ribosyltransferase-isomerase; OS = Psychrobacillus sp. Z8 OX=2325572 GN=queA PE=3 SV=1
MKVEDFDFELPEELIAQTPLLDRTSSKLLVADYPNDAYKHETFSAILGELNKGDCLVLNDTKVMPARLMGVKEETGANVEVLLLTQIEGDNWETLVKPAKRVKVGTKITFGEGLLTAVCTELKDHGGRIFRFEYEGVFFEVLDKLGEMPLPPYIHEKLEEKDRYQTVYAKEQGSAAAPTAGLHFTEMLLDDIRAKGVKIAFVTLHVGLGTFRPVSVDSIDDHEMHSEFYRVSKETAQTINEVRAAGGKIVAVGTTSTRTLETVATKFDGQMEEDSGWTSIFIYPGYQFKCIDGMITNFHLPKSTLVMLVSALTSREFILTAYKEAIERSYRFFSFGDAMFIKGRNY

SEQ ID NO: 71161 - protein, 400 aa, Psychrobacter alimentarius
  REGION 1..400: note = tr|A0A144NUQ2|A0A144NUQ2_9GAMM S-adenosylmethionine:tRNA ribosyltransferase-isomerase; OS = Psychrobacter alimentarius OX=261164 GN=queA PE=3 SV=1
MTDSHALDSTAPALIDNDTDNNVLDYLSVDDYDYELPDSLIARYPLAQRSASKLLYLATDNQKNTASVQDRLFAELPDLLNAGDLIVFNDTKVMKARLFGQKDTGGKIEVLIERLVNLSDLDVTTLHVETIDDTTINKEHIALCHVKASKAPKLGQRVSLANGHMNAVMIGRQDNLFILAFEAPILPHLELYGELPIPPYFERHADDTDNTRYQTVFHDPAKLASVAAPTASLHFDESVLNQLTEKGINTAFVTLHVGAGTFAPVKTDNLLNHTMHSEYAHLPQATADLINQTHANGNQVIAIGTTVTRVLETAYQKTAVEGQPLSSWSGDTDIFIYPGFKFGVIDRLLTNFHLPKSTLLMLVSAFSGKAAIEHAYQHAIGKQYRFFSYGDAMLLDKKAN

SEQ ID NO: 71162 - protein, 400 aa, Psychrobacter aquaticus
  REGION 1..400: note = tr|U4T3Z6|U4T3Z6_9GAMM S-adenosylmethionine:tRNA ribosyltransferase-isomerase OS=Psychrobacter aquaticus CMS 56 OX=1354303 GN=queA PE=3 SV=1
MTDSHAVNSDNNIQINTNKDDAVLDYLSVNDYDYELPDSLIARYPLAQRSASKLLYLATDNQKNVAHVEDRLFAELPDLLNAGDLIVFNDTKVMKARLFGQKDTGGKLEALIERLINISDLDAATLHLETMDGKLVNQEHIALCHVKASKALKLGQRVALADGHMNAVMVGRQDNLFVLAFDAPILPHLELYGELPIPPYFERHADDTDNTRYQTVFHDPAKLASVAAPTASLHFDESVLSKLAEKGINTAFVTLHVGAGTFAPVKTDNLLNHTMHSEYAHLPQATAELINQTHANGNQVIAIGTTVTRVLETAYQKTAVNGQALSSWSGDTDIFIYPGFKFGVIDRLLTNFHLPKSTLLMLVSAFSGKAAIEHAYQHAITEQYRFFSYGDAMLLDKKVN

SEQ ID NO: 71163 - protein, 403 aa, Psychrobacter arcticus
  REGION 1..403: note = sp|Q4FRV6|QUEA_PSYA2 S-adenosylmethionine:tRNA ribosyltransferase-isomerase OS=Psychrobacter arcticus (strain DSM 17307 / 273-4) OX=259536 GN=queA PE=3 SV=1
MTDSEPQTLNNNSEITANHNDDILEYLSVDDYDYELPDQLIARYPLAQRSASKLLYLPTNNANSQVEDKLFSELPDILNAGDLIVFNDTKVMKARLFGQKDTGGKIEVLIERLVSLSDVNSAYLDEIIANSKTIDTTIIAEKHIALCHIKASKALKLGQGLVLADGHMTGIMIGRQENLFILAFDTPILPDLEQYGELPIPPYFERHADATDNTRYQTVFHDPAKLASVAAPTASLHFDDIVLEKLAAKGIQTAFVTLHVGAGTFAPVKTDNLLNHTMHSEYAHLPQATAELINQTHANGKQVIAIGTTVTRVLETAYQQTAVDGQSLSGWSGDTDIFIYPGFKFGVVDKLLTNFHLPKSTLLMLVSAFATKKSIEQAYQHAIKSQYRFFSYGDAMLLDKQVD

SEQ ID NO: 71164 - protein, 405 aa, Psychrobacter cryohalolentis
  REGION 1..405: note = sp|Q1QAG2|QUEA_PSYCK S-adenosylmethionine:tRNA ribosyltransferase-isomerase OS=Psychrobacter cryohalolentis (strain K5) OX=335284 GN=queA PE=3 SV=1
MTDSEPQTLNNNSEITASHNDDILEYLSVDDYDYELPDQLIARYPLAQRSASKLLYLRANNANSQVEVEDKLFSELPELLNAGDLIVFNDTKVMKARLFGQKDTGGKIEVLIERLVALSDLNSADLDTITSNSDIIDMTVIAEKHIALCHVKASKALKLGQGLVLADGHMTGVMIGRQENLFILAFDTPILPDLELYGELPIPPYFERHADATDNTRYQTVFHDPAKLASVAAPTASLHFDDIVLEKLAAKGIQTAFVTLHVGAGTFAPVKTENLLNHTMHSEYAHLPQATADLINQTHANGKQVIAIGTTVTRVLETAYQQTAVDRQPLSGWAGDTEIFIYPGFEFGVVDKLLTNFHLPKSTLLMLVSAFATKKSIEEAYQHAIESEYRFFSYGDAMLLDKKVD

SEQ ID NO: 71165 - protein, 397 aa, Psychrobacter fozii
  REGION 1..397: note = tr|A0A2V4UJM4|A0A2V4UJM4_9GAMM S-adenosylmethionine:tRNA ribosyltransferase-isomerase; OS = Psychrobacter fozii OX=198480 GN=queA PE=3 SV=1
MTDIHAVDSETNALIDTNKDNDTLDYLSVDDYDYELPDSLIARYPLSQRSASKLLYLPADQQKTITVEDRLFAELPDLLSAGDLIVFNDTKVMKARLFGQKDTGGKLEVLIERLVGISDLDTATLHLEDMTDKPINQEHIALCHVKASKALKLGQRLQLADGHMSATMIGRQDNLFILAFDAPILPHLELYGELPIPPYFERHADDTDNARYQTVFHDPTKLASVAAPTASLHFDDLVLSKLTEKGIHTAFVTLHVGAGTFAPVKTDNLLNHTMHSEYAHLPQATADLINQTHANGKQVIAIGTTVTRVLETAYQKTTNDGQALSSWSGDTDIFIYPGFKFGVIDKLLTNFHLPKSTLLMLVSAFSGKDMIEHAYQHAIKEQYRFFSYGDAMLLEKK

SEQ ID NO: 71166 - protein, 394 aa, Psychrobacter frigidicola
  REGION 1..394: note = tr|A0A5C7A2K7|A0A5C7A2K7_9GAMM S-adenosylmethionine:tRNA ribosyltransferase-isomerase; OS = Psychrobacter frigidicola OX=45611 GN=queA PE=3 SV=1
MTTSNSTNSASQSRADDTTLEYLSVADYDYELPDSLIARYPLDQRSASKLLYLPASSQDQPLHSPQDHIFTELPELLNAGDLIVFNDTKVMKARLFGNKDTGGRVEVLIERLLNGDSLDINNTNPKEALSLHKNVALCHVKASKAPKLGQRLSLADGNMGCVMIGRRDNLFILAFDAPILPNLELHGELPIPPYFERHADATDNIRYQTVFHDPAKLASVAAPTASLHFDTSVLERLAAKGINTAFVTLHVGAGTFAPVKTENLLNHTMHSEYAHLPQATAEIINQTHANGGKVIAIGTTVTRVLETAYQKTAQNGQPLTSWSGDTDIFIYPGFKFGVIDRLLTNFHLPKSTLLMLVSAFAGKSAIEEAYQHAITNQYRFFSYGDAMLLDKINF

SEQ ID NO: 71167 - protein, 406 aa, Psychrobacter immobilis
  REGION 1..406: note = tr|A0A2V2A4J4|A0A2V2A4J4_PSYIM S-adenosylmethionine:tRNA ribosyltransferase-isomerase; OS = Psychrobacter immobilis OX=498 GN=queA PE=3 SV=1
MTDFHTIDPTTAASIDAEKNNNDLSYLSVDDYDYELPDSLIARYPLSQRSASKLLYLPANNQKDPALVEDRLFTELPELLNEGDLIVFNDTKVMKARLFGQKDTGGKLEVLIERLVDISDLETATLYVEAEKSVEAANDKAVNQEHIALCHVKASKALKLGQHLQLADGHMKAVMIGRQDNLFILAFDAPILPHLELYGELPIPPYFERHADETDNTRYQTVFHDPTKLASVAAPTASLHFDESVLSKLAAKGIRTAFVTLHVGAGTFAPVKTDNLLNHTMHSEYAHLPQATAELINQTHANGKQVIAIGTTVTRVLETAYQKTAVNGQPLSSWSGDTDIFIYPGFKFGVIDRLLTNFHLPKSTLLMLVSAFSGKDAIEHAYQHAIKEHYRFFSYGDAMLLDRKRD

SEQ ID NO: 71168 - protein, 400 aa, Psychrobacter pacificensis
  REGION 1..400: note = tr|A0A1G6ZP45|A0A1G6ZP45_9GAMM S-adenosylmethionine:tRNA ribosyltransferase-isomerase; OS = Psychrobacter pacificensis OX=112002 GN=queA PE=3 SV=1
MTDSHIDSTDTDAPTDTDKKNDVLDYLSVEDYDYELPDSLIARYPLAQRSASKLLYLPARTQINDTRVEDRLFSELPHLLEAGDLIVFNDTKVMKARLFGQKDTGGKLEVLIERLVDISDLDEVPLHLKDTNDEAVNQEHIALCHVKASKALKLGQRLQLADGHMSATMIGRQDNLFILAFDAPILPHLELYGELPIPPYFERHADDTDNTRYQTVFHDPAKLASVAAPTASLHFDESVLSKLDEKGINTAFVTLHVGAGTFAPVKTDNLLNHTMHSEYAHLPQTTANLINQTHANGKKVIAIGTTVTRVLETAYQKTAIDGQALSSWSGDTDIFIYPGFKFGVIDRLLTNFHLPKSTLLMLVSAFAGKASIEHAYQHAIEKQYRFFSYGDAMLLDKKAQ

SEQ ID NO: 71169 - protein, 395 aa, unidentified
  source 1..395: note = Psychrobacter pasteurii
  REGION 1..395: note = tr|A0A1R4EDV6|A0A1R4EDV6_9GAMM S-adenosylmethionine:tRNA ribosyltransferase-isomerase; OS = Psychrobacter pasteurii OX=1945520 GN=queA PE=3 SV=1
MTQPTPQNQLDSSNNMTTNITETEGYLSVADYDYELPDEYIARYPLAERSASRLMYLPASNMAQTDGTADIQDKNFADLPDLLDAGDLIVFNDTKVMKARLFGQKDTGGKVEVLVERLTDDVEFTTDENGQSFDNVALCHVRASKAPKLGQTLLLGDGHIECVMIGRHENLFILSFKNPILPDLEQYGELPIPPYFERHADETDNVRYQTVFHDPTKLASVAAPTASLHFDDKVLQQLADKGVNTAYVTLHVGAGTFAPVKTDNLLNHTMHSEYANLPQDTADLINQTHQNGNKVIAIGTTVTRVLETAYQKTANDQGEVSAWSGDTDIFIYPGFKFGVIDKLLTNFHLPKSTLLMLVSAFAGKAPIEQAYEHAVAQKYRFFSYGDAMLLERNES

SEQ ID NO: 71170 - protein, 393 aa, Psychrobacter phenylpyruvicus
  REGION 1..393: note = tr|A0A379LHG6|A0A379LHG6_9GAMM S-adenosylmethionine:tRNA ribosyltransferase-isomerase; OS = Psychrobacter phenylpyruvicus OX=29432 GN=queA PE=3 SV=1
MTQPITQNQNQNDNSKNMTSDNAHTEGYLSVADYDYELPDEYIARYPLAERSASRLMYLPAQQGDTTEVQDRQFAELPELLETGDLIVFNDTKVMKARLFGQKDTGGKVEVLVERLTDDIEFTTDEDGKVHDNVALCHVRASKAPKLGQTLLLANGNIECVMIGRHENLFILSFKNPILPDLEQYGELPIPPYFERHADETDNIRYQTVFHDPAKLASVAAPTASLHFDDKVLQQLADKGINTAYVTLHVGAGTFAPVKTDNLLNHTMHSEYANLPQATADLINQTHKNGNKVIAIGTTVTRVLETAYQKTADDQGQVAAWSGDTDIFIYPGFKFGVIDKLLTNFHLPKSTLLMLVSAFAGKRNIEQAYQHAVAEKYRFFSYGDAMLLERSDS

SEQ ID NO: 71171 - protein, 395 aa, unidentified
  source 1..395: note = Psychrobacter piechaudii
  REGION 1..395: note = tr|A0A1R4G9K7|A0A1R4G9K7_9GAMM S-adenosylmethionine:tRNA ribosyltransferase-isomerase; OS = Psychrobacter piechaudii OX=1945521 GN=queA PE=3 SV=1
MTQPISQNQHDNSNNLTSDNTHTESPQSGYLSVADYDYELPDEYIARYPLAERSASRLMYLPAQKADTAAIQDRQFSDLPELLESGDLIVFNDTKVMKARLFGQKDTGGKVEVLVERLTDNTEFTTDEDGKNHDNVALCHVRASKAPKLGQTLLLANNNIECVMIGRHENLFILSFKNPILPDLEQYGELPIPPYFERHADETDNVRYQTVFHDPTKLASVAAPTASLHFDDKVLQQLADKGINTAYVTLHVGAGTFAPVKTDNLLNHTMHSEYANLPQATADLINQTHKNGNKVIAIGTTVTRVLETAYQKTADNQGQVSTWSGDTDIFIYPGFKFGVIDKLLTNFHLPKSTLLMLVSAFAGKTNIEQAYQHAVAKKYRFFSYGDAMLLERNES

SEQ ID NO: 71172 - protein, 400 aa, Psychrobacter piscatorii
  REGION 1..400: note = tr|A0A0T6DU35|A0A0T6DU35_9GAMM S-adenosylmethionine:tRNA ribosyltransferase-isomerase; OS = Psychrobacter piscatorii OX=554343 GN=queA PE=3 SV=1
MTDSHIDSADTDAPTDTDKNNDVLDYLSVEDYGYELPDSLIARYPLAQRSASKLLYLPARTQINDTRVEDRLFSELPHLLEAGDLIVFNDTKVMKARLFGQKDTGGKLEVLIERLVGISDLDEVTLHLKDTNDEAVNQEHIALCHIKASKALKLGQRLQLADGHMSATMIGRQDNLFILAFDAPILPHLELYGELPIPPYFERHADDTDNTRYQTVFHDPTKLASVAAPTASLHFDESVLSKLDEKGINTAFVTLHVGAGTFAPVKTDNLLNHTMHSEYAHLPQTTADLINQTHANGKKVIAIGTTVTRVLETAYQKTAIDGQALSSWSGDTDIFIYPGFKFGVIDRLLTNFHLPKSTLLMLVSAFAGKASIEHAYQHAIEKQYRFFSYGDAMLLDKKAH

SEQ ID NO: 71173 - protein, 404 aa, Psychrobacter sp.
  REGION 1..404: note = tr|A0A2M9TVL6|A0A2M9TVL6_9GAMM S-adenosylmethionine:tRNA ribosyltransferase-isomerase; OS = Psychrobacter sp. L7 OX=1982756 GN=queA PE=3 SV=1
MTHSHAVDLDRNTITDTHKNNNDLDYLSVNDYDYELPDELIARYPLAQRSASRLLYLPASNPANVADSRAEDRMFSELPDLLNAGDLIVFNDTKVMKARLFGQKDTGGKIEVLIERLVDIADLAPAALHLTTADDQPVCTDHIALGHIKASKAPKLGQRLQLGDGHIHAVMIGRQDNLFILAFDAPILPQLEQYGELPIPPYFERHADATDNTRYQTVFHDPAKLASVAAPTASLHFDEVVLDKLAAKGIHTAFVTLHVGAGTFAPVKTDNLLNHTMHSEYAHLPQATADLINQTHANGKQVIAIGTTVTRVLETAYQKTASTGKPLAGWSGDTDIFIYPGFKFAVIDKLLTNFHLPKSTLLMLVSAFSGKQAIEQAYKHAVEQQYRFFSYGDAMLLEKQMTTE

SEQ ID NO: 71174 - protein, 390 aa, Psychrobacter sp.
  REGION 1..390: note = sp|A5WGS3|QUEA_PSYWF S-adenosylmethionine:tRNA ribosyltransferase-isomerase OS=Psychrobacter sp. (strain PRwf-1) OX=349106 GN=queA PE=3 SV=1
MTQPLSQDQHDSSSNMPTDNAETQGYLSVADYDYDLPDEYIARYPLAERSASRLMYLPAQKENTAVIQDRQFSDLPELLQAGDLIVFNDTKVMKARLFGQKDTGGKVEVLVERLTDDTEFTTDESGQSFDNVALCHVRASKAPKLGQRLVLGDGNIECVMIGRHENLFILSFKNPILPDLEQYGELPIPPYFERHADETDNVRYQTVFHDPTKLASVAAPTASLHFDDKVLKQLADKGINTAYVTLHVGAGTFAPVKTDNLLNHTMHSEYANLPQATADLINQTHQNGNKVIAIGTTVTRVLETAYQKTADEHGHISTWSGDTDIFIYPGFKFGVIDKLLTNFHLPKSTLLMLVSAFAGKANIEQAYEHAVAQKYRFFSYGDAMLLERNL

SEQ ID NO: 71175 - protein, 383 aa, Psychrobacter urativorans
  REGION 1..383: note = tr|A0A0M4TDT2|A0A0M4TDT2_9GAMM S-adenosylmethionine:tRNA ribosyltransferase-isomerase; OS = Psychrobacter urativorans OX=45610 GN=queA PE=3 SV=1
MTHSQHSIANNNTDINNDGLDYLSVADYDYELPDSLIARYPLAERSASKLLYVPASAQPEDHIFTALPDLLNAGDLIVFNDTKVMKARLFGKKDTGGRVEVLIERLIDNNDGTNNESETTQKNVALCHVKASKAPKLGQRLILADGNMGCVMIGRQDNLFILDFDAPILPHLEAYGELPIPPYFERHADATDNIRYQTVFHDPAKLASVAAPTASLHFDDGILERLAAKGINTAFVTLHVGAGTFAPVKTENLLNHTMHSEYAHLPQTTADMINQTHANGGKVIAIGTTVTRVLETAYQKTALNGQPLSTWSGDTDIFIYPGFKFGVIDRLLTNFHLPKSTLLMLVSAFSGKSAIEQAYQHAINSEYRFFSYGDAMLLDKVDF

SEQ ID NO: 71176 - protein, 349 aa, Psychroflexus gondwanensis
  REGION 1..349: note = tr|N1WRR4|N1WRR4_9FLAO S-adenosylmethionine:tRNA ribosyltransferase-isomerase OS=Psychroflexus gondwanensis ACAM 44 OX=1189619 GN=queA PE=3 SV=1
MKLSQFEYTLPENLLAEFPSEHRDEAKLMVINRKDGSIEHKMFKDVIDYFGEKDVMVFNNTKVFPARLYGNKEKTGAKIEVFLLRELNPETRLWDVLVDPARKIRIGNKLYFGEDESLVAEVIDNTTNRGRTLRFLYDGSYQDFRAKLTELGQTPLPKYIKRDVVPEDAERYQTIYAKEEGAVAAPTAGLHFSKHLLKRLEIKGVDFAEVTLHIGLGTFSPVEVEDLSKHKMDSEQIMVDEKATSIINNAKSEKRKICAVGTTVMRTLESTVSSNRRLNEFTGWTNKFIFPPYDFKIANCMITNFHMPKSTLLMMVSAFAGHELMEKAYKEAIKENYKFYSYGDAMLII

SEQ ID NO: 71177 - protein, 351 aa, unidentified
  source 1..351: note = Psychroflexus halocasei
  REGION 1..351: note = tr|A0A1H3ZNJ2|A0A1H3ZNJ2_9FLAO S-adenosylmethionine:tRNA ribosyltransferase-isomerase; OS = Psychroflexus halocasei OX=908615 GN=queA PE=3 SV=1
MGMKLSQFTFELADDLLAEHPAEHRDESKLMVIDRKTGTIEHKMFKDLINYFDEDDVMVFNDTKVFPARLYGNKEKTGARIEVFLLRELNPETRLWDVLVDPARKIRIGNKLYFGEDESLVAEVIDNTTSRGRTLRFLYDGSYEDFRSKMRELGETPLPKYIKRDVSPEDEERYQTIYAKNEGAVAAPTAGLHFSKHLMKRLEIKGVNFADVTLHIGLGTFNPVEVEDLSKHKMDSEEICIEKEATEIINRGLDEKRRICAVGTTVMRTLESAVSSNQRLNEYEGWTNKFIFPPYDFSIANCMVTNFHMPKSTLLMMISAFAGHELMEKAYKEAVKENYRFYSYGDAMLII

SEQ ID NO: 71178 - protein, 349 aa, unidentified
  source 1..349: note = Psychroflexus salarius
  REGION 1..349: note = tr|A0A1M4SJK7|A0A1M4SJK7_9FLAO S-adenosylmethionine:tRNA ribosyltransferase-isomerase; OS = Psychroflexus salarius OX=1155689 GN=queA PE=3 SV=1
MKLSQFEFELPEELLAEFPAENRDESRLMVVNRKTGEIEHKMFKDLIEYFDEDDVMIFNDTKVFPARLFGNKEKTGARIEVFLLRELNPETRLWDVLVDPARKIRIGNKLYFGEDESLVAEVIDNTTSRGRTLRFLYDGSYQDFRKKLNELGETPLPKYIKRDVQPEDEDRYQTIYAKKEGAVAAPTAGLHFSKHLMKRLEIKGINFAEVTLHIGLGTFNPVEVEDLSKHKMDSEEIMIDEEATKTINTALDNKKRVCAVGTTVMRTIESAVSSNQRLNEYNGWTNKFIFPPYDFSIANCMVTNFHMPKSTLLMMISAFAGHDLMEKAYKEAIKEKYRFYSYGDAMLII

SEQ ID NO: 71179 - protein, 351 aa, Psychroflexus sediminis
  REGION 1..351: note = tr|A0A1G7V4F1|A0A1G7V4F1_9FLAO S-adenosylmethionine:tRNA ribosyltransferase-isomerase; OS = Psychroflexus sediminis OX=470826 GN=queA PE=3 SV=1
MGMKLSQFEFTLPEDLLAEFPSEHRDEAKLMVVNRKDGSIEHKMFKDVINYFDEKDVMVFNNTKVFPARLYGNKEKTGAKIEVFLLRELNPETRLWDVLVDPARKIRIGNKLYFGEDESLVAEVIDNTTNRGRTLRFLYDGSYQDFRDKLTELGQTPLPKYIKRDVVPEDAERYQTIYAKNEGAVAAPTAGLHFSKHLLKRLEIKGIDFAEVTLHIGLGTFNPVEVEDLSKHKMDSEEIMIDSNATSIINNAKSEKRRICAVGTTVMRTLESAVSSNHRLNEYNGWTNKFIFPPHDFSIANCMITNFHMPKSTLLMMISAFAGHDLMEKAYKEAIKEKYKFYSYGDAMLIL

SEQ ID NO: 71180 - protein, 349 aa, Psychroflexus sp.
  REGION 1..349: note = tr|A0A2M9TIC5|A0A2M9TIC5_9FLAO S-adenosylmethionine:tRNA ribosyltransferase-isomerase; OS = Psychroflexus sp. S27 OX=1982757 GN=queA PE=3 SV=1
MKLSQFTFELADDLLAEHPAEHRDESKLMVIDRKTGTIEHKMFKDLINYFDEDDVMVFNDTKVFPARLYGNKEKTGARIEVFLLRELNPETRLWDVLVDPARKIRIGNKLYFGEDESLVAEVIDNTTSRGRTLRFLYDGSYEDFRSKMRELGETPLPKYIKRDVSPEDEERYQTIYAKNEGAVAAPTAGLHFSKHLMKRLEIKGVNFADVTLHIGLGTFNPVEVEDLSKHKMDSEEICIEKEATEIINRGLDEKRRICAVGTTVMRTLESAVSSNQRLNEYEGWTNKFIFPPYDFSIANCMVTNFHMPKSTLLMMISAFAGHELMEKAYKEAVKENYRFYSYGDAMLII

SEQ ID NO: 71181 - protein, 349 aa, Psychroflexus sp.
  REGION 1..349: note = tr|A0A2I0D3Z9|A0A2I0D3Z9_9FLAO S-adenosylmethionine:tRNA ribosyltransferase-isomerase; OS = Psychroflexus sp. MES1-P1E OX=2058320 GN=queA PE=3 SV=1
MKLSQFEYTLPENLLAEFPSEHRDEAKLMVINRKDGSIEHKIFKDVINYFDEKDVMVFNNTKVFPARLYGNKEKTGAKIEVFLLRELNPETRLWDVLVDPARKIRIGNKLYFGEDESLVAEVIDNTTNRGRTLRFLYDGSYQDFRAKLTELGQTPLPKYITRDVVPEDAERYQTIYAKEEGAVAAPTAGLHFSKHLLKRLEIKGIDFAEVTLHIGLGTFSPVEVEDLSKHKMDSEQIKVDEKATSIINNAKSEKRKICAVGTTVMRTIESTVSSNRRLNEFTGWTNKFIFPPYDFKIANCMITNFHMPKSTLLMMVSAFAGHELMEKAYKEAIEENYKFYSYGDAMLII

SEQ ID NO: 71182 - protein, 351 aa, Psychroflexus torquis
  REGION 1..351: note = tr|K4IPK3|K4IPK3_PSYTT S-adenosylmethionine:tRNA ribosyltransferase-isomerase OS=Psychroflexus torquis (strain ATCC 700755 / ACAM 623) OX=313595 GN=queA PE=3 SV=1
MGMKLSQFEYTLPENLLAQFPSEHRDEAKLMVINRKDGSIEHKIFKDVINYFDEKDVMVFNNTKVFPARLYGNKEKTGAKIEVFLLRELNPETRLWDVLVDPARKIRIGNKLYFGEDESLVAEVIDNTTNRGRTLRFLYDGSYQDFRAKLTELGQTPLPKYITRDVVPEDAERYQTIYAKEEGAVAAPTAGLHFSKHLLKRLEIKGIDFAEVTLHIGLGTFSPVEVEDLSKHKMDSEQIKVDEKATSIINNAKSEKRKICAVGTTVMRTIESTVSSNRRLNEFTGWTNKFIFPPYDFKIANCMITNFHMPKSTLLMMVSAFAGHELMEKAYKEAIEENYKFYSYGDAMLII

SEQ ID NO: 71183 - protein, 351 aa, Psychromonas ingrahamii
  REGION 1..351: note = tr|A1SWU1|A1SWU1_PSYIN S-adenosylmethionine:tRNA ribosyltransferase-isomerase OS=Psychromonas ingrahamii (strain 37) OX=357804 GN=queA PE=3 SV=1
MFCMKVSDFSFELPPALIARYPMKDRSASRLLSVEGNSGELKHLQFTDLVDLIDENDLLIFNDTRVIPARLFGEKETGGKIEVLVERVLDDKSFLAHLRSSKSPKPGCKLRLENSIDAVMLKRQGPLFEIHIDHGSTVLEVLESIGHMPLPPYIDRPDEDADKERYQTVYNKNPGAVAAPTAGLHFDQAVMTKLQDKGVDFAFVTLHVGAGTFQPVKVDNILDHQMHSEYAEVSQEVIDKINTTKAKGGRVIAVGTTSVRSVESAAQVSVKMGNDLAPFFSETSIFIYPGYQFQIIDALVTNFHLSESTLLMLVSAFSGKENIDNAYKVAIQEKYRFFSYGDAMFLTKKTK

SEQ ID NO: 71184 - protein, 352 aa, Psychromonas sp.
  REGION 1..352: note = tr|A0A2N0WXW2|A0A2N0WXW2_9GAMM S-adenosylmethionine:tRNA ribosyltransferase-isomerase; OS = Psychromonas sp. psych-6C06 OX=2058089 GN=queA PE=3 SV=1
MKVSDFSFQLPESLIARYPKAERTGSRLLSLCGISGDIKHQQFPDIIDLINSDDLLIFNDTRVIPARLFGEKETGGKIEVLVERVIDDKSFLAHVRSSKSPKPGCKLRLENTVDAVMVQRQGPLFEICIDDTSSVLEVLENIGHMPLPPYIDRPDEDADKERYQTVYNKNPGAVAAPTAGLHFDQTILDKIQKKGAELAFVTLHVGAGTFQPVKVDNVLEHHMHSELAQVSQEVVDKIIATKQKGGRVIAVGTTSVRSIESAAQATLAQGLPLTPYFAETDIFIYPGYKFQLIDAMVTNFHLSESTLLMLVSAFAGKKHIEKAYQVAIEEQYRFFSYGDAMFLTNANSTAEL

SEQ ID NO: 71185 - protein, 348 aa, Psychromonas sp.
  REGION 1..348: note = tr|A0A366WCV0|A0A366WCV0_9GAMM S-adenosylmethionine:tRNA ribosyltransferase-isomerase; OS = Psychromonas sp. B3M02 OX=2267226 GN=queA PE=3 SV=1
MKVADFSFHLPEELIARYPMPERTNSRLLSLEANSGQLQHLNFTDIIDLVDEKDLLIFNDTRVIPARLFGTKETGGKIEVLVERVIDETTFLAHVRSSKSPKPGCKLLLENAVNAEMVQRQGPLFEIKVDSDDSVLQILERIGHMPLPPYIDRPDEDADKERYQTVYNKNPGAVAAPTAGLHFDQAILDKIAAKGADSAFVTLHVGAGTFQPVKVDNILDHQMHSEYAEVSQQVVDKIIATKAAGGRVIAVGTTSVRSIESAASVTLAKGLPLAPFFSETSIFIYPGYEFQLVDAMVTNFHLSESTLLMLVSAFSGKENIDHAYQTAIQEKYRFFSYGDAMFLTKKST

SEQ ID NO: 71186 - protein, 349 aa, Psychroserpens burtonensis
  REGION 1..349: note = tr|A0A5C7BE92|A0A5C7BE92_9FLAO S-adenosylmethionine:tRNA ribosyltransferase-isomerase; OS = Psychroserpens burtonensis OX=49278 GN=queA PE=3 SV=1
MKLSHFHFDLPDELLAERPSDIRDESRLMVLDRKNQTIEHKLFKDVIDYFDEGDVMILNNTKVFPARLYGNKEKTGARIEVFLLRELNEEQRLWDVLVDPARKIRIGNKLYFGEDETLVAEVIDNTTSRGRTLRFLYDGSYHEFRRKLTELGETPLPKYIQREVEPEDAERYQTIFAKNEGAVAAPTAGLHFSKHLLKRLEIKGVELPEVTLHVGLGTFNPVEVEDLSKHKMDSEEIYVTKPATDIINKGIAEKRRVCAVGTTAMRAVESCVSSSGTLNEFTGWTNKFIFPPYEFSIANSMITNFHTPKSTLLMMVSAFAGHDFMKRAYEEAVKEKYRFYTYGDAMLII

SEQ ID NO: 71187 - protein, 349 aa, Psychroserpens sp.
  REGION 1..349: note = tr|A0A4P7WTD9|A0A4P7WTD9_9FLAO S-adenosylmethionine:tRNA ribosyltransferase-isomerase; OS = Psychroserpens sp. NJDZ02 OX=2570561 GN=queA PE=3 SV=1
MKLSHFHFDLPDELLAEYPAENRDESRLMVLNRKEQTIEHKMFKDIIEYFDEKDVMILNNTKVFPARLFGNKEKTGARIEVFLLRELNKEQRLWDVLVDPARKIRIGNKLYFGDDETLVAEVIDNTTSRGRTLRFLYDGSYEEFRKKLQMLGETPLPKYIKREVEPEDEERYQTIYAKEEGAVAAPTAGMHFSKHLLKRLEIKGVDFAEVTLHVGLGTFNPVEVEDLSKHKMDSEELKIEAAAVEIINNAKKEKRRICAVGTTAMRAIESSVSSSGTLNEIEGWTNKFIFPPYDFSIANAMITNFHTPKSTLMMMVSAFAGHDFMKKAYEEAVKEKYKFYSYGDAMLII

SEQ ID NO: 71188 - protein, 352 aa, Psychrosphaera saromensis
  REGION 1..352: note = tr|A0A2S7UQK4|A0A2S7UQK4_9GAMM S-adenosylmethionine:tRNA ribosyltransferase-isomerase; OS = Psychrosphaera saromensis OX=716813 GN=queA PE=3 SV=1
MQVADFHFDLPEKLIAKAPKKQRSSSKLMALNGQTGDIQDCQFEQIIELVNEGDLLIFNNTRVIPARLFGQKESGGKVEILVERLVDEHTVLAHVRANKAPKPGNILILEGAVKAEMIKRHDDLFELKFLSDETALTALEKYGHMPLPPYIDRPDTEDDRERYQTVYNEKPGAVAAPTAGLHFTEELIEKLKQKGVNTEFVTLHVGAGTFQSIRVEDVKEHVMHSEYAEVPLHVVEAIQRTKANGKRVIAVGTTSVRSIESAAWKCDMPSKQFDKLTTFTGETDIFIYPGYEFKVVDAMVTNFHLPESTLIMLVSAFAGKENILKGYNQAIANEYRFFSYGDAMFLTNQAVD

SEQ ID NO: 71189 - protein, 348 aa, unidentified
  source 1..348: note = Pueribacillus theae
  REGION 1..348: note = tr|A0A2U1K018|A0A2U1K018_9BACI S-adenosylmethionine:tRNA ribosyltransferase-isomerase; OS = Pueribacillus theae OX=2171751 GN=queA PE=3 SV=1
MDVTDFDFNLPEELIAQTPLRERTASRLMVVDPLSEKIAHRQFTDLVDLLHPGDCLVLNDTRVLPARLIGLKSDTGAKVEVLLLKQIEGDKWSTLAKPAKRVKEGTVITFGDGRLKATCTAEGENGGREFEFHFEGIFYEVLEELGEMPLPPYIKEQLDDKERYQTVYARHKGSAAAPTAGLHFTKELLKTLEEKGIHIAYLTLHVGLGTFRPVSAEVVEEHKMHAEFYQLSEGTAALLTNVRENGGRIIAVGTTTTRTLETITAMNHGKFKADAGWTDIFIYPGFTFQAIDGMITNFHLPKSSLMMLVSALAGRELIMDAYQQAIEARYRFFSFGDAMLILEGSMKS

SEQ ID NO: 71190 - protein, 350 aa, unidentified
  source 1..350: note = Puniceibacterium antarcticum
  REGION 1..350: note = tr|A0A2G8RFN0|A0A2G8RFN0_9RHOB S-adenosylmethionine:tRNA ribosyltransferase-isomerase; OS = Puniceibacterium antarcticum OX=1206336 GN=queA PE=3; SV = 1
MKLQDFDFDLPERLIATRPASPRSSARLLVAEGDVMSDAVVSDLTRWLRPGDRLVLNDTRVIPARLSGLRRRAGPEGETESRIEVTLLEPRANGCWAALLKPLKRIRDGEVITFSDALSATLVARADGQGLLRFNLMGEDFDAALAEAGAMPLPPYIAARRPADARDKEDYQTVWARNPGAVAAPTASLHFDAALLAALEQHGVTFTHVTLHVGAGTFLPVKVEDVTTHKMHAEWGEVSVQAAQEILATKAAGGRIIPVGTTALRLIETAARDGFGPWRGETDIFIYPGFEFRMADALMTNFHLPKSTLMMLVSALMGAERIRDIYAHAIAEEYRFFSYGDASLLLPARA

SEQ ID NO: 71191 - protein, 350 aa, unidentified
  source 1..350: note = Puniceibacterium sediminis
  REGION 1..350: note = tr|A0A238W4M2|A0A238W4M2_9RHOB S-adenosylmethionine:tRNA ribosyltransferase-isomerase; OS = Puniceibacterium sediminis OX=1608407 GN=queA PE=3 SV=1
MKLQDFDFDLPERLIATRPASPRSSARLLVASGDVITDAVVTDITRWLRPGDRLVLNDTRVIPARLSGVRRRAGPEGETESRIEVTLLEPRADGCWAALLKPLKRVRDGEVITFSDVLSATLVARDDGQGLLRFNLTGDDFDAALAQAGAMPLPPYIAARRPADERDKDDYQTVWARNPGAVAAPTASLHFDAALLAALEQHGVKFSHVTLHVGAGTFLPVKVEDVTTHRMHSEWGEVSEQAAQEIMETKATGGRIIPVGTTALRLIETAARDGFGPWQGDTDIFIYPGFEFRVADALMTNFHLPKSTLMMLVSALMGADRIRRIYAHAIAQEYRFFSYGDASLLFPERG

SEQ ID NO: 71192 - protein, 351 aa, unidentified; identical to SEQ ID NO: 71112
  source 1..351: note = Puniceibacterium sp.
  REGION 1..351: note = tr|A0A5B3BY30|A0A5B3BY30_9RHOB S-adenosylmethionine:tRNA ribosyltransferase-isomerase; OS = Puniceibacterium sp. HSS470 OX=2541729 GN=queA PE=3 SV=1

SEQ ID NO: 71193 - protein, 350 aa, unidentified
  source 1..350: note = Puniceibacterium sp.
  REGION 1..350: note = tr|A0A0J5TC98|A0A0J5TC98_9RHOB S-adenosylmethionine:tRNA ribosyltransferase-isomerase; OS = Puniceibacterium sp. IMCC21224 OX=1618204 GN=queA PE=3; SV = 1
MKLDDFDFDLPERLIATRPARPRSSARLLVAQGDAITDAVVTDLPDWLRPGDRLVLNDTRVIPARLNGVRRRTGAAGDTQARIEVTLLEPKASGGWGALLKPLKRVRDGETIVFSDDLSAVLESREDGQGVLRFNLSGDDFDAALAQAGAMPLPPYIAAKRPADEQDKDDYQTVWARHAGAVAAPTASLHFDAALLDALAARGVTFSHVTLHVGAGTFLPVKVEDVTTHKMHAEWGEVSEAAAAEILATRAAGGRIIPVGTTALRLLETAAQRTPGGFGAWSGETDIFIYPGFRFTMVDALMTNFHLPKSTLMMLVSALMGRARVRQIYAHAVAQDYRFFSYGDASLLIP

SEQ ID NO: 71194 - protein, 362 aa, unidentified
  source 1..362: note = Puniceicoccaceae bacterium
  REGION 1..362: note = tr|A0A368BJC1|A0A368BJC1_9BACT S-adenosylmethionine:tRNA ribosyltransferase-isomerase; OS = Puniceicoccaceae bacterium OX=2026784 GN=queA PE=3 SV=1
MNLSLFDYHLPAELIAQEPTAARDASRLMVVDRKTRSFTHAQFSEIGQYLPARPRFFRNNAAVLKARLFGQRPTGGKVECLLLQPTEDALTWWCLLKPGKKTFNAGTFGHPGEYQAEVLGVGSNGNYRVRFHPERNESITDLSERLGILPLPPYIERTDDDPRRDNDNKRYQTVYADFDKRIAVAAPTAGLHFTTELITELENGGAHFHDLTLQVGIGTFHPIQVENIEDHNIHREWYEIPASTFAELKKPEAGARIAVGTTSVRSIEDAMRRRQFSPEVCTTPSGSVQAEADIYIHPPNKFAAIDGMITNFHLPKSTLLCLVAAFLAPGSEEGIDWLKQLYAEAIDQKYRFYSYGDAMLIL

SEQ ID NO: 71195 - protein, 352 aa, unidentified
  source 1..352: note = Puniceicoccaceae bacterium
  REGION 1..352: note = tr|A0A2E6TJW5|A0A2E6TJW5_9BACT S-adenosylmethionine:tRNA ribosyltransferase-isomerase; OS = Puniceicoccaceae bacterium OX=2026784 GN=CML14_01130; PE = 3 SV=1
  VARIANT 24: note = Xaa can be any naturally occurring amino acid
  VARIANT 78: note = Xaa can be any naturally occurring amino acid
  VARIANT 131: note = Xaa can be any naturally occurring amino acid
  VARIANT 138: note = Xaa can be any naturally occurring amino acid
  VARIANT 263: note = Xaa can be any naturally occurring amino acid
MLSSELDYPLPAESIAQSPTERRXQSRLLLFDRKTQHVSHHFFHELPDLLPSKLSILRNDVSVLKARLTGQRQSGGKXECLLLRPSNFPDTTWRCLLKPGGKTAKSRKFGIEGEYSAEVIESLSSGEYLVXFDLPHDXDPSALAQRLGAMPLPPYVRRPAAPPDEERYQTVYAKQEKRSAVAAPTAGLHFTAEILDRLKREGHYIHDLTLSIGLGTFRPIETEKVEDHAMHGEEYFLEPSTKSVLRDPSFKKLAIGTTCVRAXEHYLAGKDSDLERMTQAEAKLFIRPPYQFKGVNHLLTNFHLPGSTLLCLVAAFLSPGESDGLSTLKEIYAEAIAKNYRFFSYGDAMMVV

SEQ ID NO: 71196 - protein, 386 aa, unidentified
  source 1..386: note = Puniceispirillum marinum
  REGION 1..386: note = tr|D5BNK4|D5BNK4_PUNMI S-adenosylmethionine:tRNA ribosyltransferase-isomerase OS=Puniceispirillum marinum (strain IMCC1322) OX=488538 GN=queA PE=3 SV=1
MIRRWLSVFCRFLNRLMKLSDFDFDLPPDRIATAPAQPRDSARLLDLSGAAIADRHVGDLPDLLRAGDLLIVNDTAVIPARLIGKRGDARISVTLHKYEGHKNGGNAIWRVFAKPAKKCRPDDIIMFAPDFGARVLGRGEGGDVELAFIDPRSGNALDTDSLNAGLDTYGTMPLPPYIARPDGVLDSDHEDYQTMFASQRGAVAAPTAGLHFTDGLTSALQAKGVAIAAVTLHVGAGTFLPVTVETIAEHKMHSEWGAIPADVAAKIIATKQAGGRVIAVGTTSLRILEASFAALGHIGHFAGETDIFITPGFSFNVVDMLMTNFHLPKSTLLMLVSAFAGHAPIMAAYDHAIASGYRFFSYGDACLLSHNLLSHNLSAQAETETT

SEQ ID NO: 71197 - protein, 375 aa, Pusillimonas ginsengisoli
  REGION 1..375: note = tr|A0A4V5ZWR6|A0A4V5ZWR6_9BURK S-adenosylmethionine:tRNA ribosyltransferase-isomerase; OS = Pusillimonas ginsengisoli OX=453575 GN=queA PE=3 SV=1
MNPSLELSQFDYELPSELIAQSPAAHRVESRLLHLDPDSVLHDRQFIDLVELIRPGDLLVFNNTRVIKARLTGQKESGGKVEVLVERIVDPHNVLAHVRASKPPKPGTRLRLADAFMATVHGRQGELFEIEFPERVLDLLDRHGAIPLPPYITHAADQEDEERYQTIYASEPGAIAAPTAGLHFDEALLQRLADKGIQQAFVTLHVGAGTFQPVRVQKLTEHIMHAERYSVSAETISLVQATRKAGGRVIAVGTTSVRALEAAAAQQRAQALVTHSTMTAGPDVTVDKQSPSSTLTHAAPATIEGDTRLFITPGYTFAWVDALITNFHLPQSTLLMLVSALAGMEPIRRAYTHAVQSRYRFFSYGDAMFIESPQP

SEQ ID NO: 71198 - protein, 346 aa, Pusillimonas noertemannii
  REGION 1..346: note = tr|A0A2U1CRH4|A0A2U1CRH4_9BURK S-adenosylmethionine:tRNA ribosyltransferase-isomerase; OS = Pusillimonas noertemannii OX=305977 GN=queA PE=3 SV=1
MNPSLQLSQFDYHLPSELIAQTPAATRSGSRLLHLDARSALHDRLFTDLPSLLRPHDLLVLNNTQVIKARLRGHKDSGGKVEILVERITGPTTALAHVKASKSPKAGTRLRIDDAFTIEVAGRQDELFELEFPARVLDLLERHGATPLPPYITHEAQAQDEERYQTVYAQAPGAVAAPTAGLHFDQPMLDALVAQGIQHAFVTLHVGAGTFQPVRVEDLSQHQMHAERYVVPQAVVRQIEEARRQGGRVIAVGTTSVRALESAAAQAGCADDPLEGDTRLFITPGYRFSYVDALITNFHLPRSTLMMLVSALAGMEPIRRAYAHAVQSRYRFFSYGDAMFIESPKP

SEQ ID NO: 71199 - protein, 355 aa, Pusillimonas sp.
  REGION 1..355: note = tr|A0A368WYG1|A0A368WYG1_9BURK S-adenosylmethionine:tRNA ribosyltransferase-isomerase; OS = Pusillimonas sp. EA3 OX=2183983 GN=queA PE=3 SV=1
MTEKPYPNNNELRLSQFDYDLPEALIAQTPADQRSASRLLHLDTLSQIHDRQFRDLPDLLKAGDLLVFNNTKVIKARLLGQKDTGGKVELLIERITDDKQALSHIKSSKSPKPGTVLHIAPNLSLTVTGREGELFSVQFPVNVLDALDEHGMTPLPPYIEHAADAQDEARYQTVYAQEPGAVAAPTAGLHFDDVVLEQLKNKGIRLAFVTLHVGAGTFQPVRVEKLTEHKMHFERYTVPAETLKLVDETRQQGRRIIAVGTTSVRALESAAKEREVGQAGGNISGDTNLFITPGYQFDLVNALITNFHLPRSTLLMLVSALAGMTPIKQAYEHAVAQQYRFFSYGDAMFIETPSK

SEQ ID NO: 71200 - protein, 348 aa, Pusillimonas sp.
  REGION 1..348: note = tr|A0A423S4J8|A0A423S4J8_9BURK S-adenosylmethionine:tRNA ribosyltransferase-isomerase; OS = Pusillimonas sp. NJUB218 OX=2023230 GN=queA PE=3 SV=1
MTHDLDLAAFDYELPPELIAQKPAAERTASRLLHLDKASQLHDRQFTDLPDLLRPNDLLVFNNTKVIKARLRGHKESGGKVELLIERITDINRGLAHIKASKSPKPGTRLRIADAFTMTVTGRQGELFEVEFPEDALTLLEHYGATPLPPYIEHAADNEDDERYQTVYAQQPGAVAAPTAGLHFDQPMLDQLASAGIGQCYVTLHVGAGTFQPVRVDKISEHVMHYERFSVDADVIARIRQARAKGGRVIAVGTTSVRALESAAALLASDRHNNSLTGDTNLFITPGYTFQLVDALITNFHLPRSTLMMLVSALAGIEPIRQAYAHAVTQRYRFFSYGDAMLIESPHS

SEQ ID NO: 71201 - protein, 349 aa, unidentified
  source 1..349: note = Pustulibacterium marinum
  REGION 1..349: note = tr|A0A1I7GMJ7|A0A1I7GMJ7_9FLAO S-adenosylmethionine:tRNA ribosyltransferase-isomerase; OS = Pustulibacterium marinum OX=1224947 GN=queA PE=3 SV=1
MKLSHFNFELPKELLAEYPSENRDEARLMVINRKEGTIEHKLFKDLINYFDEDDVMVLNNTKVFPARLFGNKEKTGARIEVFLLRELNEEQRLWDVLVDPARKIRIGNKLYFGEDESLVAEVIDNTTSRGRTLRFLYDGSYEEFRYKLNELGETPLPKYIKREVEPEDEERYQTIYAKHEGAVAAPTAGLHFSKHLLKRLEIKGVNFAEVTLHVGLGTFNPVEVEDLSKHKMDSEEIIITDQACETVNNAKQKKRRVCAVGTTVMRAMESSVSSDRTLNPFQGWTNKFIFPPYEFSIADCMITNFHTPKSTLLMMISAFVGHDLMMEAYKQAIEEKYKFYSYGDAMLII

SEQ ID NO: 71202 - protein, 341 aa, unidentified
  source 1..341: note = Unknown
  REGION 1..341: note = tr|A0A1E4ZIZ0|A0A1E4ZIZ0_9BACT S-adenosylmethionine:tRNA ribosyltransferase-isomerase; OS = PVC group bacterium (ex Bugula neritina AB1) OX=1868283; GN = queA PE=3 SV=1
MTLSYNLQDYSFDLPEELIAQHPMKDRDQSRLLIYHSKTKEIEHDTFSGLYKYLDAEDLLVLNDTKVIPARLYAWKTTGGKIEIFLIRPIIAQTWLCMVSSSKKIKKGHSLKLSSDIQGEIIKELPHGYRHISFHGENLEENLRNLGNIPLPPYIKRELNEEDATRYQTIFASKEGAVAAPTAGLHFTDNLFSKLKQKGVNVAHITLHVGPGTFKKVTCDDIRSHHVDQEYFEISNETINLLKATKKKKKRVISVGTTTTRVLESLETPWASTKGWTNLYIRPPYTYKVIDSLITNFHLPQSSLLFLVSALTGHEEIKSIYKEAVFERYRFYSYGDAMICL

SEQ ID NO: 71203 - protein, 349 aa, Pyramidobacter piscolens
  REGION 1..349: note = tr|D1Y1N5|D1Y1N5_9BACT S-adenosylmethionine:tRNA ribosyltransferase-isomerase OS=Pyramidobacter piscolens W5455 OX=352165 GN=queA PE=3 SV=1
MTQWNFFDINTYDYELPPELIAQKPAEPRDRCRLLAVRRADGKLFHQHFHDILQWLRPGDVLVRNDTRVMAARVEGVKVNGSAQAEILLLRPEDDSEKCWEALVRPGRKLPEGARVRLDGDVVVTIGAVKSEDGVRRVIFPADCDVRALAEANGSMPLPPYIHERSSRPEDYQTVYAKDPRSAAAPTAGLHFTRELLREVAGRGVTIADITLEVGLGTFRPVKTEDIRRHHMHSEHCVVPQDAYDKIVMAKKNGGRVIALGTTVVRTLEGMAATSAGLRPGVLETGLFIYPGFKYKVVDALITNFHLPKSTLMMLVAAFAGYDLTMKAYAEAVKERYRFFSFGDAMMIM

SEQ ID NO: 71204 - protein, 349 aa, Pyramidobacter sp.
  REGION 1..349: note = tr|A0A3A9I142|A0A3A9I142_9BACT S-adenosylmethionine:tRNA ribosyltransferase-isomerase; OS = Pyramidobacter sp. CG50-2 OX=2382160 GN=queA PE=3 SV=1
MTQRDFFDINTYDYELPPELIAQKPADPRDRCRLLTVRRADGKLFHQHFHDVLQWLRPGDVLVRNDTRVMAARVGGVKVNGSAQVEVLLLRPEDDGEKCWEALVRPGRKLPEGSRVRLDGDVVVTIDAVKSEDGVRRVVFPADCDVRALAEANGSMPLPPYIHERSSRPEDYQTVYAKDPRSAAAPTAGLHFTRELLRKVAERGVTIADITLEVGLGTFRPVKTEDIRRHHMHVEHCVIPQDAYDKIVMAKKNGGRVVALGTTVVRTLEGMAAASGGLHPGVLETELFIYPGFEYKVVDALITNFHLPKSTLVMLVAAFAGYDLTMKAYAEAVKERYRFFSFGDAMMIV

SEQ ID NO: 71205 - protein, 349 aa, Pyramidobacter sp.
  REGION 1..349: note = tr|A0A1V4AIN2|A0A1V4AIN2_9BACT S-adenosylmethionine:tRNA ribosyltransferase-isomerase; OS = Pyramidobacter sp. C12-8 OX=1943580 GN=queA PE=3 SV=1
MTQRDFFDINTYDYELPPELIAQKPADPRDRCRLLTVRRADGKLFHQHFHDVLQWLRPGDVLVRNDTRVMAARVGGVKVNGSAQVEVLLLRPEDDGEKCWEALVRPGRKLPEGSRVRLDGDVVVTIGAVKSEDGVRRVVFPADCDVRALAEANGSMPLPPYIHERSSRPEDYQTVYAKDPRSAAAPTAGLHFTRELLRKVAERGVTIADITLEVGLGTFRPVKTEDIRRHHMHVEHCVIPQDAYDKIVMAKKNGGRVVALGTTVVRTLEGMAAASGGLHPGVLETELFIYPGFEYKVVDALITNFHLPKSTLVMLVAAFAGYDLTMKAYAEAVKERYRFFSFGDAMMIV

SEQ ID NO: 71206 - protein, 360 aa, unidentified
  source 1..360: note = Pyrinomonas methylaliphatogenes
  REGION 1..360: note = tr|A0A0B6WTV2|A0A0B6WTV2_9BACT S-adenosylmethionine:tRNA ribosyltransferase-isomerase; OS = Pyrinomonas methylaliphatogenes OX=454194 GN=queA PE=3; SV = 1
MRRLGSRFQTSFSAVLISDFDYDLPEELIAQQPAEPRDASRMLVVDRHRACWQDCAFRDLPELVHPGDVLVINNTRVFPARLIGRREPSGGKIELLLLTERGALEWEALARPARRLPVGARVSFGEGRLRGEIREEIEGGLRLVRFECEENFDQLLDEIGRTPLPPYIKRDPFKADAPDRERYQTIFARERGAVAAPTAGLHFTPRIIAELRERGAQIAEITLHVGYGTFEPVRVKDVQQHRVAAERFVIGQEAAEKIAQARRSGGRIIAVGTTSVRALESAADERGIVKPTAGSTQLTIVPGYRFRAVDALLTNFHLPRSSLLLLVSAFAGRELILAAYRHAVKERYRFYSYGDCMLII

SEQ ID NO: 71207 - protein, 345 aa, unidentified
  source 1..345: note = Quasibacillus thermotolerans
  REGION 1..345: note = tr|A0A0F5ICW8|A0A0F5ICW8_9BACI S-adenosylmethionine:tRNA ribosyltransferase-isomerase; OS = Quasibacillus thermotolerans OX=1221996 GN=queA PE=3; SV = 1
MKNVRVEDFDFNLPEELIAQTPLANRSDSRLMVLDKETGAVSHEVFKNIASYLQPGDCLVLNDTKVMPARLYGIKADTGAKVEVLLLKQEEGDKWETLVKPAKRIKAGTELAFGDGRLTAVCVEEREHGGRILEFSYEGIFYEVLDELGEMPLPPYIKEQLEERDRYQTVFAKERGSAAAPTAGLHFTEELLEELRNMGVHTAFLTLHVGLGTFRPVSVDSVEEHEMHAEFYRLSEGTARLIQQVKEEGGRIISVGTTSTRTLETIARDHQGRIEAASGWTDIFIYPGFKFQAIDGMITNFHLPKSTLIMLVSALAGKEHIMAAYKEAVEQKYRFFSFGDAMLIK

SEQ ID NO: 71208 - protein, 372 aa, unidentified
  source 1..372: note = Quisquiliibacterium sp.
  REGION 1..372: note = tr|A0A5C8P4U6|A0A5C8P4U6_9BURK S-adenosylmethionine:tRNA ribosyltransferase-isomerase; OS = Quisquiliibacterium sp. CC-CFT501 OX=2498847 GN=queA; PE = 3 SV=1
MRLSDFDFELPPELIAQHPPAERGASRLLVVRAGGAGDGAAAAGGAEARPEERPEARLEDRLFADLPSLLAPGDLLVLNDTRVIRARLFGVKDTGGRVEALVERVSGPKEAIAMLRASKPPKPGSRIAWRSGGAEVLERADEFWRLRFDDPVMEVLEREGRLPLPPYITHAPGAEDERRYQTVYAREAGSVAAPTAGLHFDEAMLARLRNAGVGLAWVTLHVGAGTFQPVRVEDLSRHRMHAERYEVPEATARAIADTRAAGGRVVAVGTTSLRTLEGVAAAHDGAVVAGAGETRLFVRPGFRFRVVDRLITNFHLPKSTLLMLVSAFAGMETIRRAYAHAIAQRYRFFSYGDAMLLERSPGADGHDPNDPL

SEQ ID NO: 71209 - protein, 356 aa, Rahnella aquatilis
  REGION 1..356: note = tr|H2IZL9|H2IZL9_RAHAC S-adenosylmethionine:tRNA ribosyltransferase-isomerase OS=Rahnella aquatilis (strain ATCC 33071 / DSM 4594 / JCM 1683 / NBRC 105701 / NCIMB 13 365 / CIP 78.65) OX=745277 GN=queA PE=3 SV=1
MRVADFSFELPESLIARYPQTQRSGCRLLSLDGPSGELTHGVFTDILDKIHPGDLLVFNNTRVIPARVFGRKVSGGKIEVLVERVLDSHRVLAHVRASKSPKPGAELLLGDKEDIKATMLARHDTLFELEFNEDRDVFTLLNEIGHMPLPPYIDRPDEEADRELYQTVYSERPGAVAAPTAGLHFDQPLLDALKAKGVELAFVTLHVGAGTFQPVRVDTIEDHIMHAEYAEVPQDVVDAVLACKARGNKVVAVGTTSVRSLESAAKASEDALIAPFFGDTKIFIYPGYHYQVIDSLITNFHLPESTLIMLVSAFAGYKNTMNAYHQAVAEQYRFFSYGDAMFINRNPLAPQEVVGQ

SEQ ID NO: 71210 - protein, 356 aa, Rahnella aquatilis
  REGION 1..356: note = tr|H8NYP0|H8NYP0_RAHAQ S-adenosylmethionine:tRNA ribosyltransferase-isomerase OS=Rahnella aquatilis HX2; OX = 1151116 GN=queA PE=3 SV=1
MRVADFSFELSESLIARYPQTQRSGCRLLSLDGPSGELTHGVFTDILDKIHPGDLLVFNNTRVIPARVFGRKVSGGKIEVLVERVLDTHRVLAHVRASKSPKPGAELLLGDKEDIKATMVARHDTLFELEFNEDRDVFTLLNEIGHMPLPPYIDRPDEDADRELYQTVYSERPGAVAAPTAGLHFDEPLMDALKAKGVEFAFVTLHVGAGTFQPVRVDTIEDHIMHAEYAEVPQDVVDAVLACKARGNNVVAVGTTSVRSLESAAKASEDALIAPFFGDTKIFIYPGYHYQVIDSLITNFHLPESTLIMLVSAFAGYKNTMNAYHQAVAEQYHFFSYGDAMFINRNPLAPQEVVGQ

SEQ ID NO: 71211 - protein, 356 aa, unidentified
  source 1..356: note = Rahnella inusitata
  REGION 1..356: note = tr|A0A419MBX5|A0A419MBX5_9GAMM S-adenosylmethionine:tRNA ribosyltransferase-isomerase; OS = Rahnella inusitata OX=58169 GN=queA PE=3 SV=1
MRVADFSFELPESLIARYPQTQRSGCRLLSLDGPSGELTHGVFTDILDKIVPGDLLVFNNTRVIPARVFGRKVSGGKIEVLVERVLDSHRVLAHVRASKSPKPGAELLLGDKDDIKATMVARHDTLFELEFNEDRDVFTLLNEIGHMPLPPYIDRPDEDADRELYQTVYSERLGAVAAPTAGLHFDQPLMDALKEKGVEFAFVTLHVGAGTFQPVRVDTIEDHIMHAEYAEVPQDVVDAVLACKARGNKVVAVGTTSVRSLESAAKASEDALIAPFFGDTKIFIYPGYHYQVIDSLITNFHLPESTLIMLVSAFAGYKNTMNAYHQAVAEQYRFFSYGDAMFINRNPLAPQEVVGE

SEQ ID NO: 71212 - protein, 356 aa, Rahnella sp.
  REGION 1..356: note = tr|A0A2N0W8C4|A0A2N0W8C4_9GAMM S-adenosylmethionine:tRNA ribosyltransferase-isomerase; OS = Rahnella sp. AA OX=2057180 GN=queA PE=3 SV=1
MRVADFSFELPESLIARYPQTQRSGCRLLSLDGPSGELTHGVFTDILDKILPGDLLVFNNTRVIPARVFGRKVSGGKIEVLVERVLDSHRVLAHVRASKSPKPGAELLLGDNEDIKATMVARHDTLFELQFNEDRDVFTLLNEIGHMPLPPYIDRPDEDADRELYQTVYSERPGAVAAPTAGLHFDQPLLDALKEKGVELAFVTLHVGAGTFQPVRVDTIEDHIMHAEYAEVPQEVVDAVLACKARGNKVVAVGTTSVRSLESAAKASEDALIAPFFGDTKIFIYPGYNYQVIDCLITNFHLPESTLIMLVSAFAGYKNTMNAYHQAVAEQYRFFSYGDAMFINRNPLAPQEVVGQ

SEQ ID NO: 71213 - protein, 356 aa, Rahnella sp.
  REGION 1..356: note = tr|A0A4R2Z4J3|A0A4R2Z4J3_9GAMM S-adenosylmethionine:tRNA ribosyltransferase-isomerase; OS = Rahnella sp. JUb53 OX=2485128 GN=queA PE=3 SV=1
MRVADFSFELPESLIARYPQTQRSGCRLLSLDGPSGELTHGVFTDILDKIHPGDLLVFNNTRVIPARVFGRKVSGGKIEVLVERVLDSHRVLAHVRASKSPKPGAELLLGDKEDIKATMVARHDTLFELEFNEDRDVFTLLNEIGHMPLPPYIDRPDEDADRELYQTVYSERPGAVAAPTAGLHFDEPLMDALKAKGVEFAFVTLHVGAGTFQPVRVDTIEDHIMHAEYAEVPQEVVDAVLACKARGNKVVAVGTTSVRSLESAAKASEDALIAPFFGDTKIFIYPGYHYQVIDSLITNFHLPESTLIMLVSAFAGYKNTMNAYHQAVAEQYRFFSYGDAMFINRNPLAPQEVVGQ

SEQ ID NO: 71214 - protein, 356 aa, unidentified
  source 1..356: note = Rahnella woolbedingensis
  REGION 1..356: note = tr|A0A419N702|A0A419N702_9GAMM S-adenosylmethionine:tRNA ribosyltransferase-isomerase; OS = Rahnella woolbedingensis OX=1510574 GN=queA PE=3 SV=1
MRVADFSFELPESLISRYPQTQRSGCRLLSLDGPSGELTHGVFTDILDKIHPGDLLVFNNTRVIPARVFGRKVSGGKIEVLVERVLDSHRVLAHVRASKSPKPGAELLLGDKEEIKATMVARHDTLFELEFNEDRDVFTLLNEIGHMPLPPYIDRPDEESDRELYQTVYSERPGAVAAPTAGLHFDEPLMDALKAKGVEFAFVTLHVGAGTFQPVRVDTIEDHIMHAEYAEVPQEVVDAVLACKARGNKVVAVGTTSVRSLESAAKASEDALIAPFFGDTKIFIYPGYHYDVIDSLITNFHLPESTLIMLVSAFAGYKNTMNAYHQAVAEQYRFFSYGDAMFINRNPLAPQEVVGQ

SEQ ID NO: 71215 - protein, 352 aa, unidentified
  source 1..352: note = Raineya orbicola
  REGION 1..352: note = tr|A0A2N3IHB8|A0A2N3IHB8_9BACT S-adenosylmethionine:tRNA ribosyltransferase-isomerase; OS = Raineya orbicola OX=2016530 GN=queA PE=3 SV=1
MPMKLSDYAFDLPTKLIALHPTPNRDESRLMVVHRKTGKIEHRIFKDVLDYFDDGDVMVVNDTKVFPARLYGNKEKTGADIEVFLLRELNSQYHLWDVLVDPARKIRVGNKLYFGDGELVAEVIDNTTNRGRTIRFLWDGEDEEFYKTVHQLGQTPLPKEIIKRRKVEKEDEERFQSIFAKEVGAVAAPMACLHFTKQLVKRLAIKGVDIVTLTMHISLGTFKTVEVEDLTKHKPDSEQFRIPEKTAQRINEALDAKKKVCAVGSSVMRSLESSVSASGRVKPADAWTDKFIFIPYDFKIPNAYITNFHLPESTLFMTACTFGGYELIMKAYEIAIQEEYRFHTYGDAMLIL

SEQ ID NO: 71216 - protein, 398 aa, unidentified
  source 1..398: note = Raineya orbicola
  REGION 1..398: note = tr|A0A2N3IHA4|A0A2N3IHA4_9BACT S-adenosylmethionine:tRNA ribosyltransferase-isomerase; OS = Raineya orbicola OX=2016530 GN=queA PE=3 SV=1
MQLSDFDYHLPPELIAQEPLPLRDQAKLLFYNKGTIADHIFYELPQILPQNSFLVFNNTKVIPARLLLQKSSGAWIEIFLLEPVEPHSLVTIAMQARRRCLWECMIGNKKRFKDAIEVPITIRKEELSLKCSLVSENRVLFEWENEKVSFAEILECLGKIPLPPYIKREVSEKDKERYQTIFALKEGAVAAPTASLHFTENVFENLKNKNISYDFLTLHVGAGTFQPIKVANFQEHKIHSERLIVSLQNIENLINNVHKNIIPVGTTSMRTLESLYWFGTEIILGKSHSPILHIKQQVPYQIPVSQHPPLQEALQAIKELMQQHQINELQGSTEIYIYPSYDFKVCKGLITNFHMPQTTLILLIAAFVGNDWRKIYQHALQNNYRFLSYGDSSLLLPS

SEQ ID NO: 71217 - protein, 354 aa, Ralstonia insidiosa
  REGION 1..354: note = tr|A0A191ZZF4|A0A191ZZF4_9RALS S-adenosylmethionine:tRNA ribosyltransferase-isomerase; OS = Ralstonia insidiosa OX=190721 GN=queA PE=3 SV=1
MLTLSDFDFDLPPELIAQTALPDRTASRLLAVRREADGVHSGVSFEDRQFADLGDYLRPGDLLVFNDTRVIKARFFGHKASGGKVEVLVERLLDEHTVLAQIRSSKSPVEGTTLRLADAFDVTVGPRAEPFFTLRFPQPALDLIEQYGRLPLPPYIEHDPDSFDETRYQTIYARNPGAVAAPTAGLHFDDALFAKLDAMGIQRGFLTLHVGAGTFQPVRVENIAEHRMHSEWYEITPELAEAIRATRAAGGRIIAVGTTSMRALESAAQPDGTLHAGSGDTDIFITPGYRFRLVDALVTNFHLPKSTLLMLVSAFAGMDAIRGAYQHAIAQRYRFFSYGDAMLLTRAEPETQSL

SEQ ID NO: 71218 - protein, 353 aa, Ralstonia mannitolilytica
  REGION 1..353: note = tr|A0A2N5LEN4|A0A2N5LEN4_9RALS S-adenosylmethionine:tRNA ribosyltransferase-isomerase; OS = Ralstonia mannitolilytica OX=105219 GN=queA PE=3 SV=1
MLTLSDFDFDLPPELIAQTALPDRTASRLLALRREADGVHFDDRQFSDLVDYVRPGDLLVFNDTRVIKARFFGQKASGGKVEVLVERLLDEHTVLAQIRSSKSPVEGTTLRLADAFDVTVGPRAEPFFTLRFPQPALDLIEQHGRLPLPPYIEHDPDSFDETRYQTVYARNPGAVAAPTAGLHFDDALFARLDAMGVKRGFLTLHVGAGTFQPVRVENIAEHRMHSEWYAISPELADTIRATRAAGGRVIAVGTTSMRALESAALPDGTLQAGSGDTDIFITPGYRFRVVDALVTNFHLPKSTLLMLVSAFAGMQAIRDAYRHAIAQRYRFFSYGDAMLLTRAPSEPGDTGSP

SEQ ID NO: 71219 - protein, 353 aa, Ralstonia mannitolilytica
  REGION 1..353: note = tr|A0A160BXY0|A0A160BXY0_9RALS S-adenosylmethionine:tRNA ribosyltransferase-isomerase; OS = Ralstonia mannitolilytica OX=105219 GN=queA PE=3 SV=1
MLTLSDFDFDLPPELIAQTALPDRTASRLLAVRREADGVHFDDRQFSDLVDYVRPGDLLVFNDTRVIKARFFGQKASGGKVEVLVERLLDEHTVLAQIRSSKSPVEGTTLRLADAFDVTVGPRAEPFFTLRFPQPALDLIEQYGRLPLPPYIEHDPDSFDETRYQTVYARNPGAVAAPTAGLHFDDALFARLDAMGVKRGFLTLHVGAGTFQPVRVENIAEHRMHSEWYAISPELADAIRATRAAGGRVIAVGTTSMRALESAALPDGTLQAGSGDTDIFITPGYRFRVVDALVTNFHLPKSTLLMLVSAFAGMQAIRDAYRHAIAQRYRFFSYGDAMLLTRAPSEPGDTESP

SEQ ID NO: 71220 - protein, 359 aa, Ralstonia pickettii
  REGION 1..359: note = sp|B2UC74|QUEA_RALPJ S-adenosylmethionine:tRNA ribosyltransferase-isomerase OS=Ralstonia pickettii (strain 12J) OX=402626 GN=queA PE=3 SV=1
MLTLSDFDFDLPPELIAQTALPDRTASRLLAVRRTEDAVHFEDRQFADLVDYLRPGDLLVFNDTRVIKARFFGHKASGGKVEVLVERLLDEHTVLAQIRSSKSPVEGTSLRLADAFDVTVGPRAEPFFTLRFPQPALDLIEQYGRLPLPPYIEHDPDSFDETRYQTVYARNPGAVAAPTAGLHFDDALFAKLDAMGIRRGFLTLHVGAGTFQPVRVENIAEHRMHSEWYEITPELAEAIRATRAAGGRVIAVGTTSMRALESAAQPDGTLNACSGETDIFITPGYRFRAVDLLVTNFHLPKSTLLMLVSAFAGMSAIREAYQHAIAQRYRFFSYGDAMLLTRAPTEPGEPGEPGETQSL

SEQ ID NO: 71221 - protein, 356 aa, Ralstonia pickettii
  REGION 1..356: note = tr|C6BDN2|C6BDN2_RALP1 S-adenosylmethionine:tRNA ribosyltransferase-isomerase OS=Ralstonia pickettii (strain 12D) OX=428406 GN=queA PE=3 SV=1
MLTLSDFDFDLPPELIAQTALPDRTASRLLAVRRAGDAVHFEDRQFADLVDYLRPGDLLVFNDTRVIKARFFGQKASGGKVEVLVERLLDEHTVLAQIRSSKSPVEGTTLRLADAFDVTVGPRAEPFFTLRFPQPALDLIEQYGRLPLPPYIEHDPDSFDETRYQTVYARNPGAVAAPTAGLHFDDALFAKLDAMGIQRGFLTLHVGAGTFQPVRVENIAEHRMHSEWYEITAELAEAIRATRAAGGRIIAVGTTSMRALESAAQPDGTLNACSGETDIFITPGYRFRAVDLLVTNFHLPKSTLLMLVSAFAGMSAIREAYQHAIAQRYRFFSYGDAMLLTRAPTEPGDPGETQSL

SEQ ID NO: 71222 - protein, 362 aa, unidentified
  source 1..362: note = Ralstonia pseudosolanacearum
  REGION 1..362: note = tr|A0A454TMN4|A0A454TMN4_9RALS S-adenosylmethionine:tRNA ribosyltransferase-isomerase; OS = Ralstonia pseudosolanacearum OX=1310165 GN=queA PE=3; SV = 1
MSAPPFMLTLSDFDFDLPPELIAQTALPDRTASRLLAARHDAQGTHFDDRQFADLVDYLRPGDLLVFNDTRVIKARFFGHKASGGRIEVLVERLLDEHTVLAQIRSSKSPVAGSTLRLADAFDVTVGPRHEPFFTLRFPQPALELIEQYGRLPLPPYIEHTPDSFDETRYQTVYARTPGAVAAPTAGLHFDDALFARLDAMGVRRGFLTLHVGAGTFSPVRVENIAEHRMHSEWYAISPELAEAIRGTRAAGGRIVAVGTTSMRALESAAQPDGTLAAGSGETDIFITPGYRFRLVDALVTNFHLPKSTLLMLVSAFAGLETIRAAYRHAIAQRYRFFSYGDAMFLTRAEPDTQSASPDPSC

SEQ ID NO: 71223 - protein, 362 aa, unidentified
  source 1..362: note = Ralstonia pseudosolanacearum
  REGION 1..362: note = tr|A0A223GQ49|A0A223GQ49_9RALS S-adenosylmethionine:tRNA ribosyltransferase-isomerase; OS = Ralstonia pseudosolanacearum OX=1310165 GN=queA PE=3; SV = 1
MSAPPFMLTLSDFDFDLPPELIAQTALPDRTASRLLAARHDAQGTHFDDRQFADLVDYLRPGDLLVFNDTRVIKARFFGHKASGGKIEVLVERLLDEHTVLAQIRSSKSPVAGSTLRLADAFDVTVGPRHEPFFTLRFPQPALELIEQYGRLPLPPYIEHTPDSFDETRYQTVYARTPGAVAAPTAGLHFDDALFARLDAMGVRRGFLTLHVGAGTFSPVRVENIAEHRMHSEWYAISPDLAEAIRATRAVGGRIVAVGTTSMRALESAAQPDGTLAAGSGETDIFITPGYRFRLVDALVTNFHLPKSTLLMLVSAFAGLETIRAAYRHAIAQRYRFFSYGDAMFLTRAEPDTQSASPDPSC

SEQ ID NO: 71224 - protein, 356 aa, Ralstonia solanacearum
  REGION 1..356: note = sp|Q8XVW5|QUEA_RALSO S-adenosylmethionine:tRNA ribosyltransferase-isomerase OS=Ralstonia solanacearum (strain GMI1000) OX=267608 GN=queA PE=3 SV=2
MLTLSDFDFDLPPELIAQTALPDRTASRLLAARHDAQGTHFDDRQFADLVDYLRPGDLLVFNDTRVIKARFFGHKASGGKIEVLVERLLDEHTVLAQIRSSKSPVAGSTLRLADAFDVTVGPRHEPFFTLRFPQPALELIEQYGRLPLPPYIEHTPDSFDETRYQTVYARTPGAVAAPTAGLHFDDALFARLDAMGVRRGFLTLHVGAGTFSPVRVENIAEHRMHSEWYAISPDLAEAIRATRAVGGRIVAVGTTSMRALESAAQPDGTLAAGSGETDIFITPGYRFRLVDALVTNFHLPKSTLLMLVSAFAGLETIRAAYRHAIAQRYRFFSYGDAMFLTRAEPDTQSASPDPSC

SEQ ID NO: 71225 - protein, 362 aa, Ralstonia solanacearum
  REGION 1..362: note = tr|A0A177RU50|A0A177RU50_RALSL S-adenosylmethionine:tRNA ribosyltransferase-isomerase; OS = Ralstonia solanacearum OX=305 GN=queA PE=3 SV=1
MSAPPLMLTLSDFDFDLPPELIAQTALPDRTASRLLAVHRDAPGTHFDDRQFADLVDYLRPGDLLVFNDTRVIKARFFGHKASGGRIEVLVERLLDEHTVLAQIRSSKSPVTGSRLRLADAFDVTVGPRQEPFFTLRFPQPALELIEQYGRLPLPPYIEHTPDSFDETRYQTVYARTPGAVAAPTAGLHFDDALFARLDAMGVRRGFLTLHVGAGTFSPVRVENIAEHRMHSEWYAISPELAEAIRATRAAGGRVIAVGTTSMRALESAAQPDGTLAAGSGETDIFITPGYRFRLVDALVTNFHLPKSTLLMLVSAFAGLETIRAAYRHAIAQRYRFFSYGDAMFLTRAEPDTPSASPDPSC

SEQ ID NO: 71226 - protein, 356 aa, Ralstonia sp.
  REGION 1..356: note = tr|A0A0B1Y1V1|A0A0B1Y1V1_9RALS S-adenosylmethionine:tRNA ribosyltransferase-isomerase; OS = Ralstonia sp. A12 OX=1217052 GN=queA PE=3 SV=1
MLTLSDFDFDLPPELIAQTALPDRTASRLLAVRREADGVHSGVSYEDRQFADLVDYLRPGDLLVFNDTRVIKARFFGHKASGGKVEVLVERLLDEHTVLAQIRSSKSPVEGTTLRLADAFDVTVGPRAEPFFTLRFPQPALDLIEQYGRLPLPPYIEHDPDSFDETRYQTVYARNPGAVAAPTAGLHFDDALFARLDAMGVQRGFLTLHVGAGTFQPVRVENIAEHRMHSEWYAITPELAEASRATRAAGGRVIAVGTTSMRALESAAQPDGTLHAGSGETDIFITPGYRFRAVDALVTNFHLPKSTLLMLVSAFAGLAAIRGAYQHAIAQRYRFFSYGDAMFLTRAEPDTESTSA

SEQ ID NO: 71227 - protein, 350 aa, Ralstonia sp.
  REGION 1..350: note = tr|A0A0J9GKX2|A0A0J9GKX2_9RALS S-adenosylmethionine:tRNA ribosyltransferase-isomerase; OS = Ralstonia sp. MD27 OX=1676617 GN=queA PE=3 SV=1
MLTLSDFDFDLPPELIAQTALPDRTASRLLAVRRADDGVHFDDRQFADLVDYLRPGDLLVFNDTRVIKARFFGQKASGGKVEVLVERLLDEHTVLAQIRSSKSPVEGTTLRLADAFDVTVGPRAEPFFTLRFPQPALDLIEQYGRLPLPPYIEHDPDSFDETRYQTVYARNPGAVAAPTAGLHFDDALFAKLDAMGIQRGFLTLHVGAGTFQPVRVENIAEHRMHSEWYAISPELAEAIRATRAAGGRIIAVGTTSMRALESAAQPDGTLHAGSGDTDIFITPGYRFRLVDALVTNFHLPKSTLLMLVSAFAGTAAIRAAYQHAIAQRYRFFSYGDAMLLTRAEPDSISA

SEQ ID NO: 71228 - protein, 350 aa, Ralstonia syzygii
  REGION 1..350: note = tr|G3A1A5|G3A1A5_9RALS S-adenosylmethionine:tRNA ribosyltransferase-isomerase OS=Ralstonia syzygii R24; OX = 907261 GN=queA PE=3 SV=1
MLTLSDFDFDLPPELIAQTALPDRTASRLLAVRRDAQGPHFDDCQFADLVDYLRPGDLLIFNDTRVIKARFFGHKASGGKIEVLVERLLDEYTVLAQIRSSKSPVAGSTLRLADAFDVTVGPRHEPFFTLRFPQPALELIEQYGRLPLPPYIEHTPDSFDETRYQTVYARNPGAVAAPTAGLHFDDALFARLDAMGVRRGFLTLHVGAGTFSPVRVENIAEHRMHSEWYAISPALAEAIRATRAAGGRIIAVGTTSMRALESAARPNGTLAAGSGETDIFITPGYRFRLVDALVTNFHLPKSTLLMLVSAFAGLETIRAAYRHAIAQRYRFFSYGDAMFLTRAEPDTQSA

SEQ ID NO: 71229 - protein, 343 aa, Ramlibacter henchirensis
  REGION 1..343: note = tr|A0A4Z0C922|A0A4Z0C922_9BURK S-adenosylmethionine:tRNA ribosyltransferase-isomerase; OS = Ramlibacter henchirensis OX=204072 GN=queA PE=3 SV=1
MRAFTLGDFDFALPPELIAQHPAPERSASRLLDGRHLPPADRVFRELPALLTPGDLLVFNDTRVLKARLYGGKPSGGKLELLVERVLAGGEVVAHMKVSKKPPVGTVLAMEGGFTATLLGRWPDAEGPLFRLAFSDDPYALMERHGHVPLPPYIEHADTEQDVERYQTVFARTPGAVAAPTAALHFDPQVLASLDACGIRRASLTLHVGAGTFQPVKTENIAEHRMHSEWYDVPAATQEAVARTRAQGGRIVAVGTTTVRTLESWALTGQARGDTDIFITPGFRFRLVDLMVTNFHLPRSTLMMLVSAFAGHDRITALYRHAVAHRYRFFSYGDSMLLERAPT

SEQ ID NO: 71230 - protein, 343 aa, unidentified
  source 1..343: note = Ramlibacter rhizophilus
  REGION 1..343: note = tr|A0A4Z0BGG2|A0A4Z0BGG2_9BURK S-adenosylmethionine:tRNA ribosyltransferase-isomerase; OS = Ramlibacter rhizophilus OX=1781167 GN=queA PE=3 SV=1
MRHFSTSDFDFELPPELIAQHPAPERSASRLLDGRGPDPIDRIFRELPTLLDPGDLLVFNDTQVLKARLFGEKPSGGKLELLVERVIGEREVVAHMKVSKKPPVGTRLSMQGGFTATLLGRWPDDDGPLFRLAFDDEPHALMARHGHVPLPPYIEHADSAEDETRYQTVFARRPGAVAAPTAALHFDDAVLGALAARGIERAAVTLHVGAGTFQPVKTEDLAAHRMHSEWYEVPEATQQAIDRARARGGRIVAVGTTTVRTLESWARSGAASGDTDIFITPGFEFRLVDLMLTNFHLPRSTLMMLISAFAGYEPVMALYRHAIAQRYRFFSYGDAMLLARASS

SEQ ID NO: 71231 - protein, 365 aa, Ramlibacter sp.
  REGION 1..365: note = tr|A0A4Y7B264|A0A4Y7B264_9BURK S-adenosylmethionine:tRNA ribosyltransferase-isomerase; OS = Ramlibacter sp. WS9 OX=1882741 GN=EEB15_30430 PE=3 SV=1
MKAAHLPSQRAPGARLLVVDSAGGLRHTSRSRLADFLNPGDVLVANDAATLPASLSGVHSRTGRAIEVRLAGRRSLAVDDVRDFTAVVFGAGDYRTRTEDRPSPPALQAGDVLVLGPLRAIVLRLQGHPRLVSLRFEGDVDAIWAGIARHGRPIQYAHVQPPLALWDVWTRVAALPVAFEPPSAGFVLDWSLLSALKARGVVFETLTHAAGISSTGDDELDARLPLDEPYDVPQATVRAIESASERGGRVVALGTTVTRALEHAGSNGPLRAGSGVADQRLGPGTQLNVVDAIISGTHEPGTSHYELLRAFAGDGVLRHAAQEMERAGYLTHEFGDTVLIEAAFSRLPKAAGPVARRHDPEEQIA

SEQ ID NO: 71232 - protein, 342 aa, Ramlibacter sp.
  REGION 1..342: note = tr|A0A4Z0BVN6|A0A4Z0BVN6_9BURK S-adenosylmethionine:tRNA ribosyltransferase-isomerase; OS = Ramlibacter sp. 18x22-1 OX=2530451 GN=queA PE=3 SV=1
MRTFSLGDFDFALPPELIAQHPAPERSASRLLDGRHSRPADRVFRELPALLSPGDLMICNDTQVVKARLFGGKPTGGKLELLVERVLANGEVVAHMKVSKKPPVGTVLAMDGGFTATLLGRWPDPEGALFHLRFSEDPFGLMERHGHVPLPPYIEHEDTAQDVDRYQTVFARSPGAVAAPTAALHFDDSVLASLDACGVRRAAITLHVGAGTFQPVKTEDIARHRMHSEWYEIPAATQDAITRTRREGGRIIAVGTTTVRTLETWAATGRAQGDTDIFITPGFRFRVVDLMITNFHLPKSTLMMLVSAFAGYEHVMALYRHAVAQRYRFFSYGDAMLLERRT

SEQ ID NO: 71233 - protein, 348 aa, Ramlibacter tataouinensis
  REGION 1..348: note = tr|F5Y1F9|F5Y1F9_RAMTT S-adenosylmethionine:tRNA ribosyltransferase-isomerase OS=Ramlibacter tataouinensis (strain ATCC BAA-407 / DSM 14655 / LMG 21543 / TTB310) OX= 365046 GN=queA PE=3 SV=1
MRTFTLADFDFALPPELIAQHPAAERSASRLLDGTGAEPADRVFRDLPALLAPGDLLVFNDTRVVKARLFGEKPTGGRLELLVERVLQDHEVAAHMKTGKKPPVGTQLTMDGGFSATLLGRWPDEDGTLFRLRLSGEPHALMERHGHVPLPPYITHGDTAEDERRYQTVFAARPGAVAAPTAALHFDQALLAALEARGIERASLTLHVGAGTFQPVKTENLAEHRMHSEWYEVPASTQQAVQATRRRGGRIVAVGTTTVRTLESWALTGQASGDTRIFITPGFGFRLVDLLVTNFHLPKSTLMMLVSAFAGHAQVMDLYRHAIARRYRFFSYGDAMLLARRGSGAPPA

SEQ ID NO: 71234 - protein, 341 aa, Ramlibacter tataouinensis
  REGION 1..341: note = tr|A0A127JY79|A0A127JY79_9BURK S-adenosylmethionine:tRNA ribosyltransferase-isomerase; OS = Ramlibacter tataouinensis OX=94132 GN=queA PE=3 SV=1
MRTFSVGDFDFALPPELIAQHPAAERSASRLLDGLGATPMDRVFRELPAQLREGDLLVFNDTRVVKARLFGEKPTGGRLELLIERVTGAREVVAHMKVSKKPQPGTVLRMDGGFTATLLGRWPDEDGALFRFALDDDPYALMERHGHVPLPPYIEHADTADDERRYQTVFAKRPGAVAAPTAALHFDEPLLGELAQRGIACASVTLHVGAGTFQPVKAENLAEHRMHSEWYEVPQATQDAIARLRHRGGRLVAVGTTTVRTLESWSRTGQASGDTSIFITPGFAFREVDLLVTNFHLPRSTLMMLVSAFAGYEHVMALYRHAIAQRYRFFSYGDAMLLART

SEQ ID NO: 71235 - protein, 356 aa, unidentified
  source 1..356: note = Raoultella electrica
  REGION 1..356: note = tr|A0A514EVT6|A0A514EVT6_9ENTR S-adenosylmethionine:tRNA ribosyltransferase-isomerase; OS = Raoultella electrica OX=1259973 GN=queA PE=3 SV=1
MRVTDFSFELPESLIAHYPQPERSRCRLLSLDGPTGALTHGTFTDLLDKLNPGDLLVFNNTRVIPARLFGRKASGGKIEVLVERMLDDKRILAHIRASKAPKPGAELLLGDDESINATMVARHDALFEVEFNDERPVLEILNSIGHMPLPPYIDRPDEDADRELYQTVYSTRPGAVAAPTAGLHFDDMMLEKLREKGIEMAFVTLHVGAGTFQPVRVETIEDHIMHSEYAEVPQEVVDAVLAAKARGNRVIAVGTTSVRSLESAAQAAKKDLIEPFFGDTQIFIYQGYQYKAVDALVTNFHLPESTLIMLVSAFAGYQHTMNAYKAAVEQKYRFFSYGDAMFITYNPQAIFERVGE

SEQ ID NO: 71236 - protein, 354 aa, Raoultella ornithinolytica
  REGION 1..354: note = tr|A0A4R2Y3U7|A0A4R2Y3U7_RAOOR S-adenosylmethionine:tRNA ribosyltransferase-isomerase; OS = Raoultella ornithinolytica OX=54291 GN=queA PE=3 SV=1
MRVTDFSFELPESLIAHYPQPERSSCRLLSLDGPTGALTHGTFTDLLDKLNPGDLLVFNNTRVIPARLFGRKASGGKIEVLVERMLDDKRILAHIRASKAPKPGAELLLGDDESIQATMVARHDALFEVEFNDERPVLDILNSIGHMPLPPYIDRPDEEADRELYQTVYSVRPGAVAAPTAGLHFDEPLLEKLREKGVEMAFVTLHVGAGTFQPVRVDSIEEHIMHSEYAEVPQDVVDAVLAAKARGSRVIAVGTTSVRSLESAAQAAKNDPIEPFFGDTKIFIYPGYQYKAVDALVTNFHLPESTLIMLVSAFAGYQHTMNAYKAAVEQKYRFFSYGDAMFITYNPRAIFERP

SEQ ID NO: 71237 - protein, 356 aa, Raoultella ornithinolytica
  REGION 1..356: note = tr|A0A1Y6GLT0|A0A1Y6GLT0_RAOOR S-adenosylmethionine:tRNA ribosyltransferase-isomerase; OS = Raoultella ornithinolytica OX=54291 GN=queA PE=3 SV=1
MRVTDFSFELPESLIAHYPQPERSRCRLLSLDGPTGALTHGTFTDLLDKLNPGDLLVFNNTRVIPARLFGRKASGGKIEVLVERMLDDKRILAHIRASKAPKPGAELLLGDDESINATMVARHDALFEVEFNDERPVLDILNSIGHMPLPPYIDRPDEDADRELYQTVYSTRPGAVAAPTAGLHFDDMMLEKLREKGIEMAFVTLHVGAGTFQPVRVETIEDHIMHSEYAEVPQEVVDAVLAAKARGNRVIAVGTTSVRSLESAAQAAKNDLIEPFFGDTQIFIYQGYQYKAVDALVTNFHLPESTLIMLVSAFAGYQHTMNAYKAAVEQKYRFFSYGDAMFITYNPQAIFERVGE

SEQ ID NO: 71238 - protein, 356 aa, Raoultella planticola; identical to SEQ ID NO: 71237
  REGION 1..356: note = tr|A0A2X2E670|A0A2X2E670_RAOPL S-adenosylmethionine:tRNA ribosyltransferase-isomerase; OS = Raoultella planticola OX=575 GN=queA PE=3 SV=1

SEQ ID NO: 71239 - protein, 354 aa, Raoultella sp.
  REGION 1..354: note = tr|A0A509CQ88|A0A509CQ88_9ENTR S-adenosylmethionine:tRNA ribosyltransferase-isomerase; OS = Raoultella sp. NCTC 9189 OX=2583577 GN=queA PE=3 SV=1
MRVTDFSFELPESLIAHYPQPERSSCRLLSLDGPTGALTHGTFTDLLDKLNPGDLLVFNNTRVIPARLFGRKASGGKIEVLVERMLDDKRILAHIRASKAPKPGAELLLGDDESIQATMVARHDALFEVEFNDERPVLDILNNIGHMPLPPYIDRPDEEADRELYQTVYSVRPGAVAAPTAGLHFDEPLLEKLREKGVEMAFVTLHVGAGTFQPVRVDSIEEHIMHSEYAEVPQDVVDAVLAAKARGSRVIAVGTTSVRSLESAAQAAKNDLIEPFFGDTKIFIYPGYQYKAVDALVTNFHLPESTLIMLVSAFAGYQHTMNAYKAAVEQKYRFFSYGDAMFITYNPRAIFERP

SEQ ID NO: 71240 - protein, 363 aa, Raoultella sp.
  REGION 1..363: note = tr|A0A4R3ZLE5|A0A4R3ZLE5_9ENTR S-adenosylmethionine:tRNA ribosyltransferase-isomerase; OS = Raoultella sp. BIGb0138 OX=2485115 GN=queA PE=3 SV=1
MRVTDFSFELPESLIAHYPQPERSRCRLLSLDGPTGALTHGTFTDLLDKLNPGDLLVFNNTRVIPARLFGRKASGGKIEVLVERMLDDKRILAHIRASKAPKPGAELLLGDDESISATMVARHDALFEVEFNDRRPVLDILNSIGHMPLPPYIDRPDEDADRELYQTVYSARPGAVAAPTAGLHFDEPMLEKLREKGIEMAFVTLHVGAGTFQPVRVETIEDHIMHSEYAEVPQEVVDAVLAAKARGNRVVAVGTTSVRSLESAAQAAKNDLIEPFFGDTQIFIYQGYQYKVVDALVTNFHLPESTLIMLVSAFAGYQHTMNAYQAAVEQKYRFFSYGDAMFITYNPQAIFEHVGESVRGMSV

SEQ ID NO: 71241 - protein, 354 aa, Raoultella terrigena
  REGION 1..354: note = tr|A0A1V2BS04|A0A1V2BS04_RAOTE S-adenosylmethionine:tRNA ribosyltransferase-isomerase; OS = Raoultella terrigena OX=577 GN=queA PE=3 SV=1
MRVTDFSFELPESLIAHYPQPERSSCRLLSLDGPTGALTHGTFTDLLDKLNPGDLLVFNNTRVIPARLFGRKASGGKIEVLVERMLDDKRILAHIRASKAPKPGAELLLGDDESIQATMVARHDALFEVEFNDERPVLDILNSIGHMPLPPYIDRPDEEADRELYQTVYSVRPGAVAAPTAGLHFDEPLLEKLREKGVEMAFVTLHVGAGTFQPVRVDSIEEHIMHSEYAEVPQDVVDAVLAAKARGSRVIAVGTTSVRSLESAAQAAKNDLIEPFFGDTKIFIYPGYQYKAVDALVTNFHLPESTLIMLVSAFAGYQHTMNAYKAAVEQKYRFFSYGDAMFITYNPRAIFERP

SEQ ID NO: 71242 - protein, 202 aa, Raoultella terrigena
  REGION 1..202: note = tr|A0A4U9DEE8|A0A4U9DEE8_RAOTE S-adenosylmethionine:tRNA ribosyltransferase-isomerase; OS = Raoultella terrigena OX=577 GN=queA_1 PE=3 SV=1
MRVTDFSFELPESLIAHYPQPERSSCRLLSLDGPTGALTHGTFTDLLDKLNPGDLLVFNNTRVIPARLFGRKASGGKIEVLVERMLDDKRILAHIRASKAPKPGAELLLGDDESIQATMVARHDALFEVEFNDERPVLDILNNIGHMPLPPYIDRPDEEADRELYQTVYSVRPGAVAAPTAGLHFDEPLLESCVRKALRWRS

SEQ ID NO: 71243 - protein, 316 aa, unidentified
  source 1..316: note = Raphidiopsis brookii
  REGION 1..316: note = tr|D4TN10|D4TN10_9CYAN S-adenosylmethionine:tRNA ribosyltransferase-isomerase OS=Raphidiopsis brookii D9; OX = 533247 GN=queA PE=3 SV=1
MQNSDLDISLSGYDYELPPELIAQNPVVPRDNSRLMVINPPAGTLTPPLDHIFRDLPELLKPGDLLVMNNTRVIPARLYGRKSTGARVEVLLLEEKQHNCWLALVKPGKYFNIGTEIIFDDQGLSSVNKLIPQLTATVIERDENTGGRLLRFDLPINVSLLHFLHKLGKIPLPPYINNSHALEEQYQTVYAKHDGAVAAPTAGLHFTPELLVKLRESGIQQEFLTLHVGVGTFRPVEVEDVTTHQMHEEWIEVSGDLVEKIYATKNAGGRIIAVGTTVVRALEGAAQSGSLQPYTGKVNLFYLSRLSMACRGRSYY

SEQ ID NO: 71244 - protein, 367 aa, unidentified
  source 1..367: note = Raphidiopsis curvata
  REGION 1..367: note = tr|A0A1Z4VGF7|A0A1Z4VGF7_9CYAN S-adenosylmethionine:tRNA ribosyltransferase-isomerase; OS = Raphidiopsis curvata NIES-932 OX=1973482 GN=queA PE=3; SV = 1
MQNSDLDISLSGYDYELPPELIAQNPVVPRDSSRLMVINSLDAGTLTPPLDHIFRDLPELLKPGDLLVMNNTRVIPARLYGHKSTGARVEVLLLEEKQHNCWLALVKPGKYFNIGTEIVFGDQGAELTPQLTATVIERDENTGGRLLQFDLPINVSLLQFLHKLGEIPLPPYINNSHALEEQYQTVYAKYDGAIAAPTAGLHFTPELLVKLRERGIQQEFLTLHVGVGTFRPVEVEDVTTHQMHEEWIEVSGDLVEKIYATRNAGGRIIAVGTTVVRALEGAAQSGSLQPYTGKVNLFIYPGYQWRVVEGLITNFHLPRSSLLMLVSSLIGRERLLDIYNQAIASRYRFYSFGDAMLILPEARICCS

SEQ ID NO: 71245 - protein, 348 aa, Reichenbachiella agariperforans
  REGION 1..348: note = tr|A0A1M6L376|A0A1M6L376_9BACT S-adenosylmethionine:tRNA ribosyltransferase-isomerase; OS = Reichenbachiella agariperforans OX=156994 GN=queA PE=3; SV = 1
MKLSEFKFDLPPGLLALYPTENRDEARMMVIHKDSGKIEHKVFTDFIDYFNEGDSIIINDTKVFPARLYGNKEKTGAKIEVFLLRELNKELHLWDVLVDPARKIRVGNKLYFGEGDLVAEVIDNTTSRGRTIRFLFDGTDEEFYKTIDELGETPLPKEIARKTEPEDRERFQTIYADKVGAVAAPTAGAHFTMQVLKRLELAGVDVNPITLHLGLGTFRPVDVEDLTKHKMDSENFIVPEATADIVNNVLDTKKNVCAIGTTVLRALESSVSASDRLKANEGWTDKFIFPPYEPKIVKSLLTNFHLPESTLLMNAAAFGGYDLIMDAYQVAIKEKYRFFSYGDAMLII

SEQ ID NO: 71246 - protein, 397 aa, Reichenbachiella agariperforans
  REGION 1..397: note = tr|A0A1M6R8S1|A0A1M6R8S1_9BACT S-adenosylmethionine:tRNA ribosyltransferase-isomerase; OS = Reichenbachiella agariperforans OX=156994 GN=queA PE=3; SV = 1
MVNNNTDLAQYLFDLPDEKIAKHPLKDRDASKLLVYKNDTIHHDHFRNLLDHVPTDATLFLNNTKVIAARLYFQKNTGAKIEVFLTEPISPHTAFEPALKAKKTCIWKCMIGNLKKWKDNTSIYLTLGAINLEAKLLDRSHGLVEFCWDTADEFLMVIEAAGHVPLPPYLNRAQESEDKYRYQTVFSEKEGAVAAPTAGLHFTDSILDTIRSKGHVVDQLTLHVSAGTFRPIKTEDFTEHDMHNERIIIYRHNLINILESKGPIVAVGTTAMRTLESTYWYGALLSKELTKDFKVDQHTAYREELAGISLETATQAIIHQMDQLGIDELHGETEIFIYPGYDFKVVQGLFTNFHMPSSTLVLLVAAFLGSDWRKIYNEALSHDYRFLSYGDSSLLLR

SEQ ID NO: 71247 - protein, 348 aa, Reichenbachiella faecimaris
  REGION 1..348: note = tr|A0A1W2G9G4|A0A1W2G9G4_9BACT S-adenosylmethionine:tRNA ribosyltransferase-isomerase; OS = Reichenbachiella faecimaris OX=692418 GN=queA PE=3 SV=1
MKLSEFKFDLPPGLLALYPTENRDESRLMVVHKDTGEIEHKVFTDLISYLDEGDSVILNDTKVFPARLYGNKEKTGAKIEVFLLRELNKELHLWDVLVDPARKIRVGNKLYFGEGDLVAEVIDNTTSRGRTIRFLFDGTDEEFYKSIDELGETPLPKEIARKTEPEDRERFQTIYAENVGAVAAPTAGIHFTRQMLKRLELKGVDTRAITLHLGLGTFRPVDVEDLTKHKMDSENYIVSEETATLVNKVLDEKKKVCAIGTTVLRALESSVSASDRLKANEGWTDKFIFPPYDFKIVKSLVTNFHLPESTLLMNAAAFGGFDLIMEAYQVAIKEKYRFFSYGDAMLII

SEQ ID NO: 71248 - protein, 400 aa, Reichenbachiella faecimaris
  REGION 1..400: note = tr|A0A1W2GJK7|A0A1W2GJK7_9BACT S-adenosylmethionine:tRNA ribosyltransferase-isomerase; OS = Reichenbachiella faecimaris OX=692418 GN=queA PE=3 SV=1
MSSDSASLEKYLYELPDHRIAKHPLAHRDDSKLLLYRAGEIEHQTFKDVVDLVPDDSLLFLNNTKVIAARLFFHKSTGAQIEVFLTEPILPHTEFQNALKVKNKCTWKCMIGNLKKWKDENVLSLKLNDELTIEARLVDRKKNLVEFTWEGNHEFLSIVEAAGHVPLPPYLNREEEAEDKDRYQTVFSELEGAVAAPTAGLHFTDDILKKLAKKGIKQDRLTLHVSAGTFRPIKDADFKNHDMHNERIIVNRQNIANILAATGSIIPVGTTALRTLESLYWYGVKLAKDRKTKFFVEKNDPYEKHLQGISLEHAMTAILNKMDSENIDQLKGETEIFIYPGYEFKVANGLFTNFHMPASTLVLLVAAFVGDDWKKIYQEALDKDYRFLSYGDTSLLLPHG

SEQ ID NO: 71249 - protein, 348 aa, Reichenbachiella sp.
  REGION 1..348: note = tr|A0A2G5L0W2|A0A2G5L0W2_9BACT S-adenosylmethionine:tRNA ribosyltransferase-isomerase; OS = Reichenbachiella sp. 5M10 OX=1889772 GN=queA PE=3 SV=1
MKLSEFKFDLPPGLLALYPTENRDESRMMVVHKDSGKIEHKVFKDFIEYFNEGDSVIINDTKVFPARLYGNKEKTGAKIEVFLLRELNKELHLWDVLVDPARKIRVGNKLYFGEGDLVAEVIDNTTSRGRTIRFLFDGTDEEFYKTIDELGETPLPKEIARKTEEEDRERFQTIYADKVGAVAAPTAGIHFTMSVLKRLELQGVDVSPITLHLGLGTFRPVDVEDLTKHKMDSENFMVGEKTTDIVNTALDTKHNVCAVGTTVLRALESSVSANDRLKPNEGWTDKFIFPPYESKIVKSLLTNFHLPESTLLMNAAAFGGYDLIMEAYQVAIKEKYRFFSYGDAMLII

SEQ ID NO: 71250 - protein, 397 aa, Reichenbachiella sp.
  REGION 1..397: note = tr|A0A2G5KX99|A0A2G5KX99_9BACT S-adenosylmethionine:tRNA ribosyltransferase-isomerase; OS = Reichenbachiella sp. 5M10 OX=1889772 GN=queA PE=3 SV=1
MSKPSTELEEYLFELPDEKIAKHPLENRDASKMLVYKQGEITHDHFKNLLDHIPTDSTLFLNNTKVIAARLFFQKSTGAKIEVFLTEPISPYQEFEKALQVKKQCSWKCIIGNLRKWKDGTTITLQLGSIQLRAKLIDRSHGIVEFSWDTEDAFLQIIEAAGHVPLPPYLNRKETEDDKTRYQTVFSVNEGAVAAPTAGLHFTKEILNRLEANGTKIDQVTLHVSAGTFRPIKTTDFKDHDMHNERIIIYRHNLHNILLSKGPVLAVGTTAMRTLESTYWYGAILTKNPQAPFKVDKDTAYQAQYANISVRESIEALLQKMDEMQVDVLHGETEIFIYPGYDFKIIHGLFTNFHMPASTLVLLVAAFVGKDWQEIYRQALAQDYRFLSYGDTSFLLR

SEQ ID NO: 71251 - protein, 353 aa, Reinekea blandensis
  REGION 1..353: note = tr|A4BG46|A4BG46_9GAMM S-adenosylmethionine:tRNA ribosyltransferase-isomerase OS=Reinekea blandensis MED297; OX = 314283 GN=queA PE=3 SV=1
MHVNDFDFQLPDELIARHPAEQRTGSRLLHLHGDSGQVQHRHFPDIEQLIEPGDLLVFNNTRVIPARLFGQKRSGGKVELLIERMTSDHTALAHIKANKSPKAGTELIMEGDIQLEVTGRDQNLFCVRCTNPEPLVDLLDQHGHMPLPPYLEREDDDDDRERYQTVYAQRKGAVAAPTAGLHFDDALLARLKDKGVNTAFVTLHVGAGTFQPVKADNIKDHVMHAEWIDVPDSVVEQIRTTKAAGKRVIAVGTTSVRSLETASQSGQIEPFTGDTNIFIYPGYRFKTVDALLTNFHLPKSTLIMLISAFAGKDHVMAAYEAAIRERYRFFSYGDAMFVTRNDDVTTAESGDLS

SEQ ID NO: 71252 - protein, 352 aa, unidentified
  source 1..352: note = Reinekea forsetii
  REGION 1..352: note = tr|A0A2K8KT29|A0A2K8KT29_9GAMM S-adenosylmethionine:tRNA ribosyltransferase-isomerase; OS = Reinekea forsetii OX=1336806 GN=queA PE=3 SV=1
MHLNDFDFELPDNLIARHPASERTGSRLLHLAGDTGQCQHLRFPQFEDLVSPGDLLVFNDTRVIPARLFGQKTSGGKIEVLIERMTSSHTALAHIRANKSSKVGTELLMEGGIELVVTGRDDNLFKIECRNPEPLVDLLDQHGHMPLPPYLERADDSTDRERYQTVYADKKGAVAAPTAGLHFDDALMARLADKGVNTAFVTLHVGAGTFAPVKTEQLADHIMHAEWVDVSFAVVEQIRATQAAGKRVIAIGTTSVRSLESASSSGAIEPFTGDTRIFIYPGYRFKTVDAMLTNFHLPKSTLIMLVSAFAGQDAVMAAYAEAVHEQYRFFSYGDAMFVTPHNLPPLASEATA

SEQ ID NO: 71253 - protein, 362 aa, Reinekea marinisedimentorum
  REGION 1..362: note = tr|A0A4R3IA17|A0A4R3IA17_9GAMM S-adenosylmethionine:tRNA ribosyltransferase-isomerase; OS = Reinekea marinisedimentorum OX=230495 GN=queA PE=3 SV=1
MAGHFLAAISISMQVNDFDFQLPDSLIARQPAKERTGSRLLHLNGMSGEVQHLSFPGIETLIEPGDLLVFNNTRVIPARIFGQKASGGKVEVLVERITSPHTALAHVRANKSPKPGNELIMEGDIRLTVTGRSENLFCLECTNKEALVDLLEAHGHMPLPPYLERDDNEDDRERYQTVYAQKKGAVAAPTAGLHFDDALLARLKDKGVNTAFVTLHVGAGTFAPVKADSIKDHVMHAEWVEVTEQVVEQIRATKAAGKRVIAVGTTSVRSLESASQQGEIAPFSGDTQIFIYPGYEYKTVDALLTNFHLPKSTLIMLVSAFAGQQNVMNAYHQAIENKYRFFSYGDAMFVTPQAFTNIEETE

SEQ ID NO: 71254 - protein, 373 aa, Reinekea sp.
  REGION 1..373: note = tr|A0A5C8Z4K3|A0A5C8Z4K3_9GAMM S-adenosylmethionine:tRNA ribosyltransferase-isomerase; OS = Reinekea sp. SSH23 OX=2593301 GN=queA PE=3 SV=1
MHVDDFDFQLPDALIARHPTKERTGSRLLHLNGQSGQTQHLNFADIESLIEPGDLMVFNDTRVIPARLFGQKTSGGKVEVLVERITSPNTALAHIRANKSAKPGTLLTMEGGIELEVTGRSENLFAIRCLNEQPLVELLEQHGHMPLPPYLEREDDDEDRERYQTVYAQKKGAVAAPTAGLHFDDALLQRLADKGVNTAFVTLHVGAGTFAPVKADSIEEHVMHAEWVEVSAEVVEKIKATKAAGKRVIAIGTTSVRSLESASANGEIEAFSGDTQIFIYPGYRFKTVDAMLTNFHLPKSTLIMLVSAFAGQGNVLNAYNEAITEQYRFFSYGDAMFVTPQPFTEAFAETLAEQSPSFNLNDDSAASAQSKEL

SEQ ID NO: 71255 - protein, 347 aa, unidentified
  source 1..347: note = Reyranella soli
  REGION 1..347: note = tr|A0A512ND23|A0A512ND23_9PROT S-adenosylmethionine:tRNA ribosyltransferase-isomerase; OS = Reyranella soli OX=1230389 GN=queA PE=3 SV=1
MRVDLFDFDLPDELIAQRPIQPRDAARLLDVAPDGLHDRTVRDLPSLLRQGDLLVFNDTKVIPARLRGVRGGTAGRQDVAVEALLIRDLGAGRWLSFARPTKRLRLGDRIGFTDFGATVETKNDDGSLVLAFDTTGPRFLAALEHSGAVPLPPYIRSGVADAQDRADYQTMFARFDGSVAAPTAGLHFTPELMASLADAGIATASVTLHVGAGTFQPVRVDDTDAHTMHAEWGEVPAITAQAIAETRARGGRVVSIGTTALRLLETVARDHDGAVAAWIGETDIFITPGFRFRAVDLLLTNFHLPRSTLFMLVSAFAGLERMKAAYAHAVRERYRFYSYGDCCLLRR

SEQ ID NO: 71256 - protein, 156 aa, Reyranella sp.
  REGION 1..156: note = tr|A0A522Z9J1|A0A522Z9J1_9PROT S-adenosylmethionine:tRNA ribosyltransferase-isomerase (Fragment) OS=Reyranella sp. OX=1929291 GN=EPO10_19320; PE = 3 SV=1
MRVDLFDFALPDDLIAQRPVSPRDSARLLDVTGETLHDRTVRSLPGLLRRGDLLVFNDTKVIPARLKGTRPGNGQRQDVAVEALLIRDLGNGRWRAFARPGKRLRPGDVLDFPGLRARVEAKEEDGSLVLDFDQEGHAFLTALEQEGTVPLPPYIR

SEQ ID NO: 71257 - protein, 336 aa, Reyranella sp.
  REGION 1..336: note = tr|A0A521LMI3|A0A521LMI3_9PROT S-adenosylmethionine:tRNA ribosyltransferase-isomerase; OS = Reyranella sp. OX=1929291 GN=queA PE=3 SV=1
MRVDLFDFDLPEDLIAQRPVVPRDAARLLDVTGDGLHDRTVRDLPGLLRKGDLLVFNDTKVIPARLIGTRPEGGKVEALLIRDLGDGRWLTFARPAKRMKVGQKLAFEGLAATVAAKREDGSVVLAFDRSGHAFLTALEQGGAVPLPPYIRGGTADAQDRADYQTLFAKHDGSVAAPTAGLHFTPALMAALAEAGIATAGVTLHVGAGTFQPVRVDDTDAHTMHAEWGEVSQETADAIARAQRVVAIGTTSLRLLESVARTGPMRAWSGETDIFITPGFPFRAVDLLLTNFHLPRSTLFMLVAAFAGLERMKAVYAHAVGERYRFYSYGDCCLLRR

SEQ ID NO: 71258 - protein, 346 aa, Rheinheimera nanhaiensis
  REGION 1..346: note = tr|I1DSN0|I1DSN0_9GAMM S-adenosylmethionine:tRNA ribosyltransferase-isomerase OS=Rheinheimera nanhaiensis E407-8 OX=562729 GN=queA PE=3 SV=1
MSVTSMQVKDFSFELPEQLIARFPKAERSSSRLLAMDKHSGELSHHIFKDLADFLQPGDLLVFNNTKVIPARLFGQKASGGKVEVLVERMLDKQRFLAHVRASKAPKPGTELLLEGSAKVVMNQRHDELFELQVIGDEPVLDMLERLGHMPLPPYIDRPDTEEDKARYQTVYNEKPGAVAAPTAGLHFDQPLLDKLKAKGVEFAYITLHVGAGTFQPVRVDNVLEHKMHAEYIEVPQPVVDAIAACKARGNKVVAVGTTSVRSLESAAQQGGGQLVAYSGDTQIFIYPGYQFKVIDALITNFHLPESTLIMLVSAFSSRENIMHAYKTAIAEQYRFYSYGDAMFIR

SEQ ID NO: 71259 - protein, 351 aa, Rheinheimera pacifica
  REGION 1..351: note = tr|A0A1H6JFS4|A0A1H6JFS4_9GAMM S-adenosylmethionine:tRNA ribosyltransferase-isomerase; OS = Rheinheimera pacifica OX=173990 GN=queA PE=3 SV=1
MSVTSVPAKSMQVSDFSFELPEQLIARFPKAERSSSRLLAMDKHSGALQHHIFKDLADFLQPGDLLVFNNTKVIPARLFGQKASGGKVEVLVERMLDDKRFLAHVRASKAPKPGTELILENSATVVMNQRHDELFELEVTGDEPVLDMLERLGHMPLPPYIDRPDNAEDKARYQTVYNEKPGAVAAPTAGLHFDQPLLDKLKAKGVEFAYVTLHVGAGTFQPVRVANVLEHKMHAEYIEVSQQVVDAVAACKARGNRVVAVGTTSVRSLESAAAQGGGNLVAYNGDTQIFIYPGYEFKVIDALITNFHLPESTLIMLVSAFSSRDYVMNAYNTAIAEQYRFYSYGDAMFIS

SEQ ID NO: 71260 - protein, 341 aa, unidentified
  source 1..341: note = Rheinheimera salexigens
  REGION 1..341: note = tr|A0A1E7Q9F9|A0A1E7Q9F9_9GAMM S-adenosylmethionine:tRNA ribosyltransferase-isomerase; OS = Rheinheimera salexigens OX=1628148 GN=queA PE=3 SV=1
MQVSDFSFQLPEQLIARHPKAERSSSRLLAMDKSSGALSHHIFKQVIDFIHPGDLLVFNNTKVIPARLFGQKASGGKVEVLVERVLDEKRFLAHIRASKAPKPGTKLILEQSAEVEMLQRHDELFELAVCSDEPVLDMLERLGHMPLPPYIDRPDTAEDKARYQTVYSEKPGAVAAPTAGLHFDTPLLQQLTDKGVEFAYVTLHVGAGTFQPVRVDNVLAHKMHAEYIDVPDSTVAAIAACKARGGKVVAVGTTSVRSLESAAQIGNGDLIAYKGDTQIFIYPGYEFKVIDALITNFHLPESTLIMLVSAFSQREYVMQAYATAIAEQYRFYSYGDAMYIG

SEQ ID NO: 71261 - protein, 341 aa, Rheinheimera sp.
  REGION 1..341: note = tr|A0A4P6VU11|A0A4P6VU11_9GAMM S-adenosylmethionine:tRNA ribosyltransferase-isomerase; OS = Rheinheimera sp. D18 OX=2545632 GN=queA PE=3 SV=1
MHVKDFSFELPEQLIARFPKAERSSSRLLVMNKHNGELQHHIFKDLADQLQAGDLLVFNNTKVIPARLFGQKLSGGKVEVLVERMLDNKRFLAHVRASKAPKAGAILLLENSAEVRMNQRHEELFELEVLSDEPVLTMLERLGHMPLPPYIDRPDNDEDKARYQTVYNAKPGAVAAPTAGLHFDQPLLDKLSAKGVEFAYVTLHVGAGTFQPVRVDNVLEHKMHAEYIEVSQQVVDAVAACKARGNRVIAVGTTSVRSLESAVQQGNGTLVAYNGDTQIFIYPGYRFKVVDALVTNFHLPESTLIMLVSAFSRREYVMQAYKTAIAEQYRFYSYGDAMFIS

SEQ ID NO: 71262 - protein, 341 aa, Rheinheimera sp.
  REGION 1..341: note = tr|A0A486XPW9|A0A486XPW9_9GAMM S-adenosylmethionine:tRNA ribosyltransferase-isomerase; OS = Rheinheimera sp. BAL341 OX=1708203 GN=queA PE=3 SV=1
MQVKDFSFELPEQLIARFPKAERSSSRLLAMDKHSGELQHHIFKDLADFLQPGDLLVFNNTKVIPARLFGQKASGGKVEVLVERMLDNKRFLAHVRASKAPKPGTELVLEGSAKVTMKQRHDELFELEVMGDEPVLEMLERLGHMPLPPYIDRPDTEEDKARYQTVYNEKPGAVAAPTAGLHFDQPLLDKLRTKGIEFAYITLHVGAGTFQPVRVDNVLEHKMHAEYIEVPQHVVDAIAACKARGNRVVAVGTTSVRSLESAAQQGGGQLIAYNGDTQIFIYPGYQFKVIDALITNFHLPESTLIMLVSAFSSREHVMNAYQTAIAEQYRFYSYGDAMFIR

SEQ ID NO: 71263 - protein, 346 aa, unidentified
  source 1..346: note = Rheinheimera tuosuensis
  REGION 1..346: note = tr|A0A285IXA2|A0A285IXA2_9GAMM S-adenosylmethionine:tRNA ribosyltransferase-isomerase; OS = Rheinheimera tuosuensis OX=1323745 GN=queA PE=3 SV=1
MQPKSMQVKDFSFELPEQLIARFPKAERSSSRLLAMDKQSGALSHHIFKDLTDFLKPGDLLVFNNTKVIPARLFGQKASGGKVEVLVERMLDDKRFLAHVRASKAPKPGTVLMLENSAEVRMNQRHDELFELEVLSDEPVLTMLERLGHMPLPPYIDRPDTEDDKARYQTVYNEKPGAVAAPTAGLHFDQPLLDKLKAKEVEFAYVTLHVGAGTFQPVRVDNVLEHKMHAEYIEVPQQVVDAIAACKARGNKVVAVGTTSVRSLESAAQQGGGKLISYNGDTQIFIYPGYQFQVIDALITNFHLPESTLIMLVSAFSCREHVMNAYDTAINEQYRFYSYGDAMFIS

SEQ ID NO: 71264 - protein, 351 aa, unidentified
  source 1..351: note = Rhizobacter gummiphilus
  REGION 1..351: note = tr|A0A1W6LH97|A0A1W6LH97_9BURK S-adenosylmethionine:tRNA ribosyltransferase-isomerase; OS = Rhizobacter gummiphilus OX=946333 GN=queA PE=3 SV=1
MSRSYTLADFDFELPPELIAQHPAAERSGSRLLDGTRWPPADHIFRELPSLLRAGDLLVFNDTRVIKARLLGAKASGGSVEALVERVLPGNEVWMHLRASKSPKAGGRVRFTSGDGSSSFEAEVLGRGGPEDSLFHLRFPSEPFALIERHGHVPLPPYITHADDADDERRYQTVFAANPGAAAAPTAALHFDEALLAELAARGIGRAAVTLHVGAGTFQPVRTDNIADHRMHSEWFDVPQSTVDAIAATKAAGGRVVSVGTTTLRALESAAAGGTLQAGSRDTAIFITPGFDFKVIDVLVTNFHLPKSTLLMLVSALAGHDRVMGLYRHSIEHGYRFFSYGDAMLLERAAA

SEQ ID NO: 71265 - protein, 355 aa, Rhizobacter sp.
  REGION 1..355: note = tr|A0A0Q6XMM2|A0A0Q6XMM2_9BURK S-adenosylmethionine:tRNA ribosyltransferase-isomerase; OS = Rhizobacter sp. Root1221 OX=1736433 GN=queA PE=3 SV=1
MSRSYTLGDFDFDLPPELIAQHPAAERSGSRLLDGTTEPPADRIFRDLPGLLRAGDLLVFNDTRVIKARLLGAKASGGSVEALVERVLPGHEVLMHLRASKSPKAGGRVRFVSGDGASHFDADVLGRAGPEDSLFHLRFPGEPFALLERHGHVPLPPYITHADSAEDERRYQTVFAARPGAAAAPTAALHFDEALLAALDARGVKRAAVTLHVGAGTFQPVRTDNLAEHRMHSEWFDVPQATVDAIAATKAAGGRVVSVGTTTLRALESAAASGTLEAGSRDTSIFITPGFRFHVVDVLVTNFHLPKSTLLMLVSALAGHSRVMALYRHAIDHRYRFFSYGDAMLLERHDNEESR

SEQ ID NO: 71266 - protein, 360 aa, Rhizobacter sp.
  REGION 1..360: note = tr|A0A0Q7AIY6|A0A0Q7AIY6_9BURK S-adenosylmethionine:tRNA ribosyltransferase-isomerase; OS = Rhizobacter sp. Root404 OX=1736528 GN=queA PE=3 SV=1
MTPTYTLSDFDFALPPELIAQQPAAERSASRLLDGTGSAPVDRVFRELPALLRAGDLLVFNDTRVIKARLLGAKASGGAVEALVERVLPGHEVLMHLRASKSPKAGSTVRFFGVDRTDAFNAEVLGRAGPQESLFHLRFPADPLALLAAHGHVPLPPYITHADTAEDERRYQTVFAAKPGAVAAPTAALHFDDALLAELARRGIATAGVTLHVGAGTFQPVRTEILAEHTMHSEWFDVPRATVDAITRTRAAGGRIVAVGTTTLRALESAAREGALQAGSRDTDIFITPGFAFRVVDVLITNFHLPKSTLMMLVSAFAGFDRIRALYAHAIRERYRFFSYGDAMLLQRAPHDPGTDHADL

SEQ ID NO: 71267 - protein, 361 aa, unidentified
  source 1..361: note = Rhizobiaceae bacterium
  REGION 1..361: note = tr|A0A4U6ATY6|A0A4U6ATY6_9RHIZ S-adenosylmethionine:tRNA ribosyltransferase-isomerase; OS = Rhizobiaceae bacterium LC148 OX=1120689 GN=queA PE=3; SV = 1
MRVDLFDFDLPEESIALRPASPRDSARLLVVRPGDEPELADHRVSELPSFLKPGDALVFNDTKVIPAQLEGIRHREGAGGQQVSATLHMRTAPDAWKAFAKPGKRIKVGDRIEFGHGGNACMIGSLAATVEEKGEGGEVTLRFDLSGPMLDEAIMAVGHIPLPPYIAAKRAEDDKDRQDYQTIYAREEGAVAAPTAGLHFTPQLFAALDAAGIERHFVTLHVGAGTFLPVKADDTADHKMHQEIGYVSADTAARLNAVKARGGRIVCVGTTSLRLVESAATDDGVIAPWSGATGIFITPGYRFKAVDMLMTNFHLPRSTLFMLVSAFSGLETMRSAYAHAISTGYRFYSYGDASLLFRKDK

SEQ ID NO: 71268 - protein, 185 aa, unidentified
  source 1..185: note = Rhizobiaceae bacterium
  REGION 1..185: note = tr|A0A4Q3HJH8|A0A4Q3HJH8_9RHIZ S-adenosylmethionine:tRNA ribosyltransferase-isomerase (Fragment) OS=Rhizobiaceae bacterium OX=1913961; GN = EOP17_22345 PE=3 SV=1
AKDYQTIYAREQGAVAAPTAGLHFTPDLFARLDAAGVERHFVTLHVGAGTFLPMKVDDTEDHKMHQEIGYVSAETAQHLNAVRARGGRIVCVGTTSLRLIESAAADDGTILPWSGATGIFITPGYRFKAVDMLMTNFHLPKSTLFMLVSAFCGLETMRSAYDHAISSGYRFYSYGDSSLLFRNDR

SEQ ID NO: 71269 - protein, 356 aa, unidentified
  source 1..356: note = Rhizobiales bacterium
  REGION 1..356: note = tr|A0A1M3MHW2|A0A1M3MHW2_9RHIZ S-adenosylmethionine:tRNA ribosyltransferase-isomerase; OS = Rhizobiales bacterium 63-22 OX=1895812 GN=queA PE=3 SV=1
MRVDLFDFDLPEERIALRPAEPRDHARLLRVRPGQDFEDAHVYDLPDILQPGDALVFNDTKVIPAQLEGLRERDGNVSQVDATLHMRAGPDRWKAFLRPAKRVKEGDRIRFGHSGSSCFLGTLDATVAEKGEAGEALLVFDLSGALLDEAIAAVGHIPLPPYIASKRAEDERDRSDYQTVYAREEGAVAAPTAGLHFTPELLAKIKARGVEEHFVTLHVGAGTFLPVKADDTRDHKMHAEIGHVSQATADALNAVHARGGRVICVGTTSLRLIESAAGEDGQVRPWSGATDIFITPGYRFRAVDLLMTNFHLPRSTLFMLVSAFSGLETMRAAYEHAIADGYRFYSYGDASLLERA

SEQ ID NO: 71270 - protein, 370 aa, unidentified
  source 1..370: note = Rhizobiales bacterium
  REGION 1..370: note = tr|A0A1H4VB56|A0A1H4VB56_9RHIZ S-adenosylmethionine:tRNA ribosyltransferase-isomerase; OS = Rhizobiales bacterium GAS188 OX=1884351 GN=queA PE=3; SV = 1
MRVDLFDFELPPALIALRPAVPRESANLLVVRPGADPELDDRHVGDLPGLLRPGDVLVLNDTRVIPARLTGLRTRGEAVARIEVLLHQRLAGERWRAFARPAKRLAIGDRIVFGETSESVACELGRLMATVEARGADGEVDLAFDLHGAVLDEAIERFGQMPLPPYIAGKRPEDAQDRSDYQTVYAREPGAVAAPTAGLHLTEGLMQAIRARGVALATVTLHVGAGTFLPVKADDTAEHRMHPEWGEIDAQAAQTINAARAAGGRVIALGTTSLRLIESAAAPDGSLAPFAGETAIFITPGYRFKLVDGLVSNFHLPRSTLFMLVCAFSGLERMRRAYAHAIEHGYRFYSYGDASLLFRQDMLHQDGLQE

SEQ ID NO: 71271 - protein, 379 aa, unidentified
  source 1..379: note = Rhizobium acidisoli
  REGION 1..379: note = tr|A0A0N1DPX9|A0A0N1DPX9_9RHIZ S-adenosylmethionine:tRNA ribosyltransferase-isomerase; OS = Rhizobium acidisoli OX=1538158 GN=queA PE=3 SV=1
MRVDLFDFDLPDERIALRPAEPRDSARLLVVNPHAESRPHAESVPHAESRPHAESAFSDHRVGDLPSFLRAGDALVFNDTKVIPAQLEGIRHRDGAGGQQVSATLHMRVGPSRWKAFAKPGKRIKEGDRIAFGHSGESCLLGSLDATVEEKGEAGEVTLAFDLSGPALDEAIAAVGHIPLPPYIAAKRPEDERDRADYQTIYAREEGAVAAPTAGLHFTPALFEALDRAGIERHFVTLHVGAGTFLPVKADDTADHKMHLESGTVSAETAARLNAVKARGGRIVCVGTTSLRLIESAAEESGEIRGWSGATGIFITPGYRFKAVDMLMTNFHLPRSTLFMLVSAFSGFETMHAAYKHAISTGYRFYSYGDASLLFRKDK

SEQ ID NO: 71272 - protein, 360 aa, unidentified
  source 1..360: note = Rhizobium aethiopicum
  REGION 1..360: note = tr|A0A1C3XWT1|A0A1C3XWT1_9RHIZ S-adenosylmethionine:tRNA ribosyltransferase-isomerase; OS = Rhizobium aethiopicum OX=1138170 GN=queA PE=3 SV=1
MRVDLFDFDLPEERIALRPAEPRDSARLLVVDAKAASALSDHRVSDLPSFLHAGDALVFNDTKVIPAQLEGIRHRDGAGGQQVSATLHMRVGPSRWKAFAKPGKRIKEGDRIAFGHSGESCMIGSLDATVEEKGEAGEVTLAFDLSGPMLDEAIAAVGHIPLPPYIAAKRPEDERDRADYQTIYAREEGAVAAPTAGLHFTPGLFQGLDRAGIERHFVTLHVGAGTFLPVKADDTDDHKMHLESGYVSAEVAARLNTVRERGGRIVCVGTTSLRLIESAAGESGEIKPWAGATGIFITPGYRFKAVDMLMTNFHLPRSTLFMLVSAFAGFETMHAAYEHAISTGYRFYSYGDASLLFRKD

SEQ ID NO: 71273 - protein, 360 aa, unidentified
  source 1..360: note = Rhizobium album
  REGION 1..360: note = tr|A0A2U2DT10|A0A2U2DT10_9RHIZ S-adenosylmethionine:tRNA ribosyltransferase-isomerase; OS = Rhizobium album OX=2182425 GN=queA PE=3 SV=1
MRVDLFDFDLPEDNIALRPAEPRESARLLVVRPDAEPMLADHHVGDLPSFLRPGDALVFNDTKVIPAQLEGIRRREGAGGQQVSATLHMRVAPDRWKAFAKPGKRIKVGDRISFGHNGDVCLLGTLDAAVEEKGEGGEVTLLFDLSGPALDEAIAIAGHIPLPPYIAAKRPDDDQDRRDYQTIYAREEGAVAAPTAGLHFTPSLFETLDKAGIERHFVTLHVGAGTFLPVKADDTADHKMHQEIGTVDAATAARLNAVKASGGRIVCVGTTSLRLIESAAADDGTIRPWSGATGIFITPGYRFKAVDVLMTNFHLPRSTLFMLVSAFSGLETMRAAYAHAIETGYRFYSYGDASLLFRKD

SEQ ID NO: 71274 - protein, 360 aa, unidentified
  source 1..360: note = Rhizobium altiplani
  REGION 1..360: note = tr|A0A109JLG9|A0A109JLG9_9RHIZ S-adenosylmethionine:tRNA ribosyltransferase-isomerase; OS = Rhizobium altiplani OX=1864509 GN=queA PE=3 SV=1
MRVDLFDFDLPDERIALRPAEPRDSARLLVVDPADEVQLSDHRVSDLLSFLRAGDALVFNDTKVIPAQLEGIRYREGAGGQQVSATLHMRTGTSRWKAFAKPGKRIKIGDRISFGHDGTSCLLGKLECTVEEKGEGGEVTLAFDLSGPMLDEAIHSVGHIPLPPYIAAKRAEDERDRADYQTIYAREEGAVAAPTAGLHFTPALFDAIDKAGVERHFVTLHVGAGTFLPVKADDTDDHKMHLESGYVSAETAASLNAVKARGGRIICVGTTSLRLIESAAQDNGEIRAWAGATGIFITPGYRFKAVDMLMTNFHLPRSTLFMLVSAFAGFETMHAAYQHAISTGYRFYSYGDSSLLFRKD

SEQ ID NO: 71275 - protein, 359 aa, unidentified
  source 1..359: note = Rhizobium anhuiense
  REGION 1..359: note = tr|A0A432NAP1|A0A432NAP1_9RHIZ S-adenosylmethionine:tRNA ribosyltransferase-isomerase; OS = Rhizobium anhuiense OX=1184720 GN=queA PE=3 SV=1
MRVDLFDFDLPDERIALRPAEPRDSARLLVVDPNAENIRDYRVGDLPSFLQAGDALVFNDTKVIPAQLEGIRHREGAGGQQVSATLHMRIGANKWKAFAKPGKRIKEGDRIAFGHSGESCMIGSLDATVEEKGEAGEVTLAFDLSGPALDEAIASVGHIPLPPYIAAKRPEDERDRADYQTIYAREEGAVAAPTAGLHFTPALFEALDKAGIERHFVTLHVGAGTFLPVKADDTADHKMHLESGYVGAETAARLNAVKQRGGRIICVGTTSLRLIESATQDSGEIRAWSGATGIFITPGYRFKAVDMLMTNFHLPRSTLFMLVSAFSGLDTMRAAYDHAIQTGYRFYSYGDASLLFRKD

SEQ ID NO: 71276 - protein, 339 aa, unidentified
  source 1..339: note = Rhizobium azibense
  REGION 1..339: note = tr|A0A4R8A740|A0A4R8A740_9RHIZ S-adenosylmethionine:tRNA ribosyltransferase-isomerase; OS = Rhizobium azibense OX=1136135 GN=EV128_11756 PE=3 SV=1
MTADDRSDQRSARLFVVEADGIMRDLPRTRLATLFDAGDLVVANDAATLPASLHGTHVPSGKLIEIRLAGWRLLHDPRRFVALAFGSGDHRTRTEDRLPPPALSTGDHLRLGPLEAVVERVLYHPLLFELCFQGSRAAVLAGLAQHGRPIQYAHVPEPLALWDVWTKIAALPFAFEAPSAGFALDWRTLQTWRQRDVGFATLTHAAGVSSTGDPALDSRLPLDEPYRIPERTAAHVAQVKLRGSRIIAIGTSVVRALEAAADPDGSVRVGNGIATGRIARGTPLRVVDAIITGVHQPGESHFELLRAFADDGLLAKVSAALTACGYRAHEFGDSVLLNC

SEQ ID NO: 71277 - protein, 361 aa, unidentified
  source 1..361: note = Rhizobium azibense
  REGION 1..361: note = tr|A0A4V2VE26|A0A4V2VE26_9RHIZ S-adenosylmethionine:tRNA ribosyltransferase-isomerase; OS = Rhizobium azibense OX=1136135 GN=queA PE=3 SV=1
MRVDLFDFDLPDERIALRPAEPRDSARLLVVDPHAQPALGDYVVSELPSFLRAGDALVFNDTKVIPAQLEGVRHRAGAGGQRVSATLHMRVGASRWKAFSKPGKRIKIGDRIAFGHDGESCLLGQLDCTVEEKGEGGEVTLAFDLSGPALDEAIASVGHIPLPPYIAAKRSDDERDRTDYQTIYAREEGAVAAPTAGLHFTPRLFEAIDKAGVERHFVTLHVGAGTFLPVKADDTDDHKMHLESGFVSAETAARLNAVKARGGRIICVGTTSLRLIESATADDGGIRAWAGATGIFITPGYRFKAVDILMTNFHLPRSTLFMLVSAFAGFETMQSAYKHAISTGYRFYSYGDASLLFRKDR

SEQ ID NO: 71278 - protein, 360 aa, unidentified
  source 1..360: note = Rhizobium esperanzae
  REGION 1..360: note = tr|A0A246DW45|A0A246DW45_9RHIZ S-adenosylmethionine:tRNA ribosyltransferase-isomerase; OS = Rhizobium esperanzae OX=1967781 GN=queA PE=3 SV=1
MRVDLFDFDLPDERIALRPAEPRDSARLLVVDPNAESALSDHHVCDLPSFLRAGDALVFNDTKVIPAQLEGIRHRDGAGGQQVSATLHMRIGPSRWKAFAKPGKRIKEGDRIAFGHSGESCMIGSLDATVEEKGEAGEVTLAFDLSGPVLDEAIAAVGHIPLPPYIAAKRPEDERDRADYQTIYAREEGAVAAPTAGLHFTPALFEALDRAGIERHFVTLHVGAGTFLPVKADDTDDHKMHLESGYVSAETAARLNAVKQRGGRIVCVGTTSLRLIESAAEESGEIKPWAGATGIFITPGYRFKVVDMLMTNFHLPRSTLFMLVSAFAGFETMHAAYEHAISTGYRFYSYGDASLLFRKD

SEQ ID NO: 71279 - protein, 348 aa, Rhizobium etli
  REGION 1..348: note = tr|S5SYX3|S5SYX3_RHIET S-adenosylmethionine:tRNA ribosyltransferase-isomerase OS=Rhizobium etli bv. mimosae str. Mim1 OX=1328306 GN=REMIM1_PF01004 PE=3 SV=1
MIAADRLDRQSARLLVVEADGTMRDLPRANLGTLFGPGDLVVANDAATLPASLQGTHLQCGKTIEIRLAGWLSPSAPVRFLAIVFGSGDHRTRTEDRLPPPALSSGDRLQFGPLEAVVKRVLDHPRLVELSFQGTRAAMFAGLAQHGRPIQYAHVPEPLALWDVWTRIAARPVAFEAPSASFALDWRTLQVWRRREIGFATLTHAAGISSTGDPALDSRLPFDEPYHIPECTVAQVARAQLRGSRIIAIGTSVVRALEAAANPDGSVRAGDGIATGRIAQGTPLRVVDAVLTGVHQPGESHFELLRAFADDGLLASASTALTACGYRAHEFGDSMLLNRQPRLYWREP

SEQ ID NO: 71280 - protein, 373 aa, Rhizobium etli
  REGION 1..373: note = sp|B3PZR1|QUEA_RHIE6 S-adenosylmethionine:tRNA ribosyltransferase-isomerase OS=Rhizobium etli (strain CIAT 652) OX=491916 GN=queA PE=3 SV=1
MRVDLFDFDLPDERIALRPAEPRDSARLLVVNPHAESGPHAESVPHAESALSDHHVYDLPSFLRAGDALVFNDTKVIPAQLEGIRHRDGAGGQQVSATLHMRIGPSRWKAFAKPGKRIKEGDRIAFGHSGESCFLGALDATVEEKGEAGEVTLAFDLTGPALDEAIAAVGHIPLPPYIAAKRPEDERDRADYQTIYAREEGAVAAPTAGLHFTPDLFAALDKAGIERHFVTLHVGAGTFLPVKADDTDDHKMHLESGYVSAEIAARLNAVKARGGRIVCVGTTSLRLIESAAGEDGKIKPWAGATGIFITPGYRFKAVDMLMTNFHLPRSTLFMLVSAFSGFETMRAAYEHAISTGYRFYSYGDASLLFRKDK

SEQ ID NO: 71281 - protein, 360 aa, unidentified
  source 1..360: note = Rhizobium favelukesii
  REGION 1..360: note = tr|W6RHA1|W6RHA1_9RHIZ S-adenosylmethionine:tRNA ribosyltransferase-isomerase OS=Rhizobium favelukesii; OX = 348824 GN=queA PE=3 SV=1
MRVDLFDFDLPDERIALRPADPRDSARLLVVDPAGEVQLSDHRISDLPDFLRAGDALVFNDTKVIPAQLEGVRHREGAGGQQVSATLHMRIGAGRWKAFAKPGKRIKIGDRISFGHDGNSCLLGKLECTVEEKSEGGEVTLAFDLSGPMLDEAIHSVGHIPLPPYIAAKRAEDERDRVDYQTIYAREEGAVAAPTAGLHFTPALFEAIDKSGVERHFVTLHVGAGTFLPVKADDTDEHKMHLESGYVSAETAASLNAVRARGGRIVCVGTTSLRLIESAAQENGEIRAWAGATGIFITPGYRFKAVDMLMTNFHLPRSTLFMLVSAFAGFETMHAAYRHAISTGYRFYSYGDSSLLFRKD

SEQ ID NO: 71282 - protein, 374 aa, unidentified
  source 1..374: note = Rhizobium favelukesii
  REGION 1..374: note = tr|W6RJ93|W6RJ93_9RHIZ S-adenosylmethionine:tRNA ribosyltransferase-isomerase OS=Rhizobium favelukesii; OX = 348824 GN=LPU83_pLPU83c_0357 PE=3 SV=1
MIADLSDRRSARLFVVETGGTMRDLPRTRLATLFNPSDLVVANDAATLPASLHGTHIPSGEAIEIRLAGWLTLSDPTRFVAIAFGFGDHRTPTEDRLPPPALSTGDRLRLGPLDAVVERLLDHPRLLELRFPGNPAAVLAGMAQHGRPIQYAHVPEPLALWDVWTKIAARPLAFEAPSASFALDWRTLQTWRRRDVGFAALTHAAGVSSTGDPALDLRLPFDEPYHIPERTAERVARAKLCGSRIIAIGTSVVRALEAAANPDGSVRAGNGIATGRIAQGTSLRVADAVLTGVHQPGESHFELLRAFADDALLAETFAALTASGYRAHEFGDSVLYNCQPLQLSAGTEGEPLITRLGYDVGKIDGVPGVLDVKI

SEQ ID NO: 71283 - protein, 361 aa, unidentified
  source 1..361: note = Rhizobium fredii
  REGION 1..361: note = tr|A0A2L0H516|A0A2L0H516_RHIFR S-adenosylmethionine:tRNA ribosyltransferase-isomerase; OS = Rhizobium fredii OX=380 GN=queA PE=3 SV=1
MRVDLFDFDLPETSIALRPASPRDSARMLVVRPEAEPVLSDHGVLDLPAFLRPGDALVFNDTKVIPAQLEGIRQRGEDVATQVSLTLHMRVGPDRWKAFARPARRLKPGDRIGFGHGGTACLLGSLDATVEEKGEAGEVTLRFDLSGPVLDEAIMSVGHIPLPPYIASKRPEDARDRADYQTVYAREEGAVAAPTAGLHFTDRLFARLDEAGIERHFVTLHVGAGTFLPVKAGDTDDHVMHEEIGHVAAATAERLNAVRARGGRIVCVGTTSLRLIESAATEEGQIRPWSGPTGIFITPGYRFRAADMLMTNFHLPKSTLFMLVSAFAGLDTMRAAYVHAIAAGYRFYSYGDASLLFRKDQ

SEQ ID NO: 71284 - protein, 366 aa, unidentified
  source 1..366: note = Rhizobium fredii
  REGION 1..366: note = tr|G9A6U6|G9A6U6_RHIFH S-adenosylmethionine:tRNA ribosyltransferase-isomerase OS=Rhizobium fredii (strain HH103) OX=1117943 GN=queA PE=3 SV=1
MFGPSMRVDLFDFDLPETSIALRPASPRDSARMLVVRPEAEPVLSDHGVLDLPSFLRPGDALVFNDTKVIPAQLEGIRRRGEDVATQVSLTLHMRVAPDRWKAFARPARRLKPGDRISFGHGGNACLLGSLDATVEDKGEAGEVTLRFDLSGPVLDEAIMSVGHIPLPPYIASKRPEDSRDRTDYQTVYAREEGAVAAPTAGLHFTDRLFAELDEAGIERHFVTLHVGAGTFLPVKADDTDNHVMHEEIGHVDAATAERLNAVRARGGRIVCVGTTSLRLIESAATQDGKIHPWSGPTGIFITPGYRFRAVDMLMTNFHLPKSTLFMLVSAFAGLETMRGAYAHAIAAGYRFYSYGDASLLFRKDQ

SEQ ID NO: 71285 - protein, 361 aa, unidentified
  source 1..361: note = Rhizobium freirei
  REGION 1..361: note = tr|N6V262|N6V262_9RHIZ S-adenosylmethionine:tRNA ribosyltransferase-isomerase OS=Rhizobium freirei PRF 81; OX = 363754 GN=queA PE=3 SV=1
MRVDLFDFDLPDERIALRPAEPRDSARLLVVDPNSGANTLSDHQVRDLTSFLRPGDAMVFNDTKVIPAQLEGIRHREGAPGQQVSATLHMRAAPDRWKAFAKPGKRIKIGDRIQFGHGENVCALGTLDATVEEKGEGGEITLRFDLSGPALDEAIAAVGHIPLPPYIAAKRPEDERDRADYQTIYAREEGAVAAPTAGLHFTPSLFAALDALGIERHFVTLHVGAGTFLPVKADDTDDHKMHFEIGYVDAATAAKLNAVKARGGRIVCVGTTSLRLIESASAEDGTIKPWQGATGIFITPGYRFKAVDMLMTNFHLPRSTLFMLVSAFAGLDTMRAAYTHAIETGYRFYSYGDGSLLYRKD

SEQ ID NO: 71286 - protein, 361 aa, Rhizobium galegae
  REGION 1..361: note = tr|A0A5J5KND9|A0A5J5KND9_RHIGA tRNA preQ1(34) S-adenosylmethionine ribosyltransferase-isomerase QueA; OS = Rhizobium galegae OX=399 GN=queA PE=4 SV=1
MRVDLFDFDLPEENIALRPASPRDSARLLVVRPEGEPVLADHRVSDLPGFLKPGDALVFNDTKVIPAQLEGIRHREGAGGQQVSATLHMRVAPDRWKAFAKPGKRIKIGDRIEFGHGGNACLIGSLAATVEDKGEGGEVTLRFDLSGPALDEAIMSVGHIPLPPYIAAKRPEDAQDQKDYQTIYAREEGAVAAPTAGLHFTSELFSSLEAAGVERHFVTLHVGAGTFLPVKADDTAEHKMHQEIGHVSAETAARLNAVKHAGGRIVCVGTTSLRLIESATADDGTINPWSGATGIFITPGYRFKAVDMLMTNFHLPRSTLFMLVSAFCGLETMRAAYAHAIETGYRFYSYGDSSLLFRDNR

SEQ ID NO: 71287 - protein, 339 aa, Rhizobium gallicum
  REGION 1..339: note = tr|A0A0B4XCE9|A0A0B4XCE9_9RHIZ S-adenosylmethionine:tRNA ribosyltransferase-isomerase; OS = Rhizobium gallicum bv. gallicum R602 OX=1418105; GN = RGR602_PC00217 PE=3 SV=1
MTADDRSDQRSARLFVVEADGIMRDLPRTRLATLFDAGDLVVANDAATLPASLHGTHVPSGKLIEIRLAGWRLLHDPRRFVALAFGSGDHRTRTEDRLPPPSLSTGDHLRLGPLEAVVERVLYHPLLFELCFQGSRAAVLAGLAQHGRPIQYAHVPEPLALWDVWTKIAALPFAFEAPSAGFALDWRTLQTWRQRDVGFATLTHAAGVSSTGDPALDSRLPLDEPYRIPERTAAHVAQVKLRGSRIIAIGTSVVRALEAAADPDGSVRVGNGIATGRIARGTPLRVVDAIITGVHQPGESHFELLRAFADDGLLAKVSAALTACGYRAHEFGDSVLLNC

SEQ ID NO: 71288 - protein, 361 aa, Rhizobium gallicum
  REGION 1..361: note = tr|A0A0B4X3C8|A0A0B4X3C8_9RHIZ S-adenosylmethionine:tRNA ribosyltransferase-isomerase; OS = Rhizobium gallicum bv. gallicum R602 OX=1418105 GN=queA; PE = 3 SV=1
MRVDLFDFDLPDERIALRPAEPRDSARLLVIDPHAEPALGDHAVGELPSFLRAGDALVFNDTKVIPAQLEGVRHREGAGGQQVSATLHMRVGASRWKAFSKPGKRIKVGDRIAFGHCGESCFLGQLDCTVEEKGEGGEVTLAFDLSGPALDEAIASVGHIPLPPYIAAKRPDDERDRTDYQTIYAREEGAVAAPTAGLHFTPRLFEAIDKAGVERHFVTLHVGAGTFLPVKADDTNDHKMHLESGYVSAETAAKLNAVKARGGRIICVGTTSLRLIESATADDGGIRAWAGATGIFITPGYRFKAVDILMTNFHLPRSTLFMLVSAFAGFETMQAAYKHAISTGYRFYSYGDASLLFRKDR

SEQ ID NO: 71289 - protein, 360 aa, unidentified
  source 1..360: note = Rhizobium grahamii
  REGION 1..360: note = tr|A0A370KS21|A0A370KS21_9RHIZ S-adenosylmethionine:tRNA ribosyltransferase-isomerase; OS = Rhizobium grahamii OX=1120045 GN=queA PE=3 SV=1
MRVDLFDFDLPDERIALRPAEPRDSARLLVIDPGGAVQLSDHRVSELPSFLRAGDALVFNDTKVIPAQLEGIRHREGAGGQQVSATLHMRIGASRWKAFAKPGKRIKIGDRISFGHDGGSCLLGKLECTVEEKGEGGEVTLAFDLSGPMLDEAIQSVGHIPLPPYIAAKRAEDERDRADYQTIYAREEGAVAAPTAGLHFTADLFEAIDKAGVERHFVTLHVGAGTFLPVKADDTDDHKMHLESGCVSAETAASLNAVKARGGRIICVGTTSLRLIESAAQENGEIRAWAGATGIFITPGYRFKAVDMLMTNFHLPRSTLFMLVSAFAGFETMRAAYSHAISTGYRFYSYGDSSLLFRKD

SEQ ID NO: 71290 - protein, 360 aa, unidentified
  source 1..360: note = Rhizobium grahamii
  REGION 1..360: note = tr|S3I0C4|S3I0C4_9RHIZ S-adenosylmethionine:tRNA ribosyltransferase-isomerase OS=Rhizobium grahamii CCGE 502 OX=990285 GN=queA PE=3 SV=1
MRVDLFDFDLPDERIALRPAEPRDSARLLVVDPGGEVQLSDHRVSELPSFLRAGDALVFNDTKVIPAQLEGIRHREGAGGQQVSATLHMRVGASRWKAFAKPGKRIKIGDRISFGHDGGSCLLGKLECTVEEKGEGGEVTLAFDLSGPMLDEAIHSVGHIPLPPYIAAKRAEDERDRADYQTIYAREEGAVAAPTAGLHFTADLFEAIDKAGVERHFVTLHVGAGTFLPVKADDTDDHKMHLESGYVSAETAASLNAVKARGGRIICVGTTSLRLIESAAQENGEIRAWAGATGIFITPGYRFKAVDMLMTNFHLPRSTLFMLVSAFAGFETMRAAYSHAISTGYRFYSYGDSSLLFRKD

SEQ ID NO: 71291 - protein, 361 aa, Rhizobium hainanense
  REGION 1..361: note = tr|A0A1C3UPC0|A0A1C3UPC0_9RHIZ S-adenosylmethionine:tRNA ribosyltransferase-isomerase; OS = Rhizobium hainanense OX=52131 GN=queA PE=3 SV=1
MRVDLFDFDLPDERIALRPAEPRDSARLLVVDPNNGANTLSDHQVRDLPSFLRPGDAIVFNDTKVIPAQLEGIRHREGAPGQHVSATLHMRAAPDRWKAFAKPGKRIKIGDRIQFGHGENVCALGSLDATVEEKGEGGEITLRFDLSGPALDEAIASVGHIPLPPYIAAKRPEDDRDRADYQTIYAREEGAVAAPTAGLHFTPSLFAALDALGVERHFVTLHVGAGTFLPVKADDTDDHKMHFEIGHVDAATAEKLNAVKARGGRIVCVGTTSLRLIESAAADDGTIKPWQGATGIFITPGYRFKAVDMLMTNFHLPRSTLFMLVSAFAGLDTMRAAYTHAIETGYRFYSYGDGSLLHRKD

SEQ ID NO: 71292 - protein, 361 aa, unidentified
  source 1..361: note = Rhizobium hidalgonense
  REGION 1..361: note = tr|A0A2A6KI17|A0A2A6KI17_9RHIZ S-adenosylmethionine:tRNA ribosyltransferase-isomerase; OS = Rhizobium hidalgonense OX=1538159 GN=queA PE=3 SV=1
MRVDLFDFDLPDERIALRPAEPRDSARLLVVDPNAGSVLSDHRVSDLASFLRAGDALVFNDTKVIPAQLEGIRHRDGAGGQQVSATLHMRVGPSRWKAFAKPGKRIKEGDRISFGHSGESCFLGSLDATVEEKGEAGEVTLAFDLSGPALDEAIAAVGHIPLPPYIAAKRPEDERDRADYQTIYAREDGAVAAPTAGLHFTPGLFEALDRAGIERDFVTLHVGAGTFLPVKADDTADHKMHLETGTVSAEAAARLNAVKARGGRIICVGTTSLRLIESAAEESGEIKPWAGATGIFITPGYRFKAVDMLMTNFHLPRSTLFMLVSAFSGFETMHAAYNHAISTGYRFYSYGDASLLFRKDT

SEQ ID NO: 71293 - protein, 364 aa, unidentified
  source 1..364: note = Rhizobium ipomoeae
  REGION 1..364: note = tr|A0A4S8PAZ4|A0A4S8PAZ4_9RHIZ S-adenosylmethionine:tRNA ribosyltransferase-isomerase; OS = Rhizobium ipomoeae OX=1210932 GN=queA PE=3 SV=1
MRVDLFDFDLPDENIALRPASPRDHARFLVVRPEADPILGDHHVYDLPSFLKPGDALVFNDTKVIPAQLEGIRHREGAEEIAVSCTLHMRVGASRWKAFAKPGKRIKQGDRIDFAMGQGEGAACLMGSLVATVAEKGEAGEIELAFDLSGPDLDQVIANVGHIPLPPYIAAKRPEDGQDRVDYQTIYAREEGAVAAPTAGLHFTPDLFAALDAAGIERHFLTLHVGAGTFLPVKADDTAEHKMHEEIGYISPSTAAALNAVRARGNRIVAVGTTSLRLLESAAADDGHIPAWSGATDIFITPGYRFKAVDMLMTNFHLPKSTLFMLVSAFAGLDTMRAAYAHAIETGYRFYSYGDSSLLFRKDD

SEQ ID NO: 71294 - protein, 361 aa, unidentified
  source 1..361: note = Rhizobium jaguaris
  REGION 1..361: note = tr|A0A387FTN3|A0A387FTN3_9RHIZ S-adenosylmethionine:tRNA ribosyltransferase-isomerase; OS = Rhizobium jaguaris OX=1312183 GN=queA PE=3 SV=1
MRVDLFDFDLPDERIALRPAEPRDSARLLVVDPNNSEATLRDYRVRDLPSFLRPGDAVVFNDTKVIPAQLEGIRHREGAPGQQVSATLHMRAAPDRWKAFAKPGKRIKIGDRIQFGHGENVCILGALDAVVEEKGEGGEITLRFDLSGPALDEAIAAVGHIPLPPYIAAKRPEDERDRADYQTIYAREEGAVAAPTAGLHFTPSLFAALDAMDVERHFVTLHVGAGTFLPVKADDTEDHKMHFEIGYVDAMTATKLNTVKARGGRIVCVGTTSLRLIESAAGNDGTIKPWSGATGIFITPGYRFKAVDLLMTNFHLPRSTLFMLVSAFAGLDTMRAAYTHAVETGYRFYSYGDGSLLYRKD

SEQ ID NO: 71295 - protein, 350 aa, unidentified
  source 1..350: note = Rhizobium jaguaris
  REGION 1..350: note = tr|A0A387G7E5|A0A387G7E5_9RHIZ S-adenosylmethionine:tRNA ribosyltransferase-isomerase; OS = Rhizobium jaguaris OX=1312183 GN=CCGE525_32705 PE=3 SV=1
MIAADHSNPHSARLFVIEADGTMRDLPRGGLGTLFDPGDLVVANDAATLPASLHGTHLPSDQAIEIRLAGWVSRSDPARFVAIAFGPGDHRTRTEDRLPPPPLSAGDRLRLGPLEAAIERLRGHPRLVELRFLNNHAAVLAGLARHGRPIQYAHVPEPVALWDVWTKIAASPFAFEAPSAGFALDWRTLQAWRRRAIGFTTLTHAAGVSSTGDPTLDLRLPFDEPYRIPEHTAAQVARAKLRGSRIIAIGTSVVRALEAAANPDGSVRAGDGIATGRIARGMPVRVVDSILTGIHQPGESHFELLRAFADDARLARTSASLTAYGYRAHEFGDSMLLNRQPLLLSTGRGA

SEQ ID NO: 71296 - protein, 361 aa, unidentified
  source 1..361: note = Rhizobium laguerreae
  REGION 1..361: note = tr|A0A1S9G7L7|A0A1S9G7L7_9RHIZ S-adenosylmethionine:tRNA ribosyltransferase-isomerase; OS = Rhizobium laguerreae OX=1076926 GN=queA PE=3 SV=1
MRVDLFDFDLPDERIALRPAEPRDSARLLVIDPNAENSLSDHRVGDLTSFLRPGDALVFNDTKVIPAQLEGIRHRDGAGGQQVSATLHMRTGPSRWKAFAKPGKRIKQGDRISFGHSGESCFLGSLDATVGEKGEAGEVTLLFDLSGPALDEAIAAVGHIPLPPYIAAKRPEDERDRADYQTIYAREEGAVAAPTAGLHFTPGLFEALDRAGIERHFVTLHVGAGTFLPVKADDTADHKMHLESGYVSAEIAARLNAVRERGGRIICVGTTSLRLIESAAAESGEIMPWAGATGIFITPGYRFKAVDMLMTNFHLPRSTLFMLVSAFAGLETMHAAYQHAISTGYRFYSYGDASLLFRKDR

SEQ ID NO: 71297 - protein, 361 aa, unidentified
  source 1..361: note = Rhizobium laguerreae
  REGION 1..361: note = tr|A0A4R3R4L1|A0A4R3R4L1_9RHIZ S-adenosylmethionine:tRNA ribosyltransferase-isomerase; OS = Rhizobium laguerreae OX=1076926 GN=queA PE=3 SV=1
MRVDLFDFDLPYERIALRPAEPRDSACLLVIDPNAENSLSDHRVGDLTSFLRPGDALVFNDTKVIPAQLEGIRHRDGAGGQQVSATLHMRTGPSRWKAFAKPGKRIKQGDRISFGHSGESCFLGSLDATVEEKGEAGEVTLLFDLSGPALDEAIAAVGHIPLPPYIAAKRPEDERDRADYQTIYAREEGAVAAPTAGLHFTPGLFEALDRAGIERHFVTLHVGAGTFLPVKADDTADHKMHLESGYVSAEIAARLNAVRERGGRIICVGTTSLRLIESAAAESGEIMPWAGATGIFITPGYRFKAVDMLMTNFHLPRSTLFMLVSAFAGLETMHAAYQHAISTGYRFYSYGDASLLFRKDR

SEQ ID NO: 71298 - protein, 361 aa, Rhizobium leguminosarum
  REGION 1..361: note = tr|A0A4Q8XYP5|A0A4Q8XYP5_RHILE S-adenosylmethionine:tRNA ribosyltransferase-isomerase; OS = Rhizobium leguminosarum OX=384 GN=queA PE=3 SV=1
MRVDLFDFDLPDERIALRPAEPRDSARLLVVDPNAENSLSDHRVGDLTSFLRAGDALVFNDTKVIPAQLEGIRHRDGAGGQQVSATLHMRTGPSRWKAFAKPGKRIKEGDRIAFGHSGESCSLGSLDATVEHKGEAGEVTLLFDLSGPALDEAIAAVGHIPLPPYIAAKRPEDERDRTDYQTIYAREEGAVAAPTAGLHFTPALFEALDKAGIERHFVTLHVGAGTFLPVKADDTADHKMHLESGYVSAEIAARLNAVRERGGRIVCVGTTSLRLIESAAAESGEIMPWAGATGIFITPGYRFKAVDMLMTNFHLPRSTLFMLVSAFAGLETMHAAYKHAISTGYRFYSYGDASLLFRKDK

SEQ ID NO: 71299 - protein, 379 aa, Rhizobium leguminosarum; identical to SEQ ID NO: 71271
  REGION 1..379: note = sp|B5ZPR8|QUEA_RHILW S-adenosylmethionine:tRNA ribosyltransferase-isomerase OS=Rhizobium leguminosarum bv. trifolii (strain WSM2304) OX=395492 GN=queA PE=3 SV=1

SEQ ID NO: 71300 - protein, 361 aa, Rhizobium loessense
  REGION 1..361: note = tr|A0A1G4T345|A0A1G4T345_9RHIZ S-adenosylmethionine:tRNA ribosyltransferase-isomerase; OS = Rhizobium loessense OX=158890 GN=queA PE=3 SV=1
MRVDLFDFDLPDERIALRPAEPRDSARLLVIDPHAQPVLGDHAVSDLPSFLRAGDALVFNDTKVIPAQLEGVRHREGAGAQQVSATLHMRVGASRWKAFSKPGKRIKIGDRIAFGHDGESCFLGQLDCTVEEKGEGGEVTLAFDLSGPALDEAIASVGHIPLPPYIAAKRPDDVRDRTDYQTIYAREEGAVAAPTAGLHFTPRLFEAIDKAGVERHFVTLHVGAGTFLPVKADDTNDHKMHLESGYVSAETAAKLNAVKARGGRIICVGTTSLRLIESATADDGRIRAWAGATGIFITPGYRFKTVDILMTNFHLPRSTLFMLVSAFAGFETMQVAYKHAISTGYRFYSYGDASLLFRKDR

SEQ ID NO: 71301 - protein, 362 aa, unidentified
  source 1..362: note = Rhizobium loti
  REGION 1..362: note = tr|A0A1B4YEF3|A0A1B4YEF3_RHILI S-adenosylmethionine:tRNA ribosyltransferase-isomerase; OS = Rhizobium loti OX=381 GN=queA PE=3 SV=1
MRVDLFDFDLPEERIALRPAEPRDSAKMLVVKPGEALDDRRVGDLPSLLRAGDVLVFNDTKVIPAQLKGIRRRGEAQAQVEATLHMRVAPDRWLAFMRPGKRIAAGDRIHFGHDGNSCFLGQLDATVIEKGEGGEALLGFDLSGPFLDEALHAVGHIPLPPYIASKRDDDERDRADYQTIYAREEGAVAAPTAGLHFTPELFAALDAKGVERHFVTLHVGAGTFLPVKADDTADHKMHAETGSVGRETADALNAAKARGGRIIAVGTTSLRLLESAAREDGTVPAWSGPTDIFITPGYRFRTADMLMTNFHLPRSTLFMLVSAFSGLGMMRAAYAHAIANRYRFYSYGDASLLYRAEISDGR

SEQ ID NO: 71302 - protein, 360 aa, unidentified
  source 1..360: note = Rhizobium loti
  REGION 1..360: note = tr|A0A2T3E443|A0A2T3E443_RHILI S-adenosylmethionine:tRNA ribosyltransferase-isomerase; OS = Rhizobium loti OX=381 GN=queA PE=3 SV=1
MRVDLFDFDLPENSIALRPASPRDSARMLVVRPDGAPVLEDRGVLDLPSFLRPGDALVFNDTKVIPAQLEGVRYRGEDISTPVSLTLHMRVAPSRWKAFARPARRLKPGDRISFGHGGNACLLGSLEAVVEEKGDAGEVTLRFDLSGPSLDEAIMAVGHIPLPPYIASKRADDEQDRTDYQTVYAREEGAVAAPTAGLHFTDRLFAKLDEGGIERYFVTLHVGAGTFLPVKADDTADHVMHEEIGHVDPVTAAKLNAVRERGGRIVCVGTTSLRLIESAAAEDGNIRPWSGATGIFITPGYRFRAVDMLMTNFHLPKSTLFMLVSAFAGLETMHAAYAHAIATGYRFYSYGDSSLLFRKD

SEQ ID NO: 71303 - protein, 361 aa, Rhizobium lusitanum
  REGION 1..361: note = tr|A0A1C3VHD8|A0A1C3VHD8_9RHIZ S-adenosylmethionine:tRNA ribosyltransferase-isomerase; OS = Rhizobium lusitanum OX=293958 GN=queA PE=3 SV=1
MRVDLFDFDLPDERIALRPADPRDNARLLVVDPNDRANTLSDHLVRDLPSFLRPGDAVVFNDTRVIPAQLEGIRHREGAPGQQVSATLHMRSAPDRWKAFARPGKRIKIGDRIQFGHGETVCSLGTLDATVEDKGEGGEITLRFDLSGPALDEAIATVGHIPLPPYIAAKRAEDERDRADYQTIYAREEGAVAAPTAGLHFTPALFAALDAMGVERHFVTLHVGAGTFLPVKADDTDDHKMHFEIGYVDAGTAVKLNAVKARGGRIICVGTTSLRLIESAADDDGTIQPWQGATGIFITPGYRFKAVDMLMTNFHLPRSTLFMLVSAFAGLDTMRAAYTHAIETGYRFYSYGDGSLLYRKD

SEQ ID NO: 71304 - protein, 360 aa, unidentified
  source 1..360: note = Rhizobium meliloti
  REGION 1..360: note = tr|A0A222JR68|A0A222JR68_RHIML S-adenosylmethionine:tRNA ribosyltransferase-isomerase; OS = Rhizobium meliloti OX=382 GN=queA PE=3 SV=1
MRVDLFDFDLPENSIALRPASPRDSARMLVVRPDGAPVLEDRGVLDLPSFLRPGDALVFNDTKVIPAQLEGVRYRGEDISTPVSLTLHMRVAPSRWKAFARPARRLKPGDRISFGHGGNACLLGSLEAVVEEKGDAGEVTLRFDLSGPSLDEAIMAVGHIPLPPYIASKRADDERDRTDYQTVYAREEGAVAAPTAGLHFTDRLFAKLDEGGIERYFVTLHVGAGTFLPVKADDTADHVMHEEIGHVDPVTAAKLNAVRERGGRIVCVGTTSLRLIESAAAEDGNIRPWSGATGIFITPGYRFRAVDMLMTNFHLPKSTLFMLVSAFAGLETMHAAYAHAIATGYRFYSYGDSSLLFRKD

SEQ ID NO: 71305 - protein, 360 aa, unidentified
  source 1..360: note = Rhizobium meliloti
  REGION 1..360: note = sp|Q92PY5|QUEA_RHIME S-adenosylmethionine:tRNA ribosyltransferase-isomerase OS=Rhizobium meliloti (strain 1021) OX=266834 GN=queA PE=3 SV=1
MRVDLFDFDLPENSIALRPASPRDSARMLVVRPDGAPVLEDRGVLDLPSFLRPGDALVFNDTKVIPAQLEGVRYRGEDISTPVSLTLHMRVAPSRWKAFARPARRLKPGDRISFGHGGSACLLGSLEAVVEEKGDAGEVTLRFDLSGPSLDEAIMAVGHIPLPPYIASKRADDERDRTDYQTVYAREEGAVAAPTAGLHFTDRLFAKLDEGGIERYFVTLHVGAGTFLPVKADDTADHVMHEEIGHVDPVTAAKLNAVRERGGRIVCVGTTSLRLIESAAAEDGNIRPWSGATGIFITPGYRFRAVDMLMTNFHLPKSTLFMLVSAFAGLETMHAAYAHAIATGYRFYSYGDSSLLFRKD

SEQ ID NO: 71306 - protein, 347 aa, unidentified
  source 1..347: note = Rhizobium mesoamericanum
  REGION 1..347: note = tr|K0Q5G6|K0Q5G6_9RHIZ S-adenosylmethionine:tRNA ribosyltransferase-isomerase OS=Rhizobium mesoamericanum STM3625 OX=1211777 GN=BN77_p11183 PE=3 SV=1
MIAADRLDRHSARLLVIEADGSMRHLQRAKFETLFDPGDLVIANDAATLPASLHGTHLPSDKLIEIRLAGWLSLSDPARFVAIAFGSGDHHTRTEDRLPPPGLSVGDRLRLGPLEAMIERLLGHPRLLELRFLSNRAAVFAGLARHGRPIQYAHVAEPLPLWDVWTKIAAAPVAFEAPSASFALDWHTLQAWRRRAVGFSTLTHAAGVSSTGDPALDLRLPFDEPYYIPRHTAVEIARAKLRGGRIVAIGTSVVRALEAATDCDGNVSAGGGVATGRIGRGTRLRVVDAVLTGVHQPGESHFELLRAFAEDDRLARASATLTACRYRTHEFGDSVLLHRQPTLLSRE

SEQ ID NO: 71307 - protein, 360 aa, unidentified
  source 1..360: note = Rhizobium mesoamericanum
  REGION 1..360: note = tr|K0PP63|K0PP63_9RHIZ S-adenosylmethionine:tRNA ribosyltransferase-isomerase OS=Rhizobium mesoamericanum STM3625 OX=1211777 GN=queA PE=3 SV=1
MRVDLFDFDLPDERIALRPAEPRDSARLLVVDPAGAVQLSDYRVSDLPAFLRAGDALVFNDTKVIPAQLEGVRHRDGAGGQQVSATLHMRIGASRWKAFAKPGKRIKIGDRISFGHDGSSCLLGKLECTVEEKGEGGEVTLAFDLSGPILDEAIHSVGHIPLPPYIAAKRAEDERDRADYQTIYAREEGAVAAPTAGLHFTPALFEAIDKAGVERHFVTLHVGAGTFLPVKADDTEDHKMHLESGYVSAETAASLNAVRARGGRIICVGTTSLRLIESAAQENGEIRAWAGATGIFITPGYRFKTVDVLMTNFHLPRSTLFMLVSAFAGFETMQVAYKYAISTGYRFYSYGDSSLLFRKD

SEQ ID NO: 71308 - protein, 361 aa, Rhizobium miluonense
  REGION 1..361: note = tr|A0A1C3X0K5|A0A1C3X0K5_9RHIZ S-adenosylmethionine:tRNA ribosyltransferase-isomerase; OS = Rhizobium miluonense OX=411945 GN=queA PE=3 SV=1
MRVDLFDFDLPDERIALRPAEPRDSARLLVVDPNNEANTLSDHQVRDLPSFLRPGDAMVFNDTRVIPAQLEGIRYREGAPGQQVSATLHMRVAPDRWKAFAKPGKRIKIGDRIQFGHGENVCALGTLDATVEDKGEGGEITLRFDLSGPALDEAIATVGHIPLPPYIAAKRSEDERDRADYQTIYAREEGAVAAPTAGLHFTPPLFAALDAMGIERHFVTLHVGAGTFLPVKSDDTDDHKMHFEIGYVDAATAAKLNAVKARGGRIVCVGTTSLRLIESAAADDGTIKPWQGATGIFITPGYRFKAVDMLMTNFHLPRSTLFMLVSAFAGLDTMRAAYTHAIETGYRFYSYGDGSLLYRKD

SEQ ID NO: 71309 - protein, 361 aa, Rhizobium mongolense
  REGION 1..361: note = tr|A0A559SNP0|A0A559SNP0_9RHIZ S-adenosylmethionine:tRNA ribosyltransferase-isomerase; OS = Rhizobium mongolense USDA 1844 OX=1079460 GN=queA PE=3; SV = 1
MRVDLFDFDLPDERIALRPAEPRDSARLLVIDPHAQPVLGDHAVSDLPSFLRAGDALVFNDTKVIPAQLEGIRHREGAGGQQVSATLHMRVGASRWKAFSKPGKRIKIGDRIAFGHDGESCFLGQLDCTVEEKGEGGEVTLAFDLSGPALDEAIAAVGHIPLPPYIAAKRPDDVRDRTDYQTIYAREEGAVAAPTAGLHFTPRLFEAIDKAGVERHFVTLHVGAGTFLPVKADDTDDHKMHLESGYVSAETAAKLNAVKARGGRIICVGTTSLRLIESATADDGRIRAWAGATGIFITPGYRFKTVDILMTNFHLPRSTLFMLVSAFAGFETMQAAYKHAISTGYRFYSYGDASLLFRKDR

SEQ ID NO: 71310 - protein, 361 aa, Rhizobium multihospitium
  REGION 1..361: note = tr|A0A1C3WM81|A0A1C3WM81_9RHIZ S-adenosylmethionine:tRNA ribosyltransferase-isomerase; OS = Rhizobium multihospitium OX=410764 GN=queA PE=3 SV=1
MRVDLFDFDLPDERIALRPAEPRDSARLLVVDPNGGANTLSDHQVRDLPSFLRPGDAVVFNDTKVIPAQLEGIRHREGAPGQQVSATLHMRTAPDRWKAFAKPGKRIKIGDRIQFGHGENVCALGSLDATVEEKGEGGEITLRFDLSGPALDEAIASVGHIPLPPYIAAKRPEDERDRADYQTIYAREEGAVAAPTAGLHFTPSLFAALDALGVERHFVTLHVGAGTFLPVKADDTDDHKMHFEIGYVDAVTAEKLNAVKARGGRIVCVGTTSLRLIESAASDDGTIQPWQGATGIFITPGYRFKAVDMLMTNFHLPRSTLFMLVSAFAGLDTMRAAYTHAIETGYRFYSYGDGSLLYRKD

SEQ ID NO: 71311 - protein, 362 aa, unidentified
  source 1..362: note = Rhizobium naphthalenivorans
  REGION 1..362: note = tr|A0A512HD11|A0A512HD11_9RHIZ S-adenosylmethionine:tRNA ribosyltransferase-isomerase; OS = Rhizobium naphthalenivorans OX=1118451 GN=queA PE=3 SV=1
MRVDQFDFDLPDENIALRPVSPRDHSRMLVVRPDGESVLEDAHVYDLPSFLQPGDALVFNDTKVIPAQLEGVRLRDGAERTPVSATLHMRVDGARWKAFARPGKRIKVGDRIEFGHSGNDACLLGTLRAVVEEKGEAGEVTLRFDFSGASLDEAIATVGHIPLPPYIASKRHEDEKDRSDYQTMYAREEGAVAAPTAGLHFTPDLFARLDAAGIERHFVTLHVGAGTFLPVKAEDTADHKMHHEIGHVSAKTAAALNAVKARGGRIVSVGTTSLRLLESATTDSGEVQAWSGSTDIFITPGYRFKAVDVLMTNFHLPKSTLFMLVSAFAGFETMQGAYAHAITDGYRFYSYGDSSLLFRKDT

SEQ ID NO: 71312 - protein, 360 aa, unidentified
  source 1..360: note = Rhizobium nepotum
  REGION 1..360: note = tr|A0A0D8KAR0|A0A0D8KAR0_9RHIZ S-adenosylmethionine:tRNA ribosyltransferase-isomerase; OS = Rhizobium nepotum 39/7 OX=1368418 GN=queA PE=3 SV=1
MRVDLFDFDLPEENIALRPANPRDSARLLVVDPDANRMEDHRVFDLISFLKPGDALVFNDTRVIPAQLEGVRLREGAPETAVSATLHMRADQSRWKAFARPGKRIKAGDRIRFGYERDNACGLAHLEATVEEKGDEGEITLLFDVSGPVLDEAIASVGHIPLPPYIAAKRPEDAQDQIDYQTIYAREKGAVAAPTAGLHFTPALFEALDNAGIERHFVTLHVGAGTFLPVKSDDTDDHKMHFEIGHVSEETAAKLNAVKARGGRIVSVGTTSLRLIESATDENGVIHPWSGATGIFITPGYRFRAVDILMTNFHLPKSTLFMLVSAFCGLETMRDAYAHAIETGYRFYSYGDSSLLFRKN

SEQ ID NO: 71313 - protein, 355 aa, Rhizobium oryzae
  REGION 1..355: note = tr|A0A1Q9AWM4|A0A1Q9AWM4_9RHIZ S-adenosylmethionine:tRNA ribosyltransferase-isomerase; OS = Rhizobium oryzae OX=464029 GN=queA PE=3 SV=1
MRVDLFDFDLPDAAIALRPAQPRDAARLLVVRPDATADEVLADHGVLDLPDFLEPGDALVFNDTKVIPAQLQGIRRRGPDVATEVDFTLHMRIGAGSWKAFARPAKRLKPGDQVTFGPDLTAEITEKGEAGEVTLAFDRSGPALDQVIMTVGHIPLPPYIAAKRPEDEKDRADYQTIYAREEGAVAAPTAGLHFTERLFAALEARGIERHFVTLHVGAGTFLPVKVEDTDAHLMHQEIGYVSTETAAALNAVKARGGRIVCVGTTSLRLIESAANDDGTLKPWSGATGIFITPGYRFRAVDLLMTNFHLPRSTLFMLVSAFCGLETMHRAYAHAIQTGYRFYSYGDTSLLFRKTS

SEQ ID NO: 71314 - protein, 380 aa, Rhizobium oryzae
  REGION 1..380: note = tr|A0A1X7GG09|A0A1X7GG09_9RHIZ S-adenosylmethionine:tRNA ribosyltransferase-isomerase; OS = Rhizobium oryzae OX=464029 GN=queA PE=3 SV=1
MARSAFGGAGFAFLEVQARMRVDLFDFDLPEESIALRPASPRDSARLLVVRPDGEPVLSDHRVSELPGFLKSGDALVFNDTKVIPAQLEGIRHREGAGGQQVSATLHMRAAPDIWKAFARPGKRIKIGDRIEFGHGGNACLLGSLAATVEEKGEGGEVTLRFDLSGPALDEAIMAVGHIPLPPYIAAKRPEDDQDRKDYQTIYAREEGAVAAPTAGLHFTPELFAALDAAGIERHFVTLHVGAGTFLPVKADDTEDHKMHQEIGYVSAETAARLNAVRRRGGRIVSVGTTSLRLIESAAAEDGTIKPWSGATGIFITPGYRFKAVDMLMTNFHLPRSTLFMLVSAFSGLETMRSAYAHAIEAGYRFYSYGDSSLLFRTDK

SEQ ID NO: 71315 - protein, 352 aa, unidentified
  source 1..352: note = Rhizobium oryziradicis
  REGION 1..352: note = tr|A0A1Q8ZPF4|A0A1Q8ZPF4_9RHIZ S-adenosylmethionine:tRNA ribosyltransferase-isomerase; OS = Rhizobium oryziradicis OX=1867956 GN=queA PE=3 SV=1
MRVDLFDFDLPEENIALRLASPRDHARFLAVRPNGQPMLEDRQVFDLPSFLKAGDALVFNDTKVIPAQLEGVRLREGAERTPVSCTLHMRVAANSWKAFARPGKRIKQGDSIDFNGLLATVAAKGDAGEIDLVFDASGPELDQAIASVGHIPLPPYIAAKRPEDGQDKQDYQTIYAREEGAVAAPTAGLHFTPALFDALDKAGIERHFVTLHVGAGTFLPVKADDTNDHKMHQEIGHVSKATADALNAVRARGGRIVSVGTTSLRLLESASGDDGQVLPWSGATGIFITPGYRFKAVDMLMTNFHLPKSTLFMLVSAFAGMETMRAAYAHAIETGYRFYSYGDSSLLFRKDD

SEQ ID NO: 71316 - protein, 373 aa, Rhizobium phaseoli
  REGION 1..373: note = tr|A0A0M3GV63|A0A0M3GV63_9RHIZ S-adenosylmethionine:tRNA ribosyltransferase-isomerase; OS = Rhizobium phaseoli Ch24-10 OX=1128399 GN=queA PE=3 SV=1
MRVDLFDFDLPDERIALRPAEPRDSARLLVVNPHAESGPHAESVPHAESALSDHHVYDLPSFLRAGDALVFNDTKVIPAQLEGIRHRDGAGGQQVSATLHMRIGPSRWKAFAKPGKRIKEGDRIAFGHSGESCFLGALDATVEEKGEAGEVTLAFDLTGPALDEAIAAVGHIPLPPYIAAKRPEDERDRADYQTIYAREEGAVAAPTAGLHFTPDLFAALDKAGIERHFVTLHVGAGTFLPVKADDTDDHKMHLESGYVSAEIAARLNAVKARGGRIVCVGTTSLRLIESAAGEDGKIKPWAGATGIFITPGYRFKAVDMLMTNFHLPRSTLFMLVSAFSGFDTMRAAYEHAISTGYRFYSYGDASLLFRKDK

SEQ ID NO: 71317 - protein, 373 aa, Rhizobium phaseoli
  REGION 1..373: note = tr|A0A2U3CZ41|A0A2U3CZ41_9RHIZ S-adenosylmethionine:tRNA ribosyltransferase-isomerase; OS = Rhizobium phaseoli OX=396 GN=queA PE=3 SV=1
MRVDLFDFDLPDERIALRPAEPRDSARLLVVNPHAESGPHAESVPHAESALSDHHVYDLPSFLRAGDALVFNDTKVIPAQLEGIRHRDGAGGQQVSATLHMRIGPSRWKAFAKPGKRIKEGDRIAFGHSGESCFLGALDATVEEKGEAGEVTLAFDLTGPALDEAIAAVGHIPLPPYIAAKRPEDERDRADYQTIYAREEGAVAAPTAGLHFTPDLFAALDKAGIERHFVTLHVGAGTFLPVKADDTDDHKMHLESGYVSAEIAARLNAVKARGGRIVCVGTTSLRLIESAAGEDGKIKPWAGATGIFITPGYRFNAVDMLMTNFHLPRSTLFMLVSAFSGFETMHAAYEHAISTGYRFYSYGDASLLFRKDK

SEQ ID NO: 71318 - protein, 361 aa, Rhizobium pisi
  REGION 1..361: note = tr|A0A3R9GUN2|A0A3R9GUN2_9RHIZ S-adenosylmethionine:tRNA ribosyltransferase-isomerase; OS = Rhizobium pisi OX=574561 GN=queA PE=3 SV=1
MRVDLFDFDLPDERIALRPAEPRDSARLLVVDPNGQTMLTDHRASDLPSFLRAGDALVFNDTKVIPAQLEGIRHREGAGGQQMSATLHMRVGANKWKAFAKPGKRIKEGDRIAFGHSGESCMIGSLDATVEEKGEAGEVTLAFDLSGPALDEAIAAVGHIPLPPYIAAKRPEDERDRADYQTIYAREKGAVAAPTAGLHFTPALFEALDKAGIERHFVTLHVGAGTFLPVKADDTDDHKMHLESGYVSAETAARLNEVKRSGGRIVCVGTTSLRLIESAAGESGEIKPWASPTGIFITPGYRFKAVDILMTNFHLPRSTLFMLVCAFAGFETMHAAYKQAISTGYRFYSYGDASLLFRKEK

SEQ ID NO: 71319 - protein, 360 aa, Rhizobium pusense
  REGION 1..360: note = tr|A0A4U1K6W0|A0A4U1K6W0_9RHIZ S-adenosylmethionine:tRNA ribosyltransferase-isomerase; OS = Rhizobium pusense OX=648995 GN=queA PE=3 SV=1
MRVDLFDFDLPEENIALRPANPRDSARLLVVDPNENRMEDHRVFDLPSFLRAGDALVFNDTRVIPAQLEGVRLREGAPETAVSATLHMRADQSRWKAFARPGKRIKQGDRIRFGYERDNACGLAHLEATVEQKGEEGEITLLFDVSGPVLDEAIASVGHIPLPPYIAAKRPEDAQDQTDYQTIYAREKGAVAAPTAGLHFTPDLFAALDKAGIERHFVTLHVGAGTFLPVKADDTDDHKMHFEIGHVSQETADRLNAVKARGGRIVCVGTTSLRLIESAAAEDGIIHPWSDATGIFITPGYRFRAVDMLMTNFHLPKSTLFMLVSAFCGLETMRDAYKHAIETGYRFYSYGDSSLLFRKN

SEQ ID NO: 71320 - protein, 360 aa, Rhizobium pusense; identical to SEQ ID NO: 62996
  REGION 1..360: note = tr|A0A1L9CTQ2|A0A1L9CTQ2_9RHIZ S-adenosylmethionine:tRNA ribosyltransferase-isomerase; OS = Rhizobium pusense OX=648995 GN=queA PE=3 SV=1

SEQ ID NO: 71321 - protein, 360 aa, Rhizobium radiobacter
  REGION 1..360: note = tr|A0A5B1APH0|A0A5B1APH0_RHIRD S-adenosylmethionine:tRNA ribosyltransferase-isomerase; OS = Rhizobium radiobacter OX=358 GN=queA PE=3 SV=1
MRVDLFDFDLPEENIALRPANPRDSARLLVVDPNENRMEDHRVFDLPSFLKPGDALVFNDTRVIPAQLEGVRLREGAPETAVSATLHMRADQSRWKAFARPGKRIKEGDRIRFGYERDNACGLAHLEATVEEKGEEGEITLLFDVSGPVLDEAIASVGHIPLPPYIAAKRPEDAQDQTDYQTIYAREKGAVAAPTAGLHFTPDLFEALDGVGVERHFVTLHVGAGTFLPVKSDDTDDHKMHFEIGHVSQETADRLNAVKARGGRIVCVGTTSLRLIESAADENGVIHPWSDATGIFITPGYRFRAVDILMTNFHLPKSTLFMLVSAFCGLETMRAAYAHAIETGYRFYSYGDSSLLFRKN

SEQ ID NO: 71322 - protein, 366 aa, Rhizobium radiobacter
  REGION 1..366: note = tr|A0A176XEF8|A0A176XEF8_RHIRD S-adenosylmethionine:tRNA ribosyltransferase-isomerase; OS = Rhizobium radiobacter OX=358 GN=queA PE=3 SV=1
MRVDLFDFDLPEENIALRPANPRDSARLLVVDPNENRMEDHRVFDLPSFLRPGDALVFNDTRVIPAQLEGVRLREGAPETAVSATLHMRTDQSRWKAFARPGKRIKQGDRIRFGYGRDVVNSSSGACGLAHLEATVEEKGEDGEITLLFDVSGPVLDEAIASVGHIPLPPYIAAKRPEDVRDQTDYQTIYAREKGAVAAPTAGLHFTPELFAALDKAGIERHFVTLHVGAGTFLPVKADDTDDHKMHFEIGHVSQETADRLNAVKARGGRIVCVGTTSLRLIESAAAEDGTIQPWSDATGIFITPGYRFRAVDMLMTNFHLPKSTLFMLVSAFCGLETMRDAYKHAIETGYRFYSYGDSSLLFRKN

SEQ ID NO: 71323 - protein, 354 aa, unidentified
  source 1..354: note = Rhizobium rhizosphaerae
  REGION 1..354: note = tr|A0A1Q9AFU2|A0A1Q9AFU2_9RHIZ S-adenosylmethionine:tRNA ribosyltransferase-isomerase; OS = Rhizobium rhizosphaerae OX=1672749 GN=queA PE=3 SV=1
MRVDLFDFDLPESAIALRPAEPRDSARLLLVHPQETERELADHGVLELPDFLQPGDALVFNDTKVIPAQLQGIRRRGPDVATTVDFTLHMRVAPDRWKAFARPAKRLKSGDAVEFGPELAAEIVEKGDAGEVTLAFDRAGPALDQAIMATGHIPLPPYIAAKRPEDARDRADYQTIYAREEGAVAAPTAGLHFTDRLFAALDARGIERYFVTLHVGAGTFLPVKAEDTDHHVMHQEIGQVSAETAAKLNAVKARGGRIVCVGTTSLRLIESAAREDGQIAPWSGATGIFITPGYRFRAVDGLMTNFHLPRSTLFMLVSAFCGLETMHRAYAHAIASGYRFYSYGDTSLLFRKTS

SEQ ID NO: 71324 - protein, 364 aa, Rhizobium rosettiformans
  REGION 1..364: note = tr|A0A4S8PZB2|A0A4S8PZB2_9RHIZ S-adenosylmethionine:tRNA ribosyltransferase-isomerase; OS = Rhizobium rosettiformans W3 OX=538378 GN=queA PE=3 SV=1
MRVDLFDFDLPDENIALRPASPRDHARFLVVRPDADPVLEDHHVFDLPSFLRPGDALVFNDTKVIPAQLEGIRHREGAEEIAVSCTLHMRVGASRWKAFAKPGKRIKTGDRIDFGAGQGHSAACLMGSLAATVAEKGEAGEIELAFDLSGPDLDQAIATVGHIPLPPYIAAKRPEDEKDRADYQTIYAREEGAVAAPTAGLHFTSDLFAKLDAAGVERHFVTLHVGAGTFLPVKADDTAEHKMHEEIGYISPSTAAALNAVRARGNRIIAVGTTSLRLLESAAEETGHIPAWSGATGIFITPGYRFKAVDMLMTNFHLPKSTLFMLVSAFAGLDTMRNAYAHAIETGYRFYSYGDSSLLFRKDD

SEQ ID NO: 71325 - protein, 361 aa, Rhizobium selenitireducens
  REGION 1..361: note = tr|A0A376AFT7|A0A376AFT7_9RHIZ S-adenosylmethionine:tRNA ribosyltransferase-isomerase; OS = Rhizobium selenitireducens ATCC BAA-1503 OX=1336235; GN = queA PE=3 SV=1
MRVDQFDFDLPDENIALRPISPRDQARLLVVRPDGQPMLEDARVCDLPSFLSPGDALVFNDTKVIPAQLEGVRLRDGAERTPVSATLHMRVDASRWKAFARPGKRIKLGDRIEFGHSGNACLLGTLGAVVEEKGEAGEVTLRFDFSGAALDEAIATVGHIPLPPYIASKRDEDEKDRTDYQTMYAKEEGAVAAPTAGLHFTPDLFARLDAAGIERHFVTLHVGAGTFLPVKAEDTADHKMHHEIGQVSRATASALNAVRARGGRIVSVGTTSLRLLESATSEGGEIQPWSGATDIFITPGYRFRAVDVLMTNFHLPKSTLFMLVSAFAGLDTMRAAYAHAIADGYRFYSYGDASLLFRKDT

SEQ ID NO: 71326 - protein, 360 aa, unidentified
  source 1..360: note = Rhizobium smilacinae
  REGION 1..360: note = tr|A0A5C4XEQ9|A0A5C4XEQ9_9RHIZ S-adenosylmethionine:tRNA ribosyltransferase-isomerase; OS = Rhizobium smilacinae OX=1395944 GN=queA PE=3 SV=1
MRVELFDFDLPEENIALRPANPRDSARFLVVRPEAEPVLADHRVFELPDFLKPGDALVFNDTKVIPAQLEGIRHREGAGGQQVSATLHMRTEQDVWKAFAKPGKRIKVGDRIEFGHGTETCLLGSLMATVEEKGEGGEVTLRFDLSGPALDEAIMSVGHIPLPPYIAAKRAEDEKDRQDYQTIYAREEGAVAAPTAGLHFTPDLFAKLDAASIERHFVTLHVGAGTFLPMKVDDTVDHKMHQEIGYVSAEIAERLNAVKARGGRIVCVGTTSLRLIESAASEDGKILPWSGPTGIFITPGYRFKAVDLLMTNFHLPKSTLFMLVSAFCGLETMRHAYAHAIQTGYRFYSYGDSSLLFRKD

SEQ ID NO: 71327 - protein, 361 aa, unidentified
  source 1..361: note = Rhizobium sophoriradicis
  REGION 1..361: note = tr|A0A2A5KVV7|A0A2A5KVV7_9RHIZ S-adenosylmethionine:tRNA ribosyltransferase-isomerase; OS = Rhizobium sophoriradicis OX=1535245 GN=queA PE=3 SV=1
MRVDLFDFDLPDERIALRPAEPRDSARLLVVDPHAESALSDHHVYDLPSFLRAGDALVFNDTKVIPAQLEGIRHRDGAGGQQVSATLHMRLGPSRWKAFAKPGKRIKEGDRIAFGHSGESCFLGSLDATVEEKGEAGEVTLAFDLTGPALDEAIAAVGHIPLPPYIAAKRPEDERDRADYQTIYAREEGAVAAPTAGLHFTPDLFAALDKAGIERHFVTLHVGAGTFLPVKADDTDDHKMHLESGYVSGEIAARLNAVKARGGRIVCVGTTSLRLIESAAGESGEIKPWAGATGIFITPGYRFKAVDMLMTNFHLPRSTLFMLVSAFSGFETMHAAYEHAISTGYRFYSYGDASLLFRKDQ

SEQ ID NO: 71328 - protein, 360 aa, Rhizobium sp.
  REGION 1..360: note = tr|A0A246U6I4|A0A246U6I4_9RHIZ S-adenosylmethionine:tRNA ribosyltransferase-isomerase; OS = Rhizobium sp. R72 OX=1764278 GN=queA PE=3 SV=1
MRVDLFDFDLPDERIALRPAEPRDSARLLVVDPAGEVQLSDHRVSDLPDFLRAGDALVFNDTKVIPAQLEGIRHREGAGGQQVSATLHMRVGASRWKAFAKPGKRIKIGDRISFGHDGSSCLLGKLECTVEEKGEGGEVTLAFDLSGPMLDEAIHSVGHIPLPPYIAAKRAEDERDRADYQTIYAREEGAVAAPTAGLHFTPDLFEAIDKAGVGRHFVTLHVGAGTFLPVKADDTDDHKMHLESGYVSAETAASLNAVKARGGRIICVGTTSLRLIESAAQENGEIRAWAGATGIFITPGYSFKAVDMLMTNFHLPRSTLFMLVSAFAGFETMHAAYQHAISTGYRFYSYGDSSLLFRKD

SEQ ID NO: 71329 - protein, 361 aa, Rhizobium sp.
  REGION 1..361: note = tr|A0A2S6BGM4|A0A2S6BGM4_9RHIZ S-adenosylmethionine:tRNA ribosyltransferase-isomerase; OS = Rhizobium sp. KAs_5_22 OX=2067668 GN=queA PE=3 SV=1
MRVDQFDFDLPDENIALRPVSPRDQARLLVVRPDGTPVLEDARVCDLPSFLKPGDALVFNDTKVIPAQLEGVRLRDGAERTPVSATLHMRVDASRWKAFARPGKRIKLGDRIEFGHSGNACLLGTLGAVVEEKGEAGEVTLRFDFSGSALDEAIATVGHIPLPPYIASKRDEDEKDRTDYQTMYAREEGAVAAPTAGLHFTPDLFARLDAAGIERHFVTLHVGAGTFLPVKAEDTADHKMHHEIGQVSRATASALNAVRARGGRIVSVGTTSLRLLESATSEAGEIQPWSGATDIFITPGYRFRAVDVLMTNFHLPKSTLFMLVSAFAGLDTMRDAYAHAIADGYRFYSYGDASLLFRKDT

SEQ ID NO: 71330 - protein, 362 aa, unidentified
  source 1..362: note = Rhizobium straminoryzae
  REGION 1..362: note = tr|A0A549TGK9|A0A549TGK9_9RHIZ S-adenosylmethionine:tRNA ribosyltransferase-isomerase; OS = Rhizobium straminoryzae OX=1387186 GN=queA PE=3 SV=1
MRVDLFDFDLPEDNIALRPASPRDSARLLVVQPDGATVLQDHVVRDLPSFLRPGDALVFNDTKVIPAQLEGIRSREGTPDLHVSATLHMRVAPDAWKAFAKPGKRLKIGDRIRFGHSGETCALGTLDAVLEEKGEGGEVLLRFDLSGPALDEAIMAVGHIPLPPYIAAKRPEDEQDSRDYQTIYAREEGAVAAPTAGLHFTPDLFAALDAAGIERHFVTLHVGAGTFLPVKADDTTEHKMHSEIGHVSAATAEALNAVKARGGRIVSVGTTSLRLLESAAEADGTLKAWSGATDIFITPGYRFRAVDVLMTNFHLPRSTLFMLVSAFAGLDTMRAAYTHAISTGYRFYSYGDSSLLFRKTTR

SEQ ID NO: 71331 - protein, 361 aa, unidentified
  source 1..361: note = Rhizobium subbaraonis
  REGION 1..361: note = tr|A0A285U9U4|A0A285U9U4_9RHIZ S-adenosylmethionine:tRNA ribosyltransferase-isomerase; OS = Rhizobium subbaraonis OX=908946 GN=queA PE=3 SV=1
MRIELFDFDLPEERIALRPVTPREAARLLVVRPDADQPFEDRHVGDLSEFLQPGDALVFNDTRVIPAQLEGIRHREGAGGQQVSATLHMRIAADRWKAFAKPGKRIKLGDRITFGHRGNACLLGSLEATVEEKGEGGEVTLRFDLSGPMLDEAIASVGHIPLPPYIASKRADDAEDRRDYQTIYAREEGAVAAPTAGLHFTDALFAKLDARGVERHFVTLHVGAGTFLPVKADDTDDHVMHQEIGYVSRETAAALNAVRARGGRIVCVGTTSLRLLESAVSEDGTVEPWSGPTGIFITPGYRFRVADVLMTNFHLPKSTLFMLVSAFCGLETMREAYAHAIETGYRFYSYGDASLLFRKKP

SEQ ID NO: 71332 - protein, 339 aa, Rhizobium sullae
  REGION 1..339: note = tr|A0A2N0DGB4|A0A2N0DGB4_RHISU S-adenosylmethionine:tRNA ribosyltransferase-isomerase; OS = Rhizobium sullae OX=50338 GN=CWR43_04870 PE=3 SV=1
MIAVARPDRHSARLFVVAADGMMRDLPRTKLATLFDPGDLVVANDAATLPASLQGTHVPSGKAIEIRLAGWLSLPDPTRFVAIAFGLGDHRTRTEDRLPPPALSTGDRLWLGPLEAVVERLLDHPRLLELCFPGNRAAVLAGMAQHGRPIQYAHVPEPLALWDVWTKIAARPFAFEAPSAGFGLDWRTLQAWRRRAVGFAALTHAAGVSSTGDPALDSRLPFDEPYRISERTAAQVARAKLRGSRIIAIGTSVVRALEAAANPDGSVRAGNGIATGRIERGTPLRVVDAILTGVHQPGESHFELLRAFADDALLAKASAALTACRYRAHEFGDSVLLNC

SEQ ID NO: 71333 - protein, 361 aa, Rhizobium sullae
  REGION 1..361: note = tr|A0A2N0D0H1|A0A2N0D0H1_RHISU S-adenosylmethionine:tRNA ribosyltransferase-isomerase; OS = Rhizobium sullae OX=50338 GN=queA PE=3 SV=1
MRVDLFDFDLPDERIALRPAEPRDSARLLVVDPHAETVLSDHSVSELPSFLRQGDALVFNDTKVIPAQLEGIRHREGAGGQQVSATLHMRVGASRWKAFAKPGKRIKIGDRIAFGHSGESCFLGQLDCTVEEKGEGGEVTLAFDLSGPGLDEAIASVGHIPLPPYIAAKRPDDERDRTDYQTIYARDEGAVAAPTAGLHFTPRLFEALDKAGVERHFVTLHVGAGTFLPVKADDTADHKMHLESGYVSAETAAKLNAVKARGGRIICVGTTSLRLIESAAADDGEIRAWADATGIFITPGYRFKAVDVLMTNFHLPRSTLFMLVSAFSGFETMQAAYKHAISNGYRFYSYGDASLLSRKDK

SEQ ID NO: 71334 - protein, 363 aa, Rhizobium taibaishanense
  REGION 1..363: note = tr|A0A1Q9AB18|A0A1Q9AB18_9RHIZ S-adenosylmethionine:tRNA ribosyltransferase-isomerase; OS = Rhizobium taibaishanense OX=887144 GN=queA PE=3 SV=1
MRVDLFDFDLPEENIALRPANPRDHARFLVVRPDEDPQLQEAHVYDLPSFLKAGDALVFNDTKVIPAQLEGFRLRDGAERTAVSCTLHMRVAANRWKAFARPGKRIKQGDRITFGGSDNNACMLGELVATVAEKGEAGEIDLAFDLSGPDLDQAIATVGHIPLPPYIAAKRPEDGQDRMDYQTIYAREEGAVAAPTAGLHFTPALFEALDKAGIERHFVTLHVGAGTFLPVKADDTDDHKMHQEIGHVSAETAAALNAVKARGGRIVSVGTTSLRLLESAAGDDGLIHPWSDATGIFITPGYRFKAVDVLMTNFHLPKSTLFMLVSAFAGFETMRAAYAHAIETGYRFYSYGDSSLLFRKDKQ

SEQ ID NO: 71335 - protein, 262 aa, Rhizobium tibeticum
  REGION 1..262: note = tr|A0A1H8U5U0|A0A1H8U5U0_9RHIZ S-adenosylmethionine:tRNA ribosyltransferase-isomerase; OS = Rhizobium tibeticum OX=501024 GN=queA_2 PE=3 SV=1
MIADRSDRRSARLFVVETDGTMRDLARTRLATLFSPGDLVVANDAATLPASLDGTHIPSGEAIEIRLAGWRSLPDPTRFVAIAFGVGDHRTPTEDRLPPPALSTGDRLRLGPLDAVIEGLLDHHRLLELRFPGTPAAVLAGMAQHGRPIQYAHVPELLALWDVWTKIAARPLAFEAPSASFALDWRTLQTWRLRDVGFAALTHAAGVSSTGDPALDSRLPFDEPYHIPERTAERVARAKLRRSRIIAIGTSVVRALEVIRGC

SEQ ID NO: 71336 - protein, 360 aa, Rhizobium tibeticum
  REGION 1..360: note = tr|A0A1H8LJF9|A0A1H8LJF9_9RHIZ S-adenosylmethionine:tRNA ribosyltransferase-isomerase; OS = Rhizobium tibeticum OX=501024 GN=queA_1 PE=3 SV=1
MRVDLFDFDLPDERIALRPADPRDSARLLVVDPAGEVQLSDHRISDLPDFLRAGDALVFNDTKVIPAQLEGVRHREGAGGQQVSATLHMRIGASRWKAFAKPGKRIKIGDRISFGHDGNSCLLGKLECTVEEKSEGGEVTLAFDLSGPMLDEAIHSVGHVPLPPYIAAKRAEDERDRADYQTIYAREEGAVAAPTAGLHFTPALFEAIDKSGVERHFVTLHVGAGTFLPVKADDTDEHKMHLESGYVSAETAASLNAVRARGGRIVCVGTTSLRLIESAAQENGEIRAWAGATGIFITPGYRFKAVDMLMTNFHLPRSTLFMLVSAFAGFETMHAAYRHAISTGYRFYSYGDSSLLFRKD

SEQ ID NO: 71337 - protein, 361 aa, Rhizobium tropici
  REGION 1..361: note = tr|L0LIG0|L0LIG0_RHITR S-adenosylmethionine:tRNA ribosyltransferase-isomerase OS=Rhizobium tropici CIAT 899; OX = 698761 GN=queA PE=3 SV=1
MRVDLFDFDLPEERIALRPAEPRDSARLLVVDPNNGSHTLSDYQIRDLPSFLRPGDAVVFNDTKVIPAQLEGIRHREGAPGQQVSATLHMRAAPDRWKAFAKPGKRIKIGDRIQFGHGENVCALGSLDATVEEKGEGGEITLRFDLSGPALDEAIASVGHIPLPPYIAAKRPEDERDRADYQTIYAREEGAVAAPTAGLHFTPSLFAALDAMGVERHFVTLHVGAGTFLPVKADDTDDHKMHFEIGYVDAATAEKLNAVKARGGRIVCVGTTSLRLIESAAADDGTIHPWHGATGIFITPGYRFKAVDMLMTNFHLPRSTLFMLVSAFAGLDTMRAAYTHAIETGYRFYSYGDGSLLHRKD

SEQ ID NO: 71338 - protein, 358 aa, Rhizobium tropici
  REGION 1..358: note = tr|A0A2T0PG98|A0A2T0PG98_RHITR S-adenosylmethionine:tRNA ribosyltransferase-isomerase; OS = Rhizobium tropici OX=398 GN=queA PE=3 SV=1
MRTDLFDFDLPPESIALRPASPRDAARMLVVHPDGVLRDAKIADLPHWLEPGDQIVVNDTKVIAAQLRGRRIGRETEPKIEATLIKRLDGSRWQALVKPAKKLAPGDTIRFGNEGKVCLLGNLDAEVEAKGQEGEVTLSFSFHGPVLDQAIADVGATPLPPYIASKRTPDDQDVSDYQTMFAAQEGAVAAPTAGLHFTPALEAALKNRGVALHRLTLHVGAGTFLPVKVDDTSEHKMHAEWGCITAETASALNAARAKGGRIVAIGTTSLRLLESAANADGTIQPFAAETSIFITPGYRFRVVDVLLTNFHLPRSTLFMLVSAFSGLETMQAAYTHAIRDGYRFYSYGDACLLFRAKS

SEQ ID NO: 71339 - protein, 367 aa, Rhizobium tubonense
  REGION 1..367: note = tr|A0A2W4CK11|A0A2W4CK11_9RHIZ S-adenosylmethionine:tRNA ribosyltransferase-isomerase; OS = Rhizobium tubonense OX=484088 GN=queA PE=3 SV=1
MRVDLFDFDLPDERIALRPAEPRDSARLLVVDPNSPSQLSDHRVQDLPSFLRPGDAIVFNDTRVIPAQLEGTRHREGAPGQQVSATLHMRVAPDRWKAFAKPGKRIKVGDRIQFGHDGNSCMLGSLEATVEEKGDSGEITLHFDLSGPSLDEAIATVGHIPLPPYIAAKRPEDERDRTDYQTIYAREEGAVAAPTAGLHFTPALFDTLDRLGVERHFVTLHVGAGTFLPVKADDTDDHKMHLEIGYVSAETAARLNAVKARGGRIVCVGTTSLRLIESAADNDGTIKAWSGPTGIFITPGYRFKAVDILMTNFHLPRSTLFMLVSAFAGFETMHGAYQHAIGSGYRFYSYGDASLLFRPALVPGQTR

SEQ ID NO: 71340 - protein, 357 aa, unidentified
  source 1..357: note = Rhizobium tumorigenes
  REGION 1..357: note = tr|A0A2W4C5B2|A0A2W4C5B2_9RHIZ S-adenosylmethionine:tRNA ribosyltransferase-isomerase; OS = Rhizobium tumorigenes OX=2041385 GN=queA PE=3 SV=1
MRVDLFDFDLPDESIALRPAEPRDSARLLIVDPHATPELSDHFVHDLPLFLRAGDAVVFNDTRVIPAQLEGIRHRDGATSQQVSATLHMRMSPGSWKAFAKPGKRIKTGDRIQFGSETAEIALEAAVGEKGEGGEITLHFDLSGPELDAAIAAVGHIPLPPYIAAKRHEDERDSTDYQTIYAREKGAVAAPTAGLHFTPELFDALDRMGVERHFVTLHVGAGTFLPVKADDTEDHKMHLEIGHVSAATAEALTAVKARGGRIVCVGTTSLRLIESAAADDGTIDPWSGPTGIFITPGYRFKAVDILMTNFHLPRSTLFMLVSAFAGFETMHAAYAHAIGAGYRFYSYGDASLLFRKD

SEQ ID NO: 71341 - protein, 361 aa, Rhizobium vallis
  REGION 1..361: note = tr|A0A3S0SR51|A0A3S0SR51_9RHIZ S-adenosylmethionine:tRNA ribosyltransferase-isomerase; OS = Rhizobium vallis OX=634290 GN=queA PE=3 SV=1
MRVDLFDFDLPDERIALRPAEPRDSARLLVVDPNGQTTLSDHRVSDLPSFLRAGDALVFNDTKVIPAQLEGIRHREGAGGQQVSATLHMRIGANKWKAFAKPGKRIKEGDRIAFGHSGESCMIGTLDATVEEKGEAGEVTLAFDLSGPALDEAIAAVGHIPLPPYIAAKRPEDERDRADYQTIYAREEGAVAAPTAGLHFTSALFEALDKAGIERHFVTLHVGAGTFLPVKADDTADHKMHLESGYVSAEIAARLNAVRERGGRIICVGTTSLRLIESAAEASGQIKAWAGATGIFITPGYRFKAVDILMTNFHLPRSTLFMLVSAFAGFETMHAAYKHAISTGYRFYSYGDASLLFRKDT

SEQ ID NO: 71342 - protein, 348 aa, Rhizobium vallis
  REGION 1..348: note = tr|A0A432PAQ6|A0A432PAQ6_9RHIZ S-adenosylmethionine:tRNA ribosyltransferase-isomerase; OS = Rhizobium vallis OX=634290 GN=EFQ99_32590 PE=3 SV=1
MIAADRLDRQSARLLVVEPDGTMRDLPRANLGTLFDPGDLVVANDAATLPASLHGTHLQCGKTIEIRLAGWLSPSAPVRFLAIVFGSGDHRTRTEDRLPPPALSSGDRLQLGPLQAVVKRILDHPRLLELSFQGTRAAMFAGLAQHGRPIQYAHVPEPLALWDVWTRIAARPVAFEAPSASFALDWRTLQAWRRREIGFATLTHAAGISSTGDPALDSRLPFDEPYHIPECTVAQVARAQLKGSRIIAIGTSVVRALEAAANPDGSVRAGDGIATGRIARGTPLRVVDAVLTGVHQLGESHFELLRAFADDSLLASASTALTAYGYRAHEFGDSMLLNRQPPPNWREP

SEQ ID NO: 71343 - protein, 347 aa, Rhizomicrobium sp.
  REGION 1..347: note = tr|A0A177QEV5|A0A177QEV5_9PROT S-adenosylmethionine:tRNA ribosyltransferase-isomerase; OS = Rhizomicrobium sp. SCGC AG-212-E05 OX=1799655 GN=queA; PE = 3 SV=1
MKVDAFDFDLPERLIALRPARPRDSARMLVVRPDGFEHRLVSDLPDFLSPGDALVTNDTRVIAARLHGVRLREAGPAKIEILLHRRLSSDSFSALARPARKLAPGDALEFGPIKASVVSRGDAGEAEIRFALAGTALDDAIAAQGEIPLPPYIAGKRAVDDSDAKDYQTVFARESGSVAAPTAGLHFTPELLARLAAIGVSREAVTLHVGLGTFLPVTAEDTGQHRMHAERLVLTPATAARLNAVHDAGRRIVAAGTTSLRSLESAADATGHLQAFDGDTDIFITPGYAFRAVDVLLTNFHLPRSTLFMLVSAFMGLDVMRTAYAEAIRENYRFYSYGDACLLIRQS

SEQ ID NO: 71344 - protein, 342 aa, unidentified
  source 1..342: note = Rhizorhabdus dicambivorans
  REGION 1..342: note = tr|A0A2A4G105|A0A2A4G105_9SPHN S-adenosylmethionine:tRNA ribosyltransferase-isomerase; OS = Rhizorhabdus dicambivorans OX=1850238 GN=queA PE=3 SV=1
MRVDLFDFDLPPENIALRPVSPRDSARMLVLEGAEGIFDRSVSDLPGLLRGGDCLVFNDTRVIPAQLEGRRGEARIGATLHKREGLRQWRAFVRNAKRVRTGDRIDFGVGVSAIAADRGEDGSILLDFEGSEPVELLLERAGTMPLPPYIAGKRPTDERDHEDYQTMFAREKGAVAAPTAALHFTPRLIEALAVAGIATETLTLHVGAGTFLPVKADDTDDHRMHAEWGRIDMATADRLNAVRAKGGRVIAVGTTSLRLIESAAGEDGLIHPFEGDTAIFITPGYRFRGIDGLMTNFHLPKSTLFMLVSALMGRERMQAAYAHAIGTGYRFYSYGDSSLLLP

SEQ ID NO: 71345 - protein, 343 aa, unidentified
  source 1..343: note = Rhizorhabdus sp.
  REGION 1..343: note = tr|A0A521SGV0|A0A521SGV0_9SPHN S-adenosylmethionine:tRNA ribosyltransferase-isomerase; OS = Rhizorhabdus sp. OX=1968843 GN=queA PE=3 SV=1
MRVDLFDFDLPPENIALRPASPRDSARMLVVEGASGLSDRFVSDLPGLLRAGDCLVFNDTRVIPAQLEGRRGEARIGATLHKREGLRQWRAFVRNAKRVRIGDRIDFGADVFAVAVDRGEDGSILLDFAGEEPVELLLERAGTMPLPPYIAGKRPADARDRDDYQTMFAKEKGAVAAPTAALHFTPGLMAALAEAGIASETLTLHVGAGTFLPVKAEDTDDHRMHAEWGRIDAATADRLNAVRARGGRVVAVGTTSLRLIESAAGDDGLIRPFDGDTAIFITPGYRFRGIDGLMTNFHLPKSTLFMLVSALMGRERMQAAYAHAIAAGYRFYSYGDSSLLLPG

SEQ ID NO: 71346 - protein, 343 aa, unidentified
  source 1..343: note = Rhodanobacter denitrificans
  REGION 1..343: note = tr|A0A368KJH5|A0A368KJH5_9GAMM S-adenosylmethionine:tRNA ribosyltransferase-isomerase; OS = Rhodanobacter denitrificans OX=666685 GN=queA PE=3 SV=1
MKKSDFDFELPSELIAQAPLPERSASRLLLLDVPAQSRQDRRFRELPDFLRPGDLLVFNDTRVLPARLYGRKDTGGAVEILIERVTGAHEAVVQLGVSKKPKEGARIELGDGSHALVLGRDESFFRLRFEAPEPLEKLLQKLGEMPLPPYIERHADASDMERYQTVFAREPGAVAAPTAGLHFDEAILARLRERGVEFGYVTLHVGAGTFQPVRVDDLQDHHMHREWLNVGAHLIGQIRRTRANGGRVIAVGTTVVRALESASKDGELHPFAGETQIFIFPGYRFTSIDGLITNFHLPQSTLLMLVSALAGREFMLGAYRHAVEQRYRFFSYGDAMLILPHGA

SEQ ID NO: 71347 - protein, 354 aa, unidentified
  source 1..354: note = Rhodanobacter denitrificans
  REGION 1..354: note = tr|M4NKB5|M4NKB5_9GAMM S-adenosylmethionine:tRNA ribosyltransferase-isomerase OS=Rhodanobacter denitrificans OX=666685 GN=queA PE=3 SV=1
MPRFPLPAAPALKKSDFDFDLPHELVAQAPLPERSASRMLLLDVAAQSRQDRLFRELPDFLRPGDLLVFNDTRVLPARLYGRKDTGGAVEILIERVTGAHEAVVQLGVSKKPKEGARIELADSSHALVLGRDEGFFRLRFEAPEPLEKLLLKLGEMPLPPYIERHADASDMERYQTVFAREPGAVAAPTAGLHFDEAILGRLRERGVEFGYVTLHVGAGTFQPVRVDDLKDHCMHREWLNVGAHLIGQIRRTRANGGRVIAVGTTVVRALESASRDGELHPFAGETQIFIFPGYRFSSIDGLITNFHLPQSTLLMLVSALAGREFILDSYRHAVEQRYRFFSYGDAMLILPHGA

SEQ ID NO: 71348 - protein, 345 aa, Rhodanobacter fulvus
  REGION 1..345: note = tr|I4VXA6|I4VXA6_9GAMM S-adenosylmethionine:tRNA ribosyltransferase-isomerase OS=Rhodanobacter fulvus Jip2; OX = 1163408 GN=queA PE=3 SV=1
MKKSDFDFELPPELIAQAPLAERSASRLLLLDAAAPALQDRMFRELPQMLRPGDLLVFNDTRVLPARLFGHKSTGGAVEILIERVTGAHEATVQLGVSKKPKVGGRIELADGSQAVVLGRDEGFFHLRFEAPEPLEKLLLKLGEMPLPPYIARHPDASDLERYQTVYAREPGAVAAPTAGLHFDQATLDALRERGVDTGYITLHVGAGTFQPVRAENLEDHHMHREWLNVGAHLIEQIRRTRAAGGRVIAVGTTVVRALESASKDGQLHPFAGETQIFIFPGYTFTSIDGLLTNFHLPQSTLLMLVSALAGREAILDAYRHAVAERYRFFSYGDAMLILPRPAGG

SEQ ID NO: 71349 - protein, 343 aa, unidentified
  source 1..343: note = Rhodanobacter glycinis
  REGION 1..343: note = tr|A0A5B9DX42|A0A5B9DX42_9GAMM S-adenosylmethionine:tRNA ribosyltransferase-isomerase; OS = Rhodanobacter glycinis OX=582702 GN=queA PE=3 SV=1
MKKSDFNFDLPPELIAQAPLPERSASRLLLLDAAAAKRQDRMFRELPEFLNPGDLLVFNDTRVLPARLYGRKDTGGAVEILIERVTGAHEAVVQLGVSKKPKEGGRIELADGSHATVLGRDEGFFRLRFESPESLERLLLKLGEMPLPPYIERAADASDMERYQTVYAREPGAVAAPTAGLHFDEALLAKLHERGVDFGYVTLHVGAGTFQPVRADDISDHHMHSEWLNVGAGLIEQIHRTRAAGGRVIAVGTTVVRALESATAEGQLRPFAGETRIFIFPGYKITSIDGLITNFHLPQSTLLMLVSALAGRDYMLDAYRHAVEQRYRFFSYGDAMLILPQGA

SEQ ID NO: 71350 - protein, 343 aa, unidentified
  source 1..343: note = Rhodanobacter glycinis
  REGION 1..343: note = tr|A0A502CD24|A0A502CD24_9GAMM S-adenosylmethionine:tRNA ribosyltransferase-isomerase; OS = Rhodanobacter glycinis OX=582702 GN=queA PE=3 SV=1
MKKSDFDFELPPELIAQAPLPERSASRMLVLDVPAQWRQDRMFRELPDYLRPGDLLVFNDTRVLPARLYGRKSTGGAVEILIERVTGAHEAIVQLGVSKKPKEGGRIELADGSHAVVLGRDDGFFRLHFEASEPLEKLLLKLGEMPLPPYIERHADASDMERYQTVFAREPGAVAAPTAGLHFDEAMLATLRERGVEFGYITLHVGAGTFQPVRADDLKDHHMHREWLNVGAHLVGQIRRARANGGRVIAVGTTVVRALESASKDGELHPFAGETQIFIFPGYHFSSIDGLLTNFHLPQSTLLMLVSALAGREFMLDSYRHAVTQGYRFFSYGDAMLILPQGG

SEQ ID NO: 71351 - protein, 343 aa, Rhodanobacter lindaniclasticus
  REGION 1..343: note = tr|A0A4V3UT24|A0A4V3UT24_9GAMM S-adenosylmethionine:tRNA ribosyltransferase-isomerase; OS = Rhodanobacter lindaniclasticus OX=75310 GN=queA PE=3; SV = 1
MKKSDFDFDLPHELIAQAPLPERSASRMLLLDVAARSRQDRMFRELPDFLRPGDLLVFNDTRVLPARLYGRKESGGAVEILIERVTGAHEATVQLGVSKKPKEGGRIELADGSHAVVLGRDEGFFRLRFEAPEPLEKLLLKLGEMPLPPYIERHADASDMERYQTVFAREPGAVAAPTAGLHFDEAILDQLRERGVEFGYVTLHVGAGTFQPVRAVNLEDHHMHTEWLNVGAHLVEQIRRTRANGGRVIAVGTTVVRALESASKDGLVHPFAGETQIFIFPGYRFSSIDGLLTNFHLPQSTLLMLVSALAGREFMLDAYRHAVEQRYRFFSYGDAMLILPHGA

SEQ ID NO: 71352 - protein, 343 aa, Rhodanobacter sp.
  REGION 1..343: note = tr|A0A1V3P1Q7|A0A1V3P1Q7_9GAMM S-adenosylmethionine:tRNA ribosyltransferase-isomerase; OS = Rhodanobacter sp. C05 OX=1945855 GN=queA PE=3 SV=1
MKKSDFDFELPPELIAQAPLAERSASRMLLLDVPAQARQDRMFRELPDFLRPGDLLVFNDTRVLPARLYGRKISGGAVEILIERVTGAHEATVQLGVSKKPKEGGRIELADGSHAVVLGRDEGFFRLHFEAPEPLEKLLLKLGEMPLPPYIERHADASDLERYQTVFAREPGAVAAPTAGLHFDEAMLATLRERGVEFGYITLHVGAGTFQPVRADDLKDHRMHREWLNVGAHLIGQIRRTRANGGRVIAVGTTVVRALESASKDGELHPFAGETQIFIFPGYRFSSIDGLLTNFHLPQSTLLMLVSALAGREFMLDAYRHAVEQGYRFFSYGDSMLILPQGG

SEQ ID NO: 71353 - protein, 345 aa, Rhodanobacter sp.
  REGION 1..345: note = tr|A0A522FY55|A0A522FY55_9GAMM S-adenosylmethionine:tRNA ribosyltransferase-isomerase; OS = Rhodanobacter sp. OX=1883446 GN=queA PE=3 SV=1
MKKSDFDFDLPRELIAQEPLAERSASRLLVLDVPAGAHEDHIFRELPDFLQPGDLLVFNDTRVLPARLYGRKESGGAVEIMLERVTGTHEAIVQLGVSHKPKTGARIELADGSHAVLLGREEDFFRLHFESPEPLEKLLMRLGEMPLPPYIERKPDEADKERYQTVYAREPGAVAAPTAGLHFDQPLLARLRERGVNFGYITLHVGAGTFQPVREDEISKHHMHREWLNVGAALVAQIHATRAAGHRVVAVGTTVVRALEAASVDGKVQPFAGETQIFIFPGYKITSIDALITNFHLPQSTLLMLVSALAGRDYMLAAYRYAVEQRYRFFSYGDAMLILPGGIKR

SEQ ID NO: 71354 - protein, 349 aa, Rhodanobacter spathiphylli
  REGION 1..349: note = tr|I4W5F0|I4W5F0_9GAMM S-adenosylmethionine:tRNA ribosyltransferase-isomerase OS=Rhodanobacter spathiphylli B39 OX=1163407 GN=queA PE=3 SV=1
MPATPALKKSDFDFDLPPELIAQAPLPERSASRMLLLDVAAQSREDRMFRELPDFLRPGDLLVFNDTRVLPARLYGRKDTGGAVEILIERVTGAHEATVQLGVSKKPKEGGRIELADGSHAVVLGRDEGFFRLRFEAPEPLEKLLLKLGEMPLPPYIERHADASDMERYQTVFAREPGAVAAPTAGLHFDEATLARLRERGVEFGYVTLHVGAGTFQPVRADDLKDHHMHTEWLNVGAHLIGQIRRTRANGGRVIAVGTTVVRALESASKDGELHPFAGETQIFIFPGYRFSSIDGLLTNFHLPQSTLLMLVSALAGREYMLDAYRHAVEQRYRFFSYGDSMLILPKGV

SEQ ID NO: 71355 - protein, 343 aa, Rhodanobacter thiooxydans
  REGION 1..343: note = tr|A0A154QIS0|A0A154QIS0_9GAMM S-adenosylmethionine:tRNA ribosyltransferase-isomerase; OS = Rhodanobacter thiooxydans OX=416169 GN=queA PE=3 SV=1
MKKSDFDFELPPELIAQAPLPERSASRMLLLDVPAQSQQDRMFRELPEFLRPGDLLVFNDTRVLPARLYGRKDTGGAVEILIERVTGAHEAVVQLGVSKKPKEGARIELADGSHALVLGRDESFFRLRFEAPEPLEKLLQKLGEMPLPPYIARHADASDMERYQTVFAREPGAVAAPTAGLHFDQPILDRLRERGVDFGYITLHVGAGTFQPVRVDDIKDHHMHREWLNVGAHLIGQIRRARANGGRVIAVGTTVVRALESASRDGELHPFAGETQIFIFPGYRFSSIDGLITNFHLPQSTLLMLVSALAGREFMLGAYRHAVEQRYRFFSYGDAMLILPHGA

SEQ ID NO: 71356 - protein, 345 aa, unidentified
  source 1..345: note = Rhodanobacteraceae bacterium
  REGION 1..345: note = tr|A0A522R5A8|A0A522R5A8_9GAMM S-adenosylmethionine:tRNA ribosyltransferase-isomerase; OS = Rhodanobacteraceae bacterium OX=2052182 GN=queA PE=3; SV = 1
MKKSDFHYDLPPELIAQQPLPERSASRLLMVDAPRQALSEHTFQDLPRLLQPGDLLVFNDTRVLPARLFGHKSSGGEVEIMLERITGTHTATALLGASKKPREGSLIELDDGTSARVLGRDGQFFELRFECAEPLEKLLLRIGHVPLPPYIARADESSDRERYQTVYAKHPGAVAAPTAGLHFDASLLDALRARNVEFGYVTLHVGAGTFQPVRAEKIEDHEMHREWLNVGAELVEKIHRTRARGGRVIAVGTTVVRALEAARGEHGEVEPFAGETRIFIFPGYRITSIDGLITNFHLPESTLLMLVSAFAGREFVLSAYRHAVGQRYRFYSYGDAMLVWPSQRT

SEQ ID NO: 71357 - protein, 356 aa, unidentified
  source 1..356: note = Rhodanobacteraceae bacterium
  REGION 1..356: note = tr|A0A522S2R4|A0A522S2R4_9GAMM S-adenosylmethionine:tRNA ribosyltransferase-isomerase; OS = Rhodanobacteraceae bacterium OX=2052182 GN=queA PE=3; SV = 1
MKKSDFHYDLPHELIAQQPLPERSASRLLVVDAPRQVLADRAFHDLPQLLNPGDLLVFNDTRVLPARLFGRKPSGGAVEIMLERVTGTHTAVAMLGVSKKPREGSLIELDDGTPVRVLGREGQFFELRFECAEPLEKLLLKIGHMPLPPYIARADESSDRERYQTVYAKHLGAVAAPTAGLHFDEVLLDALRARGVDFDYITLHVGSGTFQPVRAEKIEDHAMHREWLNVGAELVEKIHRTRARGGRVIAVGTTVVRSLEAARGEHGEVEPFAGETDIFIFPGYRITSIDGLITNFHLPESTLLMLVSAFAGREFVLSAYKHAVEQRYRFYSYGDAMLVWPERRDSGLGTRDSAAR

SEQ ID NO: 71358 - protein, 349 aa, Rhodobaca barguzinensis
  REGION 1..349: note = tr|A0A2K8K618|A0A2K8K618_9RHOB S-adenosylmethionine:tRNA ribosyltransferase-isomerase; OS = Rhodobaca barguzinensis OX=441209 GN=queA PE=3 SV=1
MKLSDFDFDLPEDLIATRPVRPRPAARLLLAQGSRIEDRHVSDLPDILRAGDLLVINTTKVIPARLTGQRHRDTAQGPVSARIEVTLTEPQPDGSWRALAKPLRKLAQGEEIIFTDALRAEVVARNPDDVVLRFNLAGEAFDAALDAAGQMPLPPYIAGRRAADAQDREDYQTVFARTPGAVAAPTASLHFDAALMAQLREIGVEFCEVTLHVGAGTFLPVKVDDVRDHKMHAEWGQVTAQAADQIMAARKAGGRIIPVGTTALRLIETAATGPGQIAAWAGKTDIFITPGFSFQLADALMTNFHLPKSTLMMLVSALMGRDQIMDIYAHAIAERYRFFSYGDASLLIP

SEQ ID NO: 71359 - protein, 355 aa, Rhodobacter aestuarii
  REGION 1..355: note = tr|A0A1N7J772|A0A1N7J772_9RHOB S-adenosylmethionine:tRNA ribosyltransferase-isomerase; OS = Rhodobacter aestuarii OX=453582 GN=queA PE=3 SV=1
MKLDDFDFDLPEGLIATRPARPRTAAKLLVAEGEGIRDLTVADLPDLLGPGDRLVLNNTKVIPARLTGSRARDTGQGTVVAKIEVTLLEPAPGGAWSALAKPLRKVKEGEEITFSDRLSAKVLTIAEGQMQIAFNCTGADFDAALAEAGAMPLPPYIAALRAPDEDDKSDYQTVFARHSGAVAAPTASLHFTPELLETLRQKGVSFTEVTLHVGAGTFLPVKVEDVTTHKMHAEWGEVSAQAAAEINATKAAGGRVIPVGTTALRLIESAAVAEGEIAPFCDTTEIFIYPGYRFRIADALMTNFHLPKSTLLMLVSALMGQERIREIYAHAVAKGYRFFSYGDASLLLPKARNGG

SEQ ID NO: 71360 - protein, 346 aa, Rhodobacter azotoformans
  REGION 1..346: note = tr|A0A2T5KBE9|A0A2T5KBE9_9RHOB S-adenosylmethionine:tRNA ribosyltransferase-isomerase; OS = Rhodobacter azotoformans OX=43057 GN=queA PE=3 SV=1
MKLSDFDFDLPERLIATRPARPRTAARLLLAEGDRIEDRHVRDLVGIFRPGDRLVLNNTRVIPARLVGTRTRGEACAKIEITLMEPAAAGGWRALAKPLRKLKEGETIRFSDALSAEVAEKGETDLRLVFDRAGEDFDAALAEAGAMPLPPYIAARRAPDAQDREDYQTVFARHAGAVAAPTASLHFDRPLLEALAANGVAFTEVTLHVGAGTFLPVKVEDVTTHRMHAEWGEVTEAAAAEIAATKAAGGRVIPVGTTALRLIESASAAGTIRPWRGETDIFIYPGYRFRVTDALMTNFHLPKSTLLMLVSALMGEARIRAIYDHAVRHDYRFFSYGDASLLIPGG

SEQ ID NO: 71361 - protein, 346 aa, Rhodobacter blasticus
  REGION 1..346: note = tr|A0A2T4J790|A0A2T4J790_RHOBL S-adenosylmethionine:tRNA ribosyltransferase-isomerase; OS = Rhodobacter blasticus DSM 2131 OX=1188250 GN=queA PE=3; SV = 1
MKLSDFDFPLPEELIATRPARPRSSARLLVAEGDTLRDLVVRDLAGLLGPGDRLVLNNTRVIPARLFGTRTRGEAVARVEVTLLEPAATGGWRALAKPLRKVKEGEVIAFSDDLSARVAEKGETDLRLEFNQTGEAFDAALATAGAMPLPPYIAAKRAADEQDKDDYQTVFARHTGAVAAPTASLHFDADLLAALRAKGVQFTEVTLHVGAGTFLPVKVEDVTTHRMHAEWGQVTPQAAAEINATREAGGRVIPVGTTALRLIESAARSGRVEPWEGPTDIFIYPGFAFHVTDALMTNFHLPRSTLLMLVAALMGKGRMDRVYEHAIHNGYRFFSYGDASLLIPTR

SEQ ID NO: 71362 - protein, 350 aa, Rhodobacter capsulatus
  REGION 1..350: note = tr|D5ATK9|D5ATK9_RHOCB S-adenosylmethionine:tRNA ribosyltransferase-isomerase OS=Rhodobacter capsulatus (strain ATCC BAA-309 / NBRC 16581 / SB1003) OX=272942; GN = queAPE=3 SV=1
MNLSDFDFELPEGRIAIRPARPRTAAKLLVATPDAIRDLTVADLPDLLGPGDRLVLNTTKVIPARLSGRRTRQSAQGEVVARVEVTLLEPAPGGDWMALAKPLRKLKEGEEIVFSDALSARIAAIAEGQMRIRFNLTGPDFDAALAEAGAMPLPPYIAALRAPDEQDKTDYQTVFAQKPGAVAAPTASLHFTPDLLEKLRDKGVQFTEVTLHVGAGTFLPVKVEDVTTHRMHAEWGEVTPQAAAEINATKAAGGRVIPVGTTALRLIESAATGPGVIAPFAATTDIFIYPGYRFRIADALMTNFHLPKSTLLMLVSALMGQDRIRAIYDHALTKNYRFFSYGDASLLLPG

SEQ ID NO: 71363 - protein, 350 aa, Rhodobacter capsulatus; identical to SEQ ID NO: 71362
  REGION 1..350: note = tr|A0A0E2PVD8|A0A0E2PVD8_RHOCA S-adenosylmethionine:tRNA ribosyltransferase-isomerase; OS = Rhodobacter capsulatus Y262 OX=1415161 GN=queA PE=3 SV=1

SEQ ID NO: 71364 - protein, 346 aa, Rhodobacter johrii
  REGION 1..346: note = tr|A0A330H7G2|A0A330H7G2_9RHOB S-adenosylmethionine:tRNA ribosyltransferase-isomerase; OS = Rhodobacter johrii OX=445629 GN=queA PE=3 SV=1
MQLSDFDFDLPERLIATRPARPRTAARLLLAEGDRIEDRHVRDLVGIFRPGDRLVLNNTRVIPARLTGTRTRGEAEARIEVTLMEPAAAGGWRAMAKPLRKLKPGETIRFSDALSAEVAEKGETDLRLVFDRAGEAFDAALAQAGAMPLPPYIAARRAPDAQDDEDYQTVFARHAGAVAAPTASLHFDRPLLEALAARGVGFTEVTLHVGAGTFLPVKVEDVTTHRMHAEWGEVTDTAAAEIAAAKAAGGRVIPVGTTALRLIESAAASGTIRPWRGETDIFIYPGYRFRVTDALMTNFHLPKSTLLMLVSALMGQERIRAIYDHAVRHDYRFFSYGDASLLIPGG

SEQ ID NO: 71365 - protein, 353 aa, Rhodobacter maris
  REGION 1..353: note = tr|A0A285T1Z8|A0A285T1Z8_9RHOB S-adenosylmethionine:tRNA ribosyltransferase-isomerase; OS = Rhodobacter maris OX=446682 GN=queA PE=3 SV=1
MMMTLDDFDFDLPEGLIATRPARPRSSAKLLVAKGGDLRDLTVADLPALFRPGDRLVLNNTKVIPARLSGRRSRASARGEVVAKVEVTLLEPAAGGEWSALAKPLRKLREGEEIVFSGALSARVMAIAEGQMRIAFNVTGADFDAALAEAGAMPLPPYIAALRAPDEADKSDYQTVFARHAGAVAAPTASLHFTPELLETLRENGVQFTEVTLHVGAGTFLPVKVADVTTHRMHAEWGEVSEQAAAEINATKAAGGRVIPVGTTALRLIESAAGEDGRVAPFRGTTDIFIYPGYRFRVTDALMTNFHLPKSTLLMLVSALMGQERIREIYAHAVARGYRFFSYGDASLLFPEP

SEQ ID NO: 71366 - protein, 346 aa, Rhodobacter megalophilus
  REGION 1..346: note = tr|A0A239C6T1|A0A239C6T1_9RHOB S-adenosylmethionine:tRNA ribosyltransferase-isomerase; OS = Rhodobacter megalophilus OX=418630 GN=queA PE=3 SV=1
MQLSDFDFDLPERLIATRPARPRTAARLLLAEGDRIEDRHVRDLVGIFRPGDRLVLNNTRVIPARLTGTRTRGEAEARIEVTLMEPAAAGGWRAMAKPLRKLKPGETIRFSDALSAEVAEKGETDLRLVFDRAGAAFDAALAEAGAMPLPPYIAARRAPDAQDDEDYQTVFARHAGAVAAPTASLHFDRPLLEALAARGVGFTEVTLHVGAGTFLPVKVEDVTTHRMHAEWGEVTEAAAAEIAATKAAGGRVIPVGTTALRLIESAAASGAIRPWRGETDIFIYPGYRFRVTDALMTNFHLPKSTLLMLVSALMGQERIRAIYDHAVRHDYRFFSYGDASLLIPGG

SEQ ID NO: 71367 - protein, 345 aa, Rhodobacter ovatus
  REGION 1..345: note = tr|A0A285CTL7|A0A285CTL7_9RHOB S-adenosylmethionine:tRNA ribosyltransferase-isomerase; OS = Rhodobacter ovatus OX=439529 GN=queA PE=3 SV=1
MKLSDFDFDLPESLIATRPARPRTAARLLLAEGDTIRDLHVRDLLDIFRPGDRLVLNNTKVIPARLSGTRCRGDAVARVEVTLLEPAAQGWRALAKPLRKLKPGEEIRFSPDLSATVAEKGDTDLRLVFNLTGEDFDTALAQAGAMPLPPYIAAKRAPDAQDHKDYQTVFARHAGAVAAPTASLHFDRELLAALAAKGIGFTEVTLHVGAGTFLPVKVEDVTTHRMHAEWGEVTEQAAAEIAATKAAGGRVIPVGTTALRLIESAAADGQIRPWRGKTDIFIYPGYRFRVADALMTNFHLPKSTLLMLVSALMGPDRIRRIYDHALHEGYRFFSYGDASLLIPKG

SEQ ID NO: 71368 - protein, 351 aa, Rhodobacter sp.
  REGION 1..351: note = tr|A0A0R2TRL8|A0A0R2TRL8_9RHOB S-adenosylmethionine:tRNA ribosyltransferase-isomerase; OS = Rhodobacter sp. BACL10 MAG-120910-bin24 OX=1655597; GN = queA PE=3 SV=1
MAVSLSDFDFELPEERIAIRPLKPKGEAKLLHYEKGLFYDRHVANLIDLLHEGDLLVLNNTRVIAARLRAERRRETAQGPVSAHIELTLMNPTAQGHWRAMAKPLRKVLVGEVLHISPDLWAEVVAKTDTDLTLAFNAEGAELDASIERSGQMPLPPYIAAKRPPDAQDRQDYQTVFARHMGAVAAPTASLHFDQSLLDALTRKGVCFCEVTLHVGAGTFLPVKVEDVTTHKMHAEWGDVSAHAAAQISATKTKGGRVIAVGTTALRLIETAAQTTGQIAPYQGFTDIFIYPGFDFKVTDGLMTNFHLPKSTLLMLVAALIGKGQLDKLYAHAIAAEYRFFSYGDSSLLLP

SEQ ID NO: 71369 - protein, 351 aa, Rhodobacter sp.; identical to SEQ ID NO: 71368
  REGION 1..351: note = tr|A0A348MPJ2|A0A348MPJ2_9RHOB S-adenosylmethionine:tRNA ribosyltransferase-isomerase; OS = Rhodobacter sp. OX=1062 GN=queA PE=3 SV=1

SEQ ID NO: 71370 - protein, 346 aa, Rhodobacter sphaeroides
  REGION 1..346: note = sp|Q3J252|QUEA_RHOS4 S-adenosylmethionine:tRNA ribosyltransferase-isomerase OS=Rhodobacter sphaeroides (strain ATCC 17023 / 2.4.1 / NCIB 8253 / DSM 158); OX = 272943 GN =queA PE=3 SV=1
MQLSDFDFDLPERLIATRPARPRTAARLLLAEGDRIEDRHVRDLVGIFRPGDRLVLNNTRVIPARLTGTRTRGEAEARVEVTLMEPAAAGGWRAMAKPLRKLKPGETIRFSDALSAEVAEKGETDLRLVFDRAGAAFDAALAEAGAMPLPPYIAARRAPDTQDDEDYQTVFARHAGAVAAPTASLHFDRPLLEALAARGVGFTEVTLHVGAGTFLPVKVEDVTTHRMHAEWGEVTETAAAEIAATKAAGGRVIPVGTTALRLIESAAASGAIRPWRGETDIFIYPGYRFRVTDALMTNFHLPKSTLLMLVSALMGQERIRAIYDHAVRHDYRFFSYGDASLLIPGG

SEQ ID NO: 71371 - protein, 346 aa, Rhodobacter sphaeroides
  REGION 1..346: note = sp|A4WTM7|QUEA_RHOS5 S-adenosylmethionine:tRNA ribosyltransferase-isomerase OS=Rhodobacter sphaeroides (strain ATCC 17025 / ATH 2.4.3) OX=349102 GN=queA PE=3 SV=1
MKLSDFDFDLPERLIATRPARPRTAARLLLAEGDRIEDRHVRDLVGIFHPGDRLVLNNTRVIPARLVGTRTRGEACAKIEITLMEPAAAGGWRALAKPLRKLKEGETIRFSDALSAEVAEKGETDLRLVFDRAGEDFDAALAEAGAMPLPPYIAARRAPDAQDREDYQTVFARHAGAVAAPTASLHFDRPLLEALAANGVAFTEVTLHVGAGTFLPVKVEDVTTHRMHAEWGEVTEAAAAEIAATKAAGGRVIPVGTTALRLIESASAAGTIRPWRGETDIFIYPGYRFRVTDALMTNFHLPKSTLLMLVSALMGEARIRAIYDHAVRHDYRFFSYGDASLLIPGG

SEQ ID NO: 71372 - protein, 349 aa, Rhodobacter veldkampii
  REGION 1..349: note = tr|A0A2T4JKW8|A0A2T4JKW8_9RHOB S-adenosylmethionine:tRNA ribosyltransferase-isomerase; OS = Rhodobacter veldkampii DSM 11550 OX=1185920 GN=queA; PE = 3 SV=1
MKLSDFDFDLPEGLIATRPARPRPAARLLVAEGAAIRDLHVRDLVGLLRPGDRLVLNNTKVIPARLSGTRRRATPQGEAVAKVEVTLLEPAPGGAWMALAKPLRKLRVGETISFASRLSAEVLAIVEGQAQLAFNLTGNDFDTALAEAGAMPLPPYIAALRAPDAADKDDYQTVFARHSGAVAAPTASLHFDADLLAALAAKGVAFTEVTLHVGAGTFLPVKVEDVTTHRMHAEWGEVSAQAAAEINATRAAGGRIIPVGTTALRLIESAATPEGRVQPFRGTTEIFIYPGYRFRVTDALMTNFHLPKSTLLMLVSALMGEACIRRIYAHAVAQGYRFFSYGDASLLIP

SEQ ID NO: 71373 - protein, 350 aa, Rhodobacter vinaykumarii
  REGION 1..350: note = tr|A0A1N7L5A1|A0A1N7L5A1_9RHOB S-adenosylmethionine:tRNA ribosyltransferase-isomerase; OS = Rhodobacter vinaykumarii OX=407234 GN=queA PE=3 SV=1
MKLEDFDFDLPEGLIATRPVRPRPAARLLVAQGPEGWSDAHVRDLPGLLRPGDLLVLNDTRVIPARLSGLRARQTPQGEVHARIEVTLMEPGTDGEWQALVKPLRKLRPGEEIVFAPGFSAEVREIAEGRARLAFSVGGAAFETALAEVGAMPLPPYIAALRAPDAADHEDYQSVFARRPGAVAAPTASLHFDDALMAELSARGVGFARVTLHVGAGTFLPVKVEDVTTHRMHAEWGEITPEAAAAINATRAAGGRVIAVGTTALRLVESAATPEGEVRPFAGTTEIFIYPGYRFRAIDGLMTNFHLPRSTLLMLVSALMGRERIHALYQHAIGQGYRFFSYGDASLLIP

SEQ ID NO: 71374 - protein, 350 aa, unidentified
  source 1..350: note = Rhodobacter viridis
  REGION 1..350: note = tr|A0A318U2K9|A0A318U2K9_9RHOB S-adenosylmethionine:tRNA ribosyltransferase-isomerase; OS = Rhodobacter viridis OX=1054202 GN=queA PE=3 SV=1
MNLSDFDFDLPEGLIATRPARPRTAAKLLVATPEAIRDLTVADLPDLLGPGDRLVLNTTKVIPARLSGRRTRQSAQGEVVAKVEVTLLEPAPGGDWMALAKPLRKLKEGEEIVFSASLSARVEAIAEAQMRIRFNLTGPDFDAALAEAGAMPLPPYIAALRAPDEQDKTDYQTVFAQNPGAVAAPTASLHFTPELLEKLREKGVQFTEVTLHVGAGTFLPVKVEDVTTHRMHAEWGEVSAQAAAEINATKLAGGRVIPVGTTALRLIESAATGPGVIAPFAATTDIFIYPGYRFRIADALMTNFHLPKSTLLMLVSALMGQERIREIYAHALTKNYRFFSYGDASLLLPG

SEQ ID NO: 71375 - protein, 341 aa, unidentified
  source 1..341: note = Rhodobacteraceae bacterium
  REGION 1..341: note = tr|A0A3N9Q7P5|A0A3N9Q7P5_9RHOB S-adenosylmethionine:tRNA ribosyltransferase-isomerase; OS = Rhodobacteraceae bacterium CH30 OX=2490538 GN=queA PE=3; SV = 1
MQLSDFDYHLPEHLVAQHPPEVRGGSRLLHVAGKQLSDTLFAELPGFLSAGDVLVFNDTRVIKARLFGEKASGGKIEALIERVLDEHTALAHVRASKSPKPGTRLVFAGRWQAEMVERVGELFKLRFLAEENLFDILEASGKLPLPPYIERDTDSDDDSRYQTVYAKEQGAVAAPTAGLHFTDEMLARLEAQGVKLAYVTLHVGAGTFQPVRVDNIADHKMHSEIYDIPEQTRAMIEEAHAAGHKVVSVGTTSMRALESAARGGALVAGRGETDIFITPGYRFNVVDRLLTNFHLPKSTLLMLVSAFAGYDEMRAAYVHAVEKEYRFFSYGDAMLLERKDG

SEQ ID NO: 71376 - protein, 354 aa, unidentified
  source 1..354: note = Rhodobacteraceae bacterium
  REGION 1..354: note = tr|A0A2V2LKF4|A0A2V2LKF4_9RHOB S-adenosylmethionine:tRNA ribosyltransferase-isomerase; OS = Rhodobacteraceae bacterium TG-679 OX=2072018 GN=queA; PE = 3 SV=1
MKLDDFDFDLPEDLIATRPVRPRSAARLLVADPARITDAHVGDLPSFLRPGDRLVLNDTRVLPVRLTGTRTRATDSGTGAARIEVTLLEPQADGAWTALVKPLRKLADGEVIVFTDRLAATMLGRTGEGTARLGLSLKGDALEAELAQAGAMPLPPYIAARRPADARDLEDYQTVFARRSGAVAAPTASLHFDADLLARIAAAGVDFTHVTLHVGAGTFLPVKVDDPAQHKMHAEWGEVTPDAAAEIAATREAGGRIIPVGTTALRLLETAAQGTGEVVPMAEPTDIFIYPGFRFRVTDGLMTNFHLPKSTLMMLVSAFMGTDRMRAVYAHAIAQRYRFFSYGDASLLLPTKRA

SEQ ID NO: 71377 - protein, 348 aa, unidentified
  source 1..348: note = Rhodobacterales bacterium
  REGION 1..348: note = tr|A0A1Y5HIM1|A0A1Y5HIM1_9RHOB S-adenosylmethionine:tRNA ribosyltransferase-isomerase; OS = Rhodobacterales bacterium 56_14_T64 OX=1856299 GN=queA; PE = 3 SV=1
MKLSDFDFELPDSLIATRPASPRSAARLLVAEGDVIHDRTVTDLVDWLRPGDRLVLNDTKVIPARLSGLRHRLSAQGPVAAKIEVTLLEPRADGCWSALLKPLKKIKIGEDVVFCEGFSATLEAIADGQGQLRFNLAGDDFDAALAQAGAMPLPPYIAAKRPADAQDKQDYQTVWARHSGAVAAPTASLHFDDALLAALAAKGVEFTHVTLHVGAGTFLPVKVEDVTSHKMHAEWGRVSPQAAAEIAATKAAGGRVIPVGTTALRLIESAARGGEITPWEGDTDIFIYPGFTFHVTNALMTNFHLPKSTLLMLVSALIGQDRVRAIYEHAVSDEYRFFSYGDASLLIP

SEQ ID NO: 71378 - protein, 349 aa, unidentified
  source 1..349: note = Rhodobacterales bacterium
  REGION 1..349: note = tr|A0A1Q4CQ42|A0A1Q4CQ42_9RHOB S-adenosylmethionine:tRNA ribosyltransferase-isomerase; OS = Rhodobacterales bacterium 65-51 OX=1895824 GN=queA PE=3; SV = 1
MKLADFDFDLPEHLIATRPVKPRPAARLLLAEGDAIRDLHVRDLVTLLRPGDRLVLNNTKVIPARLNGTRWRDTGQGRVSAKVEITLLEPVASSGWRALAKPLRKLAQGEVIVFSDQLSAQVSRKGETDLVLEFNLTGPDFDAALAAAGQMPLPPYIAAKRAPDAQDHQDYQTVFARHSGAVAAPTASLHFDAGLLAALRARGVEFTEVTLHVGAGTFLPVKVEDVTTHRMHAEWGEVTEAAVAEIAATKAAGGRVIPVGTTALRLIESAAQGGALAPWRGETDIFIYPGFTFRVADGLMTNFHLPRSTLMMLVAALMGRDRILRIYDHAISEGYRFFSYGDASLLLPG

SEQ ID NO: 71379 - protein, 362 aa, unidentified
  source 1..362: note = Rhodobiaceae bacterium
  REGION 1..362: note = tr|A0A3D5HKP4|A0A3D5HKP4_9RHIZ S-adenosylmethionine:tRNA ribosyltransferase-isomerase; OS = Rhodobiaceae bacterium OX=2026785 GN=queA PE=3 SV=1
MQVEAFDFDLPDELIALRPASPRDSAKLLHVAPNGHLTDKFIRDLSSYFVKGDVLLVNDTRVIPAKLSGTRLRESVAGDTQQSGAHVELNLIERQGTSTWKCLLKPAKKVKPGDIIRFQDKEGVVYPATVLEKDQGEALIDFKLSLDKMDALLGLIGSMPLPPYIAGKRRPDEKDNQDYQTLFAEHDGAVAAPTAGLHFTPNLQAELEAMGVEICRVTLHVGAGTFLPVKVENTANHKMHAEWGEVKPEIADKLNNAKQNGHRICCVGTTSLRLLESATKKDGIIEPFADATDIFIKPGYCFRAADMLLTNFHLPKSTLFMLVSAFSGLDTMKKAYEHAVQNNYRFYSYGDACLLELADKNN

SEQ ID NO: 71380 - protein, 362 aa, unidentified
  source 1..362: note = Rhodobiaceae bacterium
  REGION 1..362: note = tr|A0A2D7H6U3|A0A2D7H6U3_9RHIZ S-adenosylmethionine:tRNA ribosyltransferase-isomerase; OS = Rhodobiaceae bacterium OX=2026785 GN=queA PE=3 SV=1
MQVDLFDFDLPEELIALRPAVPRDSARLLYVGDTGDTGDHTVSDLPEFLKEGDVLVVNTTKVIPARLTGRRVRRGVDDNTHSGAKIEVTLTERKGPLAWQCFLKPARRVNVGDKLVFGDAAITVEAEVTARDGPEAGLMFHLAPDAMEGTLARIGAMPLPPYIAGKRSPDARDVDDYQTLFAAHEGAVAAPTAGLHFTPELVARLHDRGIALVDVTLHVGPGTFLPVKVDDTRSHVMHSEWGEVSAAAAAQINAAKAGGHRVICVGTTALRLIESACSEIGRISAFRGDTDIFITPGYAFRMCDLLVTNFHLPRSTLFMLVSAFSGLSVMQNAYATAIEKKYRFYSYGDACLLTRREVSGEV

SEQ ID NO: 71381 - protein, 362 aa, Rhodobium orientis
  REGION 1..362: note = tr|A0A327JHQ0|A0A327JHQ0_9RHIZ S-adenosylmethionine:tRNA ribosyltransferase-isomerase; OS = Rhodobium orientis OX=34017 GN=queA PE=3 SV=1
MRVEDFDFELPEERIALRPARPRDAARMLVVHPGGDPELTDRIVRDLPGMLRPGDALVSNDTRVIPAQLEGKRIGRGDSAPKIAVTLHKRAGLDAWYGFARPAKKLAPGDRVAFAADCTFCYGGALMASVVEKGEGGEVLFRFDRSGEMLDIELARVGAMPLPPYIASKRKIDGRDARDYQTMFASRDGAVAAPTAGLHFTDDLIAALDERGVSRHTVTLHVGAGTFLPVKVDDLKDHRMHAEWGEIGEETADALNAVKARGGRIVSVGTTSLRLLESAADEDGIIKPFCDDTSIFISPGYRFRAVDILMTNFHLPRSTLFMLVSAFCGLDVMRRAYGHAIAENYRFYSYGDASLLFREGAA

SEQ ID NO: 71382 - protein, 346 aa, Rhodoblastus acidophilus
  REGION 1..346: note = tr|A0A212RAW4|A0A212RAW4_RHOAC S-adenosylmethionine:tRNA ribosyltransferase-isomerase; OS = Rhodoblastus acidophilus OX=1074 GN=queA PE=3 SV=1
MRVDVFDFDLPEDRIALRPASPRESARLLAIGEDLRDLHVGDLPSQLRPGDVLVVNDAKVIPAQLFGTRTRGEAVARIEATLHKKQDGAHWRAFVRPAKKLKLGETVAFGDDGALQAVVEAKNEGEVLLGFNLSGPALDNALMAVGHMPLPPYIAARRAEDAQDAQDYQTVFAQKPGAVAAPTAGLHFTPALLAAAQAAGARIEKVTLLVGAGTFLPVKAEDTKDHVMHAEWGEIDAETAARLNAARAQGGRIVAVGTTSLRILESAADETGIKPFSGETSIFITPGYRFNAVDMLMTNFHLPRSTLFMLVCAFAGLERMQSAYAHAIRSGYRFYSYGDACLLMGK

SEQ ID NO: 71383 - protein, 347 aa, Rhodoblastus sphagnicola
  REGION 1..347: note = tr|A0A2S6NA62|A0A2S6NA62_9RHIZ S-adenosylmethionine:tRNA ribosyltransferase-isomerase; OS = Rhodoblastus sphagnicola OX=333368 GN=queA PE=3 SV=1
MRVNLFDFDLPEERIALRPAQPRESARLLVIGDALRDLRVGDLPSLLRPGDVLVVNDAKVIPAQLFGTRARGEVFARIEATLHKKVDAAHWRAFVRPAKKLKIGETIVFGGVGGELRAQVEEKNEGEVLLGFDLSGPALDTVLMAIGHMPLPPYIAARRPEDAQDARDYQTVFAEKLGAVAAPTAGLHFTPNLLEAARAAGVRVEKVTLLVGAGTFLPVKAEDTEDHVMHAEWGEIDAGTAERLNAARAAGGRVVAVGTTSLRILESAADETGIRPFVGETSIFITPGYCFNAADALMTNFHLPRSTLFMLVSAFAGLERMQAAYAHAIEAGYRFYSYGDACLLLRK

SEQ ID NO: 71384 - protein, 352 aa, Rhodococcus jostii
  REGION 1..352: note = tr|Q0SK86|Q0SK86_RHOJR S-adenosylmethionine:tRNA ribosyltransferase-isomerase OS=Rhodococcus jostii (strain RHA1) OX=101510 GN=RHA1_ro00214 PE=3 SV=1
MTRARIPSAAEFRFVLPQRLEASGPPESRGLLRDSVRMLVSDRGRVEHSRFHDLPRFLRPGDVVVVNASSTLAAAVDGTVDAVGPVVVHFSTDLADGDWAVEVRAPGPVSGALDTIAAGTRIILPRGVVATLVKPWPLGSTRLWRASIDGVADVAAELLATSGRPITYAYVHERWPLSSYQTIFGRTGGSAEMASAARPFTHSMVTDLATSGVVVAPILLHTGVSSPERGEPPIPERFEVPEQTARLVNDRRAAGGRVIAVGTTVTRALETAATSGGMAVAGAGWTDLVLSAGRPTLVVDGLITGWHAPGASHLMLLESVVGEKAVRRAYDEALARGYLWHEFGDSALLLRR

SEQ ID NO: 71385 - protein, 367 aa, Rhodococcus jostii
  REGION 1..367: note = tr|A0A1H5ML53|A0A1H5ML53_9NOCA S-adenosylmethionine:tRNA ribosyltransferase-isomerase; OS = Rhodococcus jostii OX=132919 GN=SAMN04490220_9081 PE=3; SV = 1
MTGARTAAAAELRFVLPRRLEASGPPESRGLRRDAVRLLVSDRGRVEHSRFHELPRYLRPGDVVVVNTSSTLAAAVDGTVAGVGPVVVHFSTELEHGEWAVEVRAPGPVAGALGSVGAGTRISLPLGAVATLAEPWPRGSTRLWRAGIDGVTDVPTELLATSGRPITYAYVPEHWPLPDYQTIFGRIGGSAEIASAARPFTHAVITELVTSGVVVAPVLLHTGVSSPERGEPPIPERYEVPEPTARLVNDRRAAGGRVIAVGTTVTRALETRATSDGRAVAGAGWTDLVLSARRPTRVVDGLITGWHAPGASHLMLLESVVGAAAVRHAYDEALAGGYLWHEFGDSALLLRRCRDLTARAGCPSPGK

SEQ ID NO: 71386 - protein, 352 aa, Rhodococcus koreensis
  REGION 1..352: note = tr|A0A1H5CER3|A0A1H5CER3_9NOCA S-adenosylmethionine:tRNA ribosyltransferase-isomerase; OS = Rhodococcus koreensis OX=99653 GN=SAMN04490239_9152; PE = 3 SV=1
MTRSGSDSVTEFRFVLPQRLEASGPPEERGLLRDSVKLLVSDRGNLVHSTFHDLPRFLRPGDVVVVNASATLAAAMDGTVDTVGPVVVHFSTELEGGDWAVEVRAPGPVSGALDSVTEGTRIRLSRGAVATLQEPWPRGSTRLWRASVDGVTDVAAELLATAGRPITYAYVHERWPLSYYQTIFGRTGGSAEMASAARPFTHPIVTDLATSGVVTAPILLHTGVSSPERGEPPIPERYEVPEHTARLINDRRAAGGRVIAVGTTVTRALETRATPDGLAVAGGGWTNLVLSAGRPARVVDGLITGWHAPGASHLMLLESVVGAAAVRRAYDEALARGYLWHEFGDSALLLRR

SEQ ID NO: 71387 - protein, 366 aa, Rhodococcus maanshanensis
  REGION 1..366: note = tr|A0A1H7FA84|A0A1H7FA84_9NOCA S-adenosylmethionine:tRNA ribosyltransferase-isomerase; OS = Rhodococcus maanshanensis OX=183556; GN = SAMN05444583_101112 PE=3 SV=1
MTEVRVEAAAGPDFVLPDRLEASGPPESRGQLRDTVRLLVAEGERVEHARFHELPRYLRAGDVVVVNTSATLAAAVDGTVDGVGPVVVHFSMPLDDGAWVVEVRAPGPVTGPLDDAAAGMRIRLPLSAEATLREPWPRTSIRLWRAEIDGVADVARDLLAVAGRPITYAYVRERWPLPYYQTIFGRDRGSAEMASAARPFTHTMITELAVSGVVVAPVLLHTSVSSAEPGEPPIPERYEIPEWTARLINDRRAAGGRVIAVGTTVTRALETGATERGTVVAGAGWTDLVLSARRPARVVDGLVTGWHAPGASHLMLLESVVGPAVVRRAYEAALEEGYLWHEFGDSALLLRAKGQLARLTPTAVRG

SEQ ID NO: 71388 - protein, 352 aa, Rhodococcus opacus
  REGION 1..352: note = tr|A0A3A9U3G8|A0A3A9U3G8_RHOOP S-adenosylmethionine:tRNA ribosyltransferase-isomerase; OS = Rhodococcus opacus OX=37919 GN=COO55_36340 PE=3 SV=1
MTRARVASAAEFRFVLPQRLEASGPPESRGLLRDSVRLLVSDRGRVEHTRFHELPRFLQPGDVVVVNASSTLAAAVDGTVDTVGPVVVHFSTDLEDGDWVVEVRAPGPVSVALDAVAAGTRIILPRGVVATLVEPWPLGSTRLWRASIDGVADVAAELLATSGRPITYAYVHERWPLSSYQTIFGRTGGSAEMASAARPFTHPMVTDLVTSGVVVAPILLHTGVSSPERGEPPIPERYEVPEQTARLVNDRRAAGGRVIAVGTTVTRALETQATSDGMSLAGAGWTDLVLSAARPTRVVDGLITGWHAPGASHLMLLESVVGEAAVRRAYDEALAHGYLWHEFGDSALLLRR

SEQ ID NO: 71389 - protein, 352 aa, Rhodococcus opacus
  REGION 1..352: note = tr|A0A1B1K742|A0A1B1K742_RHOOP S-adenosylmethionine:tRNA ribosyltransferase-isomerase; OS = Rhodococcus opacus OX=37919 GN=A8787_0291 PE=3 SV=1
MTRARVASAAEFRFVLPQRLEASGPPESRGLLRDSVRLLVSDRGRVEHTRFHELPRFLQPGDVVVVNASSTLAAAVDGTVDTVGPVVVHFSTDLEDGDWVVEVRAPGPVSVALDAVAAGTRIILPRGVVATLVEPWPLGSTRLWRASIDGVADVAAELLATSGRPITYAYVHERWPLSSYQTIFGRTGGSAEMASAARPFTHPMVTDLVTSGVVVAPILLHTGVSSPERGEPPIPERYEVPEQTAHLVNDRRAAGGRVIAVGTTVTRALETQATSDGMSLAGAGWTDLVLSAARPTRVVDGLITGWHAPGASHLMLLESVVGEAAVRRAYDEALAHGYLWHEFGDSALLLRR

SEQ ID NO: 71390 - protein, 342 aa, Rhodococcus qingshengii
  REGION 1..342: note = tr|A0A4R6A5C9|A0A4R6A5C9_9NOCA S-adenosylmethionine:tRNA ribosyltransferase-isomerase; OS = Rhodococcus qingshengii OX=334542 GN=E2R56_03850 PE=3; SV = 1
MAATAFDFYLPSELNATHPPERRGIRRDHVKMMVLNKQTGNVRHDRFFRLADYLKPGDLVVMNNSRTVPAILQAGLIRNTKQIHPEVEIRLARRRDEEIWDVLIVTDEVNLGDILHFSPDLTAVVIDIRKESPLKTILFSKKGTDLFNCIYALGEPVRYEYIHKKWELDYYQTVFASQPGSVEMPSAGRAFSWELLFNLQRKGIELDFIQLHTGLSYLLDDDYEPSPTDNYEEYHLSEKTIEKIHMTKAAGGRVIAVGTTVVRALESAGVTGELNGVTNLYINQSFPLKMVDGIITGFHEPKASHLDMLTAFVPQDLLWSAYEEAIEQQYLWHEFGDMNLIL

SEQ ID NO: 71391 - protein, 342 aa, Rhodococcus qingshengii
  REGION 1..342: note = tr|A0A4R6A3M9|A0A4R6A3M9_9NOCA S-adenosylmethionine:tRNA ribosyltransferase-isomerase; OS = Rhodococcus qingshengii OX=334542 GN=queA PE=3 SV=1
MKVDLFDFHLPEELIAQVPLQNRTDSRLMVVNKETGVIKHEIFKNISEYLREGDCLVLNDTKVLPARLFGVKKDTGAKIEVLLLKQLEGDQWETLVKPAKRIKEGTEIDFGDGLLTAVCTGSSEHGGRVLEFHYEGIFYEILNQLGEMPLPPYIKEQLEDRDRYQTVFAREPGSAAAPTAGLHFTEDLLNEVREKGVHVAFITLHVGLGTFRPVSVDDVLEHDMHSEFYMITEGTARLLNEVRQNGGRIITVGTTSTRTLETIASENNGSFIESSGWTNIFIYPGYEFKAIDGMITNFHLPKSTLIMLVSALAGRENILHAYTTAVNEHYRFFSFGDAMLII

SEQ ID NO: 71392 - protein, 356 aa, Rhodococcus sp.
  REGION 1..356: note = tr|A0A541B4D3|A0A541B4D3_9NOCA S-adenosylmethionine:tRNA ribosyltransferase-isomerase; OS = Rhodococcus sp. C9-5 OX=2546320 GN=FK531_16620 PE=3 SV=1
MTTADRTSEPRTRFELSHRQEADVPPEARGLARDGVRLLVSDREKLEHSVFRDIPRFLRAGDLLVVNTSATLPAAVDAEIDGEGRVVVHFSTPLGSGPLGGQDWAVEVRGPGPVTGPLPGIGVGTRIRLPRNASVMLLEPWPPGSRRLWRARVDGMADVTSDLLAAEGRPVTYAYVSGRWPLPYYQTVFGRDPGSAEMPSAGRPFTDVLIADLVARSVLVAPVLLHTGVSSPEAGEPPLPERYAVPATTARLVNETRAAGGRVIAVGTTVTRALETAATVGGRAVEGAGWTDLVLGRHRRARVVDGLVTGWHAPGASHLMLLEAVVGESVVRRAYEAALTHGYLWHEFGDSALLLR

SEQ ID NO: 71393 - protein, 352 aa, Rhodococcus sp.
  REGION 1..352: note = tr|A0A285E560|A0A285E560_9NOCA S-adenosylmethionine:tRNA ribosyltransferase-isomerase; OS = Rhodococcus sp. OK270 OX=1882814 GN=SAMN05447004_11960; PE = 3 SV=1
MTEVRVEAAAGPDFVLPNRLEASGPPESRGQLRDTVRLLVAEGDRVEHARFHELPRYLRGGDVVIVNTSATLAAAVDGTVDGVGRVVVHFSTPLDDGAWVVEVRAPGPVTGPLGAASAGMRIRLPLGAQATLREPWPRTSIRLWRAEIDGVADVARDLLAVAGRPITYAYVRERWPLPYYQTIFGKDRGSAEMASAARPFTHPMMTDLAVSGVAVAPILLHTSVSSAEPGEPPIPERYELPEWTARLINDRRAAGGRVIAVGTTVTRALETGATEGGTAVAGAGWTDLVLSGRRPARVVDGLITGWHAPGASHLMLLESVVGPAAVRRAYEAALAEGYLWHEFGDSALLLRA

SEQ ID NO: 71394 - protein, 352 aa, Rhodococcus wratislaviensis
  REGION 1..352: note = tr|A0A3D9QY73|A0A3D9QY73_9NOCA S-adenosylmethionine:tRNA ribosyltransferase-isomerase; OS = Rhodococcus wratislaviensis OX=44752 GN=C8E05_0328 PE=3; SV = 1
MTGARVASAAEFRFVLPRRLEASGPPESRGLLRDAVRLLVSDRGRVEHTRFHDLPRFLRPGDVVVVNASSTLAAAVDGTVDAVGPVVVHFSTDLGDGDWAVEVRAPGPVSGALDTVAAETRIILPRGVVATLMEPWPVGSTRLWRASIVGVKDVAAELLATSGRPITYAYVHDRWPLPSYQTIFGRTGGSAEMASAARPFTHPMVTDLATSGVVMAPILLHTGVSSPERGEPPIPERYEVPEQTAQLVNDRRAAGGRVIAVGTTVTRALETQATSDGMAVAGAGWTDLVLSAGRPTRVVDGLITGWHAPGASHLMLLESVVGEGAVRHAYDEALARGYLWHEFGDSALLLRR

SEQ ID NO: 71395 - protein, 352 aa, Rhodococcus wratislaviensis
  REGION 1..352: note = tr|X0R5U8|X0R5U8_9NOCA S-adenosylmethionine:tRNA ribosyltransferase-isomerase OS=Rhodococcus wratislaviensis NBRC 100605 OX=1219028 GN=RW1_030_00770; PE = 3 SV=1
MTGARVASAAEFRFVLPRRLEASGPPESRGLLRDAVRLLVSDRGRVEHTRFHDLPRFLRPGDVVVVNASSTLAAAVDGTVDAVGPVVVHFSTDLGDGDWAVEVRAPGPVSGALDTVAAETRIILPRGVVATLMEPWPVGSTRLWRASIDGVKDVAAELLATSGRPITYAYVHDRWPLPSYQTIFGRTGGSAEMASAARPFTHPMVTDLATSGVVTAPILLHTGVSSPERGEPPIPERYEVPEQTAQLVNDRRAAGGRVIAVGTTVTRALETQATSDGMAVAGAGWTDLVLSAGRPTRVVDGLITGWHAPGASHLMLLESVVGEAAVRHAYDEALAHGYLWHEFGDSALLLRR

SEQ ID NO: 71396 - protein, 342 aa, unidentified
  source 1..342: note = Rhodocyclaceae bacterium
  REGION 1..342: note = tr|A0A431KYZ0|A0A431KYZ0_9RHOO S-adenosylmethionine:tRNA ribosyltransferase-isomerase; OS = Rhodocyclaceae bacterium OX=1898103 GN=queA PE=3 SV=1
MALTLDDFDYLLPQELIAQAPLERRTDSRLLQVSTTLGDLRFSDLPSLLAPGDLLVFNDTRVLHARLFGTKDTGGQVEVMIERPLGAHEALAQIRASKSPKPGTRLHLEGALEVEVLGRAGEFFHLRFPATEDLVELLERHGRLPLPPYIERSAGNADESRYQTVYARNPGSVAAPTAGLHFDEPLLARLAEQGVNSAYVTLNVGAGTFQPVRVQDLSEHQMHTEAYFVPKATVDAIAATKAAGKRVVCVGTTSMRALESAARSRTLQAGEAESDLFILPGYEFNVADALITNFHLPKSTLLMLVSALAGMDTIRRAYAHAIEQRYRFFSYGDAMFLTRDSQ

SEQ ID NO: 71397 - protein, 370 aa, unidentified
  source 1..370: note = Rhodocyclaceae bacterium
  REGION 1..370: note = tr|A0A524BCD9|A0A524BCD9_9RHOO S-adenosylmethionine:tRNA ribosyltransferase-isomerase; OS = Rhodocyclaceae bacterium OX=1898103 GN=queA PE=3 SV=1
MTSLSVDDFDFHLPPELIAQHPAAERRGSRLLHVCPRGLPAGCCGEPENPAKIGSKGLQLVDRQFADLPGLLRAGDLLVFNDTRVIKARFFGCKDTGGHIEVMLERIVDATHAICQIRASKAPKAGSTLRLADAFDVRMTGRAGTDGDFFALELVDAGNFWELSEQYGKLPLPPYIEHPAEGADETRYQTVYAREPGAVAAPTAGLHFDEAMLETLRAQGINTAFLTLHVGAGTYRPMRVEKIADHRMHSERFEIPQATVEAIAATRAAGGRIIAVGTTSLRALESAGNDNGAVRVGGAETDIFITPGYRFKVVDRLITNFHLPKSTLLMLVSAFSGMAAIREAYAHAVAQRYRFFSYGDAMLLEKADAV

SEQ ID NO: 71398 - protein, 344 aa, unidentified
  source 1..344: note = Rhodocyclales bacterium
  REGION 1..344: note = tr|A0A363SGR5|A0A363SGR5_9RHOO S-adenosylmethionine:tRNA ribosyltransferase-isomerase; OS = Rhodocyclales bacterium OX=2072421 GN=queA PE=3 SV=1
MPLSLADFDYDLPPELIAQFPLPERTASRLLAVDGDKLEDRRFSEIAQLLRAGDLLVFNDTRVLHARLHGVKDSGGRVEVLIERPVGRHEALAQIRASHAPWPGSRLVLEGVLEVSVVAREGAFFLLRFPGPEDLVDLLERHGKLPLPPYIQRQSEDADEARYQTVYARNRGSVAAPTAGLHFDAPLLDALRAKGVDFAWLTLHVGAGTFQPVRVEDLAHHRMHRERYVIPVDTANALAAARARGGRIVAVGTTSLRALEAAAQEGEILAGPGETELFILPGFRFRTADALITNFHLPKSTLLMLVSAFGGLENLRRAYAHALAERYRFFSYGDAMFITRHDTP

SEQ ID NO: 71399 - protein, 372 aa, unidentified
  source 1..372: note = Rhodocyclales bacterium
  REGION 1..372: note = tr|A0A2M7Y6F4|A0A2M7Y6F4_9RHOO S-adenosylmethionine:tRNA ribosyltransferase-isomerase; OS = Rhodocyclales bacterium CG_4_9_14_3_um_filter_68_10; OX = 1974089 GN=queA PE=3SV=1
MGHGFPAFGAAHRDDELATRPAEVSRTIAPVKLSDFDYALPPELVARHPLPSRSASRLLVLRGSRIDDRCFRDLPALLRPGDLLVANDTRVVHARLRGAKPSGGRVEALVERIVGEHEADAQLRASHKPQPGTRLLIDGGLELEVVAREGDFFRLRFPGDDNVMTLLERHGSLPLPPYLGREPEAADEIRYQTVYARSDGSAAAPTAGLHFDRALLDELAARAVGFAHLTLDVGAGTFQPVRVEDLAQHRMHRERYRVPEETVRAVAAARAAGGRVLAVGTTSLRALEAAAASGTLEAGEGETGLFILPGYRFRVPDGLITNFHLPRTTLLMLACAFGGTRNVLHAYGHAIRCGYRFYSYGDAMFIEREAQA

SEQ ID NO: 71400 - protein, 374 aa, Rhodoferax antarcticus
  REGION 1..374: note = tr|A0A1Q8YIF4|A0A1Q8YIF4_9BURK S-adenosylmethionine:tRNA ribosyltransferase-isomerase; OS = Rhodoferax antarcticus ANT.BR OX=1111071 GN=queA PE=3; SV = 1
MNINTPLHPRPYTLSDFDFELPPELIAQHPAPERSGSRLLDGSASTPVDRIFRGLPALLQPGDLMVFNDTQVMNARLFGEKPTGGKVELLVERVLGANQVAAHMRVSKKPEVGTSLALIGAPGTREHLSATLLGRWPDEQGTLFRFVLSNDAGDDPYTLMARHGHVPLPPYITHTDSPEDAKRYQTVFAKNPGAVAAPTAALHFDEALLAQIDAMGVQRAHVTLHVGAGTFQPVKTENLAEHQMHSEWFEVPVATQQALADCHARGGRVVAVGTTTVRTLESWALENGIGSPMAQQPRALTPFSRDTRIFITPGFDFKVVDALITNFHLPKSSLMMLVSAFAGFEHIRALYAHAIREKYRFFSYGDAMLLARRA

SEQ ID NO: 71401 - protein, 360 aa, Rhodoferax fermentans
  REGION 1..360: note = tr|A0A1T1ATG4|A0A1T1ATG4_RHOFE S-adenosylmethionine:tRNA ribosyltransferase-isomerase; OS = Rhodoferax fermentans OX=28066 GN=queA PE=3 SV=1
MNTSSPSAPRSFTLSDFDFQLPPELIAQHPAPERSGSRLLDGRSASPVDRVFRDLPALLQPGDLMVFNDTQVMNARLFGEKPTGGKLELLVERVLGGNQVAAHMRVSKKPEVGTTVALVSAPGSTDHLSATLLGRWPDEQGALFRFVLSNDAGDDPYTLMSRHGHVPLPPYITHTDSEEDARRYQTVFAKNPGAVAAPTAALHFDEALLAQIDALGVQRAQVTLHVGAGTFQPVKTENLSEHQMHSEWYEVPASTQQAIADCRARGGRIVAVGTTTVRTLESWAQSGTSTGDTRIFITPGFEFRQVDALITNFHLPKSSLMMLVSAFAGYEHIMALYAHAIQEKYRFFSYGDAMLLTRQP

SEQ ID NO: 71402 - protein, 360 aa, unidentified
  source 1..360: note = Rhodoferax ferrireducens
  REGION 1..360: note = tr|Q221C4|Q221C4_RHOFT S-adenosylmethionine:tRNA ribosyltransferase-isomerase OS=Rhodoferax ferrireducens (strain ATCC BAA-621 / DSM 15236 / T118) OX=338969; GN = queAPE=3 SV=1
MPLTLADAARAFTLSDFDFHLPPELIAQHPAPERSGSRLLDSTSATPQDRVFRDLPSLLQPGDLLVFNDTRVINARLFGEKSTGGKLELLVERVLGGNQVAAHLRVSKKPEVGASVALTGAPGTHENLRATLLGRWPDAQGALFRFVLTNDAGDDPFTLMARHGHVPLPPYITHSDSAEDAARYQTVFAKNPGAVAAPTAALHFDDALLAALDARGVQRAFVTLHVGAGTFQPVKTENLAEHQMHSEWYDVPTATQQAIADCRARGGRLIAVGTTTVRTLESWAKTGQTTGDTQIFITPGFEFQLVDLLVTNFHLPKSSLMMLVSAFAGYEPVMALYQHAMAAQYRFFSYGDAMLLARQR

SEQ ID NO: 71403 - protein, 375 aa, unidentified
  source 1..375: note = Rhodoferax ferrireducens
  REGION 1..375: note = tr|A0A1W9KSM2|A0A1W9KSM2_9BURK S-adenosylmethionine:tRNA ribosyltransferase-isomerase; OS = Rhodoferax ferrireducens OX=192843 GN=queA PE=3 SV=1
MNTYTHHSPRPYTLSDFDFELPPELIAQHPAPERSSSRLLDGSGGKPVDRIFRDLPMLLQPGDLMVFNDTQVMNARLFGEKPTGGKVELLIERVLGGNQVVAHMRVSKKPEIGTTITLVAAPGYTDHPSATLLGRWPDAQGTLFRLVLSNDAGDNPYTLMARHGHVPLPPYITHTDSVEDAQRYQTVFAKHPGAVAAPTAALHFDDALLAQIDALGVQRAHVTLHVGAGTFQPVKTENLAEHQMHSEWFEVPVATQQAIADCRARGGRVVAVGTTTVRTLESWAACATTPGPNVADAPLVPVSGDTRIFITPGFDFQMVDALITNFHLPKSSLMMLVSAFAGYEPIRALYAHAIREKYRFFSYGDAMWLVRQAKE

SEQ ID NO: 71404 - protein, 359 aa, unidentified
  source 1..359: note = Rhodoferax koreense
  REGION 1..359: note = tr|A0A1P8JR04|A0A1P8JR04_9BURK S-adenosylmethionine:tRNA ribosyltransferase-isomerase; OS = Rhodoferax koreense OX=1842727 GN=queA PE=3 SV=1
MSTRPFTLSDFDFILPEALIAQHPATERSASRLLDGTAAHPVDRVFRDLPGLLRAGDLLVFNDTKVVKARLFGEKASGGKVELLVERVLTGNQVAAHMRVSKKPEPGATISLAGKDEESGFRATLLGRWPDADGTLFRFVLSNDAGDDPYTLMERHGHVPLPPYITHTDSAEDAERYQTVFARAPGAVAAPTAALHFDAAVLAGLDARGVQRASVTLHVGAGTFQPVKTENIAEHQMHSEWYEVPAATQQAIAECRARGGRVVAVGTTSVRTLESWAASGLASGDTRIFITPGFDFQVVDVLITNFHLPKSTLMMLVSAFAGYEPIMALYRHAIAQQYRFFSYGDAMLLERKSVDGAAA

SEQ ID NO: 71405 - protein, 363 aa, unidentified
  source 1..363: note = Rhodoferax saidenbachensis
  REGION 1..363: note = tr|A0A1P8K6C4|A0A1P8K6C4_9BURK S-adenosylmethionine:tRNA ribosyltransferase-isomerase; OS = Rhodoferax saidenbachensis OX=1484693 GN=queA PE=3 SV=1
MPLHPSDADRVYTLSDFDFELPEALIAQHPAPERSGSRLLDGTGATSVDRIFRELPSLLKTGDLLVFNDTKVINARLFGEKATGGKVELLIERVLGGNQVAAHMRVSKKPEVGATIKMTCAPGQEDGLSATLLGRWPNVDGPIYRFVLSNDRGDDPYTLMERHGHVPLPPYITHSDSPEDVQRYQTVFAKNPGAVAAPTAALHFDEALFAQFDAMGVSRAHVTLHVGAGTFQPVKTENLAEHQMHSEWYDVPAATQQAIAECKARGGRIVAVGTTTVRTLESWAKTGLASGDTNIFITPGFDFQLIDLLVTNFHLPKSSLMMLVSAFAGYEHIMGLYGEAIARGYRFFSYGDAMLLERTRALP

SEQ ID NO: 71406 - protein, 360 aa, Rhodoferax sp.
  REGION 1..360: note = tr|A0A1G3HTS3|A0A1G3HTS3_9BURK S-adenosylmethionine:tRNA ribosyltransferase-isomerase; OS = Rhodoferax sp. RIFCSPLOWO2_12_FULL_60_11 OX=1802019; GN = queA PE=3 SV=1
MPLTLADAARAFTLSDFDFHLPPELIAQHPAPERSGSRLLDSTGATPQDRVFRDLPSLLQPGDLLVFNDTRVINARLFGEKSTGGKLELLVERVLGGNQVAAHLRVSKKPEVGASVALTGAPGTHENLRATLLGRWPDAQGALFRFVLTNDAGDDPFTLMARHGHVPLPPYITHTDSAEDAARYQTVFAKNPGAVAAPTAALHFDDALLAAIDARGVQRAFVTLHVGAGTFQPVKTENLAEHQMHSEWYDVPAATQQAIAECRARGGRLIAVGTTTVRTLESWAKTGQTTGDTQIFITPGFEFQLVDLLVTNFHLPKSSLMMLVSAFAGYEPVMALYRHAMAAQYRFFSYGDAMLLARQR

SEQ ID NO: 71407 - protein, 367 aa, Rhodoferax sp.
  REGION 1..367: note = tr|A0A515EK19|A0A515EK19_9BURK S-adenosylmethionine:tRNA ribosyltransferase-isomerase; OS = Rhodoferax sp. Gr-4 OX=2527691 GN=queA PE=3 SV=1
MTLASAAARTFTLSDFDFALPDNLIAQHPAPQRTASRLLDGTGANSVDRIFKDLPTLLRAGDLMVFNDTKVINARLFGEKATGGKLELLIERVLGGNQVAAHMRVSKKPEVGATVKLVCAPGCEDGLSATLLGRWPNADGPLFRFVLSNDAGDNPYTLMERHGHVPLPPYITHTDSAEDAQRYQTVFAKNPGAVAAPTAALHFDEALLAQLDAMGVQRAHVTLHVGAGTFQPVKTENIAEHQMHSEWYQVPQATIDAIAACKARGGRVIAVGTTTVRTLESWAKSCTGPGFAGGITEGDTNIFITPGFAFEVVDMLITNFHLPKSSLMMLVSAFAGYVPIMALYRDAIAREYRFFSYGDAMLLARAA

SEQ ID NO: 71408 - protein, 333 aa, unidentified
  source 1..333: note = Rhodohalobacter barkolensis
  REGION 1..333: note = tr|A0A2N0VEU1|A0A2N0VEU1_9BACT S-adenosylmethionine:tRNA ribosyltransferase-isomerase; OS = Rhodohalobacter barkolensis OX=2053187 GN=queA PE=3 SV=1
MSYTLDDFDYHLPEELIAQKPATPRDHSRLLVYDRETGTIRDDYFYNIGDYLPVNTSLVVNNSKVEKCRLLFNEDKVEIFVTKAVNDRVVEAMVRPGKKFKPGKTVDLADGLTAKTLNIAEDGIRTIELSRSLDDEITEKYKHTPFPPYIERDESLADRYQTVYAKDEGSKAAPTAGLHFTPDLLEKLEKQGIEKKEVTLHVGLGTFAPVKADKIEDHIMHSEWFQISQKQADELNRSKSITAVGTTSVRVLESAQKIEGKFVAGSGETDIFITPGYSFKSVDHLITNFHLPKSTLLMLISAFIGMDETKRIYQHAIREKYRFYSFGDAMLLL

SEQ ID NO: 71409 - protein, 348 aa, unidentified
  source 1..348: note = Rhodohalobacter sp.
  REGION 1..348: note = tr|A0A371QKQ2|A0A371QKQ2_9BACT S-adenosylmethionine:tRNA ribosyltransferase-isomerase; OS = Rhodohalobacter sp. SW132 OX=2293433 GN=queA PE=3 SV=1
MKLTDFKFEIEDFNVPEEPVNPRDSSKLMVLNREDQSIKHETFADIHKYVNEGDVIIYNNTKVFPAKLKGKKEKTDADIEVFLLRELMPENMLWDVLVEPARKIRIGNKLYFGEDLMAEVVDNTTSRGRTIRFLYEGSNEELYERLDEIGDMPLPPYIEREPVEGDKERYQTIFAKERGAVAAPTAGMHFTEELVEKIEKKGAEFLPVTLHIGWGTFRNVEVEDLTKHRMDSENFLISKDTSDKINTALKSKKNKVIACGTSAVRVIETSVMASGMSKPGTGWTDKFIYPDYDFKITEAVITNFHRPESTLLMLAAAFGSYDFIMKAYEEAKENDYRFFTFGDAMLIL

SEQ ID NO: 71410 - protein, 333 aa, unidentified
  source 1..333: note = Rhodohalobacter sp.
  REGION 1..333: note = tr|A0A371QTB1|A0A371QTB1_9BACT S-adenosylmethionine:tRNA ribosyltransferase-isomerase; OS = Rhodohalobacter sp. SW132 OX=2293433 GN=queA PE=3 SV=1
MSFTLDDFDYNLPEELIAQKPATPRDHSRLLVYNRETGEITDDYFYNIGDYLPPDTSLVVNNSKVEKCRLLFNDGKVEIFVTRAVNNRVVEAMVRPGKKFRSGKTVDLTDELSAKTISIADDGIRTIELSHPLDHPVVTPYKHTPFPPYIERDESLSERYQTVYAKDSGSKAAPTAGLHFTPELLEKLAAQGIRKNEVTLHVGLGTFAPVKADRIEDHIMHSEWYQISQQQADALNKTKRVTAVGTTSVRVLESAPKEEGSFIPCSGETDIFITPGYTFKSVDHLITNFHLPKSTLLMLIAAFTGFDEMKKIYQHAIQQNYRFYSFGDAMLIL

SEQ ID NO: 71411 - protein, 364 aa, unidentified
  source 1..364: note = Rhodomicrobium udaipurense
  REGION 1..364: note = tr|A0A037V241|A0A037V241_9RHIZ S-adenosylmethionine:tRNA ribosyltransferase-isomerase; OS = Rhodomicrobium udaipurense JA643 OX=858455 GN=queA PE=3; SV = 1
MHLKDFDFELPKSAIALRPASPRDAARLLRVDPAAPEPLSEATIRDLPAFFRPGDIMVFNDTRVLSAELSGTRPPRDADAPAVDVSLNLIEREASGSWKAFARPARRLRPGDAIHFETGGQASRLIVVAKSDEGEITLAAPDGDSVEAVMQRHGAMPLPPYIARQRPADERDRSDYQTVFARNEGAVAAPTAGLHFTPELLARLAERGVETAFVTLHVGAGTFLPVKSETVEDHEIHAEWFEIGDETARAINAARERGSRIIAAGTTSLRVLETATREDGFIEPAKGFTRIFIKPGHRFRSADLLVTNFHLPKSTLFMLVCAFSGTDIMKRAYAHAVDAGFRFYSYGDACLLSRADALPSAARP

SEQ ID NO: 71412 - protein, 391 aa, Rhodomicrobium vannielii
  REGION 1..391: note = tr|E3I2T6|E3I2T6_RHOVT S-adenosylmethionine:tRNA ribosyltransferase-isomerase OS=Rhodomicrobium vannielii (strain ATCC 17100 / ATH 3.1.1 / DSM 162 / LMG 4299); OX = 648 757 GN=queA PE=3 SV=1
MSGRTRALIFYFGTCPPLGLPFLRRRIVHLTDFDFELPKSAIALRPASPRDAARLLRVDPAAPQPLSEATIRDLPAFFRPGDIMVFNDTRVLSAELSGTRPPRDADAPAVDVSLNLIEREASGSWKAFARPARRLRPGDAIHFETGGHASRLIVVAKSDEGEITLAAPDGDSVEAIMQRHGAMPLPPYIARQRPADERDRSDYQTVFARNEGAVAAPTAGLHFTPELLARLAERGIETAFVTLHVGAGTFLPVKSETVEDHEIHAEWFEIGDATARAINAARERGGRIIAAGTTSLRVLETATREDGFIEPAKGFTRIFIKPGHCFRSADLLVTNFHLPKSTLFMLVCAFSGTDLMKRAYAHAVEAGFRFYSYGDACLLARADAQPSTARP

SEQ ID NO: 71413 - protein, 409 aa, Rhodonellum psychrophilum
  REGION 1..409: note = tr|U5BU99|U5BU99_9BACT S-adenosylmethionine:tRNA ribosyltransferase-isomerase OS=Rhodonellum psychrophilum GCM71 = DSM 17998 OX=1123057 GN=queA PE=3 SV=1
MRTNPTWEDLKLSDYEYTLPEDRIAKFPLEKRDESKLLHYKNSKIEHLHFSELPKLIPSGSLMVFNNTKVIPARLIFQRPTGAKIEIFLLKPVLPTTVINEVMLETGSVSWETMIGNLKKWKEGEVLEGVITIKEEKLVLSAELVDRENRMVRLSWTDSAIPFVSIVEAAGEVPLPPYLNRKATEEDKPRYQTIYSKKEGAVAAPTAGLHFTEKILNQIEERNIGIDYLTLHVGAGTFQPIKEEEVSKHGMHSEQIVVDISTITRISEHEHALIAVGTTSMRSLESLYWFGVKLQQNAGEEFLIPKLYPYQPFTSLPSRKESFETILKWMEAKGIGEITGSTEILIMPGYNFRVCQGLVTNFHQPSSTLILLVAAFTGGNWRKIYDSALKNEYRFLSFGDSSLLWHEEF

SEQ ID NO: 71414 - protein, 349 aa, Rhodonellum psychrophilum
  REGION 1..349: note = tr|U5C3M4|U5C3M4_9BACT S-adenosylmethionine:tRNA ribosyltransferase-isomerase OS=Rhodonellum psychrophilum GCM71 = DSM 17998 OX=1123057 GN=queA PE=3 SV=1
MKLSDFKFDVPRKLISLYPAENRDESRLMVVHRKTGEIEHRIFKDIIEYFDEGDVFVMNNTKVFPARLYGNKEKTGAKIEVFLLRELNQELRLWDVLVDPARKIRVGNKLYFGDSDLVAEVIDNTTSRGRTIRFLFDGTDEEFYKTVDTLGETPILKEFIERSVEAEDRERYQTIFAKHVGAVAAPTAGLHFTPHLLKRLELKGVDVTPITLHVGLGTFRQVDVEDLTKHKMDSENFDIPEETVNLVNRALDSKKRVVSVGTTTLKTIESSVTANGRLKEDRGWTDKFITPPYEFKIANALITNFHLPESTLLMTASAFGGYDLIMKAYQIAIKEKYRFFSYGDAMLIL

SEQ ID NO: 71415 - protein, 358 aa, Rhodopila globiformis
  REGION 1..358: note = tr|A0A2S6NLN1|A0A2S6NLN1_RHOGL S-adenosylmethionine:tRNA ribosyltransferase-isomerase; OS = Rhodopila globiformis OX=1071 GN=queA PE=3 SV=1
MPVATDVEPPVTPLTLADFDYTLPPERIAHEPARPRDSARLLHVHPGGLADRLVRDLPGLLRPGDVLVANDTRVFPAQLTALRGAARIGITLDRPRRDGAWKALARNARRLHAGDALAIAGAGMLTARVVDKHADGSVGLAFNLDGDDLMAAFHEAGALALPPYIDRPHGPLPSDSADYQTVFAQREGAVAAPTAGLHFTPALLAALDAAGVRRVTLTLHVGIGTFLPVRVERVADHRMHAERGEITAEAAAAINQARRDGGRVIAVGTTSLRLLESAAWPAGTVQPFRGETSLFILPGYGFKAVDRLLTNFHLPRSTLLMLVSAFSGRARILAAYEHAIVAGYRFHSYGDACFLEPG

SEQ ID NO: 71416 - protein, 402 aa, Rhodopirellula baltica
  REGION 1..402: note = tr|L7CK20|L7CK20_RHOBT S-adenosylmethionine:tRNA ribosyltransferase-isomerase OS=Rhodopirellula baltica SWK14 OX=993516 GN=queA PE=3 SV=1
MFRQAVLATIAERPYAGRSILSDTFLRSYASFRMPSLDLYDYELPRELIAQEPLQNRVDARLMVIDRASGEIEHHHVRDLPQLLRAEDVMVKNNSRVVPARLFGRRTKTGGRWQGLFLRSDRATGVWELLTKTRGTLQTGETITLDDRDARAGGELMVIGRDDQGHLLVQPVPNESFEGPPQAIEPGKWLDKYGRVPIPPYIRDGHMVDADVTNYQTVFASTNPEDAGSVAAPTAGLHFTKQLLDEIAKGQTASAEVTLHVGIGTFRPIEVDDIDQHQMHEEWGRIEEDAVETINDRRSGGGRCVAVGTTSVRVLESCVANRNETNGRGVAATWTGATDIFIKPPYRFGVVDALMTNFHLPKSSLLVLVSAFAGHELIRRAYQEAIANEYRFFSYGDAMLIV

SEQ ID NO: 71417 - protein, 402 aa, Rhodopirellula baltica
  REGION 1..402: note = tr|K5E3S5|K5E3S5_RHOBT S-adenosylmethionine:tRNA ribosyltransferase-isomerase OS=Rhodopirellula baltica SH28 OX=993517 GN=queA PE=3 SV=1
MFRQAVLATIAERPYAGRSILSDTFLRSYASFRMPSLDLYDYELPRELIAQEPLQNRVDARLMVIDRASGEIEHHHVRDLPQLLRAEDVMVKNNSRVVPARLFGRRTKTGGRWQGLFLRSDRATGVWELLTKTRGTLQTGETITLDDRDARAGGELMVIGRDDQGHLLVQPVPNESFEGPPQAIEPGKWLDKYGRVPIPPYIRDGHMVDADVTNYQTVFASTNPEDAGSVAAPTAGLHFTKQLLDEIAKGQTASAEVTLHVGIGTFRPIEVDDIDQHKMHEEWGRIEEDAVETINDRRSGGGRCVAVGTTSVRVLESCVANRNETNGRGVAATWTGATDIFIKPPYRFGVVDALMTNFHLPKSSLLVLVSAFAGHELIRRAYQEAIANEYRFFSYGDAMLIV

SEQ ID NO: 71418 - protein, 388 aa, unidentified
  source 1..388: note = Rhodopirellula europaea
  REGION 1..388: note = tr|M2AX02|M2AX02_9PLAN S-adenosylmethionine:tRNA ribosyltransferase-isomerase OS=Rhodopirellula europaea 6C; OX = 1263867 GN=queA PE=3 SV=1
MLVDRLFPTHFLRPYASFRMPSLDLYDYELPRELIAQEPLQNRVDARLMVIDRASGEIEHHHVRDLPQLLRAEDVMVKNNSRVVPARLFGRRTKTGGRWQGLFLRSDRATGVWELLTKTRGTLQTGETITLDDRDARAGGELMVIGRDDQGHLLVQPVPNEFFDGPPQAIEPGKWLDKYGRVPIPPYIRDGHMVDADVTNYQTVFASINPEDAGSVAAPTAGLHFTKQLLDEIAKGQTASAEVTLHVGIGTFRPIEVDDIDQHQMHEEWGRIEEDAVETINDRRSGGGRCVAVGTTSVRVLESCVTNRNETNGRGVAATWTGATDIFIKPPYRFGVVDALMTNFHLPKSSLLVLVSAFAGHDLIRRAYKEAIANEYRFFSYGDAMLIV

SEQ ID NO: 71419 - protein, 388 aa, unidentified
  source 1..388: note = Rhodopirellula europaea
  REGION 1..388: note = tr|M5RYU6|M5RYU6_9PLAN S-adenosylmethionine:tRNA ribosyltransferase-isomerase OS=Rhodopirellula europaea SH398 OX=1263868 GN=queA PE=3 SV=1
MLFDRFFPTLFLRPYASFRMPSLDLYDYELPRELIAQEPLQNRVDARLMVIDRASGEIEHHHVRDLPQLLRAEDVMVKNNSRVVPARLFGRRTKTGGRWQGLFLRSDRATGVWELLTKTRGTLQTGETITLDDRDARAGGELMVIGRDDQGHLLVQPVPNESFDGPPQAIEPGKWLDKYGRVPIPPYIRDGHMVDADVTNYQTVFASTNPEDAGSVAAPTAGLHFTKQLLDEIAKGQTASAEVTLHVGIGTFRPIEVDDIDQHQMHEEWGRIEEDAVETINDRRSGGGRCVAVGTTSVRVLESCVTNRDETNGRGIAATWTGATDIFIKPPYRFGVVDALMTNFHLPKSSLLVLVSAFAGHDLIRRAYKEAIANEYRFFSYGDAMLIV

SEQ ID NO: 71420 - protein, 397 aa, unidentified
  source 1..397: note = Rhodopirellula islandica
  REGION 1..397: note = tr|A0A0J1BJD5|A0A0J1BJD5_RHOIS S-adenosylmethionine:tRNA ribosyltransferase-isomerase; OS = Rhodopirellula islandica OX=595434 GN=queA PE=3 SV=1
MVAAIAQRPYAGRSILPTHFLCSDASFRMPSLDLYDYELPRERIAQEPLPNRVDARLMVIDRASGEIEHHHVRDLPQLLRAEDVMVMNNSRVVPARLFGRRTKTGGRWQGLFLRSDRATGVWELLTKTRGTLQTGETITLDDRDARAGGELMVIGRDDQGHLLVQPVPNDFFEGPAKAIEPGKWLDRYGRIPIPPYIRDGHMVDADVTNYQTVFASSKPEDAASVAAPTAGLHFTKSLLTEIAKGQTAMAEVTLHVGIGTFRPIEVNDIDEHRMHEEWGRIESDAVSQINDRRSGGGRCVAIGTTSVRVLESCVANRNESDGRGVAETWTGATDIFIKPPYRFGVVDALMTNFHQPKSSLLVLVSAFAGHDLIRRAYQEAIENEYRFFSYGDAMLIV

SEQ ID NO: 71421 - protein, 358 aa, unidentified
  source 1..358: note = Rhodopirellula maiorica
  REGION 1..358: note = tr|M5RTV0|M5RTV0_9PLAN S-adenosylmethionine:tRNA ribosyltransferase-isomerase OS=Rhodopirellula maiorica SM1 OX=1265738 GN=queA PE=3 SV=1
MSDIEQYDYDLPRERIAQEPLATRSDARLMLVDRKAGTIDHHYVRDLPELLKADDTLVLNNTRVIPAKLVGYRAETSGQWQGLFLRADAATGVWEVLTKTRGTLRPGEAITIKDREGRPSMQLVVVSRTDDGHLLVTPRLPGRDESEWPREPADWLERYGRIPLPPYIRDGQMVDADVKNYQTVFAEHRGSVAAPTAGLHFTDKLLEYIRTGGTDIQEVTLHVGIGTFRPIAVDRLDEHTMHSEWGQIDAATAETIRARRAHGRCIAVGTTSVRVLESAAQNAEGQLEPWTGATDLFIKPPYQFKVVDALMTNFHLPRSSLLVLVSAFAGRELIMEAYQNAIENEYRFFSYGDAMLIV

SEQ ID NO: 71422 - protein, 367 aa, unidentified
  source 1..367: note = Rhodopirellula sallentina
  REGION 1..367: note = tr|M5TXH4|M5TXH4_9PLAN S-adenosylmethionine:tRNA ribosyltransferase-isomerase OS=Rhodopirellula sallentina SM41 OX=1263870 GN=queA PE=3 SV=1
MHSLNLYDYTLPRELIAQEPLRNRVDARLMIIDRAKGTIEHHHVRDLPELLRAEDSLVLNNSRVVPARLIGYRTRTRGRWQGLFLRSDQESGVWELLTKTRGTLKTGETITLQDRDARDGGQLEVIGRDDEGHLLVRPLAESVHLDDSLAGHETSPTHWLERFGRVPIPPYIRDGRMVDADLVNYQTVFASKRDEDKASVAAPTAGLHFTENLLSNIRKGQTAIHEVTLHVGIGTFRPIESDNIDEHHMHHEWGRIDEQTCQNIQARRAAGGRCVAVGTTSVRVLESSVAANGGELKEWTGATDLFIKPPYQFGAVDALMTNFHLPKSSLLVLVSALAGRELIMEAYRQAIESEYRFFSYGDAMLIT

SEQ ID NO: 71423 - protein, 367 aa, Rhodopirellula sp.
  REGION 1..367: note = tr|A0A1Z8MKR8|A0A1Z8MKR8_9PLAN S-adenosylmethionine:tRNA ribosyltransferase-isomerase; OS = Rhodopirellula sp. TMED11 OX=1986614 GN=queA PE=3 SV=1
MSEIDQYDYQLPRELIAQEPLNNRSDARLMLINRASGEIQHHHVRDLPDLLRSEDTLVLNDSRVIPARMVGYRTRTGGRWQGLFLRQDPATGIWEVLTKTRGTLVAGETITIEDRNGLPGMRLQVVSRTDDGHLIAVPMPPEDRHAGGELPPIDGDSIDAAVWLERYGRVPLPPYIRDGHMMDSDVTNYQTVFAKAPGSVAAPTAGLHFTPNLLQQIVSGGTETASVTLHVGLGTFRPVSCERLEDHPMHTEWGQITEENAELINQRRSTGGRCVAVGTTSVRVLESAAAANGGQLKPWTATTDLFIRPPHDFKVVDALMTNFHLPKSTLMVLVSALAGRELIMEAYRQAIAEEYRFYSYGDCMMIV

SEQ ID NO: 71424 - protein, 366 aa, Rhodopirellula sp.
  REGION 1..366: note = tr|A0A255R0H7|A0A255R0H7_9PLAN S-adenosylmethionine:tRNA ribosyltransferase-isomerase; OS = Rhodopirellula sp. MGV OX=2023130 GN=queA PE=3 SV=1
MSEIDIYDFELPRELVAQQPLPTRSDARLMLVNRRSGTIEHHHVRDLPDLLRSEDTLVLNDSRVIPARMIGFRTRTGGRWQGLFLRADADSGIWEVLTKTRGKLVAGETITVEDRNGLPGMRLEVVARTNEGHLLVMPRPATESFGQMSSEGLDEDSPPHEWLQRYGRVPLPPYIRDGHMVDDDVERYQTVFSKTPGSVAAPTAGLHFTPPLLKQIQSGGTETASVTLHVGLGTFRPVATESLDDHVMHTEWAEISEENAALINERRTAGGRCVAVGTTSVRTLESAAAALDGALDAWSGTTDLFIRPPYQFKVVDALMTNFHLPKSTLLILVSALAGRELILEAYAKAVESEYRFFSYGDAMLIV

SEQ ID NO: 71425 - protein, 363 aa, Rhodoplanes elegans
  REGION 1..363: note = tr|A0A327JYF5|A0A327JYF5_9RHIZ S-adenosylmethionine:tRNA ribosyltransferase-isomerase; OS = Rhodoplanes elegans OX=29408 GN=queA PE=3 SV=1
MRTDLFDFDLPQERIALRPASPRDSARLLVVRPQAGADAAPALEDHVVRDLPSLLRPGDQLVVNDTKVIPAQLFGRRLGRGPEVAIEATLVERLDGSRWKALVKGSKKLSVGDTVRFGDEGKVCFLGQLDASVEQKGEGGAVTLAFTFHGPVLDQAIAERGAMPLPPYIAARRPADEQDRADYQTLFAREEGAVAAPTAGLHFTDDLLARLRDAGGGLHTVTLHVGPGTFLPVKADDTADHRMHAEYGVVSEATAAALNAAKRAGGRIVAVGSTSLRLLESAADEDGTIRPFAAETAIFITPGYRFRAVDVMMTNFHLPRSTLFMLVAAFSGLDTMRRAYAHAVATGYRFYSYGDASLLFRGE

SEQ ID NO: 71426 - protein, 360 aa, unidentified
  source 1..360: note = Rhodoplanes piscinae
  REGION 1..360: note = tr|A0A447CVP8|A0A447CVP8_9RHIZ S-adenosylmethionine:tRNA ribosyltransferase-isomerase; OS = Rhodoplanes piscinae OX=444923 GN=queA PE=3 SV=1
MRTDLFDFELPPDRIALRPVSPRDSARLLVVRPSGAPELDDRVVRDLPTLLRPGDQLVVNDTKVIPAQLFGRRLGRGAEVAIEATLIERLDGSRWRALVKGAKKLAAGDTVRFGDEGKVCFLGQLDATVEDKGEAGEVTLSFAFHGPVLDQAIAERGAMPLPPYIAGRRPADEQDRSDYQTLFAREEGAVAAPTAGLHFTDDLLARLAAAGVGLHRVTLHVGAGTFLPVKAEDTAEHRMHAERGQVSEATAAALNAARRAGGRIVAVGSTSMRLLESAADDDGTIRPFAGETAIFITPGYRFRAIDVMMTNFHLPRSTLFMLVSAFSGLDTMRRAYAHAVATGYRFYSYGDATLLFRETT

SEQ ID NO: 71427 - protein, 360 aa, unidentified
  source 1..360: note = Rhodoplanes piscinae
  REGION 1..360: note = tr|A0A327K693|A0A327K693_9RHIZ S-adenosylmethionine:tRNA ribosyltransferase-isomerase; OS = Rhodoplanes piscinae OX=444923 GN=queA PE=3 SV=1
MRTDLFDFDLPQDRIALRPVSPRDSARLLVVRPGGAPELDDRVVRDLPTLLRPGDQLVVNDTKVIPAQLSGRRIGRGAEAAIEATVIERLDGSRWRALVKGAKKLAAGDTVRFGDEGKVCFLGQLDATVEDKGEAGEVTLSFAFHGPVLDQAIAERGAMPLPPYIAGRRPADEQDRSDYQTLFAREEGAVAAPTAGLHFTDDLLARLAAAGIGLHRVTLHVGAGTFLPVKAEDTAAHRMHAERGQVSEATAAALNAARRAGGRIVAVGSTSMRLLESAADADGIIRPFAGETAIFITPGYRFRAIDVMMTNFHLPRSTLFMLVSAFSGLDTMRRAYAHAVATGYRFYSYGDATLLFRETT

SEQ ID NO: 71428 - protein, 358 aa, Rhodoplanes roseus
  REGION 1..358: note = tr|A0A327KJS0|A0A327KJS0_9RHIZ S-adenosylmethionine:tRNA ribosyltransferase-isomerase; OS = Rhodoplanes roseus OX=29409 GN=queA PE=3 SV=1
MRTDLFDFDLPPERIALRPASPRDSARLLVVRPGGAPELADHIVRDLPGLLRAGDQIVVNDTKVIPAQLFGRRLGRGLEVAIEATLVERIDGSRWRALVKGSKKLAVGDTVRFGDEGKVCFLGQLDATVEHKGEAGAVTLAFAFHGPVLDQAIAERGAMPLPPYIAARRPADEQDRADYQTLFAREEGAVAAPTAGLHFTDDLLARLDAAGIGLHTVTLHVGPGTFLPVKVDDTADHRMHAEYGVVSEVTAAALDAARKSGGRIVAVGSTSLRLLESAAEPDGTIAPFAAETSIFITPGYAFRAVDVMMTNFHLPRSTLFMLVAAFAGLDPMRRAYAHAIATGYRFYSYGDASLLFRE

SEQ ID NO: 71429 - protein, 359 aa, Rhodoplanes sp.
  REGION 1..359: note = tr|A0A127EUM6|A0A127EUM6_9RHIZ S-adenosylmethionine:tRNA ribosyltransferase-isomerase; OS = Rhodoplanes sp. Z2-YC6860 OX=674703 GN=queA PE=3 SV=1
MRTDLFDFDLPPERIALRPVSPRDAARLLVVRPGGTPEFDDRGVRDLPDLLNPGDALVVNDTKVISARLMGHRIGRGPDAKIEATLTERIDGSRWRAFAKPGKKLAPGDVIRFGEEGKVCFLGQLDATVESKGEGGEITLSFAFHGVVLDQAIAERGDMPLPPYIAGKRKPDAQDRDDYQTYFAREEGSVAAPTAGLHFTEALLGRLQARGVALHKVTLHVGPGTFLPVHADDTSDHKMHSEHAVLTAETAAALNAVHAKGGRIVAVGSTALRTLESAADDTGTIKPFSGDTALFITPGYRFKAVDVMMTNFHLPRSTLFMLVSALCGLDTMQRAYAHAIAGGYRFYSYGDASLLFRTQ

SEQ ID NO: 71430 - protein, 364 aa, Rhodopseudomonas faecalis
  REGION 1..364: note = tr|A0A318TAT3|A0A318TAT3_9BRAD S-adenosylmethionine:tRNA ribosyltransferase-isomerase; OS = Rhodopseudomonas faecalis OX=99655 GN=queA PE=3 SV=1
MSCQAFMRTDLFDFELPASAIALRPASPRDAARMLVVEPGRALHDQIVRDLPDWLRPGDALVVNDTKVIAAQLSGRRIGRATEPKIEATLIKRLDGSRWQALVKPAKKLTPGDVVRFGHDGRVCLLGQLDATVEHKGDAGEIILSFAMHGAVLDQAIAELGAPPLPPYIASKRTPDDRDASDYQTMFAAREGAVAAPTAGLHFTPALQEALAARGVSLHRVTLHVGAGTFLPVKTDDTAEHKMHAEWGCISSETAAALNAVHAAGGRIIAVGTTSLRLLESAAAEDGQLKPFADETSIFITPGYRFKAVDVLMTNFHLPRSTLFMLVSAFAGLGTMQHAYAHAISSGYRFYSYGDACLLFRTTP

SEQ ID NO: 71431 - protein, 360 aa, Rhodopseudomonas palustris
  REGION 1..360: note = sp|Q6N6L0|QUEA_RHOPA S-adenosylmethionine:tRNA ribosyltransferase-isomerase OS=Rhodopseudomonas palustris (strain ATCC BAA-98 / CGA009) OX=258594 GN=queA PE=3 SV=2
MRTELFDFDLPAENIALRPVSPRDAARMLVVRPGAPLEDRIVRDLPALLAPGDQLVVNDTRVIAAQLTGRRIGRGLEPKIEATLIKRLDGARWQALVKPAKKLLPGDVVRFGHDGRVCLLGHLDATVEAKGDAGEVTLVFSFHGPVLDQAIAEVGATPLPPYIASKRAPDAQDIADYQTMFASNEGAVAAPTAGLHFTAELETALAACGVGLHRITLHVGAGTFLPVKAEDTSEHRMHAEWGTISSGTAEALNAARAAGGRIVAVGTTSLRLLESAARDDGRIAPFADETSIFITPGYRFRAVDVLMTNFHLPRSTLFMLVSAFCGLDTMQAAYAHAIRTGYRFYSYGDASLLFRNDITP

SEQ ID NO: 71432 - protein, 358 aa, Rhodopseudomonas palustris
  REGION 1..358: note = sp|Q07MX7|QUEA_RHOP5 S-adenosylmethionine:tRNA ribosyltransferase-isomerase OS=Rhodopseudomonas palustris (strain BisA53) OX=316055 GN=queA PE=3 SV=1
MRTDLFDFDLPQGAIALRPASPRDAARMLVVEASGALHDRVVSELPEWLRPGDALVVNDTKVIAAQLTGRRIGRDTEPKIDATLIKRLDGSRWQALVKPAKKLLPGDIVRFGHDGRVCLLGQLDATVEAKGEAGEIILAFTLHGPVLDQAIAELGAPPLPPYIASKRAPDDRDAADYQTMFAANEGAVAAPTAGLHFTKALEQALAARGVTLHRVTLHVGAGTFLPVKTEDTAEHKMHAEWGCLSRETADALNAARAADGRIVAVGTTSLRLLESAAGDDGRLAPFADDTAIFITPGYRFKAVDVLMTNFHLPRSTLFMLVSAFAGLDTMQRAYAHAIKSGYRFYSYGDACLLFRNPS

SEQ ID NO: 71433 - protein, 373 aa, unidentified
  source 1..373: note = Rhodopseudomonas pentothenatexigens
  REGION 1..373: note = tr|A0A336JY82|A0A336JY82_9BRAD S-adenosylmethionine:tRNA ribosyltransferase-isomerase; OS = Rhodopseudomonas pentothenatexigens OX=999699 GN=queA; PE = 3 SV=1
MDRRIKSGDDGYRMRTDLFDFDLPAENIALRPVSPRDAARMLVVRPGAPLEDRIVRDLPSLLAPGDQLVVNDTRVIAAQLTGRRIGRGPEPKIEATLIKRLDGARWQALVKPAKKLLPGDVVRFGHDGRVCLLGHLDATVEAKGEAGEVTLAFSFHGPVLDQAIAEIGATPLPPYIASKRPPDAQDVADYQTMFAANEGAVAAPTAGLHFTAELEAALAARGVGLHRITLHVGAGTFLPVKAEDTSEHRMHAEWGTISSGTADALNAARAAGGRIVAVGTTSLRLLESAARDDGRIAPFADETSIFITPGYRFRAVDVLMTNFHLPRSTLFMLVSAFCGLDTMQAAYAHAIRTGYRFYSYGDASLLFRNDITP

SEQ ID NO: 71434 - protein, 360 aa, unidentified
  source 1..360: note = Rhodopseudomonas pseudopalustris
  REGION 1..360: note = tr|A0A1H8SSV0|A0A1H8SSV0_9BRAD S-adenosylmethionine:tRNA ribosyltransferase-isomerase; OS = Rhodopseudomonas pseudopalustris OX=1513892 GN=queA; PE = 3 SV=1
MRTELFDFDLPASSIALRPVSPRDAARMLVVRPGATLEDRAVRDLPALLQPGDQLVVNDTRVIAAQLTGRRIGRATEPRIEATLIKRLDGSRWQALVKPAKKLAEGDVVRFGHDGRVCLLGHLDATVEAKGDAGEVTLAFTFHGPALDQAIAELGATPLPPYIASKRTPDDQDAADYQTMFAANEGAVAAPTAGLHFTPELDAALKARGVTLHRLTLHVGAGTFLPVKVDDTAEHKMHAEWGTISRATADALNAARAQGGRIVAVGTTSLRLLESAAREDGTIAPFADETAIFITPGYRFRAVDVLMTNFHLPRSTLFMLVSAFCGLETMQAAYRHAIDSGYRFYSYGDASLLFREPASR

SEQ ID NO: 71435 - protein, 360 aa, Rhodopseudomonas sp.
  REGION 1..360: note = tr|A0A0N1LRU2|A0A0N1LRU2_9BRAD S-adenosylmethionine:tRNA ribosyltransferase-isomerase; OS = Rhodopseudomonas sp. AAP120 OX=1523430 GN=queA PE=3 SV=1
MRTDLFDFDLPTDNIALRPVSPRDAARMLVVRPGAVLEDRIVRDLPALLAPGDQLVVNDTRVIAAQLAGRRIGRATEPKIDATLIKRLDGSRWQALVKPAKKLSEGDVVRFGHDGRVCLLGHLDATVEAKGDAGEVTLSFSLHGPALDQAIAELGATPLPPYIASKRAADAQDAADYQTMFAANEGAVAAPTAGLHFTPDLDAALATRGVALHRVTLHVGAGTFLPVKADDTAEHKMHAEWGTISKATADALNTARTQGGRIVAVGTTSLRLLESAARPDGTIAPFADETSIFITPGYRFRAVDILMTNFHLPRSTLFMLVSAFCGLETMQAAYRHAIDSGYRFYSYGDASLLFREPVSV

SEQ ID NO: 71436 - protein, 349 aa, unidentified
  source 1..349: note = Rhodosalinus sediminis
  REGION 1..349: note = tr|A0A3D9BT57|A0A3D9BT57_9RHOB S-adenosylmethionine:tRNA ribosyltransferase-isomerase; OS = Rhodosalinus sediminis OX=1940533 GN=queA PE=3 SV=1
MKLSEFDFDLPEELIATRPARPRSSARLLVAEGDRITDAVARDLPEFLRPGDRLVLNDTKVIPARLSGTRQRHGDAGPSEARIEVTLLEPRAGGLWTALVKPMKKLAADEVIRFSDELSARMEGREEEKALLAFDLTGKDFDEALARAGAMPLPPYIERRRAADAQDAEDYQTVWARRPGAVAAPTASLHFDETLLDALRAAGIGMTHVTLHVGAGTFLPVKVDDVTEHRMHAEWGEVSEAAAAEIAETRRAGGRIIPVGTTALRLLETAGRSGEVVPWSGDTDIFIYPGFEFRVADALMTNFHLPKSTLMMLVAAFMGRARIERIYAHAIAERYRFFSYGDASLLVPA

SEQ ID NO: 71437 - protein, 350 aa, unidentified
  source 1..350: note = Rhodosalinus sp.
  REGION 1..350: note = tr|A0A365U5E6|A0A365U5E6_9RHOB S-adenosylmethionine:tRNA ribosyltransferase-isomerase; OS = Rhodosalinus sp. E84 OX=2259333 GN=queA PE=3 SV=1
MQLSDFDFDLPDELIATRPARPRSSARLLVAEGDRITDAIVRDLPEFLRPGDRLILNDTKVIPARLSGTRSRHGAAGASDARIEVTLLEPRPGGLWTALVKPLKKLAPGEVIRFSDDLSARMQGREGEQALLEFDQTGKAFDEALARAGAMPLPPYIERRRAPDEQDREDYQTVWAARPGAVAAPTASLHFDAALLDALRAADIGMTHVTLHVGAGTFLPVKVDDVTRHRMHAEWGEVSESAAAQIAETRRAGGRIIPVGTTALRLIETAGQGGEIAPWEGDTDIFIYPGFRFRMTDALMTNFHLPKSTLMMLVAALMGLDRVRRIYAHAITERYRFFSYGDASLLVPGE

SEQ ID NO: 71438 - protein, 364 aa, Rhodospira trueperi
  REGION 1..364: note = tr|A0A1G6ZV84|A0A1G6ZV84_9PROT S-adenosylmethionine:tRNA ribosyltransferase-isomerase; OS = Rhodospira trueperi OX=69960 GN=queA PE=3 SV=1
MTHSAAPFHADRDATAMRVDLFDFDLPADRIASRPADPRDSARLLRVTADGGLEDRAVADLPSVLSPGDVLVLNDTRVIPARLFARVGQARVEVMLHRRVGPDAWWAFARPAKKVRPGTDLLFAEGFTGACAEKGEGGEVLVRFDRAGAALTAALEDHGHVPLPPYIKRPDDQADRETYQTVFARADGAVAAPTAGLHFTERLFAALDERGVRRVTVTLHVGAGTFLPVKAEDTDEHRMHVEDGEISAAAAQAICEARAGGGRVVAVGTTSLRILESAAAPDGTLGAFSGGTDLFITPGYRFRAVDRLVTNFHLPKSTLFMLVSAFSGLRTMQAAYAHAIAGGYRFYSYGDACLLDGRPRERCD

SEQ ID NO: 71439 - protein, 344 aa, unidentified
  source 1..344: note = Rhodospirillaceae bacterium
  REGION 1..344: note = tr|A0A1Z9JGE3|A0A1Z9JGE3_9PROT S-adenosylmethionine:tRNA ribosyltransferase-isomerase; OS = Rhodospirillaceae bacterium TMED167 OX=1986863 GN=queA; PE = 3 SV=1
MKVSDFDFDLPPDLIAQTPAEPRESARLLHVGDTLGDRHVRDLPSLLSPGDLLVFNNTKVIPTRLRGKRREAGLEVTLHKQESGKTWWAFARPARKLSVGDKIDFAREFTANVLDKHTGGEVLLGFQQSDGDLITMLQQYGIMPLPPYIKRPKDGIPGDAADYQTVFAEKEGAVAAPTAGLHFSETLLKMLNTAGIQTAFVTLHVGAGTFLPVKVEETTDHQMHSEWGTIPAATLKLVNDTRSAGAAVVPVGSTSLRLLETAADDTGVLRPFTGETDIFMTPGHPFKIADKMITNFHLPKSTLFMLVAAFAGLNRMTAAYGHAIRSGYRFYSYGDACLLERGET

SEQ ID NO: 71440 - protein, 352 aa, unidentified
  source 1..352: note = Rhodospirillaceae bacterium
  REGION 1..352: note = tr|A0A2E2E4V3|A0A2E2E4V3_9PROT S-adenosylmethionine:tRNA ribosyltransferase-isomerase; OS = Rhodospirillaceae bacterium OX=1898112 GN=queA PE=3 SV=1
MKVDLFDFDLPDQCIAQSPAEPRDSAKLLHVPVSGGFADRRVSDLPDLLQLQDLLVVNDTKVLPTRLFGQRGTAGIEVTLIKERASDLWDAFARPGKKLKPKDQIIFADDLVALVEDKHLDGQITLRFNCQGAALREALWQRGTMPLPPYIKRSRTPDRDTDAKDRDHYQTLFAQREGAVAAPTASLHFTPNLLQRLQDKGVPMVRLTLHVGAGTFLPVKVEDTDDHPMHSEWAQLSPEAAERLNAHKASGGRIVAVGTTPMRTLESAAAPDGTLAAFEGETDIFITPGYRFRAVDRLMTNFHLPRSTLFMLVSAFSGLDRMQAAYAHAISSGYRFYSYGDSSLLDRAPVEG

SEQ ID NO: 71441 - protein, 343 aa, unidentified
  source 1..343: note = Rhodospirillales bacterium
  REGION 1..343: note = tr|A0A257NJI3|A0A257NJI3_9PROT S-adenosylmethionine:tRNA ribosyltransferase-isomerase; OS = Rhodospirillales bacterium 20-58-10 OX=1970564 GN=queA; PE = 3 SV=1
MRLEDFGYDLPASHIATEPARPRESAKLLHVKPDALGDYQVRDLPDLLRAGDLLVVNDTRVIPAQLTAMRGAARIGITLDKPNEHGDWLVLLRNARRVRAGDMLQIDEAFSAEVMAVHEGGTAALRFNVSDAAFLAALGRTGALALPPYIARPEGITEQDKADYQTMFAEHDGAVAAPTAGLHFTPALLEALAAKGVETVRVTLHVGAGTFLPVRVEDVTTHKMHAERGIVSAEAAARINEVKARGGRVIPVGTTALRLIESAADDDGVVKPFVRETDIFILPGYRFKVADVLFTNFHLPHSTLLMLVSAFAGMARIKSAYDYAIAHDYRFYSYGDACLLERP

SEQ ID NO: 71442 - protein, 347 aa, unidentified
  source 1..347: note = Rhodospirillales bacterium
  REGION 1..347: note = tr|A0A259MCT2|A0A259MCT2_9PROT S-adenosylmethionine:tRNA ribosyltransferase-isomerase; OS = Rhodospirillales bacterium 39-66-50 OX=1970570 GN=queA; PE = 3 SV=1
MRVDLFDFALPDDLIAQRPVSPRDSARLLDVTGETLHDRTVRSLPGLLRRGDLLVFNDTRVIPARLKGVRPGQGIRQDVAVEALLIRDLGSRRWRAFARPGKRLRPGDALVFSGLRARVEAKEEDGSLVLAFTQEGHAFLTALEQEGTVPLPPYIRGGTADAQDRKDYQTLFARHEGSVAAPTAGLHFTPELMAALADSGITTAGVTLHVGAGTFQPVRVDDTDAHTMHAEWGEVSEATARAVEATRILGGRVVSIGTTSLRLLETVAREHDGALKPWSGETDIFITPGFQFRAVDLLLTNFHLPRSTLFMLVSAFAGLERMKQVYEHAVAARYRFYSYGDCCLLRR

SEQ ID NO: 71443 - protein, 345 aa, Rhodospirillum rubrum
  REGION 1..345: note = sp|Q2RXQ9|QUEA_RHORT S-adenosylmethionine:tRNA ribosyltransferase-isomerase OS=Rhodospirillum rubrum (strain ATCC 11170 / ATH 1.1.1 / DSM 467 / LMG 4362 / NCIB 8255/ S1) OX=269796 GN=queA PE=3 SV=1
MRVDLFDFDLPRDLIAVRPAVPRDSARLLLVEGESRRDLGVGDLPGLLDPGDILVFNDTRVIPARLKGRIGDGGVEVTLHKRVGPDAWDCFARPARKLKPGVVILFAEGFTATVAARGEDGEATLRFDRAGAALMAALEAYGHIPLPPYIKRPDDARDRADYQTIYAREDGAVAAPTAGLHFTPALLAALEARGVSRAMVTLHVGAGTFLPVKVEDTDDHRMHAETGTLTAQTAEAINAARAAGGKVVAVGTTAMRLLESATGADKVIRPFHGDTSIFITPGYRFNAVDRLMTNFHLPRSTLFMLVSAFAGASRMRNAYAHAISQGYRFYSYGDSSLLSHAEDPR

SEQ ID NO: 71444 - protein, 351 aa, Rhodothalassium salexigens
  REGION 1..351: note = tr|A0A4R2PPI1|A0A4R2PPI1_RHOSA S-adenosylmethionine:tRNA ribosyltransferase-isomerase; OS = Rhodothalassium salexigens DSM 2132 OX=1188247 GN=queA; PE = 3 SV=1
MRVDAFDFHLPEDRIALRPAEPRDAARLLVVRPDELLDRGVLDLPDLLGPGDVLVVNNTRVIPSRLHGRRGEARVEVTLHKSEGGTVWAAFARPARKCRPGDTLVFGDLCAQVVERRAGGEVVLAFDCADDQMMAALEAHGEMPLPPYIAGRRAVDTKDDSDYQTAFAAEAGAVAAPTAGLHFTDRLLAALAARGVGREEVTLHVGAGTFLPVKAEDTDAHVMHAEWGRVPRAVAERLTAARAAGGRVVAVGTTSLRLLESAADQAGRIQPFEGDTDIFITPGYRFRAIDRLMTNFHLPRSTLFMLVSAFSGLDRMQSAYAHAVAERYRFYSYGDACLLHPSTPSVGGAGR

SEQ ID NO: 71445 - protein, 349 aa, unidentified
  source 1..349: note = Rhodothermaceae bacterium
  REGION 1..349: note = tr|A0A2E3QSS1|A0A2E3QSS1_9BACT S-adenosylmethionine:tRNA ribosyltransferase-isomerase; OS = Rhodothermaceae bacterium OX=2026787 GN=queA PE=3 SV=1
MPHALADYAFDLPDGLIAQRPAERRDGSRMLVLHRATGALEDARFADLGRYLEAGDALVFNDTRVVPARLVGRRPTGGRAELFLVERATDGTWSALAKPGRRLTAGGEVLFGDGLTAAIEAVEEGGRRRIRILRDGEPLDGAAEEAALEAIGRMPLPPYVDREADATDRERYQTVFARTPGAVAAPTAGLHFTPATVDGLREAGVVTAEVTLHVGYGTFEPVRAEDLRDHRVAAERIEVPATTAATLNAVRAARGRIVAVGTTSTRALETAADDEGRFHPVSGPTDLTVTPGYRFRAIDGLLTNFHLPSSSLLVLTATFGGREAVMEAYRHAVREGYRFYSYGDCMLIL

SEQ ID NO: 71446 - protein, 336 aa, unidentified
  source 1..336: note = Rhodothermaceae bacterium
  REGION 1..336: note = tr|A0A424HK57|A0A424HK57_9BACT S-adenosylmethionine:tRNA ribosyltransferase-isomerase; OS = Rhodothermaceae bacterium TMED105 OX=1986665 GN=queA; PE = 3 SV=1
  VARIANT 4: note = Xaa can be any naturally occurring amino acid
  VARIANT 12: note = Xaa can be any naturally occurring amino acid
  VARIANT 21: note = Xaa can be any naturally occurring amino acid
  VARIANT 24: note = Xaa can be any naturally occurring amino acid
  VARIANT 42..43: note = Xaa can be any naturally occurring amino acid
  VARIANT 215: note = Xaa can be any naturally occurring amino acid
  VARIANT 238: note = Xaa can be any naturally occurring amino acid
MDKXTLSDFDYXLPEELIAQXPSXKRDHSRLLVYDRSDQSIXXTQFHHIGKHLPSNTTLVMNNTKVDECRLQWEEGKKEVFIVSSMADNPVTAMVRPGRQFKKGAYHQLSETCRLEVEEVLEDGLRRCRLDPDPSDPAWLPFFHTPFPPYIKPNEELADRYQTVYSRTPGSKAAPTAGLHFTPELLQGLQNQGIRRTEVTLNVGLGTFAPVKSEXILSHKMHEEFFSVSPSALESIAXAKHITAVGTTSCRTLESLAAADLLPPYQTVTRETGIFIHPGYTWKRTNALLTNFHLPKSTLLMLLAALVGVEEWKRIYEEAIRERYRFYSFGDAMLVL

SEQ ID NO: 71447 - protein, 348 aa, unidentified
  source 1..348: note = Rhodothermaeota bacterium
  REGION 1..348: note = tr|A0A2A5X835|A0A2A5X835_9BACT S-adenosylmethionine:tRNA ribosyltransferase-isomerase; OS = Rhodothermaeota bacterium MED-G18 OX=1986239 GN=queA; PE = 3 SV=1
MKLSEFDFKLAATRTAIHPAANRDESRLMILHKKTGKIEHKQFKDIIKFFKEDDVLVLNDTKVFPARLYGQKEKTGAKIEVFLLRELNPELNLWDVLVDPARKIRVGNKLYFGEGELVAEVIDNTTSRGRTIRFIPEDTERDFHDIIQEYGETPLPKEIKRKVDKKDEERFQTVYAKNIGAVAAPAAGLHFTDILLKKLILKGVKIVKITSHTGLGTFKDIDVEDLTKHKMDSENFSVPVETEIEVNRALDNGNRIFAVGTSTMKTLETAVSASNRLKAKSGWTDKFIFPPYDFKICGAMITNFHSPKSTLLMMASAYGGFDQVMKVYKVAIKEKYMFHTYGDALMII

SEQ ID NO: 71448 - protein, 351 aa, unidentified
  source 1..351: note = Rhodothermaeota bacterium
  REGION 1..351: note = tr|A0A2A5XWH6|A0A2A5XWH6_9BACT S-adenosylmethionine:tRNA ribosyltransferase-isomerase; OS = Rhodothermaeota bacterium MED-G12 OX=1986237 GN=queA; PE = 3 SV=1
MKLTDFRYEIEGLNIPDAPLKERDSAKLMVLNRAEQTIEHRSFSDIHEYLNEGDVLVYNNTKVFPARLNGKKEKTEADIEVFLLRELQPENMLWDVLVEPARKIRIGNKLYFGEGEDELMAEVVDNTTSRGRTIRFLFDGPNHELYERLDSLGKMPLPPYIEREPVDEDKERYQTVFASERGAVAAPTAGMHFTEDLLEKIKAKGVHVLPITLHIGWGTFRNVEVEDLTKHRMDSENYFISQDTSDQINVALKSKKHKVIAMGTSVVRAIETSVMASGMSKQGTGWTDKFIYPHYQFKITESLITNFHRPESTLLMLGAAFAGYDLLMKAYEEAKENNYRLFSFGDAMMVI

SEQ ID NO: 71449 - protein, 348 aa, Rhodothermus marinus
  REGION 1..348: note = tr|G2SHG2|G2SHG2_RHOMG S-adenosylmethionine:tRNA ribosyltransferase-isomerase OS=Rhodothermus marinus (strain SG0.5JP17-172) OX=762570 GN=queA PE=3 SV=1
MRLSDLHYDYPKSLVAKYPAEPRDSARLMVLDRKRRSIEHRIFRDIVDYFNEGDVLVVNNTKVFPARLYGRKEKTGARIEVLLLRELNAESRLWDALVDPARKIRVGNKIYFDGGLVAEVIDNTTSRGRTIRFLFDGSDEELYQKIEEVGHMPLPPYIKREDEPEDRERYQTIFAQETGSVAAPTAGLHFTPELVERLKQKGVDVVPITLHVGLGTFRPIEVEDLTKHRMDSEYFTITEEAAERINRALLSPEHTVTAVGTTVVRALESSISATGTVKPGFGWTDKFIYPPYDFKIVERLITNFHMPRSTLLALVVAFAGYDFVMEAYRTAVQEKYRLFSFGDAMLIL

SEQ ID NO: 71450 - protein, 348 aa, Rhodothermus marinus
  REGION 1..348: note = tr|D0MHN0|D0MHN0_RHOM4 S-adenosylmethionine:tRNA ribosyltransferase-isomerase OS=Rhodothermus marinus (strain ATCC 43812 / DSM 4252 / R-10) OX=518766 GN=queA; PE = 3 SV =1
MRLSDLHYDYPKSLVAKYPAEPRDSARLMVLDRKRRTIEHRIFRDIVDYFNEGDVLVVNNTKVFPARLYGRKEKTGAKIEVLLLRELNAESRLWDALVDPARKIRVGNKIYFDGGLVAEVIDNTTSRGRTIRFLFDGSDEELYQKIEEVGHMPLPPYIKREDEPEDRERYQTIFAQETGSVAAPTAGLHFTPELVERLKQKGVDIVPITLHVGLGTFRPIEVEDLTKHRMDSEYFTITEEAAERINRALLSPEHTVTAVGTTVVRALESSISATGTVKPGFGWTDKFIYPPYDFKIVERLITNFHMPRSTLLALVVAFAGYDFVMEAYRTAVQEKYRLFSFGDAMLIL

SEQ ID NO: 71451 - protein, 348 aa, Rhodothermus profundi
  REGION 1..348: note = tr|A0A1M6WH09|A0A1M6WH09_9BACT S-adenosylmethionine:tRNA ribosyltransferase-isomerase; OS = Rhodothermus profundi OX=633813 GN=queA PE=3 SV=1
MRLSDLHYEYPKSLIAKYPAEPRDSARLMVLNRKCKTIEHRIFRDIVDYFNEGDVLVVNNTKVFPARLYGRKEKTGARIEVLLLRELNAESRLWDALVDPARKIRVGNKIYFDGGLVAEVIDNTTSRGRTIRFLFDGNDEELYRKIEEIGHMPLPPYIKREDEPEDRERYQTIFARETGSVAAPTAGLHFTPALVERLKQKGVDIVPITLHVGLGTFRPIEVEDLTKHRMDSEYFIITEEAAERINRALLSPDHTVTAVGTTVVRALESSISATGTLKAGSGWTDKFIYPPYDFRIVERLITNFHMPRSTLLALVVAFAGHDFVMEAYRIAVQEKYRLFSFGDAMLIL

SEQ ID NO: 71452 - protein, 346 aa, Rhodovarius sp.
  REGION 1..346: note = tr|A0A437MMI8|A0A437MMI8_9PROT S-adenosylmethionine:tRNA ribosyltransferase-isomerase; OS = Rhodovarius sp. CCP-6 OX=1979269 GN=queA PE=3 SV=1
MTLTAADFDYPLPDDRIAQHPARPRDAALLLDARAPALVDRGVLDLPALLEPGDLLVVNDTRVIPARLTARRGQARVEIMLNRAEGNGIWHALVRNARRLKAGDTVEIEGAPITARVVEDPAEGAVRLDFGPDEAALAAALDQAGEIPLPPYIQRAAGPEDEADYQTLFADRPGAVAAPTASLHFTPRLIEALEARGVRRATLTLHVGAGTFLPLRGDNPAEHKMHAEWGQITPETAALINETRARGRRIVAVGTTVLRLLETAATGDIAQPVRPFDGLTSIFLLPGHRFTTADLLMTNFHLPKSTLMMLVAGFAGLDHMRAVYAHALAGPYRFTSYGDSSLWARA

SEQ ID NO: 71453 - protein, 369 aa, Rhodovulum adriaticum
  REGION 1..369: note = tr|A0A4R2NP78|A0A4R2NP78_RHOAD S-adenosylmethionine:tRNA ribosyltransferase-isomerase; OS = Rhodovulum adriaticum OX=35804 GN=queA PE=3 SV=1
MKLSDFDFDLPEALIATRPARPRSSARLLVADGDRTRDLHVRDLPGLLRPGDLLVLNDTRVIPARLTGTRTRDTGQGPVTARIEVTLMEPAAGGGWRAMAKPLRKLKPGERVVFSDTLSAEVVDKGAEDVTLTFDLEGAAFEEALAQAGAMPLPPYIAARRPADERDREDYQTVWAARPGAVAAPTASLHFDPPLLAALAERGVAFTHVTLHVGAGTFLPVKVDDVSQHKMHAEWGEVTDTAAAEINATRAAGGRIIPVGTTALRLIESAAAPDGAMHPWQGETDIFIRPGYRFRVADALMTNFHLPKSTLMMLVSALMGTERIRGIYAHAIGAGYRFFSYGDASLLIPAGETRHGGVAGGHSPGDSPA

SEQ ID NO: 71454 - protein, 369 aa, unidentified
  source 1..369: note = Rhodovulum bhavnagarense
  REGION 1..369: note = tr|A0A4R2RM04|A0A4R2RM04_9RHOB S-adenosylmethionine:tRNA ribosyltransferase-isomerase; OS = Rhodovulum bhavnagarense OX=992286 GN=queA PE=3 SV=1
MKLSDFDFDLPEVLIATRPARPRSAARLLVAEGDAMRDLHVYDLVKVLRPGDRLVLNDTRVIPARLSGARTRESGQGPVTARIEVTLMEPAPVGRWRAMARPLRKLRPGERIVFSEALSAEVVERGPEDVTLAFNLEGEAFEAALAEAGAMPLPPYIAARRAADAQDRDDYQTVWATRPGAVAAPTASLHFDPPLLQALAGRGVLFTHVTLHVGAGTFLPVKVDDVEDHKMHAEWGEVTETAAAEINSTRAAGGRIIPVGTTALRLIESAAAPDGTVHPWQGETDIFIRPGYRFRVADGLMTNFHLPKSTLMMLVSALMGTDRIRRLYAHAIKTGYRFFSYGDASLLVPEDETRHGQVAERQHRGGAPA

SEQ ID NO: 71455 - protein, 362 aa, Rhodovulum euryhalinum
  REGION 1..362: note = tr|A0A4R2KCG1|A0A4R2KCG1_9RHOB S-adenosylmethionine:tRNA ribosyltransferase-isomerase; OS = Rhodovulum euryhalinum OX=35805 GN=queA PE=3 SV=1
MKLSDFDFDLPEDLIATRPARPRSAARLLVAEGDAMRDLHVRDLPGLLLPGDRLVLNDTRVIPARLTGTRRRETPQGPVEARVEVTLMDPAPGGRWRAMAKPLRKLGTGETVVFSDSLRAQVAGKGAEDVTLAFNLGGAAFDAALAAAGAMPLPPYIAAKRPADAQDREDYQTVWAARPGAVAAPTASLHFDEPLLAALRERGVASTHVTLHVGAGTFLPVKTDDISAHRMHAEWGEVTDAAAAEINATRAAGGRIIPVGTTALRLIESAADEAGHLHPWAGETDIFIRPGYRFRITDALMTNFHLPRSTLMMLVSALMGIERTRRIYTHAVNSRYRFFSYGDASLLIPGPEAVTQGSQTGI

SEQ ID NO: 71456 - protein, 349 aa, Rhodovulum imhoffii
  REGION 1..349: note = tr|A0A2T5BVT8|A0A2T5BVT8_9RHOB S-adenosylmethionine:tRNA ribosyltransferase-isomerase; OS = Rhodovulum imhoffii OX=365340 GN=queA PE=3 SV=1
MKLSDFDFALPEDLIATRPARPRSSARLLLARGEEIADRHVGDLVTILRPGDRLVLNDTRVLPARLTGTRRRKTAQGMVEARVEVTLMHPTPQGGWRAMAKPLRKLRAGEEIVFSETLQAEVIGKSDENVTLAFGLSGAEFDAALAQAGAMPLPPYIAARRPADEQDRVDYQTVWAARPGAVAAPTASLHFDTPLLKALAARGVQFSHVTLHVGAGTFLPVKVDDVSQHKMHAEWGEVGAQAAAEINATRAGGGRVIPVGTTALRLIESAAAPDGTLPPWRGETDIFITPGYHFRVTDGLMTNFHLPRSTLMMLVSALMGQGRIRRIYAHAIDQRYRFFSYGDASLLIP

SEQ ID NO: 71457 - protein, 369 aa, Rhodovulum kholense
  REGION 1..369: note = tr|A0A2T5UKK8|A0A2T5UKK8_9RHOB S-adenosylmethionine:tRNA ribosyltransferase-isomerase; OS = Rhodovulum kholense OX=453584 GN=queA PE=3 SV=1
MKLSDFDFDLPEALIATRPARPRSSARLLVAEGDTIRDLQVRDLVDLLGPGDRLILNDTRVIPARLSGQRLRQTGQGPAEARVEVTLMEPAAGGQWRAMARPLKKLQPGDRIRFSDALSAEVAARGPEDVTLAFDCAGAAFDAALAEAGAMPLPPYIAARRPADAQDREDYQTVWAARPGAVAAPTASLHFDEPLLAALAARGVAFSHVTLHVGAGTFLPVKVDDVSDHRMHAEWGEVSETAAAEINATRAAGGRIIPVGTTALRLIETAADETGRIAPWRGETDIFIRPGYRFRMTDALITNFHLPRSTLLMLVSALMGVGCIRNIYLHAVEHGYRFFSYGDASLLIPPGRDRLDSGRPGHPPSAPTA

SEQ ID NO: 71458 - protein, 362 aa, Rhodovulum marinum
  REGION 1..362: note = tr|A0A4R2Q0N5|A0A4R2Q0N5_9RHOB S-adenosylmethionine:tRNA ribosyltransferase-isomerase; OS = Rhodovulum marinum OX=320662 GN=queA PE=3 SV=1
MKLSDFDFDLPDELIATRPARPRSAARLLVAEGERVRDLHVRDLPGLLGPGDRLVLNDTRVIPARLTGTRRRESAQGPVVARVEVTLMEPAPDGRWRAMAKPLRKLKPGETVVFSEKLSAEVVAKGTQDVTLAFNLVGEDFDAALAEAGAMPLPPYIAAKRPADAQDTEDYQTVWAARPGAVAAPTASLHFDDALLAALRARGVSFTHVTLHVGAGTFLPVKTDDVSAHKMHAEWGEVTEAAAAEINATRAAGGRIIPVGTTALRLIESAADEAGRLHPWVGETDIFIRPGYRFRIADALMTNFHLPRSTLMMLVSALMGTETIRKIYAHAVTSRYRFFSYGDASLLIPAAQPGRQGSQTGI

SEQ ID NO: 71459 - protein, 369 aa, Rhodovulum robiginosum
  REGION 1..369: note = tr|A0A428JVC4|A0A428JVC4_9RHOB S-adenosylmethionine:tRNA ribosyltransferase-isomerase; OS = Rhodovulum robiginosum OX=68292 GN=queA PE=3 SV=1
MKLSDFDFDLPEALIATRPARPRSAARMLVAEGDAIDDLHVRDLPDLLRPGDRLVLNDTKVIAARLTGTRRRDTAQGPVEARVEITLMAPDPAGRWRAMAKPLRKLKEGETVVFSDALRAEVAVKTDEDVTLAFNLDGADFDTALAAAGAMPLPPYIAARRPADDRDREDYQTVWAARTGAVAAPTASLHFDEALLAALKGRGVGFTHVTLHVGAGTFLPVKVDDVSRHRMHAEWGEVTQAAADEINAARAAGGRIIPVGTTALRLIETAADPAGQLHPWQGETDIFIRPGYRFRITDALITNFHLPRSTLLMLVSALMGVGTVRRIYAHAVAERYRFFSYGDASLLIPEDETRRAQVAGGHLHPAQEP

SEQ ID NO: 71460 - protein, 355 aa, Rhodovulum sp.
  REGION 1..355: note = tr|A0A369R1I9|A0A369R1I9_9RHOB S-adenosylmethionine:tRNA ribosyltransferase-isomerase; OS = Rhodovulum sp. 12E13 OX=2203891 GN=queA PE=3 SV=1
MKLSDFDFDLPEELIATRPARPRSSARLLLAEGEATRDLHVFDLPDILRPGDLMVLNDTRVIPARLTGTRRRATSQGDTQAQIEVTLLEARADGTWAALAKPMKKVRDGETIVFSPELSADVAGRGDGQLHLAFSLSGEDFDRALNEAGAMPLPPYIAARRAADAQDREDYQTVFARRAGAVAAPTASLHFDAALLDKIARRGVRFAHVTLHVGAGTFLPVKVDDVTTHRMHAEWGEVTQEAADAINAAKAEGGRIVAVGTTALRLIESAATEGGIAPWRGETDIFIYPGFRFRVADGLMTNFHLPKSTLMMLVSALMGRERIMALYAHAIAERYRFFSYGDASLLFPQRMDKPL

SEQ ID NO: 71461 - protein, 349 aa, Rhodovulum sp.
  REGION 1..349: note = tr|A0A095EYE1|A0A095EYE1_9RHOB S-adenosylmethionine:tRNA ribosyltransferase-isomerase; OS = Rhodovulum sp. NI22 OX=1469613 GN=queA PE=3 SV=1
MKLSDFDFDLPEELIATRPARPRTAARMLVAEGDTLRDCHVYDLPSLLRAGDRLVLNNTKVIPARLFGRRLRHTPEGVVEAKVEITLLEPQPGGGWAALAKPLRKLKQGEEIVFSDALSARVTARREGDVVLGFNLEGDDFDAALAEAGAMPLPPYIAAKRPADAQDKTDYQTVFARHAGAVAAPTASLHFDAELLEKLRATGVTFTEVTLHVGAGTFLPVKVEDVESHKMHAEWGEVTAQAAAEINATRAAGGRIIPVGTTALRLIESAAQADGTMVPWRGETDIFIRPGYRFRVTGALMTNFHLPKSTLLMLVSALMGVERMRAVYAHAVAGRYRFFSYGDASLLIP

SEQ ID NO: 71462 - protein, 362 aa, Rhodovulum steppense
  REGION 1..362: note = tr|A0A4R1YTK8|A0A4R1YTK8_9RHOB S-adenosylmethionine:tRNA ribosyltransferase-isomerase; OS = Rhodovulum steppense OX=540251 GN=queA PE=3 SV=1
MKLSDFDFDLPEALIATRPARPRTAARLLVAEGDRLRDLHVRDLPDLLQPGDRLVLNDTRVIPARLSGLRRRETAQGPVEARIEVTLMEPAPGGCWRAMARPLKKLKPGDRVIFSDRLSARVVAKGDEDAVLDFDQTGAAFDTALAEAGAMPLPPYIAAKRPADAQDAEDYQTVWAARPGAVAAPTASLHFDEPLLAALAARGVGFSHVTLHVGAGTFLPVKTDDVSAHRMHAEWGEVTARAAAEINATRAAGGRIIPVGTTALRLIESAADEAGVLHPWTGETDIFIRPGYRFRIADALMTNFHLPRSTLMMLVSALMGTERIRRIYIHAVNSGYRFFSYGDASLLIPGPQAVRQGSQTGI

SEQ ID NO: 71463 - protein, 348 aa, Rhodovulum sulfidophilum
  REGION 1..348: note = tr|A0A2W5NF32|A0A2W5NF32_RHOSU S-adenosylmethionine:tRNA ribosyltransferase-isomerase; OS = Rhodovulum sulfidophilum OX=35806 GN=queA PE=3 SV=1
MRLEDFDFDLPEELIALRPARPRPASRLLVATPERLIDSTVAALGDWLRPGDLLVLNDTKVIPARLSGLRRRANGAEARIEATLIAAQPDGAWRALARPGKRLAVGDVIAFGAALTAEVRDKDGAEVVLAFDRAGAGLDAALQAVGEMPLPPYIAARRAPDARDREDYQTVFATRPGAVAAPTASLHFDEALLAALEARGVAQTRVTLHVGAGTFLPVKVENIEAHRMHAEWGEIDAEAAGAIEATLAAGGRVIPVGTTALRLIETAATGPARIASWRGETDIFIRPGHGFRVTRGLMTNFHLPKSTLLMLVSALMGVGRMREVYAHAIAERYRFFSYGDSSLLLPKG

SEQ ID NO: 71464 - protein, 369 aa, Rhodovulum sulfidophilum
  REGION 1..369: note = tr|A0A0D6B2E5|A0A0D6B2E5_RHOSU S-adenosylmethionine:tRNA ribosyltransferase-isomerase; OS = Rhodovulum sulfidophilum OX=35806 GN=queA PE=3 SV=1
MKLSDFDFDLPEALIATRPVRPRSAARLLVAEGDTIRDLHVRDLADLLGPGDRLVLNDTRVIPARLSGLRRRETGQGPAEARVEVTLMEPAAAGQWRAMARPLKKLRPGDRIRFSDALSAEVVARGPEDATLAFDCEGAAFDAALAEAGAMPLPPYIAARRPADAQDREDYQTVWAARPGAVAAPTASLHFDAALLAALEAKGVAFTHVTLHVGAGTFLPVKVDDVSEHRMHAEWGEVSEAAAAEINATRAAGGRIIPVGTTALRLIESAAVAEDRIAPWRGETDIFIRPGYRFRLTDALITNFHLPRSTLLMLVSALMGCARIRKIYLHAVEHGYRFFSYGDASLLIPPGRDRRDSSRPKAPPSGPTA

SEQ ID NO: 71465 - protein, 369 aa, Rhodovulum visakhapatnamense
  REGION 1..369: note = tr|A0A4R8G2D2|A0A4R8G2D2_9RHOB S-adenosylmethionine:tRNA ribosyltransferase-isomerase; OS = Rhodovulum visakhapatnamense OX=364297 GN=queA PE=3 SV=1
MKLSDFDFDLPEALIATRPARPRSSARLLVAEGDTIRDLHMRDLSDLLGPGDRLVLNDTRVIPARLSGQRLRQTGQGPAEARVEVTLMEPAAGGQWRAMARPLKKLKPGDRIRFSDALSAEVAARGDEDVTLAFDCTGAAFDAALAEAGAMPLPPYIAARRPADAQDREDYQTVWAARPGAVAAPTASLHFDEPLLAALAAKGVAFSHVTLHVGAGTFLPVKVDDVSDHRMHAEWGEVSETAAAEINATRAAGGRIIPVGTTALRLIETAADETGRIAPWRGETDIFIRPGYRFRLTDALITNFHLPRSTLLMLVSALMGVGSIRKIYLHAVEHGYRFFSYGDASLLIPPGRDRPDSGRPGHPPSAPTA

SEQ ID NO: 71466 - protein, 122 aa, unidentified
  source 1..122: note = Richelia intracellularis
  REGION 1..122: note = tr|M1WVV4|M1WVV4_9NOST S-adenosylmethionine:tRNA ribosyltransferase-isomerase OS=Richelia intracellularis HM01 OX=1165095 GN=RINTHM_9460 PE=3 SV=1
MHGEWIKVSAETVEQIHKTRADGGRIIAVGTTVVRSLESAAASGAIQPFCGKSNLFIYPGYKWKVVDGLITNFHLPRSSLLMLVSALIGRERLLNIYQQAIISGYRFYSFGDAMLILPEAVN

SEQ ID NO: 71467 - protein, 388 aa, unidentified
  source 1..388: note = Richelia intracellularis
  REGION 1..388: note = tr|M1WTH7|M1WTH7_9NOST S-adenosylmethionine:tRNA ribosyltransferase-isomerase OS=Richelia intracellularis HH01 OX=1165094 GN=queA PE=3 SV=1
MKTASALGLPLKQNSNSVLAVNNLELCLSGYDYELPIDIIAQNPASPRDSSKLLIVDSVNTGNSKQPTCEVFRNLPNILQPGDLLVMNNTRVIPARLHGHKSTGAEIEVLLLEERQHNYWLALVKPGKRFKLGTELIFTTGTQKNGSKFNLGREMKATVVGSDQATGGRLLRFELPEGISLIELLDVFGEIPLPPYINKNHSGKEKYQTIYAEYPGAVAAPTAGLHFTPSLLKKLQSRGINQAFVTLHVGIGTFRPVEVENITKHKMHGEWIKVSAETVEKIHKTRADGGRIIAVGTTVVRSLESAAASGAVQPFCGKSNLFIYPGYKWKVVDGLITNFHLPRSSLLMLVSALIGRERLLNIYQQAIISGYRFYSFGDAMLILPEAVN

SEQ ID NO: 71468 - protein, 388 aa, unidentified; identical to SEQ ID NO: 71467
  source 1..388: note = Richelia sp.
  REGION 1..388: note = tr|A0A3B9F6T6|A0A3B9F6T6_9NOST S-adenosylmethionine:tRNA ribosyltransferase-isomerase; OS = Richelia sp. OX=2053605 GN=queA PE=3 SV=1

SEQ ID NO: 71469 - protein, 365 aa, Rickettsia africae
  REGION 1..365: note = sp|C3PMQ3|QUEA_RICAE S-adenosylmethionine:tRNA ribosyltransferase-isomerase OS=Rickettsia africae (strain ESF-5) OX=347255 GN=queA PE=3 SV=1
MKLSDFDFDLPSELIAQYPSRERDNSDLLIAVTPPIKTKFYNIIDYLKEGDLLVFNNSKVIKAKLNLGENITINLNQKLSDDSWSAFAKPARKLHVNDEFYFDNHKVIITEKLAMGEIKVKFELNDISVFEFLNKYGEMPLPVYIRRSHSLCHPVATTTGSKTYLNNDWIPWSNHGMTNTQNDNDRYQTVYSQIEGSVAAPTAGLHFTKDILDKLKAEGIQATFLTLHVGAGTFLPVKTENIHEHKMHTEYCSITPDTAKIINKAKQEGKRIIAVGTTTLRTLESSCNNGIVKAGSFKTDIFITPGFKFQTADMLLTNFHFPKSTLFMLICAFAGFKEMHELYKYAIKEAMRFFSYGDATLLCRK

SEQ ID NO: 71470 - protein, 371 aa, Rickettsia akari
  REGION 1..371: note = sp|A8GMK3|QUEA_RICAH S-adenosylmethionine:tRNA ribosyltransferase-isomerase OS=Rickettsia akari (strain Hartford) OX=293614 GN=queA PE=3 SV=1
MKLSAFDFNLPSELIAQSPSSERDNSDLLIAAMPPIKTKFYNIIDYLKEGDLLVLNNSKVIKAKLHLWKNVTINLNQKLSDDSWSAFAKPTRKLHVNDEFYFDNHKVIITEKLVMGEIKVKFDLDNISVFEFLDKYGEMPLPVYIRRSHSLYHTTSTLCHTRENGYSEKLDAFFRRNDIKDKDNDIVYDNERYQTIYSQIEGSVAAPTAGLHFTNDILDKLKTKGIHTAFLTLHVGAGTFLPVKTENIHEHKMHTEYCSITPETAEIINKAKQERRRIIAVGTTTLRTVESFCNNGIIKAGSFETDIFITPGFKFQTADMLLTNFHFPKSTLFMLICAFAGFKEMHELYKYAIKEKMRFFSYGDATLLYRK

SEQ ID NO: 71471 - protein, 365 aa, unidentified
  source 1..365: note = Rickettsia amblyommatis
  REGION 1..365: note = tr|A0A0F3QXV8|A0A0F3QXV8_RICAM S-adenosylmethionine:tRNA ribosyltransferase-isomerase; OS = Rickettsia amblyommatis str. Darkwater OX=1359166; GN = queA PE=3 SV=1
MKLSDFDFDLPSELIAQYPYSERDNSDLLIAVTPPIKTKFYNIIDYLKEGDLLVFNNSKVIKAKLNLGKNITINLNQKLSDDSWSAFAKPARKLHVNDEFYFDNHKVIITEKLAMGEIKVKFEFNNISIFEFLNKYGEMPLPVYIRRSHSLCHPVTTTTGSTKYLNNDWIPWSNYGMTNTQNDNDRYQTVYSQIEGSVAAPTAGLHFTKDILDKLKAKGIQATFLTLHVGAGTFLPVKTENIHEHKMHTEYCSITPDTAEIINKAKQEGKRIIAVGTTTLRTLESSCNNGIVKAGSFETDIFITPGFKFQTADMLLTNFHFPKSTLFMLICAFAGFKEMHELYKYAIKEAMRFFSYGDATLLCRK

SEQ ID NO: 71472 - protein, 365 aa, unidentified; identical to SEQ ID NO: 71471
  source 1..365: note = Rickettsia amblyommatis
  REGION 1..365: note = tr|H8K4F9|H8K4F9_RICAG S-adenosylmethionine:tRNA ribosyltransferase-isomerase OS=Rickettsia amblyommatis (strain GAT-30V) OX=1105111 GN=queA PE=3 SV=1

SEQ ID NO: 71473 - protein, 365 aa, unidentified
  source 1..365: note = Rickettsia argasii
  REGION 1..365: note = tr|A0A0F3RG10|A0A0F3RG10_9RICK S-adenosylmethionine:tRNA ribosyltransferase-isomerase; OS = Rickettsia argasii T170-B OX=1268837 GN=queA PE=3 SV=1
MKLSDFDFDLPSELIAQYPSSERDNSDLLIAVTPPIKTKFYNIIDYLKEGDLLVFNNSKVIKAKLNLGKNVTINLNQKLSDDSWSAFAKPARKLHVNDEFYFDNHKVIITEKLAMGEIKVKFELNDISVFEFLNKYGEMPLPVYIRRSHSLCHPVATTTGSKKYLNNDWIPWSNHGMTNTQNDNDRYQTVYSQIEGSVAAPTAGLHFTKDILDKLKAEGIQATFLTLHVGAGTFLPVKTENIHEHKMHTEYCSITPDTAEIINKAKQEGKRIIAVGTTTLRTLESSCNNGIIKAGSFETDIFITPGFKFQTADMLLTNFHFPKSTLFMLICAFAGFKEMHELYKYAIKEAMRFFSYGDATLLCRK

SEQ ID NO: 71474 - protein, 362 aa, unidentified
  source 1..362: note = Rickettsia asembonensis
  REGION 1..362: note = tr|A0A0C2MNN7|A0A0C2MNN7_9RICK S-adenosylmethionine:tRNA ribosyltransferase-isomerase; OS = Rickettsia asembonensis OX=1068590 GN=queA PE=3 SV=1
MKLSDFDFDLPSDLIAQYPASERDNSDLLIARTKPIKTKFYNILDYLKEGDLLVFNNSKVIKAKLHLGKNITINLNQKLSDNCWSAFAKPARKLNISDEFYFDNHKVIITDKLAMGEIKVKFELDNISVFEFLDKYGEMPLPIYIRRSHSLCHPRTTLLRESENILGVIPWLDHGMTNDNERYQTIYNQIEGSVAAPTAGLHFTKDILDKLNTKGVHTAFVTLHVGAGTFLPVKTENIHEHKMHTEYCSITPETTEIINKAKQERRRIIVVGTTTLRTLESSCNNGVVKAGSFETNIFITPGFKFQTADMLLTNFHFPKSTLFMLICAFAGFKEMHELYKYAIKEKMRFFSYGDATLLYRKV

SEQ ID NO: 71475 - protein, 403 aa, Rickettsia asiatica
  REGION 1..403: note = tr|A0A510G6M2|A0A510G6M2_9RICK S-adenosylmethionine:tRNA ribosyltransferase-isomerase; OS = Rickettsia asiatica OX=238800 GN=queA PE=3 SV=1
MKLSDFDFDLPSELIAQYPSSKRDRSDLLIAATPPIKTKFYNIIDYLKEGDLLVFNNSKVIKAKLHLGRNITINLNKKLSDIVNSVGFAYKEQGAKPITNRRATSDIVGESKSIDYNSWSAFAKPARKLNIGDEFYFDNHKVIITKKFAMGEINIKFELDNISVFEFLDKYGEMPLPVYIRRSFKRHCEEGRSPDAAISLQDPEIAMASQIMPRNDDKLDPLRYQTVYSQIEGSVAAPTAGLHFTKDIIDKLKAKNIQTTFLTLHVGAGTFLPVKTENIHEHKMHTEYCSITPETAEIINKTKQEGRRIIAVGTTTLRTLESSCNNGIVKASDFETNIFITPGFKFQTANMLLTNFHFPKSTLFMLICAFAGFKEMHELYKYAIKEKMRFFSYGDATLLYRKV

SEQ ID NO: 71476 - protein, 371 aa, Rickettsia australis
  REGION 1..371: note = tr|H8K8F7|H8K8F7_RICAC S-adenosylmethionine:tRNA ribosyltransferase-isomerase OS=Rickettsia australis (strain Cutlack) OX=1105110 GN=queA PE=3 SV=1
MKLSDFDFNLPSELIAQYPSSERDNSDLLIAAMPPIKTKFYNIIDYLKEGDLLVFNNSKVIKAKLHLWKNVTINLNQKLSDDSWSAFAKPTRKLHVDDEFYFDNHKVIITEKLVMGEIKVKFDLDNISVFEFLDKYGEMPLPVYIRRSHSLYHTRSTLYHTPENGYPEKLDSCFRRNDIKDKDNDIVYDNERYQTIYSQIEGSVATPTAGLHFTKDILDKLKTKGVHTAFLTLHVGAGTFLPVKTENIHEHKMHTEYCSITPETAEIINRAKQERRRIIAVGTTTLRTVESSCNNGIVKAGSFETDIFITPGFKFQTADMLLTNFHFPKSTLFMLICAFAGFKEMHELYKYAIKEKMRFFSYGDATLLYKK

SEQ ID NO: 71477 - protein, 353 aa, Rickettsia bellii
  REGION 1..353: note = tr|A0A0F3QCN2|A0A0F3QCN2_RICBE S-adenosylmethionine:tRNA ribosyltransferase-isomerase; OS = Rickettsia bellii str. RML An4 OX=1359193 GN=queA PE=3; SV = 1
MKLSDFDFDLPLELIAQNPISKRDESNLLIASTQQYVKTKFYNIIDYLKEGDLLVFNNSKVIKAKLSLDKNITINLNQRLKDNRRATNDDAGRLKSIDYWSAFAKPARKLKVGDEFYFDNHKIIITEKLEMGEIKIKFELANISVFEFLDKYGEMPLPLYIKRPERQKSDDERYQTVYSNIQGSVAAPTAGLHFTNDIINKLKAKGVQVAFVTLHVGAGTFMPVKTENINEHKMHTEYCSITPETAAIINKAKKEKRRIIAVGTTSLRTLESSGINGNVNSGDFETDIFITPGFKFQIVDMLLTNFHFPKSTLFMLVCAFAGFKEMHELYKYAIEEQMRFFSYGDATLLYRKV

SEQ ID NO: 71478 - protein, 353 aa, Rickettsia bellii
  REGION 1..353: note = sp|A8GVG9|QUEA_RICB8 S-adenosylmethionine:tRNA ribosyltransferase-isomerase OS=Rickettsia bellii (strain OSU 85-389) OX=391896 GN=queA PE=3 SV=1
MKLSDFDFDLPLELIAQNPISKRDESNLLIASTQQYVKTKFYNIIDYLKEGDLLVFNNSKVIKAKLSLDKNITINLNQRLKDNRRATNDDAGRLKSIDYWSAFAKPARKLKVGDEFYFDNHKIIITEKLEMGEIKIKFELANISVFEFLDKYGEMPLPLYIKRPERQKSDDERYQTVYSNIQGSVAAPTAGLHFTNDIINKLKAKGVQVAFVTLHVGAGTFMPVKTENINEHKMHTEYCSITPETAAIINKAKKEKRRIIAVGTTSLRTLESSGINGNVNSGDFETDIFITPGFKFQIVDMLLTNFHFPKSTLFMLVCAFAGFKEMHELYKYAIEEQMRFFSYGDATLLYKKV

SEQ ID NO: 71479 - protein, 386 aa, Rickettsia canadensis
  REGION 1..386: note = sp|A8EXV6|QUEA_RICCK S-adenosylmethionine:tRNA ribosyltransferase-isomerase OS=Rickettsia canadensis (strain McKiel) OX=293613 GN=queA PE=3 SV=1
MKLSDFDFDLPSELIAQYPSSKRDHSDLLIAATPPIKTKFYNIIDYLKEGDLLVFNNSKVIKAKLNLEKNRPLSKLAYRDKFEGDMECRTAVYTNVREDSSTGSTYKLPLEVELEKRSNITINLNQRLSNNCWSAFAKPARRLNIGDEFHFDNHKVIIVEKLAIGEIKVKFELDDISVFEFLDKYGEMPLPLYIRHHEAQKSNNERYQNIYSSIEGSVAAPTAGLHFTNDILNKLKAKNIQTTFLTLHVGAGTFLPVKTENIHEHKMHTEYCSITPDTARLINKAKQEKQRIIAVGTTTLRTLESSCNNGTVKACDFETDIFITPGFKFQTADILLTNFHFPKSTLFMLICAFAGFKEMHKLYKYAIKEKMRFFSYGDATLLYRKI

SEQ ID NO: 71480 - protein, 365 aa, Rickettsia conorii
  REGION 1..365: note = sp|Q92IY7|QUEA_RICCN S-adenosylmethionine:tRNA ribosyltransferase-isomerase OS=Rickettsia conorii (strain ATCC VR-613 / Malish 7) OX=272944 GN=queA PE=3 SV=1
MKLSDFDFDLPSELIAQYPSSERDNSDLLIAVTPPIKTKFYNIIDYLKEGDLLVFNNSKVIKAKLNLGKNITINLNQKLSDDNWSAFAKPARKLHVNDEFYFDNHKVIITEKLAMGEIKVKFELNDISVFEFLNKYGEMPLPVYIRRSHSLCHPVATTTGSKTYLNNDWIPWSNHGMTNTQNDNDRYQTVYSQIEGSVAAPTAGLHFTKDILDKLKAEGIQATFLTLHVGAGTFLPVKTENIHEHKMHTEYCSITPDTAEIINKAKQEGKRIIAVGTTTLRTLESSCNNGIVKAGSFKTDIFITPGFKFQTADMLLTNFHFPKSTLFMLICAFAGFKEMHELYKYAIKEAMRFFSYGDATLLCRK

SEQ ID NO: 71481 - protein, 366 aa, unidentified
  source 1..366: note = Rickettsia endosymbiont
  REGION 1..366: note = tr|A0A0F3RCC5|A0A0F3RCC5_9RICK S-adenosylmethionine:tRNA ribosyltransferase-isomerase; OS = Rickettsia endosymbiont of Ixodes pacificus OX=1133329; GN = queA PE=3 SV=1
MKLSDFDFDLPSELISQYPSNKRDHSDLLIATTPLIKTKFYNIINYLKEGDLLVFNNSKVIKAKLHLGKNITINLNQKLPDNCWSAFAKPARKLNIGDEFYFDNHKVIITAKLAMGEIKVKFELDNISVFEFLDKYGEMPLPVYIRRSHSLCHTVATTTGSKKFLNNDWIPWSSHGMTNTQNDNERYQTIYSQIEGSVAAPTAGLHFTKDILDKIKAEGIQTTFLTLHVGAGTFLPVKTENIHEHKMHTEYCSITPETAEIINKAKQEGRRIIAVGTTTLRTLESSCNKGTVKAGDFETDIFITPGFKFQTADMLLTNFHFPKSTLFMLICAFAGFKEMHELYKYAIKEKMCFFSYGDATLLYRKI

SEQ ID NO: 71482 - protein, 365 aa, unidentified
  source 1..365: note = Rickettsia endosymbiont
  REGION 1..365: note = tr|A0A161QNF9|A0A161QNF9_9RICK S-adenosylmethionine:tRNA ribosyltransferase-isomerase; OS = Rickettsia endosymbiont of Proechinophthirus fluctus; OX = 1462733 GN=queA PE=3SV=1
MKLSDFDFDLPSELIAQYPSSERDNSDLLIAVTPPIKTKFYNIIDYLKEGDLLVFNNSKVIKAKLNLGKNITINLNQKLSDDSWSAFAKPTRKLHINDEFYFDNHKVIITEKLAMGEIKVKFELNDISVFEFLNKYGEMPLPVYIRRSHSLCHPVATTTGSKTYLNNDWIPWSNHGMTNTQNDNDRYQTVYSQIEGSVAAPTAGLHFTKDILDKLKAEGIQATFLTLHVGAGTFLPVKTENIHEHKMHTEYYSITPDTAEIINKAKQEGKRIIAVGTTTLRTLESSCNNGIIKAGSFKTDIFITPGFKFQTADMLLTNFHFPKSTLFMLICAFAGFKEMHELYKYAIKEAMRFFSYGDATLLCRK

SEQ ID NO: 71483 - protein, 367 aa, Rickettsia felis
  REGION 1..367: note = tr|A0A0F3MUD2|A0A0F3MUD2_RICFI S-adenosylmethionine:tRNA ribosyltransferase-isomerase; OS = Rickettsia felis str. Pedreira OX=1359196 GN=queA PE=3; SV = 1
MKLSDFDFDLPTELIAQYPASERDNSDLLIATTPPIKTKFYNIIDYLKEGDLLVFNNSKVIKAKLNLERNITINLNQKLSDDSWSAFAKPARKLNIGDEFYSDNHKVIITEKFAMGEIKVKFELDNISVFEFLDKYGEMPLPVYIRRSKRHGEEEESSDEAISSQNPEIATESKRTPSNDDKLDSLRYQTIYSQIEGSVAAPTAGLHFTKEILDKLKAKGVQIAFVTLHVGAGTFLPVKTENIHEHKIHTEYCSITPETAEIINKAKQERRRIIAVGTTTLRTLESSCNNGVVKAGSFETDIFITPGFKFQTTDMLLTNFHFPKSTLFMLICAFAGFKEMHELYKYAIKEKMRFFSYGDATVLYRKV

SEQ ID NO: 71484 - protein, 367 aa, Rickettsia felis; identical to SEQ ID NO: 71483
  REGION 1..367: note = sp|Q4UMM7|QUEA_RICFE S-adenosylmethionine:tRNA ribosyltransferase-isomerase OS=Rickettsia felis (strain ATCC VR-1525 / URRWXCal2) OX=315456 GN=queA PE=3 SV=1

SEQ ID NO: 71485 - protein, 365 aa, Rickettsia heilongjiangensis
  REGION 1..365: note = tr|G0GX66|G0GX66_RICH0 S-adenosylmethionine:tRNA ribosyltransferase-isomerase OS=Rickettsia heilongjiangensis (strain ATCC VR-1524 / 054) OX=1032845; GN = queA PE=3 SV= 1
MKLSDFDFDLPSELIAQYPSSERDNSDLLIAVTPPIKTKFYNIIDYLKEGDLLVFNNSKVIKAKLNLGKNVTINLNQKLSDDSWSAFAKPARKLHVNDEFYFDNHKVIITEKLAMGEIKIKFELNDISVFEFLNKYGEMPLPVYIRRSHSLCHPVATTTGSKKYLNNDWIPWSNHGMTNTQNDNDRYQTVYSQIEGSVAAPTAGLHFTKDILDKLKAEGIQATFLTLHVGAGTFLPVKTENIHEHKMHTEYCSITPDTAEIINKAKQEGKRIIAVGTTTLRTLESSCNNGIIKAGSFETDIFITPGFKFQTADMLLTNFHFPKSTLFMLICAFAGFKEMHELYKYAIKEAMRFFSYGDATLLCRK

SEQ ID NO: 71486 - protein, 365 aa, Rickettsia japonica
  REGION 1..365: note = tr|G4KMD3|G4KMD3_RICJY S-adenosylmethionine:tRNA ribosyltransferase-isomerase OS=Rickettsia japonica (strain ATCC VR-1363 / YH) OX=652620 GN=queA PE=3 SV=1
MKLSDFDFDLPSELIAQYPSSERDNSDLLIAVTPPIKTKFYNIIDYLKEGDLLVFNNSKVIKAKLNLGKNVTINLNQKLSDDSWSAFAKPARKLHVNDEFYFDNHKVIITEKLAMGEIKVKFELNDISVFEFLNKYGEMPLPVYIRRSHSLCHPVATTMGSKKYLNNDWIPWSNHGMTNTQNDNDRYQTVYSQIEGSVAAPTAGLHFTKDILDKLKAEGIQATFLTLHVGAGTFLPVKTENIHEHKMHTEYCSITPDTAEIINKAKQEGKRIIAVGTTTLRTLESSCNNGIIKAGSFETDIFITPGFKFQTADMLLTNFHFPKSTLFMLICAFAGFKEMHELYKYAIKEAMRFFSYGDATLLCRK

SEQ ID NO: 71487 - protein, 365 aa, Rickettsia japonica; identical to SEQ ID NO: 71486
  REGION 1..365: note = tr|A0A3B7DA82|A0A3B7DA82_RICJA S-adenosylmethionine:tRNA ribosyltransferase-isomerase; OS = Rickettsia japonica OX=35790 GN=queA PE=3 SV=1

SEQ ID NO: 71488 - protein, 365 aa, Rickettsia massiliae
  REGION 1..365: note = tr|H6QL64|H6QL64_RICMA S-adenosylmethionine:tRNA ribosyltransferase-isomerase OS=Rickettsia massiliae str. AZT80 OX=1105112 GN=queA PE=3 SV=1
MKLSDFDFDLPSELIAQYPSSERDNSDLLIAVTPPIKTKFYNIIDYLKEGDLLVFNNSKVIKAKLNLGKNITINLNQKLSDDSWSAFAKPARKLHVNDEFYFDNHKVIITEKLAMGEIKVKFELNDISVFEFLNKYGEMPLPVYIRRSHSLSHPVATTTGSKKYLNNDWIPWSNHGMTNTQNDNDRYQTVYSQIEGSVAAPTAGLHFTKDILNKLKAEGIQATFLTLHVGAGTFLPVKTENIHEHKMHTEYCSITPDTAEIINKAKQEGKRIIAVGTTTLRTLESSCNNGIVKAGSFETDIFITPGFKFQTADMLLTNFHFPKSTLFMLICAFAGFKEMHELYKYAIKEAMRFFSYGDATLLCRK

SEQ ID NO: 71489 - protein, 366 aa, unidentified; identical to SEQ ID NO: 71481
  source 1..366: note = Rickettsia monacensis
  REGION 1..366: note = tr|A0A0B7J2J8|A0A0B7J2J8_9RICK S-adenosylmethionine:tRNA ribosyltransferase-isomerase; OS = Rickettsia monacensis OX=109232 GN=queA PE=3 SV=1

SEQ ID NO: 71490 - protein, 365 aa, Rickettsia montanensis
  REGION 1..365: note = tr|H8KCL5|H8KCL5_RICMS S-adenosylmethionine:tRNA ribosyltransferase-isomerase OS=Rickettsia montanensis (strain OSU 85-930) OX=1105114 GN=queA PE=3 SV=1
MKLSDFDFDLPSELIAQYPSSERDNSDLLIAVTPPIKTKFYNIIDYLKEGDLLVFNNSKVIKAKLNLGKNITINLNQKLSDDSWSAFAKPARKLHVNDEFYFDNHKVIITEKLAMGEIKVKFELNDISVFEFLNKYGEMPLPVYIRRSHSLCHPVATTTGSKKYLNNDWIPWSNHGMTNTQNDNDRYQTVYSQIEGSVAAPTAGLHFTKDIFDKLKAEGIQATFLTLHVGAGTFLPVKTENIHEHKMHTEYCSITPDTAEIINKAKQEGKRIIAVGTTTLRTLESACNNGIVKAGSFETDIFITPGFKFQTADMLLTNFHFPKSTLFMLICAFAGFKEMHELYKYAIKEAMRFFSYGDATLLCRK

SEQ ID NO: 71491 - protein, 365 aa, Rickettsia parkeri
  REGION 1..365: note = tr|A0A0F3QRT7|A0A0F3QRT7_RICPA S-adenosylmethionine:tRNA ribosyltransferase-isomerase; OS = Rickettsia parkeri str. Grand Bay OX=1359203 GN=queA; PE = 3 SV=1
MKLSDFDFDLPSELIAQYPSSERDNSDLLIAVTPPIKTKFYNIIDYLKEGDLLVFNNSKVIKAKLNLGKNITINLNQKLSDDSWSAFAKPARKLHVNDEFYFDNHKVIITEKLAMGEIKVKFELNDISVFEFLNKYGEMPLPVYIRRSHSLCHPVATTTGSKTYLNNDWIPWSNHGMTNTQNDNDRYQTVYSQIEGSVAAPTAGLHFTKDILDKLKAEGIQATFLTLHVGAGTFLPVKTENIHEHKMHTEYCSITPDTAEIINKAKQEGKRIIAVGTTTLRTLESSCNNGIVKAGSFKTDIFITPGFKFQTADMLLTNFHFPKSTLFMLICAFAGFKEMHELYKYAIKEAMRFFSYGDATLLCRK

SEQ ID NO: 71492 - protein, 365 aa, Rickettsia peacockii
  REGION 1..365: note = sp|C4K0Y4|QUEA_RICPU S-adenosylmethionine:tRNA ribosyltransferase-isomerase OS=Rickettsia peacockii (strain Rustic) OX=562019 GN=queA PE=3 SV=1
MKLSDFDFDLPSELIAQYPSSERDNSDLLIAVTPLIKTKFYNIIDYLKEGDLLVFNNSKVIKAKLNLGKNITINLNQKLSDDSWSAFAKPARKLHVNDEFYFDNHKVIITEKLAMGEIKVKFELNDISVFEFLNKYGEMPLPVYIRRSHSLCHPVATTTGSKTYLNNDWIPWSNHGMTNTQNDNDRYQTVYSQIEGSVAAPTAGLHFTKDILDKLKAEGIQATFLTLHVGAGTFLPVKTENIHEHKMHTEYCSITPDTAEIINKAKQEGKRIIAVGTTTLRTLESSCNNGIVKAGSFKTDIFITPGFKFQTADMLLTNFHFPKSTLFMLICAFAGFKEMHELYKYAIKEAMRFFSYGDATLLCRK

SEQ ID NO: 71493 - protein, 365 aa, unidentified
  source 1..365: note = Rickettsia philipii
  REGION 1..365: note = tr|H6PWK9|H6PWK9_RICP3 S-adenosylmethionine:tRNA ribosyltransferase-isomerase OS=Rickettsia philipii (strain 364D) OX=481009 GN=queA PE=3 SV=1
MKLSDFDFDLPSELIAQYPSSERDNSDLLIAVTPPIKTKFYNIIDYLKEGDLLVFNNSKVIKAKLNLGKNITINLNQKLSDDSWSAFAKPARKLHVNDEFYFDNHKVIITEKLAMGEIKVKFELNDISVFEFLNKYGEMPLPVYIRRSHSLCHPVATTTGSKTYLNNDWIPWSNHEMTNTQNDNDRYQTVYSQIEGSVAAPTAGLHFTKDILDKLKAEGIQATFLTLHVGAGTFLPVKTENIHEHKMHTEYCSITPDTAEIINKAKQEGKRIIAVGTTTLRTLESSCNNGIVKAGSFKTDIFITPGFKFQTADMLLTNFHFPKSTLFMLICAFAGFKEMHELYKYAIKEAMRFFSYGDATLLCRK

SEQ ID NO: 71494 - protein, 383 aa, Rickettsia prowazekii
  REGION 1..383: note = sp|Q9ZDV6|QUEA_RICPR S-adenosylmethionine:tRNA ribosyltransferase-isomerase OS=Rickettsia prowazekii (strain Madrid E) OX=272947 GN=queA PE=3 SV=1
MKLSDFDFNLPSALIAQYPSSERDNSDLLIAGTKHIKTKFYNIIDYLKKGDLLVFNNSKVIKAKLHLGKNITINLNKKLSDNCWIAFAKPARKLNIGDEFYFDTHKIIITEKLAIGEIKVKFMLDNISIIKFLDKYGEIPLPFYIKRPSPVCYSNMALCCKPENTLKIKSIPHNMSKIVTNNSNTVNLRSNDGIIDSTNDNDRYQTIYSQIEGSVAAPTAGLHFTKNILDKLKTKGVHTAFVTLHVGAGTFLPVKTENIHEHKMHTEYCSITTETAEIINKTKQEGRSIIAVGTTTLRTIESACNNGIVRAGNFETDIFITPGFNFQVVDMLLTNFHFPKSTLFILICAFAGFKEMHALYKYAIKEKMRFFSYGDATLLYRKV

SEQ ID NO: 71495 - protein, 383 aa, Rickettsia prowazekii; identical to SEQ ID NO: 71494
  REGION 1..383: note = tr|D5AWD4|D5AWD4_RICPP S-adenosylmethionine:tRNA ribosyltransferase-isomerase OS=Rickettsia prowazekii (strain Rp22) OX=449216 GN=queA PE=3 SV=1

SEQ ID NO: 71496 - protein, 366 aa, Rickettsia raoultii
  REGION 1..366: note = tr|A0A126E903|A0A126E903_9RICK S-adenosylmethionine:tRNA ribosyltransferase-isomerase; OS = Rickettsia raoultii OX=369822 GN=queA PE=3 SV=1
MKLSDFDFDLPSELIAQYPSSERDNADLLIAVTPPIKTKFYNIIDYLKEGDLLVFNNSKVIKAKLNLGKNITINLNQKLSDDSWSAFAKPARKLHVHDEFYFDNHKVIITEKLAMGEIKVKFELNDISVFEFLNKYGEMPLPVYIRRSHSLCHPVAMTTESKKYLNNDWIPWSNHHGMTNTQNDNDRYQTVYSQIEGSVAAPTAGLHFTKDILDKLKAEGIQATFLTLHVGAGTFLPVKTENIHEHKMHTEYCSITPDTAEIINKAKQEGKRIIAVGTTTLRTLESSCNNGIVKAGSFETDIFITPGFKFQTADMLLTNFHFPKSTLFMLICAFAGFKEMHELYKYAIKEAMRFFSYGDATLLCRK

SEQ ID NO: 71497 - protein, 366 aa, Rickettsia rhipicephali
  REGION 1..366: note = tr|A0A0S2CAE6|A0A0S2CAE6_RICRH S-adenosylmethionine:tRNA ribosyltransferase-isomerase; OS = Rickettsia rhipicephali OX=33992 GN=queA PE=3 SV=1
MKLSDFDFDLPSELIAQYPSSERDNSDLLIAVTPPIKTKFYNIIDYLKEGDLLVFNNSKVIKAKLNLGKNITINLNQKLSDDSWSAFAKPARKLHVNDEFYFDNHKVIITEKLAMGEIKVKFELNDISVFEFLNKYGEMPLPVYIRRSHSLCHPVATTTGSKKYLNNDWIPWSNHGMTNTQNDNDRYQTVYSQIEGSVAAPTAGLHFTKDILNKLKAEGIQATFLTLHVGAGTFLPVKTENIHEHKMHTEYCSITPDTAEIINKAKQEGKRIIAVGTTTLRTLESSCNNGIVKAGSFETDIFITPGFKFQTADMLLTNFHFPKSTLFMLICAFAGFKEMHELYKYAIKEAMRFFSYGDATLLCRKR

SEQ ID NO: 71498 - protein, 365 aa, Rickettsia rhipicephali; identical to SEQ ID NO: 71488
  REGION 1..365: note = tr|A0A0F3PFX0|A0A0F3PFX0_RICRH S-adenosylmethionine:tRNA ribosyltransferase-isomerase; OS = Rickettsia rhipicephali str. Ect OX=1359199 GN=queA; PE = 3 SV=1

SEQ ID NO: 71499 - protein, 365 aa, Rickettsia rickettsii
  REGION 1..365: note = sp|B0BWL5|QUEA_RICRO S-adenosylmethionine:tRNA ribosyltransferase-isomerase OS=Rickettsia rickettsii (strain Iowa) OX=452659 GN=queA PE=3 SV=1
MKLSDFDFDLPSELIAQYPSSERDNSDLLIAVTPPIKTKFYNIIDYLKEGDLLVFNNSKVIKAQLNLGKNITINLNQKLSDDSWSAFAKPARKLHVNDEFYFDNHKVIITEKLAMGEIKVKFKLNDISVFEFLNKYGEMPLPVYIRRSHSLCHPVATTTGSKTYLNNDWIPWSNHGMTNTQNDNDRYQTVYSQIEGSVAAPTAGLHFTKDILDKLKAEGIQATFLTLHVGAGTFLPVKTENIHEHKMHTEYCSITPDTAEIINKAKQEGKRIIAVGTTTLRTLESSCNNGIVKAGSFKTDIFITPGFKFQTADMLLTNFHFPKSTLFMLICAFAGFKEMHELYKYAIKEAMRFFSYGDATLLCRK

SEQ ID NO: 71500 - protein, 365 aa, Rickettsia rickettsii; identical to SEQ ID NO: 71499
  REGION 1..365: note = sp|A8GR69|QUEA_RICRS S-adenosylmethionine:tRNA ribosyltransferase-isomerase OS=Rickettsia rickettsii (strain Sheila Smith) OX=392021 GN=queA PE=3 SV=1

SEQ ID NO: 71501 - protein, 365 aa, Rickettsia sibirica
  REGION 1..365: note = tr|Q7PB21|Q7PB21_RICS2 S-adenosylmethionine:tRNA ribosyltransferase-isomerase OS=Rickettsia sibirica (strain ATCC VR-151 / 246) OX=272951 GN=queA PE=3 SV=1
MKLSDFDFDLPSELIAQYPSSERDNSDLLIAVTPPIKTKFYNIIDYLKEGDLLVFNNSKVIKAKLNLGKNITINLNQKLSDDSWSAFAKPARKLHVNDEFYFDNHKVIITEKLAMGEIKVKFELNDISVFEFLNKYGEMPLPVYIRRSHSLCHPVATTTGSKAYLNNDWIPWSNHGMTNTQNDNDRYQTVYSQIEGSVAAPTAGLHFTKDILDKLKAEGIQATFLTLHVGAGTFLPVKTENIHEHKMHTEYCSITPDTADIINKAKQEGKRIIAVGTTTLRTLESSCNNGIVKAGSFKTDIFITPGFKFQTADMLLTNFHFPKSTLFMLICAFAGFKEMHELYKYAIKEAMRFFSYGDATLLCRK

SEQ ID NO: 71502 - protein, 365 aa, Rickettsia slovaca
  REGION 1..365: note = tr|H8LMB7|H8LMB7_RICSL S-adenosylmethionine:tRNA ribosyltransferase-isomerase OS=Rickettsia slovaca str. D-CWPP OX=1105109 GN=queA PE=3 SV=1
MKLSDFDFDLPSELIAQYPSSERDNSDLLIAVTPPIKTKFYNIIDYLKEGDLLVFNNSKVIKAKLNLGTNITINLNQKLSDDSWSAFAKPARKLHVNDEFYFDNHKVIITEKLAMGEIKVKFELNDISVFEFLNKYGEMPLPVYIRRSHSLCHPVATTTGSKTYLNNDWIPWSNHGMTNTQNDNDRYQTVYSQIEGSVAAPTAGLHFTKDILDKLKAEGIQATFLTLHVGAGTFLPVKTENIHEHKMHTEYCSITPDTAEIINKAKQEGKRIIAVGTTTLRTLESSCNNGIVKAGSFKTDIFITPGFKFQTADMLLTNFHFPKSTLFMLICAFAGFKEMHELYKYAIKEAMRFFSYGDATLLCRK

SEQ ID NO: 71503 - protein, 387 aa, Rickettsia sp.
  REGION 1..387: note = tr|A0A1C3EVD7|A0A1C3EVD7_9RICK S-adenosylmethionine:tRNA ribosyltransferase-isomerase; OS = Rickettsia sp. wb OX=1851512 GN=queA PE=3 SV=1
MKLSDFDFDLPLELIAQNPVSKRDESNLLIASTEQYVKTKFYNIVDYLKEGDLLVFNNSKVIKAKLNLDKNININLNQRLKDIATNDDADRLKSIDYWSAFAKPARKLKVGDEFYFDNHKIIITEKLEMGEIKIKFELANISVFEFLDKYGEMPLPLYIKRPFQKSLAQRHCEERHSPDTAISLQNPEIATASQRTPRNDNKLDDERYQTVYSNIQGSVAAPTAGLHFTNDIINKLKEKGVQVAFVTLHVGAGTFMPVKTENISEHKMHTEYCSITPETAVIINKAKQEKRRIIAVGTTSLRTLESSAINGNLNSGEFETDIFITPGFKFQIVDMLLTNFHFPKSTLFMLVCAFAGFKEMHELYKYAIKEQMRFFSYGDATLLYRKV

SEQ ID NO: 71504 - protein, 387 aa, Rickettsia sp.; identical to SEQ ID NO: 71503
  REGION 1..387: note = tr|A0A249E5E4|A0A249E5E4_9RICK S-adenosylmethionine:tRNA ribosyltransferase-isomerase; OS = Rickettsia sp. MEAM1 (Bemisia tabaci) OX=1182263; GN = queA PE=3 SV=1

SEQ ID NO: 71505 - protein, 375 aa, Rickettsia typhi
  REGION 1..375: note = sp|Q68XF6|QUEA_RICTY S-adenosylmethionine:tRNA ribosyltransferase-isomerase OS=Rickettsia typhi (strain ATCC VR-144 / Wilmington) OX=257363 GN=queA PE=3 SV=1
MKLSDFDFNVPNALIAQYPSSERDNSDLLIAGTKHIKTKFYNIIDYLKEGDLLVFNNSKVIKAKLHLGKNITINLNKKLSDNCWGAFAKPARKLNIGDEFYFDTHKIIITEKLAMGEIKVKFILNNISMIKFLDKYGEMPLPFYIKRTSSVCCSNMALFCDHDNTLKITSISHNSNTVNFRSTDSMIDSTNDNDRYQTIYSQIEGSVAAPTAGLHFTKDILDKLKTKGINTAFVTLHVGAGTFLPVKTENIHKHKMHTEYCSITAETAEIINKTKQKGRDIIAVGTTTLRTLESSCNNGIVKAGNFETDIFITPGFNFQIVDMLLTNFHFPKSTLFILICAFAGFKEMHALYKYAIKEKMRFFSYGDATLLYRKV

SEQ ID NO: 71506 - protein, 340 aa, unidentified
  source 1..340: note = Rickettsiaceae bacterium
  REGION 1..340: note = tr|A0A1W9SBC3|A0A1W9SBC3_9RICK S-adenosylmethionine:tRNA ribosyltransferase-isomerase; OS = Rickettsiaceae bacterium 4572_127 OX=1971637 GN=queA; PE = 3 SV=1
MKLSDFNFDLPEELIAKYPPENRTDSRMLVVPKNLDKKFTDFPDLLNAGDVLVLNNTKVIPARIYGVRGEAKIEATLHKKIDERTWLAFVKNSKRLKINDTIDFSKMTAKVLEKTDAGTLLKFNKSGENLLAILDKIGHMPLPPYMKRNDDSADKLRYQTVFAERNGSVAAPTAGLHFTDEILKKIKAKNVKIVFVTLHVGAGTFLPVKTENLDEHIMHSEWGEIDKKTADILNKTRESGGRIIAVGTTATRILETATNNKKIVESFCGETDIFITPGYKFKAIDVMLTNFHLPKSTLFMLVSALAGTSEMKSAYAHAIEKKYRFYSYGDCCLLEKKERK

SEQ ID NO: 71507 - protein, 348 aa, unidentified
  source 1..348: note = Rickettsiaceae bacterium
  REGION 1..348: note = tr|A0A4V1SW56|A0A4V1SW56_9RICK S-adenosylmethionine:tRNA ribosyltransferase-isomerase; OS = Rickettsiaceae bacterium OX=2023360 GN=queA PE=3 SV=1
MKLSDFDFFLPKELIAQEPSMLRDHSALLITDQDKKLIHTKFYNIIDYLKEGDVLVFNNSKVIKSKIILTKLDRTIELFFSKQINTNNWRGFAKPAKKLKEGDVFFVDTHKIIITKKLYMGEIEAEIQLDQLSFFEFLNSYGQMPLPPYIKSNKDKEAFNTSSKRYQTVYSDILGSVAAPTAGLHFTDELIDKIKMKGIHVAFLHLHVGTGTFMPIKSHDIEQHTMHSEYCNIPIHTAEVVNKAKIEGRRIIAVGTTSLRALESAACDNKILAKEFETDIFIKPGFKFQIVDCLITNFHLPKSTLLVLACAFSGYTKIMRAYYYAIEQKMRFFSYGDAMLLLKSEDMT

SEQ ID NO: 71508 - protein, 268 aa, unidentified
  source 1..268: note = Rickettsiales bacterium
  REGION 1..268: note = tr|A0A2D7Q810|A0A2D7Q810_9RICK S-adenosylmethionine:tRNA ribosyltransferase-isomerase; OS = Rickettsiales bacterium OX=2026788 GN=CMM89_05065 PE=3; SV = 1
  VARIANT 7: note = Xaa can be any naturally occurring amino acid
  VARIANT 192: note = Xaa can be any naturally occurring amino acid
  VARIANT 197: note = Xaa can be any naturally occurring amino acid
  VARIANT 210: note = Xaa can be any naturally occurring amino acid
  VARIANT 217: note = Xaa can be any naturally occurring amino acid
  VARIANT 233: note = Xaa can be any naturally occurring amino acid
  VARIANT 235: note = Xaa can be any naturally occurring amino acid
  VARIANT 251: note = Xaa can be any naturally occurring amino acid
MIKKKKXWSAFIRSNKKIQLEQNIYLKNSIYCKVIEIKKEKNYVSYIIKFSLRYLDLIEFLNSHGKIPLPAYIKKKRLINQSDIKNYQTIFADKIGAVAAPTASLHFTKRLIDKIKKKGINIITLTLHVNGGTFLPIKSNVVEDHLMHFEKGVITQESASKINYFKKKGGRIFAVGTTVLRLLESSKDNQGXIKAFXGETNIYIKPGWKXNTIDALXTNFHTPKSTLLLLIYXIXGKKRTQEIYSFAIKHXMRFFSYGDACLIWNKNE

SEQ ID NO: 71509 - protein, 342 aa, unidentified
  source 1..342: note = Rickettsiales bacterium
  REGION 1..342: note = tr|A0A1Z9MX29|A0A1Z9MX29_9RICK S-adenosylmethionine:tRNA ribosyltransferase-isomerase; OS = Rickettsiales bacterium TMED211 OX=1986869 GN=queA PE=3; SV = 1
  VARIANT 336: note = Xaa can be any naturally occurring amino acid
MLTKKFDFEIPDSLIALEPANPRDSSKLIEVSNVFNINNFTNILDILKKNDCLVLNDTKVLPASLKGECEKKEIKVTLNKLIKTSPKIIWSVFVKPLKKAKDNVTIEFEGGFLGKLKRSNNQVLLEFNYTYDRFMIFIHRYGVLALPPYISKKRKFQKIDYQNYQTVFAKKEGAVAAPTASLHFTENLLKKIIDKGVKLVMITLHVNGGTFTPIRKHNIEEHEMHFEFGEITKNAAKIINETRLMGNKCIAVGTTVLRLLETSKKRNGQITEYCGETNIFIKPGWKINSIDGLITNFHTPKSTLFVLICAMIGINKAKRLYKFAVKNKIRFFSYGXACLLWK

SEQ ID NO: 71510 - protein, 342 aa, unidentified
  source 1..342: note = Rickettsiales endosymbiont
  REGION 1..342: note = tr|A0A3S8T546|A0A3S8T546_9RICK S-adenosylmethionine:tRNA ribosyltransferase-isomerase; OS = Rickettsiales endosymbiont of Stachyamoeba lipophora; OX = 2486578 GN=queA PE=3SV=1
MKLSDFDFELPEGLIAKHPTEPRDQCKMLVVDNDHFDDKKFYELLNYVNAGDVVVFNDTKVLPSYLKAYNNNGALININLHKYKNDLIWEAFVKPAKRVRVGEKLVVADDFVFEITAKDDGGIVYLKTNYDTKEFFNKLDYYGKMPIPPYIKREVESGDEQNYQTVYAKFSGSVAAPTAGLHFTDDLLKRLVEKGVSLEYVTLHVGAGTFMPVKVDHIKDHVMHSEYCEISFATANKINQAKANGNKIIAVGTTTLRTLESAVDKDGLVRSFCGNTNIFITPGAKIKSADMLITNFHLPKSTLLMLVSAFCGYNNIINAYKHAINNQYRFFSYGDACLLFKA

SEQ ID NO: 71511 - protein, 354 aa, unidentified
  source 1..354: note = Rickettsiales endosymbiont
  REGION 1..354: note = tr|A0A4Q7DQB0|A0A4Q7DQB0_9RICK S-adenosylmethionine:tRNA ribosyltransferase-isomerase; OS = Rickettsiales endosymbiont of Peranema trichophorum; OX = 2486577 GN=queA PE=3SV=1
MKLSDFDYHLPKELIAQTPLPRSRSRLLNVTDIMEDLHITDLPMYLSKGDVLVLNNTRVIPSLLRARKVSKFGDDVINDGIISFNLYKNVQGNVWLAFAKPGKKVRVGDTFAVNGKILLFQIIGKSQNSPEITIQFACQGDSLISQLKLYGDVPLPPYIKRSAPTEADTSDYQTVFASVDGAVAAPTAGLHFTTGMLEDIQAQGVRLAYITLHVGGGTFLPIRSEHITEHEMHEEAFLIPTDSAAIINDARANGNKVIAVGTTVLRTLEATADERGFLRGCHGSTNLFIYPGYRFKAVDMLLTNFHLPKSTLFILVCAFAGTERMKRAYLHAVQQKYRFFSYGDACFLRRYRQA

SEQ ID NO: 71512 - protein, 350 aa, Rickettsiella grylli
  REGION 1..350: note = tr|A8PK82|A8PK82_9COXI S-adenosylmethionine:tRNA ribosyltransferase-isomerase OS=Rickettsiella grylli; OX = 59196 GN=queA PE=3 SV=1
MLQTRLQTQYKPEDFFYELPEKLIAHYPTEQRTDSRLLCLNKTTGVMQHKKFKDILDFINPGDLLVLNNTQVIPARLFAKKITGGKVEILIERILERQRILAQLKSSKSLQRGTRLILENEMHVEIVNRTETMYELVFLIEPNLSILELLNQIGHIPLPPYIQRADELFDGERYQTVFASVPGAIAAPTAGLHFDEDLLTELKTKGVHIAYITLHVGAGTFQPIRSDRLEDHRMHHEYVTVSKTVCEQIIRAKQLNKRIIAVGTTVVRSLETAALQGQINPLAGETNLFIYPGFNFHCIDALITNFHLPRSTLLMLVCALGGYELIMQAYQEAVFQGYRFFSYGDAMWIS

SEQ ID NO: 71513 - protein, 349 aa, Riemerella anatipestifer
  REGION 1..349: note = tr|E4T9E1|E4T9E1_RIEAD S-adenosylmethionine:tRNA ribosyltransferase-isomerase OS=Riemerella anatipestifer (strain ATCC 11845 / DSM 15868 / JCM 9532 / NCTC 11014); OX = 693978 GN=queA PE=3 SV=1
MKTSDFNFNLPPELLAEHPSEHRDEARLMVLNRKNQTIEHKLFKDVIDYFDENDLFIFNNTKVFPARLYGNKEKTGAKIEVFLLRELDKETRVWDVLVDPARKIRIGNKLFFDEDESLVAEVIDNTTSRGRTLRFLYDGSYEEFRAKLKELGETPLPKYIKREVEPEDAERYQTIYAKKEGAVAAPTAGLHFSKHLMKRLEIKGINFAEVTLHVGLGTFNPIEVEDLSKHKMECEEAFIDQKNADIINKAIDEDRRICAVGTTTMRTIETSVSSNRKLSAYHGWTNKFIYPPYDFAVADSMITNFHTPKSTLIMMIAAFAGKDFVMHAYEEAVKEKYKFYSYGDAMLIL

SEQ ID NO: 71514 - protein, 349 aa, Riemerella anatipestifer
  REGION 1..349: note = tr|J9R8Y6|J9R8Y6_RIEAN S-adenosylmethionine:tRNA ribosyltransferase-isomerase OS=Riemerella anatipestifer RA-CH-1 OX=1228997 GN=queA PE=3 SV=1
MKTSDFNFNLPPELLAEHPSEHRDEARLMVLNRKNQTIEHKLFKDVIDYFDENDLFIFNNTKVFPARLFGNKEKTGAKIEVFLLRELDKDTRVWDVLVDPARKIRIGNKLFFDEDESLVAEVIDNTTSRGRTLRFLYDGSYEEFRAKLKELGETPLPKYIKREVEPEDAERYQTIYAKNEGAVAAPTAGLHFSKHLMKRLEIKGINFAEVTLHVGLGTFNPIEVEDLSKHKMECEEAFIDQKNADIINKAIDEDRRICAVGTTTMRTIETSVSSNRKLSAYHGWTNKFIYPPYDFAVADSMITNFHTPKSTLIMMIAAFAGKDFVMHAYEEAVKEKYKFYSYGDAMLIL

SEQ ID NO: 71515 - protein, 349 aa, unidentified
  source 1..349: note = Riemerella columbipharyngis
  REGION 1..349: note = tr|A0A1G7BPJ9|A0A1G7BPJ9_9FLAO S-adenosylmethionine:tRNA ribosyltransferase-isomerase; OS = Riemerella columbipharyngis OX=1071918 GN=queA PE=3 SV=1
MKTSDFNFNLPAELLAERPSEHRDEARLMVLDRAKQTIEHKLFKDVVNYFDENDLFIFNNTKVFPARLYGNKEKTGARIEVFLLRELDKETRVWDVLVDPARKIRIGNKLFFDKEETLLAEVIDNTTSRGRTLRFLYDGSYEEFREKLREIGNTPLPKYIKREAEPEDAERYQTIYAKVEGAVAAPTAGLHFSKHLMKRLEIKGINFAEITLHVGLGTFNPIEVEDLSKHKMECEETIIDQKNADLINKAIEEDRKICAVGTTVMRAIETSVSSNRRIGPYHGWTNKFIYPPYDFGIANTMITNFHTPKSTLLMMIAAFAGKDFVMEAYEEAIREKYKFYSYGDAMLIL

SEQ ID NO: 71516 - protein, 349 aa, Rikenella microfusus
  REGION 1..349: note = tr|A0A379MML2|A0A379MML2_9BACT S-adenosylmethionine:tRNA ribosyltransferase-isomerase; OS = Rikenella microfusus OX=28139 GN=queA_1 PE=3 SV=1
MKLSQYKYDFSPDMLAKYPAENRDESRLLVFDRKSGKIEHKIFKDIIGYFKEGDVMIFNNTKVFPARLYGNKEKTGAEIEIFLLRELNREQRLWDVLVDPARKIRIGNKLYFGDDDALVAEVIDNTTSRGRTLRFLFDGDYDQFKAALYKLGETPLPRWIRPKVEPIDAERYQTIYAKVEGAVAAPTAGLHFSKHLLKRLEIKGVGCAEVTLHVGLGNFRSVDVEDLTKHKMDSEQIFISEEAVKIVNTARAKEKRVCAIGTTVMRTIESSVSTDGMLKPFEGWTNKFIFPPYEFSVANAMVTNFHLPYSTQLMMVSAFAGYDQLMNLYEVAKKEDYKFGTYGDAMLIL

SEQ ID NO: 71517 - protein, 402 aa, Rikenella microfusus
  REGION 1..402: note = tr|A0A379MTW9|A0A379MTW9_9BACT S-adenosylmethionine:tRNA ribosyltransferase-isomerase; OS = Rikenella microfusus OX=28139 GN=queA_2 PE=3 SV=1
MEKAIDISEFDYPLPDERIARFPLEDRAASKLLLYRNGTVGEDVFRNVADYLPAGALVVFNDTKVIRARLLFHKATGARIEIFCLEPHAPADYERAFAVTGRCEWHCIVGNSKKWKSGPLEMPYDGGILSAERIQDDRIGFAWTSEHTFGQLLELLGRTPIPPYLCRESEEIDTVRYQTVYSKWEGSVAAPTAGLHFTSEIIESLSGRGFDTAEVTLHVGAGTFLPVKEKDARNHRMHTEFFQVGLATLEKLAAAAAEGKIVAVGTTSVRTLESLAVLGERVLLTGDAAPERTVGQWEAYTNGATADGESAPLGALAEWMRSWKMTQLHAATEIMIVPSYRWRTVRGLITNFHQPQSTLLLLISALVGERWREIYSYALEHGFRFLSYGDSSLLLPEKGSGE

SEQ ID NO: 71518 - protein, 350 aa, unidentified
  source 1..350: note = Rikenellaceae bacterium
  REGION 1..350: note = tr|A0A350IHD7|A0A350IHD7_9BACT S-adenosylmethionine:tRNA ribosyltransferase-isomerase; OS = Rikenellaceae bacterium OX=2049048 GN=queA PE=3 SV=1
MKLSQFQFPISLKKDIAHEPTGKWRDESRMMVLHKDTGEIEHKIFKNIVDYFGKGDTFVLNDTKVFPARLLGKKEKTGADIEVFLLRELNKEQRLWDVIVEPARKIRIGNKLYFGEDSLVAEVIDNTTSRGRTLRFLYDGKYEDFKQTLFSLGDIPVPKWVKEKTTPEDKVNFQTIFAKNEGAVSAPAAGLHFSRELFNMMTLKDINKTFITEHMGIGYFRKVDVEDLSKHKMDSERLIITPESAEIINKTKAEGHKVLAVGVTVMRGLETYVTTNDEVQPYDGWTNKFIFPPYRYAVPNAIVSNFHLPGSTMLMAVAAFGRYEPVKKAYETALQEGYKFGPYGDALLII

SEQ ID NO: 71519 - protein, 349 aa, unidentified
  source 1..349: note = Rikenellaceae bacterium
  REGION 1..349: note = tr|A0A3B8X1A3|A0A3B8X1A3_9BACT S-adenosylmethionine:tRNA ribosyltransferase-isomerase; OS = Rikenellaceae bacterium OX=2049048 GN=queA PE=3 SV=1
MKLSQFNFDLPADRIAKEPTRWRDEARLMVLHKDTGEIEHRLFKDIIDYFGKGDIFVLNDTKVFPARLYGKKEKTGADIMVLLLRELNREQRLWDVIVDPARKIRIGNKLYFGEDESLVAEVIDNTTSRGRTLRFLFDGPYEDFKEALFSLGEPYVPEWVKEKTTPEDVENYQTIFAAHEGAVSAPAASLHFSRELFNRMILKDIEKTFITVHMGIGHFRTVDVEDLSKHRMDSERLIISEEAAAAINKAKRSGKKVVAIGATVMRGLETYVTTTHEVNPYDGWTNKFIFPPYQYSVPDACVSNFHLPQSTMLMSVAAFGGYKGVMAAYEEALKEGYRFGPYGDALLIV

SEQ ID NO: 71520 - protein, 372 aa, unidentified
  source 1..372: note = Rippkaea orientalis
  REGION 1..372: note = tr|B7JVE6|B7JVE6_RIPO1 S-adenosylmethionine:tRNA ribosyltransferase-isomerase OS=Rippkaea orientalis (strain PCC 8801) OX=41431 GN=queA PE=3 SV=1
MNDDHLLASYDYHLPAELIAQSPVTPRDSSRLLVLNSLTTQVHSVFRELPQWLRSGDLLVLNNTRVIPARLYGQKTTGAPVEILLLEEKAPLSWLALVKPGKRFKRGSQIWFPHSPDETTESSVYLKATVIDVDPETGGRLLQFEADSVEAFWSAIEELGKIPLPPYVTSSEAQPGQYQTVYAQKPGAVAAPTAGLHFTPDLLQRLQAQGIQQSYITLHVGVGTFRPVEVGDITQHQMHSEWLEVPSSTVEAIAETKARGGRVIAVGTTVVRSLEGVAQIAKAEGKSGLIPFRGRTDLFIYPGYSWQVVEGMITNFHLPRSSLLMLVSALIGRERLMSVYQTAIDEKYRFYSFGDGMLILPEAVKSPNYSSV

SEQ ID NO: 71521 - protein, 371 aa, Rivibacter subsaxonicus
  REGION 1..371: note = tr|A0A4Q7VVU9|A0A4Q7VVU9_9BURK S-adenosylmethionine:tRNA ribosyltransferase-isomerase; OS = Rivibacter subsaxonicus OX=457575 GN=queA PE=3 SV=1
MQPSASEPSATRDWSVADFDFELPPELIAQHPAPERSASRLLDGRGALPVDRVFRELPALLSPGDLLVFNDTRVIKARLFGRKTTAGVRGGAGGGRVEALIERVLPGTREVWAHLRASKSPRAGSVVRFGDDEAHAFDAEVLGRCGAEDALFHLRFPEDPFVLLERSGHVPLPPYITHADAAEDVRRYQTVFADKPGAVAAPTASLHFDEALLEQLAARGVQRASVTLHVGAGTFQPVRVERIKEHRMHSEWFDVPAVTVDAIAQTRARGGRVVAVGTTTLRALESAALDRADRLPAVGARETEIFITPGFDFRVVDRLVTNFHLPKSTLLMLVSAFAGFEHMHALYAHAIAQRYRFFSYGDAMLLDRRVS

SEQ ID NO: 71522 - protein, 342 aa, unidentified
  source 1..342: note = Rivicola pingtungensis
  REGION 1..342: note = tr|A0A318KKN1|A0A318KKN1_9NEIS S-adenosylmethionine:tRNA ribosyltransferase-isomerase; OS = Rivicola pingtungensis OX=1054498 GN=queA PE=3 SV=1
MQLSDFDFELPEALIAQFPPATRGDSRLLHVDGLCCTDDHFSQLSAYLRAGDVLVFNDTRVLKARLFGQKASGGQVEILVERVLDAHRVLAHVRASKSPKPGSRLLLEGRWQAEMVERQEALFLLRFLDEANVLDILEQSGKLPLPPYITRDADSPDDERYQTVYARHQGAVAAPTAGLHFTDAQLDALRAQGVKLAFVTLHVGAGTFQPVRVDNIAEHRMHSERYDIPPATVEAITQAHASGGRVVAVGTTSLRALESAARGGELAAGQGETDIFITPGYRFRVVDRLLTNFHLPKSTLMMLVSAFAGMAPIRAAYHHAIEQQYRFFSYGDAMLLEKSPDA

SEQ ID NO: 71523 - protein, 393 aa, Rivularia sp.
  REGION 1..393: note = tr|K9R7R9|K9R7R9_9CYAN S-adenosylmethionine:tRNA ribosyltransferase-isomerase OS=Rivularia sp. PCC 7116; OX = 373994 GN=queA PE=3 SV=1
MAISNSSNPQSNTSQSVYSSNQDSTHINLDVSLDGYDYHLPPEFIAQNPAVPRDSSRLLVVDSLDTGIKSIPSHHVFRDLSVILRPQDLLVMNDTKVIPARLYGRKSTGAQVEVLLLEEKHVDCWLALVKPGKRFKKGSEIIFETKRENSQQNCKKLVATVLETDEATGGRLLQFDVPAGMSLIQLLEDFGEVPLPPYISASEAESGQYQTVYAQNPGAVAAPTAGLHFTPELLEKLEEKGINRTFVTLHVGVGTFRPVEVEDVTTHEMHGEWIEIPAETVEKIRETKAKGGRIIAVGTTAVRALEGAAKAGEAELQPFCGETDLFIYPGYEWKVVDGLITNFHLPRSSLLMLVSALIGRERLLNIYQEAIKSQYRFYSFGDAMLILPEAVSG

SEQ ID NO: 71524 - protein, 349 aa, Rivularia sp.
  REGION 1..349: note = tr|K9RGY9|K9RGY9_9CYAN S-adenosylmethionine:tRNA ribosyltransferase-isomerase OS=Rivularia sp. PCC 7116; OX = 373994 GN=Riv7116_4309 PE=3 SV=1
MSTPFTFLLPAELSAKEPPERRGIARDGVRLMTINRNSGEVDHSRFNGISEFLRPGDLLIFNTSRTLPASLQGCDCTLDKYLEIRLAQHLPDDSWLALLMCQQGNPFACGLQEGMNLDFGEGLTAKVENQDIHIPRLWKISFSLAGTQLMDSIYRLGNPIRYEYVSKPWDLDYYQTVYAKEPGSAEMPSAGRAFTWKLLFDLKRKGIETAQIVLHTGLSSYMDDELDALHPASEEEYFISETAAKKINRVRQEGGRIIAVGTTVVRALESAVDIEGLIKPQHSYTRLHISAEHQLKIVDGLLTGMHEPEASHLDLLTAFLSAEQIQVAYEDAVQRGYLWHEFGDLNLIL

SEQ ID NO: 71525 - protein, 390 aa, unidentified
  source 1..390: note = Robbsia andropogonis
  REGION 1..390: note = tr|A0A0F5JZL0|A0A0F5JZL0_9BURK S-adenosylmethionine:tRNA ribosyltransferase-isomerase; OS = Robbsia andropogonis OX=28092 GN=queA PE=3 SV=1
MYTLSDFDFNLPEALIAQYALPERSASRLLHVGPPAPGSTSPHLTDHHFADLVSFLRPGDLLVFNDTKVLKARFFGTKASGGHVEVLVERLIEDPPGTRPVGAGGTTALAQIRASKSPRAGTTLRLADAFDVIVGERVGPFYTLTFPGPCLDLIEQYGRLPLPPYIQHTPDASDETRYQTVYAAHPGAVAAPTAGLHFDEALLAALDAAGIQRGTLTLHVGAGTFQPVRTENIADHVMHSESYEIPAALADAISTTRAAGGRVIAVGTTSMRALESAARDQATATGASDLGTPANVAVDDRSSTAPQLRAHRAETDIFITPGYPFRIVDCLITNFHLPKSTLMMLVSAFAGMAPIRAAYRHAIAAQYRFFSYGDAMFLTRTPEAPSDAQV

SEQ ID NO: 71526 - protein, 379 aa, unidentified
  source 1..379: note = Robbsia sp.
  REGION 1..379: note = tr|A0A494XKK8|A0A494XKK8_9BURK S-adenosylmethionine:tRNA ribosyltransferase-isomerase; OS = Robbsia sp. DHC34 OX=2419776 GN=queA PE=3 SV=1
MYTLSDFDFDLPPDLIAQTALADRTASRLLEVTHGGTDAGTGAAIDTGLAANPGTGTGIDPTLIDRHFSELLACVSPGDLLVFNDTKVLKARFHGHKASGGKIEVLIERLTGPRTALAQIRASKSPGEGTTIRLADAFDVTIGPRVEPFFTLHFPDDCLTLIEQYGRLPLPPYITHEADALDETRYQTVYAANPGAVAAPTAGLHFDATLLDALDAAGVRRATLTLHVGAGTFQPVRTEKLADHTMHTEWYDIPASLVDEIAATRACGGRVIAVGTTSMRALEAAARDAIRAGAAPGTLRAGSAETDIFITPGYTFNIVDRLVTNFHLPKSTLLMLVSAFAGYETIRAAYRHAIAQRYRFFSYGDAMLLTRAAPIPDHA

SEQ ID NO: 71527 - protein, 349 aa, unidentified
  source 1..349: note = Robertkochia marina
  REGION 1..349: note = tr|A0A4S3M1E0|A0A4S3M1E0_9FLAO S-adenosylmethionine:tRNA ribosyltransferase-isomerase; OS = Robertkochia marina OX=1227945 GN=queA PE=3 SV=1
MKLSHFNFDLPKDLLAEYPSENRDEARLMVVHRKDGKIEHKMFKDLIDYFDEGDVMVLNNTKVFPARLFGNKEKTGARIEVFLLRELNVEQRLWDVLVDPARKIRIGNKLYFGEDESLVAEVIDNTTSRGRTLRFLYDGSYDEFRKKLNELGETPLPKYIKREVEPEDEERYQTIYAKEEGAVAAPTAGLHFSKHLLKRLEIKGIDFAELTLHVGLGTFNPVEVEDLSKHKMDSEELFIAEEAADIVNKAKKNKKRVCAVGTTVMRGLESSVSSERTLNSFEGWTNKFIFPPYEFSIADCMVTNFHTPKSTLLMMISAFAGHDLTMKAYKEAVKEKYRFYSYGDAMLIL

SEQ ID NO: 71528 - protein, 349 aa, Robiginitalea biformata
  REGION 1..349: note = tr|A4CPN7|A4CPN7_ROBBH S-adenosylmethionine:tRNA ribosyltransferase-isomerase OS=Robiginitalea biformata (strain ATCC BAA-864 / HTCC2501 / KCTC 12146) OX=313596; GN = q ueA PE=3 SV=1
MKLSHFNFELPKELLAEYPTENRDESKLMVVHRETGKIEHKLFKDLIDYFEEDDVVVLNNTKVFPARLYGNKEKTGARIEVFLLRELNEEQRLWDVLVDPARKIRIGNKLYFGEDEALVAEVIDNTTSRGRTLRFLYDGSYTDFRRKMRELGQTPLPKYIKRDPEPEDESRYQTIYAKYEGAVAAPTAGLHFSKHLLKRLEIKGINFAELTLHVGLGTFSPVEVEDLSKHKMDSEELVIDERATEIVNTAKKNKRKVCAVGTTVMRGLESAVSSEHMLNTHEGWTNKFIFPPYEFSIANCMVTNFHLPKSTLLMMVSAFMGHDLMKRAYKEAILEQYRFYSYGDAMLIL

SEQ ID NO: 71529 - protein, 349 aa, Robiginitalea myxolifaciens
  REGION 1..349: note = tr|A0A1I6FRD7|A0A1I6FRD7_9FLAO S-adenosylmethionine:tRNA ribosyltransferase-isomerase; OS = Robiginitalea myxolifaciens OX=400055 GN=queA PE=3 SV=1
MKLSHFNFELPKELLAEYPAENRDESKLMVIHRDTGKIEHKMFKDMIDYFDEGDVMVLNNTKVFPARLFGNKEKTGARIEVFLLRELNEEQRLWDVLVDPARKIRIGNKLYFGEDETLVAEVIDNTTSRGRTLRFLYDGSYTDFRRKLRELGQTPLPKYIKREPEPEDESRYQTIYAKHEGAVAAPTAGLHFSKHLLKRLEIKGIDFAELTLHVGLGTFSPVEVEDLSKHKMDSEELIIDERATEIVNRAKKNKRKVCAIGTTVMRGLESAVSSEHTLNTHEGWTNKFIFPPYDFSIATSMVTNFHLPKSTLLMMVSAFMGHDLMKRAYKEAILEQYRFYSYGDAMLIL

SEQ ID NO: 71530 - protein, 361 aa, Robiginitomaculum sp.
  REGION 1..361: note = tr|A0A2G2LKU8|A0A2G2LKU8_9RHOB S-adenosylmethionine:tRNA ribosyltransferase-isomerase; OS = Robiginitomaculum sp. OX=2030823 GN=queA PE=3 SV=1
  VARIANT 21: note = Xaa can be any naturally occurring amino acid
  VARIANT 83: note = Xaa can be any naturally occurring amino acid
MRVDQFDFDLPEACIALRPAXPRDASRLLEVTPGQPLADRMFTDLADRLRPGDVLVLNDTKVLPAALYGLRAARDVGGGGPAXIEVNLHKRLDASHWRAFVRPAKRLRVGDVIAFGDQNEACMAGALNGRVIDKHEGEITLEFEFAGPVLDEAIARVGQMPLPPYIARKRAVDARDEHDYQTIFAQYPGSVAAPTASLHFSDAMFAALDARGVERVSLTLHVGAGTFLPVKTDDTAGHKMHGERYEVSEKTAAALNTARAEGRRIIAAGTTALRTLESIADENGVLHAGAGDTDIFITPGYTFRAVYGLLTNFHLPRSTLFMLVCALAGFDEMHAAYAHAIANGYRFYSYGDASLLWRKDT

SEQ ID NO: 71531 - protein, 360 aa, Robiginitomaculum sp.
  REGION 1..360: note = tr|A0A2G2LZ89|A0A2G2LZ89_9RHOB S-adenosylmethionine:tRNA ribosyltransferase-isomerase; OS = Robiginitomaculum sp. OX=2030823 GN=queA PE=3 SV=1
MRVDLFDFNLPEACIALRPACPRDASRLLEVTPGEPLADRMFTDLAERLRPGDVLILNDTKVLPAALYGSRPAREHGGGGPVRVEVNLHKRLDAARWRAFVRPAKRLRDGDVIAFGDDNEACMAGALNGRVCDKHEGEITLAFEFSGAVLDEAIARVGQMPLPPYIARKRAVDARDEHDYQTIFAQELGSVAAPTASLHFSDAMFAALDARGVTRQILTLHVGAGTFLPVKTDDTAGHKMHGERYEVSEVTAAALNTARAQGRRIIAAGTTALRTLESIADADGVLHAGSGDTDIFITPGYKFRAVDGLLTNFHLPRSTLFMLVSALAGLDEMRAAYAHAIADNYRFYSYGDASLLWREL

SEQ ID NO: 71532 - protein, 341 aa, Robinsoniella peoriensis
  REGION 1..341: note = tr|A0A4U8QGY0|A0A4U8QGY0_9FIRM S-adenosylmethionine:tRNA ribosyltransferase-isomerase; OS = Robinsoniella peoriensis OX=180332 GN=queA PE=3 SV=1
MKTSDFYFDLPQELIAQDPLEDRSSSRLLVLDRETGEIRHQIFKDIAAYLNPGDCLVVNDTKVIPARLFGTKVGTDAKIEVLLLKRKENNIWETLVKPGKKAKPGTKISFGEGLLMGEVIDVVEEGNRLIQFSYEGVFEEILDQLGQMPLPPYITHQLKDKNRYQTVYAKHDGSAAAPTAGLHFTPELLEEIQRKGIKIAHVTLHVGLGTFRPVKVEDVTEHHMHSEFYIVEEDQAKLINDTKKNGGKVISVGTTSCRTLESATDENGILKAGSGWTEIFIYPGYQFKMIDHLITNFHLPESTLLMLVSALAGKENIMNAYETAVKERYRFFSFGDAMFIV

SEQ ID NO: 71533 - protein, 341 aa, Robinsoniella sp.
  REGION 1..341: note = tr|A0A371AUE3|A0A371AUE3_9FIRM S-adenosylmethionine:tRNA ribosyltransferase-isomerase; OS = Robinsoniella sp. MCWD5 OX=1812858 GN=queA PE=3 SV=1
MKVTDFYFDLPKELIAQDPLKDRSSSRLLLLDKKTGEIEHNVFRNIIEFLNLGDCLVLNDTKVLPARLIGSRIGTDAKIEILLLKRKDNDVWETLVKPGKKAKIGTKISFGEGILIGEIVDIVEEGNRLIQFSYNGIFEEILDELGQMPLPPYITHQLEDKNRYQTVYAKHSGSAAAPTAGLHFTPELVEEIEKKGIAIAYITLHVGLGTFRPVKVENVLDHHMHSEFYTINQKEADKMNKAKENGNRIIAVGTTSCRTLESAVKEDGRISETSGWTEIFIYPGYKFKFIDCLITNFHLPESTLLMLVSALAGRESIMNAYQVAVNEKYRFFSFGDAMFIY

SEQ ID NO: 71534 - protein, 341 aa, Robinsoniella sp.; identical to SEQ ID NO: 71532
  REGION 1..341: note = tr|A0A0J1GFI3|A0A0J1GFI3_9FIRM S-adenosylmethionine:tRNA ribosyltransferase-isomerase; OS = Robinsoniella sp. RHS OX=1504536 GN=queA PE=3 SV=1

SEQ ID NO: 71535 - protein, 363 aa, unidentified
  source 1..363: note = Rodentibacter genomosp.
  REGION 1..363: note = tr|A0A1V3J3A0|A0A1V3J3A0_9PAST S-adenosylmethionine:tRNA ribosyltransferase-isomerase; OS = Rodentibacter genomosp. 1 OX=1908264 GN=queA PE=3 SV=1
MRVSDFHFDLPDELIARYPKADRSSCRLLTLNGENGEISHRTFTDVLDLIDEGDLLIFNNTRVIPARMFGRKASGGKIEVLVERMLDEHRFLAHIRSSKSPKEGTELFLGEDKLGENKGIQAVMIERHDTLFEVELTDKSTSLLTVLQQIGHMPLPTYIDRPDEEADQECYQTVYNKVPGAVAAPTAGLHFDDELLAKLQAKGVNFEFVTLHVGAGTFQPVRVENIEEHIMHAEYVELSQEVCNAIIDTKKAGKRVIAVGTTSVRSIETAALSAEENGNPDLIEPYFSDTSIFIYPGKKFRVVDALITNFHLPESTLIMLVSAFAGFNHTMNAYKSAVENRYRFFSYGDAMFITKNTRVRGLE

SEQ ID NO: 71536 - protein, 363 aa, unidentified
  source 1..363: note = Rodentibacter genomosp.
  REGION 1..363: note = tr|A0A1V3JNS9|A0A1V3JNS9_9PAST S-adenosylmethionine:tRNA ribosyltransferase-isomerase; OS = Rodentibacter genomosp. 2 OX=1908266 GN=queA PE=3 SV=1
MRVSDFHFDLPDELIARYPKADRSSCRLLTLNGENGEISHRTFTEVLDLIDEGDLLIFNNTRVIPARMFGCKASGGKIEVLVERMLDEHRFLAHIRSSKAPKEGTELFLGEDKLGENNGIQAVMTARHSTLFEMELEDKSTTLLTVLQQIGHMPLPPYIDRPDEEADQECYQTVYSKVPGAVAAPTAGLHFDDELLAKLRSKGVNFEFVTLHVGAGTFQPVRVENIEDHIMHAEYVELSQEVCNAIIATKKAGKRVIAVGTTSVRSIETAALSAEENGNPDLIEPYFSDTSIFIYPGKKFRVVDALITNFHLPESTLIMLVSAFAGFTRTMNAYKSAVENRYRFFSYGDAMFITKNPNVIGLE

SEQ ID NO: 71537 - protein, 363 aa, unidentified
  source 1..363: note = Rodentibacter heidelbergensis
  REGION 1..363: note = tr|A0A1V3IBA9|A0A1V3IBA9_9PAST S-adenosylmethionine:tRNA ribosyltransferase-isomerase; OS = Rodentibacter heidelbergensis OX=1908258 GN=queA PE=3; SV = 1
MRVSDFHFDLPDELIARYPKEERSSCRLLTLNGENGAISHRTFTEVLELIEEGDLLIFNNTRVIPARMFGRKASGGKIEVLVERMLDEHRFLAHIRSSKSPKEGAELILGEDKLGENHGISTVMTARHGSLFEVELKDKTTTVLAVLQQIGHMPLPPYIDRPDEEADQECYQTVYSKVPGAVAAPTAGLHFDDELLAKLQAKGVNFEFVTLHVGAGTFQPVRVENIEDHIMHAEYVELSQEVCNAIIATKKAGKRVIAVGTTSVRSIETAALSAEENGNSDLIEPYFSDTSIFIYPGKIFRVVDALITNFHLPESTLIMLVSAFAGFRHTMNAYKSAVENRYRFFSYGDAMFITKNPKVKGLE

SEQ ID NO: 71538 - protein, 363 aa, unidentified
  source 1..363: note = Rodentibacter heylii
  REGION 1..363: note = tr|A0A1V3KM76|A0A1V3KM76_9PAST S-adenosylmethionine:tRNA ribosyltransferase-isomerase; OS = Rodentibacter heylii OX=1906744 GN=queA PE=3 SV=1
MRVSDFHFDLPDELIARYPKKDRSSCRLLTLNGENGEISHRTFTDVFDLIDAGDLLIFNNTRVIPARMFGRKASGGKIEVLVERMLDEHRFLAHIRSSRSPKEGTELFLGEDKLGENKGIQAVMIARHDTLFEVELTDKSTALLTVLQQIGHMPLPPYIDRPDEEEDQECYQTVYNKVPGAVAAPTAGLHFDDELLAKLQAKGVNFEFVTLHVGAGTFQPVRVENIEDHIMHAEYVELSQEVCNAIIETKKAGKRVIAVGTTSVRSIETAALSAEENGNPDLIEPYFSDTSIFIYPGKKFRVVDVLITNFHLPESSLIMLVSAFAGFTHTMNAYKSAVENRYRFFSYGDAMFITKNTRVKGLE

SEQ ID NO: 71539 - protein, 363 aa, unidentified
  source 1..363: note = Rodentibacter heylii
  REGION 1..363: note = tr|A0A1V3KSK1|A0A1V3KSK1_9PAST S-adenosylmethionine:tRNA ribosyltransferase-isomerase; OS = Rodentibacter heylii OX=1906744 GN=queA PE=3 SV=1
MRVSDFHFDLPDELIARYPKKDRSSCRLLTLNGENGEISHRIFTDVFDLIDAGDLLIFNNTRVIPARMFGRKASGGKIEVLVERMLDEHRFLAHIRSSKSPKEGTELFLGEDKLGENKGIQAVMTARHDTLFEVELTDKSTALLTVLQQIGHIPLPPYIDRPDEEEDQECYQTVYNKVPGAVAAPTAGLHFDDELLAKLQAKGVNFEFVTLHVGAGTFQPVRVENIEDHIMHAEYVELSQEVCNAIIETKKAGKRVIAVGTTSVRSIETAALSAEENGNPDLIEPYFSDTSIFIYPGKKFRVVDALITNFHLPESTLIMLVSAFAGFTHTMNAYKSAVENRYRFFSYGDAMFITKNTRVKGLE

SEQ ID NO: 71540 - protein, 366 aa, unidentified
  source 1..366: note = Rodentibacter mrazii
  REGION 1..366: note = tr|A0A1V3IGF2|A0A1V3IGF2_9PAST S-adenosylmethionine:tRNA ribosyltransferase-isomerase; OS = Rodentibacter mrazii OX=1908257 GN=queA PE=3 SV=1
MRVSDFHFDLPDELIARYPKADRSSCRLLTLNGENGEISHRTFTEVLDLIDEGDLLIFNNTRVIPARMFGCKASGGKIEVLVERMLNEHRFLAHIRSSKAPKEGTELFLGEDKLGENNGIQAVMTARHSTLFEVELEDKSTTLLTVLQQIGHMPLPPYIDRPDEEADQECYQTVYSKVPGAVAAPTAGLHFDDELLAKLRSKGVNFEFVTLHVGAGTFQPVRVENIEDHIMHAEYVELSQEVCNAIIATKKAGKRVIAVGTTSVRSIETAALSAEENGNPDLIEPYFSDTSIFIYPGKKFRVVDALITNFHLPESTLIMLVSAFAGFTRTMNAYKSAVENRYRFFSYGDAMFITKNPNVIGLEQVV

SEQ ID NO: 71541 - protein, 363 aa, unidentified
  source 1..363: note = Rodentibacter myodis
  REGION 1..363: note = tr|A0A1V3JLI6|A0A1V3JLI6_9PAST S-adenosylmethionine:tRNA ribosyltransferase-isomerase; OS = Rodentibacter myodis OX=1907939 GN=queA PE=3 SV=1
MRVSDFYFDLPDELIARYPKEDRTSCRLLQLNGENGEVFHRTFTDVLALINEGDLLIFNNTRVIPARMFGRKASGGKIEVLVERILDEHRFLAHIRSSKSPKEGAELFLGEDKLGENNGIKAVMMARHGALFEVALSDKSTALLTVLQEIGHMPLPPYIDRPDEEADQECYQTVYGTVPGAVAAPTAGLHFDDALLEKLRAKGVNFEFVTLHVGAGTFQPVRVENIEDHIMHAEYVELSQEVCNAIIDTKKAGKRVIAVGTTSVRSIETAALSAEENGNPDLIEPYFSDTAIFIYPGKKFRVVDALITNFHLPESTLIMLVSAFAGYQNTMNAYKSAVENRYRFFSYGDAMFITKNPQVKGLE

SEQ ID NO: 71542 - protein, 363 aa, unidentified
  source 1..363: note = Rodentibacter pneumotropicus
  REGION 1..363: note = tr|A0A4S2PKJ8|A0A4S2PKJ8_9PAST S-adenosylmethionine:tRNA ribosyltransferase-isomerase; OS = Rodentibacter pneumotropicus OX=758 GN=queA PE=3 SV=1
MLVSDFHFDLPDELIARYPKEDRSSCRLLTLNGENGEISHRTFTDVLDLIDEGDLLIFNNTRVIPARMFGRKASGGKIEVLVERMLDDHRFLAHIRSSKAPKEGAELFLGEDKLGENQGIQAVMTARHDTLFEVELKDKSTAFLTVLQQIGHMPLPPYIDRPDEEADQECYQTVYSKVPGAVAAPTAGLHFDDELLAKLRAKGVNFEFVTLHVGAGTFQPVRVENIEDHIMHAEYVELSQEVCNAIIETKKAGKRVIAVGTTSVRSIETAALSSEENSNPDLIEPYFSDTSIFIYPGKKFRVVDALITNFHLPESTLIMLVSAFAGFSRTMNAYKSAVENRYRFFSYGDAMFITKNPNVKGLE

SEQ ID NO: 71543 - protein, 363 aa, unidentified
  source 1..363: note = Rodentibacter pneumotropicus
  REGION 1..363: note = tr|A0A1V3K773|A0A1V3K773_9PAST S-adenosylmethionine:tRNA ribosyltransferase-isomerase; OS = Rodentibacter pneumotropicus OX=758 GN=queA PE=3 SV=1
MRVSDFHFDLPDELIARYPKEDRSSCRLLTLNGENGKISHRTFTDVLDLIDEGDLLIFNNTRVIPARMFGRKASGGKIEVLVERMLDDHRFLAHIRSSKAPKEGAELFLGEDKLGENQGIQAVMTARHDTLFEVELKDKSTALLTALQQIGHMPLPPYIDRPDEEADQECYQTVYSKVPGAVAAPTAGLHFDDALLAKLRAKGVNFEFVTLHVGAGTFQPVRVENIEDHIMHAEYVELSQEVCNAIIETKKAGKRVIAVGTTSVRSIETAALSSEENGNPDLIEPYFSDTSIFIYPGKKFRVVDALITNFHLPESTLIMLVSAFAGFSHTMNAYKSAVENRYRFFSYGDAMFITKNPNVKGLE

SEQ ID NO: 71544 - protein, 363 aa, unidentified
  source 1..363: note = Rodentibacter rarus
  REGION 1..363: note = tr|A0A1V3IRW3|A0A1V3IRW3_9PAST S-adenosylmethionine:tRNA ribosyltransferase-isomerase; OS = Rodentibacter rarus OX=1908260 GN=queA PE=3 SV=1
MRVSDFHFDLPDELIARYPKEERSSCRLLTLNGENGAISHRTFTEVLDLIEEGDLLIFNNTRVIPARMFGRKASGGKIEVLVERMLDEYRFLAHIRSSKSPKEGAELILGEDKLGENHGISAVMTARHGSLFEVELKDKSTTLLAVLQQIGHMPLPPYIDRPDEDADQECYQTVYSKVPGAVAAPTAGLHFDDELLAKLRAKGVNFEFVTLHVGAGTFQPVRVENIEDHIMHAEYVELSQEVCNAIIATKKAGKRVIAVGTTSVRSIETAALSAEENGNSDLIEPYFSDTSIFIYPGKSFRVVDALITNFHLPESTLIMLVSAFAGFRHTMNAYKSAVENRYRFFSYGDAMFITKNPKVKGLE

SEQ ID NO: 71545 - protein, 363 aa, unidentified
  source 1..363: note = Rodentibacter ratti
  REGION 1..363: note = tr|A0A1V3L9B6|A0A1V3L9B6_9PAST S-adenosylmethionine:tRNA ribosyltransferase-isomerase; OS = Rodentibacter ratti OX=1906745 GN=queA PE=3 SV=1
MRVSDFHFDLPDELIARYPKTDRSSCRLLTLTGENGEISHRTFTDILDLINEGDLLIFNNTRVIPARMFGRKASGGKIEVLVERMLDEHRFLAHIRSSKSPKEGAELFLGEDKLGENNGIPAMMTARHDTLFEVELKDKSTTLLTVLQQIGHMPLPPYIDRPDEEADQECYQTVYSKVPGAVAAPTAGLHFDDELLAKLRTKGVNFEFVTLHVGAGTFQPVRVENIEDHTMHAEYVELSQEVCNAIIATKKAGKRVIAVGTTSVRSIETAALSAEENGNPDLLEPYFSDTSIFIYPGKKFRVVDALITNFHLPESTLIMLVSAFAGFSHTMNAYKSAVENRYRFFSYGDAMFITKNPNVKGLA

SEQ ID NO: 71546 - protein, 363 aa, unidentified
  source 1..363: note = Rodentibacter ratti
  REGION 1..363: note = tr|A0A1V3L8H4|A0A1V3L8H4_9PAST S-adenosylmethionine:tRNA ribosyltransferase-isomerase; OS = Rodentibacter ratti OX=1906745 GN=queA PE=3 SV=1
MRVSDFHFDLPDELIARYPKTDRSSCRLLTLTGENGEISHRTFTDILDLINEGDLLIFNNTRVIPARMFGRKASGGKIEVLVERMLDEHRFLAHIRSSKSPKEGTELFLGEDKLGENNGIPAVMTARHDTLFEVELKDKSTTLLTVLQQIGHMPLPPYIDRPDEEADQECYQTVYSKVPGAVAAPTAGLHFDDELLANLRAKGVNFEFVTLHVGAGTFQPVRVENIEDHTMHAEYVELSQEMCNAIIATKKAGKRVIAVGTTSVRSIETAALSAEENGNPDLLEPYFSDTSIFIYPGKKFRVVDALITNFHLPESTLIMLVSAFAGFSHTMNAYKSAVENRYRFFSYGDAMFITKNPNVKGLA

SEQ ID NO: 71547 - protein, 363 aa, unidentified
  source 1..363: note = Rodentibacter sp.
  REGION 1..363: note = tr|A0A1V3K2G5|A0A1V3K2G5_9PAST S-adenosylmethionine:tRNA ribosyltransferase-isomerase; OS = Rodentibacter sp. Ppn85 OX=1908525 GN=queA PE=3 SV=1
MRVSDFHFDLPDELIARYPKKDRSSCRLLTLNGENGEISHRTFTDVFDLIDAGDLLVFNNTRVISARMFGRKASGGKIEVLVERMLDEHRFLAHIRSSKSPKEGTELFLGEDKLGDNKGIQAVMTARHNTLFEVKLTDKSTTLLTVLQQIGHMPLPPYIDRPDEEADQECYQTVYSKVPGAVAAPTAGLHFDDELLAKLQAKGVNFEFVTLHVGAGTFQPVRVENIEDHIMHAEYVELSQEVCNAIIETKKAGKRVIAVGTTSVRSIETAALSAEENGNPDLIEPYFSDTSIFIYPGKKFRVVDALITNFHLPESTLIMLVSAFAGFTRTMNAYKSAVENRYRFFSYGDAMFITKNTNVKGLE

SEQ ID NO: 71548 - protein, 363 aa, unidentified
  source 1..363: note = Rodentibacter trehalosifermentans
  REGION 1..363: note = tr|A0A1V3IM74|A0A1V3IM74_9PAST S-adenosylmethionine:tRNA ribosyltransferase-isomerase; OS = Rodentibacter trehalosifermentans OX=1908263 GN=queA; PE = 3 SV=1
MRVSDFHFDLPNELIARYPKEDRTSCRLLTLNGENGEMAHRTFTDVLDLVETGDLLIFNNTRVIPARMFGRKASGGKIEVLLERMLDEHRFLAHIRSSKSPKEGAELFLGEDKLGENNGIQAVMIARHGALFEVALKDKSTTLLTVLQQIGHMPLPPYIDRPDEQADQECYQTVYSKVPGAVAAPTAGLHFDDALLAKLQAKGVNFEFVTLHVGAGTFQPVRVENIEEHIMHAEYVELSQEVCNAIIAAKKAGKRVIAVGTTSVRSIETAALSAEENGNSDLIEPYFSDTSIFIYPGKTFRVVDALITNFHLPESTLIMLVSAFAGFSHTMNAYKSAVENRYRFFSYGDAMFITKNPKVKGLE

SEQ ID NO: 71549 - protein, 341 aa, unidentified
  source 1..341: note = Romboutsia hominis
  REGION 1..341: note = tr|A0A2P2BUA2|A0A2P2BUA2_9FIRM S-adenosylmethionine:tRNA ribosyltransferase-isomerase; OS = Romboutsia hominis OX=1507512 GN=queA PE=3 SV=1
MKTSDFYFDLPEELIAQVPIKDRSSSKLMVLDRESGEIEHKIFKDVINYLNPGDCLVLNNTRVIPARLIGEKLDTGGKIEFLLLKRTEEDTWQALVKPGKRAKVGAKFSFGNGKLIGEVVGLAEEGSRIIKFYYEGIFEEVLDELGNMPLPPYITERLEERERYQTVYSKHNGSAAAPTAGLHFTQELLSEIKAKGVDIAFVTLHVGLGTFRPVKVEDVLNHEMHSEFYMVDKEAADKINKAKANGKKVICVGTTSCRTVESASSEDGVVQESSGWTNIFIYPGYKFKVVDRLITNFHLPESTLIMLVSALCGKDKTLNAYNVAVEEKYRFFSFGDAMIIK

SEQ ID NO: 71550 - protein, 341 aa, unidentified
  source 1..341: note = Romboutsia ilealis
  REGION 1..341: note = tr|A0A1V1I3C1|A0A1V1I3C1_9FIRM S-adenosylmethionine:tRNA ribosyltransferase-isomerase; OS = Romboutsia ilealis OX=1115758 GN=queA PE=3 SV=1
MKTSDFYFDLPEELIAQVPILDRSSSKLMVLDKETGEIEHKTFKNVIDYLNPGDCLVLNNTRVIPARLIGEKVDTGGKIEFLLLKRTEEDTWQALVKPGKRAKIGTKFSFGNGKLIGEVVGLAEEGSRIIKFHYEGIFEEVLDELGNMPLPPYITERLEERERYQTVYSKHNGSAAAPTAGLHFTEELLQQIKDKGVDIAFVTLHVGLGTFRPVKVDNVLEHEMHSEYYMVDKEAAQKINNAKKNGHNVVCVGTTSCRTVESATNEDGIIEETSGWTNIFIYPGYKFKMVDKLITNFHLPESTLIMLVSALSSKENVLNAYEAAVKERYRFFSFGDAMIVK

SEQ ID NO: 71551 - protein, 341 aa, unidentified
  source 1..341: note = Romboutsia lituseburensis
  REGION 1..341: note = tr|A0A1G9R9P7|A0A1G9R9P7_9FIRM S-adenosylmethionine:tRNA ribosyltransferase-isomerase; OS = Romboutsia lituseburensis DSM 797 OX=1121325 GN=queA; PE = 3 SV=1
MKTSDFYFDLPEELIAQVPIKDRSSSKLMVLDKKTGEIEHKIFKDVINYLNPGDCLVLNNTRVIPARLIGEKLDTGGKIEFLLLERTEEDTWQALVKPGKRAKIGTKFSFGNGKLIGEVVRLAEEGSRIIKFHYEGIFEEVLDELGNMPLPPYITERLEERERYQTVYSKHNGSAAAPTAGLHFTEELLNQIKEKGVDIAFVTLHVGLGTFRPVKVDDVLNHEMHSEYYVVDKEASEKINKAKANGNKVICVGTTSCRTVESASNEDGSINECSGWTNIFIYPGYKFKVVDKLITNFHLPESTLIMLVSALCSKESTLNAYDIAVQERYRFFSFGDAMIIK

SEQ ID NO: 71552 - protein, 341 aa, unidentified
  source 1..341: note = Romboutsia maritimum
  REGION 1..341: note = tr|A0A371IRE9|A0A371IRE9_9FIRM S-adenosylmethionine:tRNA ribosyltransferase-isomerase; OS = Romboutsia maritimum OX=2020948 GN=queA PE=3 SV=1
MKTSDFYFDLPDELIAQVPIEDRSSSKLMVLDKNTGEIEHKIFKDVIEYLNPGDCLVLNNTRVIPARLIGEKVDTGGKIEFLLLKRTEEDTWQALVKPGKRAKVGTKFSFGEGKLIGEVVGLAEEGSRIIKFHYEGIFEQVLDELGNMPLPPYITARLEEKERYQTVYSKHNGSAAAPTAGLHFTEELLQKIKDKGVEIAFVTLHVGLGTFRPVKVDDVLNHEMHSEYYMVHKEAADKINTAKQNGNKVICVGTTSCRTVESACDEDGFVKETSGWTNIFIYPGYKFKVVDNLITNFHLPESTLIMLVSALVNKEAVLNAYDVAVKERYRFFSFGDAMIIK

SEQ ID NO: 71553 - protein, 341 aa, unidentified
  source 1..341: note = Romboutsia weinsteinii
  REGION 1..341: note = tr|A0A371J8V8|A0A371J8V8_9FIRM S-adenosylmethionine:tRNA ribosyltransferase-isomerase; OS = Romboutsia weinsteinii OX=2020949 GN=queA PE=3 SV=1
MKTSDFYFNLPDELIAQVPIKDRSSSKLMVLDRETGEIEHKIFKDVVDYLNPGDCLVLNNTRVLPARLIGEKVDTGGKIEFLLLKRTEDDTWQALVKPGKRAKVGTKFSFGNGKLVGEVVGLAEEGSRIVKFHYEGIFEEVLDELGNMPLPPYITERLEEKERYQTVYSKHNGSAAAPTAGLHFTEDLLQTIKDKGVDIAFVTLHVGLGTFRPVKVDDVLNHEMHSEYYMVDEEAAQKINKAKANGKNVICVGTTSCRTVESASDENGVIKESSGWTNIFIYPGYKFKIVDRLITNFHLPESTLIMLVSALANKESVLNAYETAVENEYRFFSFGDAMIVK

SEQ ID NO: 71554 - protein, 348 aa, Roseateles aquatilis
  REGION 1..348: note = tr|A0A246ISL2|A0A246ISL2_9BURK S-adenosylmethionine:tRNA ribosyltransferase-isomerase; OS = Roseateles aquatilis OX=431061 GN=queA PE=3 SV=1
MRMSRPYTVSDFDFALPPELIAQHPAAERSASRLLDGRAEPPVDRIFRELPDLLNPGDLLVFNNTKVIKARLYGAKSSGGAVEALVERVLPGTREVWAHMRASKSPKAGAVVRFAEAFDAEVLGRCGPDDGLFHLRLSGDPFELLERHGHVPLPPYIEHGDSADDVRRYQTVFAREPGAVAAPTAALHFDEALLARLAERGVGTAHVTLHVGAGTFQPVRVESLADHKMHSEWFQVAPETVDAIARCRAAGGKVTAVGTTTLRALESAALGGTLKAGARETDIFITPGFDFQVVDRLVTNFHLPKSTLMMLVSAFAGYEPVMALYRHAIAQRYRFFSYGDAMLLERRR

SEQ ID NO: 71555 - protein, 349 aa, Roseateles depolymerans
  REGION 1..349: note = tr|A0A0U3LIG8|A0A0U3LIG8_9BURK S-adenosylmethionine:tRNA ribosyltransferase-isomerase; OS = Roseateles depolymerans OX=76731 GN=queA PE=3 SV=1
MSRLFTVSDFDFALPEDLIAQHPAEQRSASRLLDGRTGTPVDRIFRDLPELLDPKDLLVFNNTRVIKARLYGAKASGGAVEALIERVLPGTHEVWAHMRASKSPKPGAVVRFAEAFDAEVLGRCGPDNGLFHLRLSGDPFELLEQHGHVPLPPYIAHDDSADDVRRYQTVFAREPGAVAAPTAALHFDEPLLERLAARGIQTAHVTLHVGAGTFQPVRVDNLADHKMHSEWFQVPEETVAAIERCRAEGGRVTAVGTTTLRALESAAVGGALRAGARETDIFITPGFDFQVVDRLITNFHLPKSTLMMLVSALAGYEHIMALYRHAIDQRYRFFSYGDAMLLDRRRADA

SEQ ID NO: 71556 - protein, 358 aa, Roseateles depolymerans
  REGION 1..358: note = tr|A0A2W5FQS9|A0A2W5FQS9_9BURK S-adenosylmethionine:tRNA ribosyltransferase-isomerase; OS = Roseateles depolymerans OX=76731 GN=queA PE=3 SV=1
MSRSFTVADFDFDLPPELIAQHPAAERSASRLLDGLGEGAVDRVFRELPALLQPGDLLVFNNTQVIKARLYGHKASGGGVEGLVERVLPAGNGGAAREVWMHLRASKSPKPGSRVRFADAFDAEVLGRCGPDNGLFHLRFDGDAFALLQRHGHVPLPPYIAHADDADDERRYQTVFAREPGAVAAPTAALHFDEGVLAALAARGVATAHVTLHVGAGTFQPVRVEQIADHKMHSEWCQVPAETAQRIAATRAAGGRIVAVGTTTLRTLESAALAAHQAGTGELLQVGARETDIFITPGFEFRVVDRLLTNFHLPKSTLMMLVSAFAGYEHVMALYRHAIAQRYRFFSYGDAMLLARRG

SEQ ID NO: 71557 - protein, 346 aa, Roseateles sp.
  REGION 1..346: note = tr|A0A1H7KC95|A0A1H7KC95_9BURK S-adenosylmethionine:tRNA ribosyltransferase-isomerase; OS = Roseateles sp. YR242 OX=1855305 GN=queA PE=3 SV=1
MSRLFSVSDFDFALPDDLIAQHPAAERSASRLLDGRGDAPVDRVFRELPDLLDPKDLLVFNNTRVIKARLYGAKSSGGAVEALVERVLPGTREVWAHMRASKSPKPGAVVRFADAFDAEVLGRCGPDNGLFHLRLSGEPFELLERHGHVPLPPYIAHDDSADDVRRYQTVFAREPGAVAAPTAALHFDEALLERLAARGVQTAHVTLHVGAGTFQPVRVDTLAEHKMHSEWFQVPQETVDAIARCRAAGGRVTAVGTTTLRALESAARGGSLQAGARETDIFITPGFEFQVVDRLVTNFHLPKSTLMMLVSALAGYERIMVLYQHAIEQRYRFFSYGDAMLLDRRG

SEQ ID NO: 71558 - protein, 345 aa, Roseburia faecis
  REGION 1..345: note = tr|A0A173RKA9|A0A173RKA9_9FIRM S-adenosylmethionine:tRNA ribosyltransferase-isomerase; OS = Roseburia faecis OX=301302 GN=queA PE=3 SV=1
MTEGMNVKDYDYDLPEELIAQDPLEDRSSSRLMVLDRQTGDVEHRHFTDILEYLHPGDCLVINNTKVIPARLFGVKEDTQAKIEVLLLKRKENDIWETLVKPGKKAKPGTKLVFGDGLLTAEVVDVVEEGNRLIQFHYDGIFEEILDQLGQMPLPPYITHQLKDKNRYQTVYAKYDGSAAAPTAGLHFTKELLQKVKDMGVDIAEVTLHVGLGTFRPVKVENVLDHHMHSEFYMVSQEAADKINRAKESGHRVIAVGTTSTRTLEAAADENGRLHETSGWTEIFIYPGYQFKVIDALITNFHLPQSTLVMLVSALAGRAHVLHAYEIAVKERYRFFSFGDAMLIK

SEQ ID NO: 71559 - protein, 345 aa, Roseburia faecis
  REGION 1..345: note = tr|A0A0M6WLE6|A0A0M6WLE6_9FIRM S-adenosylmethionine:tRNA ribosyltransferase-isomerase; OS = Roseburia faecis OX=301302 GN=queA PE=3 SV=1
MTEGMNVKDYDYDLPEELIAQDPLEDRSSSRLMVLDRQTGDVEHRHFTDILEYLHPGDCLVINNTKVIPARLFGVKEDTQAKIEVLLLKRKENDIWETLVKPGKKAKPGTKLVFGDGLLTAEVVDVVEEGNRLIQFHYDGIFEEILDQLGQMPLPPYITHQLKDKNRYQTVYAKYDGSAAAPTAGLHFTKELLQKVKDMGVDIAEVTLHVGLGTFRPVKVENVLDHHMHSEFYMVSQEAADKINRAKESGHRVIAVGTTSTRTLEAAADENGRLHETSGWTEIFIYPGYQFKVIDALITNFHLPQSTLVMLVSALAGREHVLHAYEIAVKERYRFFSFGDAMLIK

SEQ ID NO: 71560 - protein, 343 aa, Roseburia hominis
  REGION 1..343: note = tr|G2T1M9|G2T1M9_ROSHA S-adenosylmethionine:tRNA ribosyltransferase-isomerase OS=Roseburia hominis (strain DSM 16839 / NCIMB 14029 / A2-183) OX=585394 GN=queA PE=3 S; V = 1
MDVKDFYYDLPQELIAQDPLEDRSSSRLMVLDKATGEVEHRHFKDIVDYLRPGDCLVINNTKVIPARLYGVKEGTEAKIEILLLKRKENDVWETLVKPGKKCKIGTRINFGEGLLTGEVIDIVEEGNRLIQFHYEGIFEEILDQLGQMPLPPYITHQLKDKNRYQTVYAKYDGSAAAPTAGLHFTPELLEQVRAMGVEIAEVTLHVGLGTFRPVKESDVLKHHMHSEFYRIEQSEADKINRAKQEGHRVIAVGTTSTRTLEAAADEHGVLHETSGWTEIFIYPGYQFKVIDALITNFHLPESTLVMLVSALAGREHVLHAYEIAVQERYRFFSFGDAMFITAK

SEQ ID NO: 71561 - protein, 343 aa, Roseburia hominis
  REGION 1..343: note = tr|A0A395V9L0|A0A395V9L0_9FIRM S-adenosylmethionine:tRNA ribosyltransferase-isomerase; OS = Roseburia hominis OX=301301 GN=queA PE=3 SV=1
MDVKDFYYDLPQELIAQDPLEDRSSSRLMVLDKATGEVEHRHFKDIVDYLRPGDCLVINNTKVIPARLYGVKEGTEAKIEILLLKRKENDVWETLVKPGKKCRIGTRINFGEGLLTGEVIDIVEEGNRLIQFHYEGIFEEILDQLGQMPLPPYITHQLKDKNRYQTVYAKYDGSAAAPTAGLHFTPELLEQVRAMGVEIAEVTLHVGLGTFRPVKESDVLKHHMHSEFYRIEQSEADKINRAKQAGHRIIAVGTTSTRTLEAAADEHGVLHETSGWTEIFIYPGYQFKVIDALITNFHLPESTLVMLVSALAGREHVLHAYEIAVQERYRFFSFGDAMFITAK

SEQ ID NO: 71562 - protein, 345 aa, Roseburia intestinalis
  REGION 1..345: note = tr|D4KXN8|D4KXN8_9FIRM S-adenosylmethionine:tRNA ribosyltransferase-isomerase OS=Roseburia intestinalis XB6B4 OX=718255 GN=queA PE=3 SV=1
MDVKDFYYDLPQELIAQDPLKDRSSSRLMVLDKNTGEVTHRVFKDITDYLRPGDCLVINNTKVIPARLYGVKEGTEAKIEILLLKRKENDIWETLVKPGKKCKVGTKISFGDGLLTGEVIDIVEEGNRLIQFHYDGIFEEILDQLGQMPLPPYITHQLQDKNRYQTVYAKYDGSAAAPTAGLHFTPELLKKVKEMGVEIAEVTLHVGLGTFRPVKETDVLKHHMHSEFYRIEQSEADKINHAKETGHRVIAVGTTSTRTLEAASDENGFLRETSGWTEIFIYPGYRFKVIDSLITNFHLPESTLVMLVSALAGREHVLNAYEIAVQEKYRFFSFGDAMLITDTTV

SEQ ID NO: 71563 - protein, 345 aa, Roseburia intestinalis
  REGION 1..345: note = tr|D4KQT3|D4KQT3_9FIRM S-adenosylmethionine:tRNA ribosyltransferase-isomerase OS=Roseburia intestinalis M50/1 OX=657315 GN=queA PE=3 SV=1
MDVKDFYYDLPQELIAQDPLEDRSSSRLMVLDKNTGEVTHRVFKDITDYLRPGDCLVINNTKVIPARLYGVKEGTEAKIEILLLKRKENDIWETLVKPGKKCKVGTKISFGDGLLTGEVIDIVEEGNRLIQFHYDGIFEEILDQLGQMPLPPYITHQLQDKNRYQTVYAKYDGSAAAPTAGLHFTPELLKKVKEMGVEIAEVTLHVGLGTFRPVKETDVLKHHMHSEFYRIEQSEADKINHAKETGHRVIAVGTTSTRTLEAASDENGFLRETSGWTEIFIYPGYRFKVIDSLITNFHLPESTLVMLVSALAGREHVLNAYEIAVQEKYRFFSFGDAMLITDTTV

SEQ ID NO: 71564 - protein, 345 aa, Roseburia inulinivorans
  REGION 1..345: note = tr|A0A396AH72|A0A396AH72_9FIRM S-adenosylmethionine:tRNA ribosyltransferase-isomerase; OS = Roseburia inulinivorans OX=360807 GN=queA PE=3 SV=1
MDVKDFYYDLPQELIAQDPLEDRSSSRLMVLDKITGEVEHRHFKDIVEYLRPGDCLVINNTKVIPARLYGVKEGTEAKIEILLLKRKENDIWETLVKPGKKCKIGTKIVFGEGILTGEVVDIVEEGNRLIQFHYEGIFEEILDRLGQMPLPPYITHQLQDKNRYQTVYAKYDGSAAAPTAGLHFTPELLQQVRDMGVEIAEVTLHVGLGTFRPVKESDVLKHHMHSEFYKIEQSEADKINKAKKEGHRVIAVGTTSTRTLESAADENGFLTEKSGWTEIFIYPGYQFKVIDALITNFHLPESTLVMLVSALAGREHVLAAYETAVEEKYRFFSFGDAMFIVDRES

SEQ ID NO: 71565 - protein, 345 aa, Roseburia inulinivorans
  REGION 1..345: note = tr|A0A173R0D4|A0A173R0D4_9FIRM S-adenosylmethionine:tRNA ribosyltransferase-isomerase; OS = Roseburia inulinivorans OX=360807 GN=queA PE=3 SV=1
MDVKDFYYDLPQELIAQDPLEDRSSSRLMVLDKITGEVEHRHFKDIIEYLRPGDCLVINNTKVIPARLYGVKEGTEAKIEILLLKRKENDIWETLVKPGKKCKIGTKIVFGEGILTGEVVDIVEEGNRLIQFHYEGIFEEILDRLGQMPLPPYITHQLQDKNRYQTVYAKYDGSAAAPTAGLHFTPELLQQVRDMGVEIAEVTLHVGLGTFRPVKETDVLKHHMHSEFYKIEQSEADKINKAKKEGHRVIAVGTTSTRTLESAADENGFLTEKSGWTEIFIYPGYQFKVIDALITNFHLPESTLVMLVSALAGREHVLAAYETAVEEKYRFFSFGDAMFIVDRES

SEQ ID NO: 71566 - protein, 341 aa, Roseburia sp.
  REGION 1..341: note = tr|A0A1Q6TLI6|A0A1Q6TLI6_9FIRM S-adenosylmethionine:tRNA ribosyltransferase-isomerase; OS = Roseburia sp. CAG:197_41_10 OX=1897018 GN=queA PE=3 SV=1
MNVKDYDYDLPEELIAQDPLEDRSSSRLMVLDRQTGDVEHKHFTDILEYLHPGDCLVINNTKVIPARLFGVKEDTQAKIEVLLLKRKENDIWETLVKPGKKAKPGTKIIFGEGLLTGEVVDVVEEGNRLIQFHYEGIFEEILDQLGQMPLPPYITHQLKDKNRYQTVYAKYDGSAAAPTAGLHFTKELLEKVKEMGVDIAEVTLHVGLGTFRPVKVDNVLDHHMHSEFYMVSAEAAEKVNRTKANGGRVISVGTTSTRTLESAADENGILHETSGWTEIFIYPGYKFKVIDGLITNFHLPQSTLVMLVSALAGREHVLHAYEIAVKEKYRFFSFGDAMLIQ

SEQ ID NO: 71567 - protein, 223 aa, Roseburia sp.
  REGION 1..223: note = tr|R5TYD3|R5TYD3_9FIRM S-adenosylmethionine:tRNA ribosyltransferase-isomerase OS=Roseburia sp. CAG:50; OX = 1262949 GN=BN683_01037 PE=3 SV=1
MIDIVEEGNRLIQFTYEGIFEEILDQLGQMPLPPYITHQLKDKNRYQTVYAKYDGSAAAPTAGLHFTPELLQQVKDMGVDIAEVTLHVGLGTFRPVKVDNILEHHMHSEFYMVTQEAADKINNAKKNGHRVICVGTTSCRTIESAADENGMLKESSGWTEIFIYPGYQFKVLDCLITNFHLPESTLLMLVSALAGREHVLAAYEEAVKEGYRFFSFGDAMFIQ

SEQ ID NO: 71568 - protein, 364 aa, unidentified
  source 1..364: note = Roseiarcus fermentans
  REGION 1..364: note = tr|A0A366F706|A0A366F706_9RHIZ S-adenosylmethionine:tRNA ribosyltransferase-isomerase; OS = Roseiarcus fermentans OX=1473586 GN=queA PE=3 SV=1
MRVDAFDFDLPPDRIALEPASPRDSARMLVVASDGALADARVADLPGLLRPGDALVVNDTRVIAARLDGIRVRGEAVASIEATLIKRIDDCRWRALVRPAKKLRVGERVRFGEASESMACLLAALDAEVEDKGEAGEVTLRFDFSGAALDEAIDRLGSPPLPPYIAARRPPGDKDRADYQTMFAAREGAVAAPTAGLHFTPDLAARLAERGVTLHRVTLHVGAGTFLPVKADDTDDHVMHSEWGAIDAATADALNVARAAGGRIVAVGTTSARILESAADDAGGVRPFAGETAIFITPGYRFRAVDALMTNFHLPRSTLFMLVSAFSGLATVKAAYAHAIAAGYRFYSYGDACLLIGRRDRDAA

SEQ ID NO: 71569 - protein, 356 aa, unidentified
  source 1..356: note = Roseibaca calidilacus
  REGION 1..356: note = tr|A0A0P7WCQ4|A0A0P7WCQ4_9RHOB S-adenosylmethionine:tRNA ribosyltransferase-isomerase; OS = Roseibaca calidilacus OX=1666912 GN=queA PE=3 SV=1
MKLSDFDFDLPEALIATRPARPRSSAKLLVAQGDTITDRHVRDLPEVLRAGDLLVLNTTKVIPARLSGHRHRDSAQGPVVARVEVTLTEPQPDGSWRALAKPLRKLAEGEDIVFAAGLVARVAERGAEDVRLAFNLDGPAFDAALEQAGQMPLPPYIEARRKADEQDRTDYQTVFARDAGAVAAPTASLHFDEDLLAQLRAKGVEFAEVTLHVGAGTFLPVKTDDVSNHKMHAEWGHVSETAAAQITRARAEGRRVIPVGTTALRVIETAATGPGQIAPYTGMTDIFITPGFRFQIASGLMTNFHLPKSTLMMLVAGLMGRARIMAIYAHAIAQDYRFFSYGDSSLLLPDDLSGNP

SEQ ID NO: 71570 - protein, 356 aa, Roseibaca ekhonensis
  REGION 1..356: note = tr|A0A3B0MEQ5|A0A3B0MEQ5_9RHOB S-adenosylmethionine:tRNA ribosyltransferase-isomerase; OS = Roseibaca ekhonensis OX=254356 GN=queA PE=3 SV=1
MKLSDFDFELPEALIATRPARPRSAARLLVAQGDAMADRHVRDLPDMLRAGDLLVLNTTKVIPARLSGRRHRDSAQGPVVAKVEITLTEPQPDGTWRALAKPLRKLADGEEVVFAAGLAAKVVERGAEDVRLRFNLDGPEFDAALDQAGQMPLPPYIESRRRADAQDRDDYQTVFARDAGAVAAPTASLHFDDDLLAALRARGVEFAEVTLHVGAGTFLPVKTDDVSAHKMHAEWGQVTQTAASQIARARAEGRRVIPVGTTALRVLETAATGPGQIAPWAGMTDIFITPGFEFQIATGLMTNFHLPKSTLMMLVAAKMGQDRIKRIYAHAIAQGYRFFSYGDSSLLLPEEVSQTA

SEQ ID NO: 71571 - protein, 323 aa, Roseibacillus sp.
  REGION 1..323: note = tr|A0A1Z8P5N0|A0A1Z8P5N0_9BACT S-adenosylmethionine:tRNA ribosyltransferase-isomerase; OS = Roseibacillus sp. TMED18 OX=1986590 GN=queA PE=3 SV=1
MRTEAFDYDLPSELIASHPLAERSASRMMVINREEGTITHHRFCDLPTFVRENDLFVFNDTRVVPARFFSNDRRVELLRVDCADPLHWRCLVRPGKRMKVGRTVEVGPSTGTVTGIDELGYRLITWDHPVDEAIHGELALPPYMERGEEPSDNERYQTVYARQDGAVAAPTAGLHFTPELIASLPHAFLTLHVGPGTFRPVQVDDPAEHRMHEEAYELGPNPAERITRAGRVISVGTTVTRVLEHLGQNGSVTAGQGRTDIFIYPPYSFRIVDALLTNFHLPKSTLLMLVSAFANRELILEAYEEAVRERYRFFSYGDCMLIL

SEQ ID NO: 71572 - protein, 323 aa, Roseibacillus sp.
  REGION 1..323: note = tr|A0A2E7YRN0|A0A2E7YRN0_9BACT S-adenosylmethionine:tRNA ribosyltransferase-isomerase; OS = Roseibacillus sp. OX=2024856 GN=queA PE=3 SV=1
MRTDDFDYDLPPELIATHPLAERTASRMMVIDRERDTIEHHLFAGLPAFLRENDLLVFNDTRVIPARFFSNDKRIELLRVDHSDPLHWRCLVRPGKRMKIGRTVEVGASTGTVTAIDELGYRLITWDHPVDENTHGELALPPYMQRGEEECDAERYQTVYARQDGAVAAPTAGLHFTPELIDALPHAFLTLHVGPGTFRPVQVDDPAEHRMHDEAYELGADSAERITRAGRVISVGTTVTRVLEHLGRNGPVPAGQGRTDIFIYPPYEFQVVDALLTNFHLPKSTLLMLVSAFANRELILEAYEQAVRERYRFYSYGDCMLIL

SEQ ID NO: 71573 - protein, 351 aa, Roseibacterium elongatum
  REGION 1..351: note = tr|W8S428|W8S428_9RHOB S-adenosylmethionine:tRNA ribosyltransferase-isomerase OS=Roseibacterium elongatum DSM 19469 OX=1294273 GN=queA PE=3 SV=1
MKLDDFDFDLPDERIATRPARPRSSARLLVADGPDTRDCHVYDLPDLLQPGDRLVLNDTRVIPARLTGHRHRDSAQGPVAAKIEVTLMEPQADGSWSALAKPLRKLAVGETVVFSDALSADVVSLEHGLRLRFNLSGADFDAALNASGAMPLPPYIAGKRAPDERDREDYQTIWAKRAGAVAAPTASLHFDEELVAALTARGIAFTFVTLHVGAGTFLPVTVEDVTTHKMHAEWGEVREKAAEEINATRAAGGRIIPVGTTALRLIETAAAEDGTMRPFEGDTDIFIYPGYTWRVTDALMTNFHLPKSTLMMLVSALMGQARIKAIYDHALANGYRFFSYGDASLLIPSRI

SEQ ID NO: 71574 - protein, 364 aa, Roseibium hamelinense
  REGION 1..364: note = tr|A0A562THI7|A0A562THI7_9RHOB S-adenosylmethionine:tRNA ribosyltransferase-isomerase; OS = Roseibium hamelinense OX=150831 GN=queA PE=3 SV=1
MRVDLFDFDLPNERIALRPARPRDSARMLVVRPEGSLAGAPDLQDRGVRDLPNLLEPGDALVFNDTKVIPAQLEGTRTRGDAVANISATLHLRASGDTWWAFVRPAKKLQTGDKVVFKGAEGAELAANVLEKGDAGDVLLRFDEKGPVLDAAIAAVGHIPLPPYIAQKRGEDAQDREDYQTVYAEKDGAVAAPTAGLHFTPELLDALDQRGIERHIVTLHVGAGTFLPVKSDETEDHKMHAEWGEVTAETATALKAVQARGNKVVAVGTTSLRILESAAQGDTGLEPFRGETSIFITPGYRFRAIDGLMTNFHLPRSTLFMLVSAFSGLETMQRAYAHAIETDYRFYSYGDSSLLFPAETAARG

SEQ ID NO: 71575 - protein, 357 aa, Roseibium sp.
  REGION 1..357: note = tr|E2CRA0|E2CRA0_9RHOB S-adenosylmethionine:tRNA ribosyltransferase-isomerase OS=Roseibium sp. TrichSKD4; OX = 744980 GN=queA PE=3 SV=1
MRVEDFDFVLPNERIALRPARPRDSARMLVVQPGDTAELSDFGVRDLPLLLEPGDALVFNDTKVIPAQLEGKRVRGDIEARISATLHLRAAADRWKAFVRPGKKVQLGDVLVFEEGGVTLTARAEEKSPAGDVLLVFDRSAAELDEAIASVGHIPLPPYIAQKRGEDEQDRSDYQTMFAEKDGAVAAPTAGLHFTPDLLAALDARGIEQHRVTLHVGAGTFLPVKVDDTDDHQMHAEWGEVSEETAAALQAVKARGNKVVSVGTTSLRILESAAQGSGGLQAFAGETSIFITPGYEFRAIDALMTNFHLPRSTLFMLVSALSGLDVMKRAYTHAIDHEYRFYSYGDASLLFPQKPTV

SEQ ID NO: 71576 - protein, 356 aa, Roseicitreum antarcticum
  REGION 1..356: note = tr|A0A1H2ZXH1|A0A1H2ZXH1_9RHOB S-adenosylmethionine:tRNA ribosyltransferase-isomerase; OS = Roseicitreum antarcticum OX=564137 GN=queA PE=3 SV=1
MQLSDFDFDLPEGLIATRPVRPRPAARMLVASGTAISDAHVRDLSLWLRPGDRMVLNNTRVIPARLTGRRWRDSAQGRVSAKIEVTLMEPLPDGDWRAMVKPLRKLAVGEDVVFSETLHAHVTAKGAEDATLRFNLTGDAFDAALSQVGAMPLPPYIAGRRAADAQDDDDYQTVFARERGAVAAPTASLHFDLDLLQALRDHGVDFTEVTLHVGAGTFLPVKVDDISTHKMHAEWGQITPQAAAEINATRAAGGRIIAVGTTALRLIESAAAPDGTLREWTGKTDIFITPGYRFRVTDGLMTNFHLPKSTLMMLVAALMGQSAIQNIYSHAVGQGYRFFSYGDASLLIPEGKEGCT

SEQ ID NO: 71577 - protein, 351 aa, Roseicyclus mahoneyensis
  REGION 1..351: note = tr|A0A316GQE5|A0A316GQE5_9RHOB S-adenosylmethionine:tRNA ribosyltransferase-isomerase; OS = Roseicyclus mahoneyensis OX=164332 GN=queA PE=3 SV=1
MKLEDFDFDLPEALIATRPARPRSSARLLHAEAGATGDRHVFDLPKILRPGDRLVLNDTRVIPARLTGQRTRQSAQGTVTARIEVTLMEPQADGTWSALAKPLRKIKIGESIFFSNDLLAEVQALDEGLRLRFNLAGSDFDAALDAAGAMPLPPYIAGKRAPDARDREDYQTVWAKRAGAVAAPTASLHFDEPLIAALTHRGVDFTFVTLHVGAGTFLPVTVEDVTTHKMHAEWGEVRAAAAAEINATRAGGGRIIPVGTTALRLIESATAADGTVHPFEGDTDIFIYPGYRFRVTDGLMTNFHLPKSTLMMLVSALMGEARVRQVYAHAIAEGYRFFSYGDASLLIPSHP

SEQ ID NO: 71578 - protein, 377 aa, unidentified
  source 1..377: note = Roseimaritima ulvae
  REGION 1..377: note = tr|A0A5B9QSV3|A0A5B9QSV3_9PLAN S-adenosylmethionine:tRNA ribosyltransferase-isomerase; OS = Roseimaritima ulvae OX=980254 GN=queA PE=3 SV=1
MKHDSRPSPLAPGRQLAASSVSFAMMNEHNIASYDYDLPRERIAQEPVAVRSDARLMVLDRYSGTIQHRYIRDLPELLHADDTLILNNSRVVPARLLGYRTRTRGRWQGLYLRSDANTGVWEVLSKTRGRLEIGETITLQDRNTRDGVLLEVMARTDNGNLLVKPQADAAAGELLRQFGWIPLPPYIRDGRMVDADVQSYQTVYAAHDGSVAAPTAGLHFTKPLLKQLTEKGLHLAEVTLHVGIGTFRPIAVEDLNQHVMHTEWGSIDAAAAQTLNDTVSRGGRRIAVGTTSVRTVESAAQDDGTLQAWTGMCDLFIQPGYRFKAIDGLLTNFHLPRSSLLVLVSAFAGRERIMQAYDEAIQNEYRFFSYGDAMLII

SEQ ID NO: 71579 - protein, 324 aa, unidentified
  source 1..324: note = Roseimicrobium gellanilyticum
  REGION 1..324: note = tr|A0A366HLR2|A0A366HLR2_9BACT S-adenosylmethionine:tRNA ribosyltransferase-isomerase; OS = Roseimicrobium gellanilyticum OX=748857 GN=queA PE=3; SV = 1
MLTSDFDYHLPEELIASEPLADRAASRMMVVHREEGRIEHRSFRDLPEYLHEGDLVVLNDTRVVPARYFSNDGSKELLRLQAFSPTKWRCMVKPGRKLRLGNAITIGEATGTVLEIYENGDRLIEFDRVVDEKSHGHLALPPYMHRQDREDDKERYQTVFAREEGSIAAPTAGLHFTPDVLSKLPHAFVTLHVGVGTFQPVKVDRVQDHVMHSERYSLSEETVAKIADAKRVLAVGTTATRVLESTAAKHGKVVAESGETNIFIHPPYQFRVVGALLTNFHLPKSTLMMLVSAFAGRELMLRAYEEAIREQYRFYSYGDCMLIV

SEQ ID NO: 71580 - protein, 349 aa, Roseinatronobacter monicus
  REGION 1..349: note = tr|A0A543K9I6|A0A543K9I6_9RHOB S-adenosylmethionine:tRNA ribosyltransferase-isomerase; OS = Roseinatronobacter monicus OX=393481 GN=queA PE=3 SV=1
MKLSDFDFDLPEDLIATRPVRPRQAARMLLARGDMIEDRHVADLPEILRPGDLLVINTTKVIPARLTGQRHRDSAQGPVSARIEITLIEPQPDGSWRALAKPLRKLALGEEIVFSDTLRAEVVARNPEDVVLRFNLEGDAFDAALDSAGQMPLPPYIAGRRAADAQDRDDYQTVFARIPGAVAAPTASLHFDAGLMAHLRNMGVGFCEVTLHVGAGTFLPVKVDDVRDHKMHAEWGQVTDKAADQIMAARKAGGRIIPVGTTALRLIETAATGPGQIGAWAGKTDIFITPGFSFQLADGLMTNFHLPKSTLMMLVSALMGRDRVMAIYAHAIAERYRFFSYGDSSLLLP

SEQ ID NO: 71581 - protein, 349 aa, Roseinatronobacter thiooxidans
  REGION 1..349: note = tr|A0A2W7QI65|A0A2W7QI65_9RHOB S-adenosylmethionine:tRNA ribosyltransferase-isomerase; OS = Roseinatronobacter thiooxidans OX=121821 GN=queA PE=3; SV = 1
MKLSDFDFDLPEDLIATRPVRPRRAARLLLAQGKTIADRQVADLPDILRAGDLLVINTTKVLPARLTGQRHRDSAQGPVSAKIEITLIEPQPDGSWRALAKPLRKLAQGEEIFFTDALRAVVVARHAEDVILRFNLEGDDFDTALDAAGQMPLPPYIAGRRAADAQDREDYQTVFARNAGAVAAPTASLHFDTALMAQLRDMGVAFCEVTLHVGAGTFLPVKVDDVRDHKMHAEWGQVTEQAAAQIMAARKAGGRIIPVGTTALRLIETAATGAGQIGPWTGKTDIFITPGFSFQLADGLMTNFHLPKSTLMMLVSALMGREQVMEIYAHAIAARYRFFSYGDSSLLIP

SEQ ID NO: 71582 - protein, 351 aa, Roseisalinus antarcticus
  REGION 1..351: note = tr|A0A1Y5RJC4|A0A1Y5RJC4_9RHOB S-adenosylmethionine:tRNA ribosyltransferase-isomerase; OS = Roseisalinus antarcticus OX=254357 GN=queA PE=3 SV=1
MKLSDFDFDLPEKLIATRPARPRSSARLLLAEGDGIADRLVTDLVDILRPGDRLVLNDTRVIPARLSGRRFRDGAEGRTAARIEVTLLEPRTGGRWSALIKPLKKLRTGEQIVFSDELSARLEAREEGQGILGFNLQGEDFDAALAEAGAMPLPPYIAGKRPADDEDKRDYQTIWAERPGAVAAPTASLHFDAPLLEALRGRGVRFSHVTLHVGAGTFLPVKVDDIRDHRMHAEWGEVTATAAAEIAATQAAGGRVIPVGTTALRLIETAAAATGAIAPWTGDTDIFITPGFTFRVAAGLMTNFHLPKSTLMMLVSALLGPERIRAIYAHAIAREYRFFSYGDSSLLLPGA

SEQ ID NO: 71583 - protein, 359 aa, unidentified
  source 1..359: note = Roseitalea porphyridii
  REGION 1..359: note = tr|A0A4P6V0R0|A0A4P6V0R0_9RHIZ S-adenosylmethionine:tRNA ribosyltransferase-isomerase; OS = Roseitalea porphyridii OX=1852022 GN=queA PE=3 SV=1
MRVDEFDFELPEDRIALRPASPRDAARMLVVRGDTLTDAGVMDLPSFLSAGDLMVFNDTRVIPAQLEGTRERDGQIATIGTTLHMRTAPNRWMAFARGAKKLKPGDRVRFGETGDACLLGTLDASVIAKGEGGEVELAFDLAGPDLDAAIALAGHIPLPPYIASKRADDERDRADYQTVYAREDGAVAAPTAGLHFTDRLFDKLDAAGINRAFVTLHVGAGTFLPVKADNTEDHRMHAEIGHVSEATAALINQTRARGGSIVSVGTTSLRLLESAADEAGTIQPFAGATDIFITPGYRFRCVDVLMTNFHLPRSTLMMLVSAFAGLGTMRRAYAHAIDAGYRFYSYGDSSLLFRNDPDG

SEQ ID NO: 71584 - protein, 348 aa, Roseivirga echinicomitans
  REGION 1..348: note = tr|A0A150XDF8|A0A150XDF8_9BACT S-adenosylmethionine:tRNA ribosyltransferase-isomerase; OS = Roseivirga echinicomitans OX=296218 GN=queA PE=3 SV=1
MKLSAFKFELSEDKIAKYPTENRDESKLMVLHRDTGEIEHKMFKDIVDYFEEGDVLVNNDTKVFPARLYGQKEKTGAKIEVFLLRELNPEMHLWDVLVDPARKIRVGNKLYFGEGELVAEVIDNTTSRGRTIRFLFDGTDEEFYKTIDTLGETPLPRTITRETEPEDRERFQTIYAKNIGAVAAPVAGLHFTKQVMKRMEIKGIDIVSVTLHIGLGTFRQVDVEDLTKHKMDSENYAIIQSTADAVNKALDNKKRVCSVGTTSMRALESSVSAGGRLKANEAWTDKFIFPEYEFKICNALITNFHLPESTLLMQAAAFAGYDKIMNAYKVAQKEGYRFFSYGDAMLII

SEQ ID NO: 71585 - protein, 403 aa, Roseivirga echinicomitans
  REGION 1..403: note = tr|A0A150X3A0|A0A150X3A0_9BACT S-adenosylmethionine:tRNA ribosyltransferase-isomerase; OS = Roseivirga echinicomitans OX=296218 GN=queA PE=3 SV=1
MMNTEKEINLSDYTYSLPDERIAKYPLDKRDLSKLLHYHKGVIEHKKFKEIEELIPDHSTLFFNNTKVIPARLIFHKSTGAQIEIFLLKPISPSPILSVVMEERETVIWECMIGNFKKWKDDIPLMRDLILGDKNIILQASIHDREKRQIKFSWNDDSISFSEIVEASGKVPLPPYLNRQPEEDDKPRYQTVYSAHDGAVAAPTAGLHFTPEILKSLADRGIKESFLTLHVSAGTFQPIKTENILEHPMHSEQMVVDRQSIQSVVEAQNSIIAIGTTSMRTLESLYWFGVRLMHGDEGFAIEKLEPYQSQQKAARSEAFSAILEWMDRNNLNQIIGTTEIFIFPGYQFRVCDGLITNFHQPGSTLILLVAAFIGEDWRKVYHEADINGYRFLSYGDSSFLLPK

SEQ ID NO: 71586 - protein, 348 aa, Roseivirga ehrenbergii
  REGION 1..348: note = tr|A0A150XTN3|A0A150XTN3_9BACT S-adenosylmethionine:tRNA ribosyltransferase-isomerase; OS = Roseivirga ehrenbergii OX=279360 GN=queA PE=3 SV=1
MKLSAFKFELSEDKIAKYPTENRDESKLMVLHRDTGEIEHKMFKDIVDYFDEGDVLVNNDTKVFPARLYGQKEKTGAKIEVFLLRELNQEMHLWDVLVDPARKIRVGNKLYFGEGELVAEVIDNTTSRGRTIRFLFDGTDEEFYKTIDTLGETPLPRTIPRETEPEDRERFQTIYAKNIGAVAAPVAGLHFTKQVMKRLEIKGVDIASITLHIGLGTFRQVDVEDLTKHKMDSENYAILQSTADAVNKALDNKKRVCSVGTTSMRALESSVSAGGRLKANEAWTDKFIFPEYEFKICNALITNFHLPESTLLMQAAAFGGYEKTMNAYKVAQKEGYRFFSYGDAMLII

SEQ ID NO: 71587 - protein, 403 aa, Roseivirga ehrenbergii
  REGION 1..403: note = tr|A0A150X028|A0A150X028_9BACT S-adenosylmethionine:tRNA ribosyltransferase-isomerase; OS = Roseivirga ehrenbergii OX=279360 GN=queA PE=3 SV=1
MMNTEKEINLSDYTYSLPDERIAKYPLAKRDQSKLLHYHNGSIEHKSFKEIEELIPDQSTLFFNNTKVIPARLIFHKSTGAQIEIFLLKPISPSPILSIVMEERETVIWECMIGNVKKWKEDIPLVRELIIDDNKITLQASIHDREKRQIQFSWNDDSISFSEIVEASGKVPLPPYLNRQPEEDDKPRYQTVYSAHDGAVAAPTAGLHFTPEILKSLANRGIKESFLTLHVSAGTFQPIKTENILEHPMHSEQMVVNRQSIQSVVEAEGKIIAIGTTSMRTLESLYWFGVRLINGNEDFSIQKLEPYQSKHEASRSEAFSAILKWMDKNELSQVIGTTEIFIFPGYQFRVCDGLITNFHQPGSTLILLVAAFIGEDWRKVYQEADNNGYRFLSYGDSSFLLPK

SEQ ID NO: 71588 - protein, 348 aa, unidentified
  source 1..348: note = Roseivirga seohaensis
  REGION 1..348: note = tr|A0A150Y1B6|A0A150Y1B6_9BACT S-adenosylmethionine:tRNA ribosyltransferase-isomerase; OS = Roseivirga seohaensis OX=1914963 GN=queA PE=3 SV=1
MKLSAFKFDLSEDKIAKYPTENRDESKLMVLHRDTGEIEHKMFKDIVDYFDEGDVLVNNDTKVFPARLYGQKEKTGAKIEVFLLRELNQEMHLWDVLVDPARKIRVGNKLYFGEGELVAEVIDNTTSRGRTIRFLFDGTDEEFYKTIDTLGETPLPRTIPRETEPEDRERFQTIYAKNIGAVAAPVAGLHFTKQVMKRLEIKGVDIASITLHIGLGTFRQVDVEDLTKHKMDSENYTILQSTADAVNKALDNKKRVCSVGTTSMRALESSVSAGGRLKANEAWTDKFIFPEYEFKICNALITNFHLPESTLLMQAAAFGGYEKTMNAYKVAQKEGYRFFSYGDAMLII

SEQ ID NO: 71589 - protein, 403 aa, unidentified
  source 1..403: note = Roseivirga seohaensis
  REGION 1..403: note = tr|A0A150XQ83|A0A150XQ83_9BACT S-adenosylmethionine:tRNA ribosyltransferase-isomerase; OS = Roseivirga seohaensis OX=1914963 GN=queA PE=3 SV=1
MMKPEKEINLSNYTYSLPDERIAKYPLAKRDQSKLLHYHNGLIEHKSFKDIEALIPDQSTLFFNNTKVIPARLIFHKSTGAQIEIFLLKPISPSPILSVVMEERETVIWECMIGNVKKWKDDIPLVRQLTIGEKNITLSASIHDRESRQIQFSWSDDSISFSEIVEASGKVPLPPYLNRQPEEDDKPRYQTVYSAHDGAVAAPTAGLHFTPEILKSLADRGIKESFLTLHVSAGTFQPIKTENILEHPMHSEQMVVDRQSIQSVVEAEGKIIAIGTTSMRTLESLYWFGVRLMNGNENFAIEKLEPYQSPQKASRLEAFSAILKWMDKNELSQVIGTTEIFIFPGYQFRVCDGLITNFHQPGSTLILLVAAFIGEDWRKVYQEADTNGYRFLSYGDSSFLLPK

SEQ ID NO: 71590 - protein, 348 aa, Roseivirga sp.
  REGION 1..348: note = tr|A0A316KBW1|A0A316KBW1_9BACT S-adenosylmethionine:tRNA ribosyltransferase-isomerase; OS = Roseivirga sp. XM-24bin3 OX=2133949 GN=queA PE=3 SV=1
MKLSAFKFELPQDRIAKYPAENRDESRMLVLHRDTGEIEHKVFKDIVDYFDEGDVMVNNDTKVFPARLYGQKEKTGAQIEVFLLRELNQEMHLWDVLVDPARKIRVGNKLYFGEGELVAEVIDNTTSRGRTIRFLFDGTDEEFYKTIDTLGETPLPRTIPRDTEPEDRERFQTIYAKHVGAVAAPVAGLHFTMQVLKRLEIKGIDVTPITLHIGLGTFRPVDVEDLTKHKMDSENYSIGEPTAQLVNRALDEKKRVVSIGTTSMRALESSVSAGGRLKANSAWTDKFIFPPYEFKICNALVTNFHLPESTLLMQAAAFGGYENVMKAYKEAIKEKYRFFSYGDAMLII

SEQ ID NO: 71591 - protein, 401 aa, Roseivirga sp.
  REGION 1..401: note = tr|A0A316KF77|A0A316KF77_9BACT S-adenosylmethionine:tRNA ribosyltransferase-isomerase; OS = Roseivirga sp. XM-24bin3 OX=2133949 GN=queA PE=3 SV=1
MAIPPAPDLKAINYSLPDEKIAKYPLAQRDQSKLLTYSGGNISDTQFKNLSEILDANTSLFFNNTKVIPARLFFQKETGAQIEIFLLNPVSPTHIISLMMEETGAVVWECMVGNFKKWKDDTILARKFEHNGSSVELRAKIVDREQKQIEFSWSDKSHSFAEIVELSGKVPLPPYLNRTDEPEDKERYQTVYSKQEGAVAAPTAGLHFTDQVLSDLEQKGVSLNYLTLHVSAGTFQPIKASDAREHNMHSEQVEVNRSTVELLSKTERVVAVGTTSMRTLESLYWFGVRLMNGNEDFSIQKLEPYETEENLPSRKEVFVFMLNWMDENNTSIVTGKTEIFIMPGYQFRVCNGLITNFHQPGSTLMLLVWAFIGENWKRVYKHALSNDYRFLSYGDSSILLP

SEQ ID NO: 71592 - protein, 401 aa, Roseivirga spongicola
  REGION 1..401: note = tr|A0A150X5X1|A0A150X5X1_9BACT S-adenosylmethionine:tRNA ribosyltransferase-isomerase; OS = Roseivirga spongicola OX=333140 GN=queA PE=3 SV=1
MAIPPAPDLKAINYSLPDEKIAKYPLAQRDQSKLLTYSGGNISDTEFKNLPEILDANTSLFFNNTKVIPARLFFQKETGAQIEIFLLNPVSPTHIISLMMEETGAVVWECMVGNFKKWKDDTILARKFENNGSSVEIRAKIVDREQKQIEFSWSDKSLSFAEIVELSGKVPLPPYLNRTDEPEDKERYQTVYSKQEGAVAAPTAGLHFTDQVLSDLEQKGVNLNYLTLHVSAGTFQPIKASDAREHNMHSEQVEVNRSTVELLSKTERVVAVGTTSMRTLESLYWFGVRLMNGNEDFSIQKLEPYETEENLPSRKEVFAFMLNWMDENNTSILTGKTEIFIMPGYQFRVCNGLITNFHQPGSTLMLLVWAFIGENWKKVYKHALSNDYRFLSYGDSSILLP

SEQ ID NO: 71593 - protein, 348 aa, Roseivirga spongicola; identical to SEQ ID NO: 71590
  REGION 1..348: note = tr|A0A150XBP6|A0A150XBP6_9BACT S-adenosylmethionine:tRNA ribosyltransferase-isomerase; OS = Roseivirga spongicola OX=333140 GN=queA PE=3 SV=1

SEQ ID NO: 71594 - protein, 350 aa, Roseivivax halodurans
  REGION 1..350: note = tr|X7EMY3|X7EMY3_9RHOB S-adenosylmethionine:tRNA ribosyltransferase-isomerase OS=Roseivivax halodurans JCM 10272 OX=1449350 GN=queA PE=3 SV=1
MRLDDFDFDLPEELIATRPARPRSSARLLVAEGDRITDAVVSDLGQWLRPGDRLVLNDTRVIPARLSGARTRLSAEGEVQARIEVTLLEPGADGTWTALVKPLKKVREGETIRFSDALSAELVAKDEGQGRLRFNLAGEDFDAALAEAGAMPLPPYIAGRRPADDRDREDYQTIWAEKPGAVAAPTASLHFDDALLGDLAKRGIAFSHVTLHVGAGTFLPVKVEDVTTHRMHAEWGEVSDAAAAEIAETRAKGGRIIPVGTTALRLLETAARETGEVRAWQGETDIFIYPGFRFHAADALMTNFHLPKSTLLMLVSALMGRERMLAIYAHAVSERYRFFSYGDASLLIPG

SEQ ID NO: 71595 - protein, 363 aa, Roseivivax halotolerans
  REGION 1..363: note = tr|A0A1I5X025|A0A1I5X025_9RHOB S-adenosylmethionine:tRNA ribosyltransferase-isomerase; OS = Roseivivax halotolerans OX=93684 GN=queA PE=3 SV=1
MKLSDFDFDLPEDRIATRPARPRSSAKLLVAEGDRISDSVVSDLPDWLRPGDRLVLNDTKVIPARLSGERRRMGAEGESSARIEATLLEPQADGTWSALVKPLKKLREGETVVFSSDLSAVLEAKADGQGRLRFNLAGEAFDAALSEAGAMPLPPYIAARRPADARDKNDYQTVWAARSGAVAAPTASLHFDAPLLEALMARGVTFTHVTLHVGAGTFLPVKVEDVTTHRMHAEWGEVSAEAAAEIAATKASGGRVIPVGTTALRLIETAAQSGVIAPFEGDTDIFIYPGFEFRVTDALMTNFHLPKSTLMMLVAALMGRERILRIYDHAIAEGYRFFSYGDASLLIPDMQGRNATTDGRLSR

SEQ ID NO: 71596 - protein, 349 aa, Roseivivax isoporae
  REGION 1..349: note = tr|X7F875|X7F875_9RHOB S-adenosylmethionine:tRNA ribosyltransferase-isomerase OS=Roseivivax isoporae LMG 25204 OX=1449351 GN=queA PE=3 SV=1
MRLDDFDFDLPEELIATRPARPRSSARLLVAAGDAIHDGTVTDLVDWLRPGDRLVLNDTRVIPARLSGTRTRPGAAGEGTARIEVTLLEPGTDGTWRALVKPLKKLREGEEVRFAAGLSAVLEARDEGQAVLRFNLAGAAFDAALAEAGAMPLPPYIAQRRAADAQDREDYQTVWAARPGAVAAPTASLHFDAPLLARLKARGVTFTHVTLHVGAGTFLPVKVEDVTRHRMHAEWGEVSEAAAAEIAATRAAGGRIVPVGTTALRLLETAARDTGAVVPWQGETDIFIYPGFTFRAADALMTNFHLPKSTLMMLVSAFLGPERIRRVYAHAVAERYRFFSYGDASLLLP

SEQ ID NO: 71597 - protein, 354 aa, unidentified
  source 1..354: note = Roseivivax jejudonensis
  REGION 1..354: note = tr|A0A1X6YT04|A0A1X6YT04_9RHOB S-adenosylmethionine:tRNA ribosyltransferase-isomerase; OS = Roseivivax jejudonensis OX=1529041 GN=queA PE=3 SV=1
MSLHIDAFDFDLPEDLIATRPARPRSSARLLVAEGDRITDAVVRDLGDWLRPGDRLVLNDTKVIPARLSGTRARTGAEGRTEARVEVTLLEPRTDGTWAALVKPLKKVRDGETIRFSDALSAVLESRGDGQGVLRFNLEGEAFDTALAEAGAMPLPPYIAGRRAADARDREDYQTVWAARPGAVAAPTASLHFDDALLADLSARGIAFSHVTLHIGAGTFLPVKVEDVTTHRMHAEWGEVSERAADEIAATRAAGGRIIPVGTTALRLIETAARDTGNVRPWTGETDIFIYPGFAFRATDALMTNFHLPRSTLMMLVSALMGAERIRAIYAHAVAERYRFFSYGDASLLVPGDA

SEQ ID NO: 71598 - protein, 352 aa, Roseivivax lentus
  REGION 1..352: note = tr|A0A1N7N1V8|A0A1N7N1V8_9RHOB S-adenosylmethionine:tRNA ribosyltransferase-isomerase; OS = Roseivivax lentus OX=633194 GN=queA PE=3 SV=1
MQLSDFDFDLPEDRIATRPARPRSAARLLVAEGDRAITDAVVRDLPDWLRPGDRLVLNDTKVIPARLSGTRTRAGANGPTEARIEVTLLEPAADGCWTALIKPLKKLRDGETVVFSSALSAVLEGREAGQGRLRFNLAGDDFDAALAQAGAMPLPPYIAAKRPADARDREDYQTIWAENAGAVAAPTASLHFDEALLAALEARGVAFTHVTLHVGAGTFLPVKVDDVTTHKMHAEWGAVSAAAAAEIAATKAAGGRVIPVGTTALRLIETAARATGEIAPFEGETDIFIYPGFTFRVTDALMTNFHLPKSTLMMLVSALMGRDRIMEIYAHAVARNYRFFSYGDASLLIPGR

SEQ ID NO: 71599 - protein, 351 aa, unidentified
  source 1..351: note = Roseivivax marinus
  REGION 1..351: note = tr|W4HQA0|W4HQA0_9RHOB S-adenosylmethionine:tRNA ribosyltransferase-isomerase OS=Roseivivax marinus; OX = 1379903 GN=queA PE=3 SV=1
MQLSDFDFDLPEELIATRPAKPRSSARLLVAEGDAITDAVVRDLGDWLRPGDRLVLNDTRVIPARLSGTRTREGAEGRTEARIEATLLEARADGAWSALVKPLKKVRDGETIRFSDRLSAVLEAREGGQGVLRFDLAGEDFDAALAEAGAMPLPPYIAQRRAADAQDAEDYQTVWAERSGAVAAPTASLHFDTALLDDLAARGIAFSRVTLHVGAGTFLPVKVDDVTTHKMHAEWGEVSEVAAAEIAETRAAGGRIIPVGTTALRLIETAARETGAVVPWSGETDIFIYPGFTFRATDALMTNFHLPKSTLMMLVSALMGPERVRRIYDHAVAERYRFFSYGDASLLVPRP

SEQ ID NO: 71600 - protein, 345 aa, unidentified
  source 1..345: note = Roseivivax pacificus
  REGION 1..345: note = tr|A0A2T6AQM9|A0A2T6AQM9_9RHOB S-adenosylmethionine:tRNA ribosyltransferase-isomerase; OS = Roseivivax pacificus OX=1267769 GN=queA PE=3 SV=1
MKLSDFDFDLPEGRIATRPASPRSSARLLVAQGDAITDGVVTDLVDWLRPGDRLVLNDTRVIPARLSGTRRRGESEARIEATLLEPQADGTWAALLKPLKRVKDGEEIRFSDALSAVVEAREDGQARLRFNLSGEDFDAALEAAGAMPLPPYIAALRAADEKDREDYQTVWAKNSGAVAAPTASLHFDEALLAALEAKGVAFTHVTLHVGAGTFLPVKVDDVTQHRMHGEWGEVSEHAAQEISATKAAGGRVIPVGTTALRLIETAAEGGEIAPFSGVTEIFIYPGYRFRVTDALMTNFHLPKSTLLMLVSALMGQDRTRRIYDHAVAEGYRFFSYGDASLLIPE

SEQ ID NO: 71601 - protein, 346 aa, unidentified
  source 1..346: note = Roseivivax roseus
  REGION 1..346: note = tr|A0A1H9TL42|A0A1H9TL42_9RHOB S-adenosylmethionine:tRNA ribosyltransferase-isomerase; OS = Roseivivax roseus OX=641238 GN=queA PE=3 SV=1
MRLSDFDFDLPDDLIATRPARPRTSARLLVAEGDGITDSRVSALDQWLRPGDRLVLNDTKVIPARLSGQRHRGESAARIESTLLEPRADGTWRALLKPLKKVRDGEEIVFSPDLSARVEGRDDGAAVLSFNLRGQDFDAALDAAGQMPLPPYIAARRAADESDREDYQTVWARHAGAVAAPTASLHFDDSLLSTLRERGVTFSYVTLHVGAGTFLPVKADDISEHRMHAEWGEITQSTADEISATRAAGGRVIPVGTTALRLIETAAREGAIRAWQGETDIFITPGFRFQVTEGLMTNFHLPRSTLLMLVSALMGPERIRRIYEHAVTERYRFFSYGDASILLPHR

SEQ ID NO: 71602 - protein, 350 aa, unidentified
  source 1..350: note = Roseivivax sediminis
  REGION 1..350: note = tr|A0A1I1Y143|A0A1I1Y143_9RHOB S-adenosylmethionine:tRNA ribosyltransferase-isomerase; OS = Roseivivax sediminis OX=936889 GN=queA PE=3 SV=1
MRLDEFDFDLPEELIATRPARPRSAARLLVAEGDRITDAVVRDLGDWLRPGDRLVLNDTRVIPARLSGMRTRAGAEGETSARIEATLLEPGADGTWSALVKPLKKVREGETIRFSEALSAVLEAKGDGQGRLRFNLSGAKFDAALAEAGAMPLPPYIAGRRAADAQDREDYQTVWADKPGAVAAPTASLHFDAPLLDGLAARGVTFSQLTLHVGAGTFLPVKVEDVTTHRMHAEWGEVSERAAAEIAETRAAGGRIIPVGTTALRLIETAARATGQVEPWRGETDIFIYPGFTFRATDALMTNFHLPKSTLLMLVSALMGQERVRAIYAHAVAERYRFFSYGDASLLIPT

SEQ ID NO: 71603 - protein, 356 aa, unidentified
  source 1..356: note = Rosenbergiella nectarea
  REGION 1..356: note = tr|A0A1H9DZB4|A0A1H9DZB4_9ENTR S-adenosylmethionine:tRNA ribosyltransferase-isomerase; OS = Rosenbergiella nectarea OX=988801 GN=queA PE=3 SV=1
MRVADFNFALPESLIAHYPQPERSACRLLSLDGPSGELQHGVFTDVLDKLQPGDLLVFNNTRVIPARVYGQKASGGKLEMLVERMLDDKRVLAHVRASKAPKPGTELLLGDTLEVRATMVARHDTLFEIEFHDSREVLDILNHIGHMPLPPYIDRPDEEADRELYQTVYSAKPGAVAAPTAGLHFDQPLLDALRQKGIETAFVTLHVGAGTFQPVRVESIEDHIMHAEYAEVPQEVVDAVLACKARGNKVVAVGTTSVRSLESAAKAADNALIAPFFDDTQIFIYPGYQYQVIDALITNFHLPESTLIMLVSAFAGYKNTMHAYQQAVVQQYRFFSYGDAMFITQNPEAVNEVMSA

SEQ ID NO: 71604 - protein, 351 aa, Roseobacter denitrificans
  REGION 1..351: note = sp|Q164S6|QUEA_ROSDO S-adenosylmethionine:tRNA ribosyltransferase-isomerase OS=Roseobacter denitrificans (strain ATCC 33942 / OCh 114) OX=375451 GN=queA PE=3 SV=1
MKLSDFDFDLPEDLIATRPAVPRTSARLLVAKGRQISDSIVSDLPNWLSPGDRLVLNDTRVIPARLTGARHRDTAQGPMQARIEVTLLEPDAQGNWSALIKPLKKVKIAEEIIFSDRLRATLRAVKDGQGVLQFNLEGDDFDAALNAAGAMPLPPYIATRRPADERDKSDYQTVFAQNSGAVAAPTASLHFDKALLSELAARGVLFSYVTLHVGAGTFLPVKVEDVTTHKMHAEWGQVSAAAAAEINATKQAGKRVIPVGTTALRLIETAGREGQIKAWEGDTDIFIYPGFRFNVADALMTNFHLPKSTLMMLVSALMGYDEVRAIYDHAVAEKYRFFSYGDASLLIPQRD

SEQ ID NO: 71605 - protein, 351 aa, Roseobacter litoralis
  REGION 1..351: note = tr|F7ZEZ8|F7ZEZ8_ROSLO S-adenosylmethionine:tRNA ribosyltransferase-isomerase OS=Roseobacter litoralis (strain ATCC 49566 / DSM 6996 / JCM 21268 / NBRC 15278 / OCh 1 49) OX=391595 GN=queA PE=3 SV=1
MKLSDFDFDLPEDLIATRPAVPRTSARLLVAKGQQISDSIVSDLPNWLSPGDRLVLNDTRVIPARLTGARHRDTAQGPMQARIEVTLLEPDARGDWSALIKPLKKVKIGEEIIFSDVLRATLQSVTDGQGFLKFNLEGDDFDAALNAAGAMPLPPYIATRRPADERDKSDYQTVFAQNNGAVAAPTASLHFDEALLSELAARGVLFSYVTLHVGAGTFLPVKVEDVTTHKMHAEWGQVSAVAAAEINATKQAGKRVIPVGTTALRLIETAGREGQITAWEGDTDIFIYPGFRFNVADALMTNFHLPKSTLMMLVSALMGYDEVRTIYNHAIAEKYRFFSYGDASLLIPKTD

SEQ ID NO: 71606 - protein, 350 aa, Roseobacter sp.
  REGION 1..350: note = tr|A4EKB5|A4EKB5_9RHOB S-adenosylmethionine:tRNA ribosyltransferase-isomerase OS=Roseobacter sp. CCS2; OX = 391593 GN=queA PE=3 SV=1
MKLSEFDFDLPDSLIATRPARPRSSARLLLAQGATIEDRIVNQLPDILQPGDRLILNDTKVIPARLFGLRHRSGEAGETAAKMDVTLLEPRADGSWSALIKPLKKVRDGEVIVFSDDLEAEVTGRGDGQGYLAFNLKGDDFDAALNAVGAMPLPPYIAGKRSADDADKTDYQTYWARNSGAVAAPTASLHFDGPLLAALAARGVQFTHVTLHVGAGTFLPVKVDDVRDHKMHAEWGEVTADAAAEINATKAAGHRVIPVGTTALRLIESAAQRGVMQPWTGPTDIFITPGFQFQMADGLMTNFHLPKSTLMMLVSALMGTDTIRAIYAHAIAQNYRFFSYGDSSLLLPHK

SEQ ID NO: 71607 - protein, 350 aa, Roseobacter sp.
  REGION 1..350: note = tr|A6FRD4|A6FRD4_9RHOB S-adenosylmethionine:tRNA ribosyltransferase-isomerase OS=Roseobacter sp. AzwK-3b; OX = 351016 GN=queA PE=3 SV=1
MKLSDFDFDLPEDLIATRPARPRSSARLLVAQGDAIRDAIVRDLGDFLRPGDRLVLNDTAVIPARLSGMRRREGPEGVTQAKIEVTLLEPGPEGDWSALVKPLKKVRDGEVIVFGAGLEAEVLARREGQGLLRFNLEGEAFDTALNDAGAMPLPPYIAARRAADAQDRTDYQTVWARHKGAVAAPTASLHFDAELLERLEAMGVTFSHVTLHVGAGTFLPVKVEDVTTHRMHAEWGRVSEAAAAEIAATKAAGGRVIPVGTTALRLIESAAQASGAIAPWEGETDIFIYPGFTFRVADALMTNFHLPKSTLMMLVSALMGQDRIKDIYDHAVENRYRFFSYGDASLLIPD

SEQ ID NO: 71608 - protein, 356 aa, Roseococcus sp.
  REGION 1..356: note = tr|A0A4R0YIB4|A0A4R0YIB4_9PROT S-adenosylmethionine:tRNA ribosyltransferase-isomerase; OS = Roseococcus sp. SYP-B2431 OX=2496640 GN=queA PE=3 SV=1
MTLATSDFDYALPEAAIAQAPLRPRDAARMLVVRGGTLEDRGVRDLPSLLEPGDVMVVNDTRVIPARLRARRGEARIEVMLNRAEGDGSWHALIRNARRLRVGDEIAIEGAELTARVLEKFEGGSARLDFGTDPARLMAALEQAGEIPLPPYIQREAGPGAEDRADYQTVFAARPGAVAAPTASLHFTPWLLAALEARGVKRATVTLHVGAGTFLPVREEDPRRHVMHHEWGELGAEAAAIINAARAEGRRILCCGTTALRLLETAARGVEDRHAPIPVFSGLTDIYILPGFPFRAADLLMTNFHLPKSTLLMLVSAFAGTRRMRRAYAHAVAEGYRFFSYGDASLLFREEADLTA

SEQ ID NO: 71609 - protein, 392 aa, unidentified
  source 1..392: note = Roseofilum reptotaenium
  REGION 1..392: note = tr|A0A1L9QRE3|A0A1L9QRE3_9CYAN S-adenosylmethionine:tRNA ribosyltransferase-isomerase; OS = Roseofilum reptotaenium AO1-A OX=1925591 GN=queA PE=3; SV = 1
MDRERELRDDRDYDLDAYDYVLPEECIAQNPVTPRDSSRLLVVDSSAGCHHEVFRELPQWLRREDLLVMNDTRVIPARLYGYKSTGMEMEALLLERVERHVWLALVKPGRRLKPGAVVEFSAHSGEDLPPLKAKIRGTDEATGGRFLEFELSGDQELQDLLDDYGHVPFPPYVTDTQAEADQYQTVYAQAAGSVAAPTAGLHFTPRLLEELEDLGIERAMVTLHVGVGTFRPVEVKDIRTHEMHQEWLEVSGETWQKVRETQKRGGRVISVGTTSVRALEGAAHWWKDRGSVGAGSFNFGSSKRDLGEPALTSGPGAGFYGKTDLFIYPGYEWQVVEGLITNFHLPRSSLLMLVSALVGRSRLLQLYQEAIAEDYRFYSFGDAMLILPEARF

SEQ ID NO: 71610 - protein, 367 aa, Roseomonas aestuarii
  REGION 1..367: note = tr|A0A2U1V934|A0A2U1V934_9PROT S-adenosylmethionine:tRNA ribosyltransferase-isomerase; OS = Roseomonas aestuarii OX=568898 GN=queA PE=3 SV=1
MTQPSTLPDRRDAGPKPELRAEDFDFALPEALIAQSPARPRDAARLLVAAPEGVRDAGVLELPDWLRPGDLMVVNDTRVIPARLRAGRGEARLEIMLNRAEAGGIWHALVRNAKKLRPGDILSIEGAPELAPRVVERQEGGAVLLDFGPDQGLLAAALERAGEIPLPPYIARPEGPRPEDREDYQPIFARQPGAVAAPTASLHFTPRLLAALAARGVAQVSLTLHVGAGTFLPIRAENPREHRLHAEWGEITEAAAAAINGTRAKGGRIVAIGTTALRLLESAVDEKGVIHPFRGLTDIFLLPGHVFRSADLLLTNFHLPKSSLFMLVSAFAGTARMRDAYAHAVAQGYRFYSYGDASLLFREDTAP

SEQ ID NO: 71611 - protein, 360 aa, Roseomonas cervicalis
  REGION 1..360: note = tr|D5RRV7|D5RRV7_9PROT S-adenosylmethionine:tRNA ribosyltransferase-isomerase OS=Roseomonas cervicalis ATCC 49957 OX=525371 GN=queA PE=3 SV=1
MTSTTPPALPELRAEDFDFALPEALIAQAPARPRDAARLLVAAPEGLRDQGVRDLPAWLRPGDLMVVNDTRVIPARLRARRGEARLEIMLNRAESGGMWHALVRNAKKLRPGDILTIEGAPELAPRVVERQEGGAALIDFGPDQGKLAAALEKAGEIPLPPYIARPDGPRPEDREDYQPIFAREPGAVAAPTASLHFTPGLLAALAERGVGQVSLTLHVGAGTFLPIRGDNPREHKLHAEWGHISEAAAASINETRARGGRIVAIGTTALRLLESAVDERGVVHPFRGLTDIFLLPGHVFRSADLLLTNFHLPKSSLFMLVSAFAGQARMRDAYAHAVAQGYRFYSYGDASLLFREDPTP

SEQ ID NO: 71612 - protein, 352 aa, unidentified
  source 1..352: note = Roseomonas deserti
  REGION 1..352: note = tr|A0A1V2GXV7|A0A1V2GXV7_9PROT S-adenosylmethionine:tRNA ribosyltransferase-isomerase; OS = Roseomonas deserti OX=1817963 GN=queA PE=3 SV=1
MPELRAADFDFDLPEALIAQGPARPRDSARMLVVGADGPVDAGVASLPDWLRPGDLMVVNDTRVIPARLRARRGLAQLEIMLNRAESGGLWHALVRNAKKLRPGDLLDIEGAPELRPRVVERQEGGAVLLDFGPDQALLAAVLERAGEIPLPPYIARPDGPTAQDLDDYQPIFARQPGAVAAPTASLHFTPALLQALEARGVAQVALTLHVGAGTFLPIRGDNPREHKLHAEWGEISDSAAATINATRAKGGRIIAIGTTALRLLESSVDDQGIVHPFRGLTDIFLLPGHVFHSADLLLTNFHLPKSSLFMLVSAFAGQGRMRDAYAHAVAQGYRFYSYGDASLLFRENAAR

SEQ ID NO: 71613 - protein, 352 aa, Roseomonas gilardii
  REGION 1..352: note = tr|A0A1L7ADA6|A0A1L7ADA6_9PROT S-adenosylmethionine:tRNA ribosyltransferase-isomerase; OS = Roseomonas gilardii OX=257708 GN=queA PE=3 SV=1
MSHSLPPLRTVDFDFTLPEASIAQSPAQPRDSARLLDVRPDGLADRHVSDLPGLLEPGDLLVVNDTRVIPARLHARRGEAAIELLLNRAEGGGVWHALARNARRLRPGDVLAIGGAPELAPRVVERQEGGAVLVDFGPDEAALLAALERAGEVPLPPYIQRPGGPVAADRADYQTVFADRPGAVAAPTASLHFTPRLLEALEARGIGRATVTLHVGAGTFLPVRGDDPREHRLHAEWGEITPEAAARINAARRVVAVGTTALRLLESAAREDGTIAPFRGLTELFLLPGHRFRSAPLLLTNFHLPKSTLFMLACAYAGTARVRAAYDHAIASGYRFYSYGDASLLRREDSAP

SEQ ID NO: 71614 - protein, 352 aa, Roseomonas gilardii
  REGION 1..352: note = tr|A0A379ND99|A0A379ND99_9PROT S-adenosylmethionine:tRNA ribosyltransferase-isomerase; OS = Roseomonas gilardii subsp. rosea OX=243956 GN=queA PE=3; SV = 1
MSHSLPPLRTVDFDFTLPEASIAQSPAQPRDSARLLDVRPDGLADRHVADLPGLLEPGDLLVVNDTRVIPARLHARRGEAAIELLLNRAEGGGVWHALARNVRRLRPGDVLAIDGAPELAPRVVERQEGGAVLVDFGPDEAALLAALERAGEVPLPPYIQRPGGPVAADRADYQTVFADRPGAVAAPTASLHFTPRLLAALEARGIGRATVTLHVGAGTFLPVRGDDPRAHRLHAEWGEITPGTAARINAARRVVAVGTTALRLLESAAREDGTIAPFRGLTELFLLPGHRFRSAPVLLTNFHLPKSTLFMLACAYAGTARVRAAYDHAIASGYRFYSYGDASLLRREDSAP

SEQ ID NO: 71615 - protein, 352 aa, Roseomonas mucosa
  REGION 1..352: note = tr|A0A1S8D8C2|A0A1S8D8C2_9PROT S-adenosylmethionine:tRNA ribosyltransferase-isomerase; OS = Roseomonas mucosa OX=207340 GN=queA PE=3 SV=1
MSHSLPPLRTVDFDFTLPEASIAQSPAQPRDSARLLDVRPDGLADRQVSDLPGLLEPGDLLVVNDTRVIPARLHARRGEAAIELLLNRSEGGGTWHALARNARRLRPGDVLAIDGAPELAPRVVERQEGGAVLVDFGSDEAALLAALERAGEVPLPPYIQRPGGPVAADRADYQTVFADRPGAVAAPTASLHFTPRLLAALEARGIGRATVTLHVGAGTFLPVRGDDPRAHKLHAEWGEIAPETAARINAARRVVAVGTTALRLLESAAREGGTIAPFHGLTELFLLPGHRFRSAPVLLTNFHLPKSTLFMLACAYAGTARVRAAYDHAIASGYRFYSYGDASLLRREDSAP

SEQ ID NO: 71616 - protein, 352 aa, Roseomonas mucosa
  REGION 1..352: note = tr|A0A379N2R7|A0A379N2R7_9PROT S-adenosylmethionine:tRNA ribosyltransferase-isomerase; OS = Roseomonas mucosa OX=207340 GN=queA PE=3 SV=1
MSHSLPPLRTVDFDFTLPEASIAQSPAQPRDSARLLDVRPDGLADRQVSDLPGLLEPGDLLVVNDTRVIPARLHARRGEAAIELLLNRSEGGGTWHALARNARRLRPGDVLAIDGAPELAPRVVERQEGGAVLVDFGPDEAALLAALERAGEVPLPPYIQRPGGPVAADRADYQTVFADRPGAVAAPTASLHFTPRLLAALEARGIGRATVTLHVGAGTFLPVRGDDPRAHKLHAEWGEIAPETAARINAARRVVAVGTTALRLLESAAREDGTIAPFRGLTELFLLPGHRFRSAPVLLTNFHLPKSTLFMLACAYAGTARVRAAYDHAIASGYRFYSYGDASLLRREDSAP

SEQ ID NO: 71617 - protein, 357 aa, unidentified
  source 1..357: note = Roseomonas nepalensis
  REGION 1..357: note = tr|A0A502FQN0|A0A502FQN0_9PROT S-adenosylmethionine:tRNA ribosyltransferase-isomerase; OS = Roseomonas nepalensis OX=1854500 GN=queA PE=3 SV=1
MATASFAFDLPEGLIAQSPARPRDSARLLRVAPPGGEDPAEVADRVVRDLPGLLRPGDLMVVNDTRVIPARLRARRGEARVEIMLNRAEADGTWHALVRNARKLRPGDVLAIEGAPELAPRVVEPPQGGAVRLDFGPDPAALAAALERAGEIPLPPYIARPDGPRPEDREDYQPIFARTPGAVAAPTASLHFTPALLAALEVRGVGRATLTLHVGAGTFLPLREEDPRAGRLHAEWGEVTESAARAINEARARGGRVVAIGTTALRLLETAAREDGTLAPFRGLTDIFLLPGHRFRGADLLLTNFHLPRSTLFMLVCAFGGTDRMRAAYAHAIAAGYRFYSYGDACLIDRDDAEASR

SEQ ID NO: 71618 - protein, 361 aa, unidentified
  source 1..361: note = Roseomonas oryzae
  REGION 1..361: note = tr|A0A5B2TFK6|A0A5B2TFK6_9PROT S-adenosylmethionine:tRNA ribosyltransferase-isomerase; OS = Roseomonas oryzae OX=1608942 GN=queA PE=3 SV=1
MTQAANLPDLRAEDFDFALPEALIAQSPARPRDAARMLVASTDGPRDAGVRDLPDWLRPGDLMVVNDTCVIPARLRARRGEARVEIMLNRAEAGGQGGTVWHALVRNARKLRPGDILSVEGAPELSPRVVERQEGGAVLLDFGPDQGLLAAALERAGEIPLPPYIARPDGPRPEDRDDYQPIFARQPGAVAAPTASLHFTPALLEALAARGVGQVSLTLHVGAGTFLPIRAENPREHKLHAEWGEIAPAAAEAINAARAKGGRIVAIGTTALRLLESAVDDQGTIRPFQGLTDIFLLPGHVFHSADLLLTNFHLPKSSLFMLVSAFAGMARMRDAYAHAVAQNYRFYSYGDASLLFREDAA

SEQ ID NO: 71619 - protein, 358 aa, unidentified
  source 1..358: note = Roseomonas rhizosphaerae
  REGION 1..358: note = tr|A0A2C7AFP8|A0A2C7AFP8_9PROT S-adenosylmethionine:tRNA ribosyltransferase-isomerase; OS = Roseomonas rhizosphaerae OX=1335062 GN=queA PE=3 SV=1
MTQPSPLPDLRAEDFDFALPEALIAQSPARPRDAARMLVAAPGGTQDAGVSDLPGWLRPGDVMVVNDTRVIPARLRARRGEARVEIMLNRAETGGIWHALVRGAKKLRPGDILSIEGAPELAPRVVERQEGGAALIDFGPDQGLLAAALEKAGEIPLPPYIARPGGPRPEDREDYQPIFARQPGAVAAPTASLHFTPALLEALAARGVGQVSLTLHVGAGTFLPIRADNPREHRLHSEWGEISPGAAAAINAARAKGGRIVAIGTTALRLLESAVDEKGIVHPFRGLTDIFLLPGHRFHSADVLLTNFHLPKSSLFMLVSAFSGTARMREAYAHAIAAGYRFYSYGDASLLFREDPAP

SEQ ID NO: 71620 - protein, 354 aa, unidentified
  source 1..354: note = Roseomonas rosea
  REGION 1..354: note = tr|A0A1M6LVX8|A0A1M6LVX8_9PROT S-adenosylmethionine:tRNA ribosyltransferase-isomerase; OS = Roseomonas rosea OX=198092 GN=queA PE=3 SV=1
MPRPLSTNDFAFDLPEALIAQSPARPRDSARLLRIAEDRQDLTIRALPDLLRPGDLMVVNDTRVIPARLRARRGEAKIEIMLNRQEADGTWHALVRNARKLRAGDILSVEGASELAPRVVENPEGGAVRLDFGPDQAALAAALERAGEIPLPPYIARPEGPRPEDREDYQPIFARIPGAVAAPTASLHFTPELLAALEARGVARTTLTLHVGAGTFLPLRGEDPRAQRLHAEWGEVTEEAAADINETRARGGRVVAIGTTALRLLETATGEDNTTRPFRDLTDIFLLPGHRFHGADLLLTNFHLPKSTLFMLVCAFGGTDRMRAAYAHAVAAGYRFYSYGDACLIDRDDGEAGA

SEQ ID NO: 71621 - protein, 352 aa, Roseomonas sp.
  REGION 1..352: note = tr|A0A1Q2YVB7|A0A1Q2YVB7_9PROT S-adenosylmethionine:tRNA ribosyltransferase-isomerase; OS = Roseomonas sp. TAS13 OX=1926319 GN=queA PE=3 SV=1
MSHSLPPLRTVDFDFTLPEASIAQSPAQPRDSARLLDVRPDGLADRQVSDLPGLLEPGDLLVVNDTRVIPARLHARRGEAAIELLLNRSEGGGTWHALARNARRLRPGDVLAIDGAPELAPRVVERQEGGAVLVDFGSDEAALLAALERAGEVPLPPYIQRPGGPVAADRADYQTVFADRPGAVAAPTASLHFTPRLLAALEARGIGRATVTLHVGAGTFLPVRGDDPRAHKLHAEWGEIAPETAARINAARRVVAVGTTALRLLESAAREDGTIAPFHGLTELFLLPGHRFRSAPVLLTNFHLPKSTLFMLACAYAGTARVRAAYDHAIASGYRFYSYGDASLLRREDSAP

SEQ ID NO: 71622 - protein, 364 aa, Roseomonas sp.
  REGION 1..364: note = tr|A0A317F6E0|A0A317F6E0_9PROT S-adenosylmethionine:tRNA ribosyltransferase-isomerase; OS = Roseomonas sp. CQN31 OX=2184016 GN=queA PE=3 SV=1
MPEAPPPSRAEGAPLRTEEFDYDLPERLIAQAPARPRDSARLLVVRAEGLEDRGVLDLPALLDPGDLLVVNDTRVIPARLHGRRGDARVEIMLNRAEGGGLWQALVRNARRLRPGDEVAIEGAEGCVARVVEREGGTALLDFGPDQAALAVALEQAGEVPLPPYIHRKGGPRAEDAADYQTIFAKRPGAVAAPTASLHFTDRLLAALEARGVQRATVTLHVGAGTFLPVREDDPRRHHIHREWAEIGEDAAAAINAARAAGRRVVALGTTAMRVTETAAREDGTVAPFRGLTDLYILPGFRFRAVDALLTNFHLPKSTLLMLVSAFSGTRRMRAAYAHAIAREYRFFSYGDASLLFRCAQDLPA

SEQ ID NO: 71623 - protein, 360 aa, Roseomonas stagni
  REGION 1..360: note = tr|A0A1I4C8T9|A0A1I4C8T9_9PROT S-adenosylmethionine:tRNA ribosyltransferase-isomerase; OS = Roseomonas stagni DSM 19981 OX=1123062 GN=queA PE=3 SV=1
MPDAPPFPTPLRTGDFDYDLPERLIAQAPARPRDSARLLVVGDGRLEDRGVLDLPAMLDPGDVLVVNDTRVIPARLHGRRGEARVEIMLNRAEGGGLWHALIRNARRLRPGDTVAIEGAEGCVARVVERDGGSALLDFGPDQAALAAALEQAGEVPLPPYIHRDGKPGAEDVADYQTIFAERPGAVAAPTASLHFTDQLLAALDARGIRRATVTLHVGAGTFLPVREDDPRAHHIHQEWCDVSPEAADTINQARAEGRRVVAVGTTALRTTESAAREDGTVAPFRGLTDLYILPGYRFRAVDALVTNFHLPKSTLLMLVSAFAGTRRMRAAYAHAVAQEYRFFSYGDGSLLFRCDQDSPA

SEQ ID NO: 71624 - protein, 341 aa, Roseospirillum parvum
  REGION 1..341: note = tr|A0A1G7WIN0|A0A1G7WIN0_9RHIZ S-adenosylmethionine:tRNA ribosyltransferase-isomerase; OS = Roseospirillum parvum OX=83401 GN=queA PE=3 SV=1
MRTDLFDFTLPPEHIARRPASPRDAARLLVVPPEGLFADLTVADLPGQLAPGDLLVVNDTRVLPARLTGRRGTAGVEITLDQRRPDGTWRALAKGARKLKPGQRIDFADALSAQVLEKAEGGVVTLAFDRDGADLRAALEAVGHIPLPPYMGRPDDARDRDDYQTLFAAREGAVAAPTAGLHFTPRLIDALTAAGITQTSLTLHVGAGTFLPVKVDDTRDHQMHGEWGEITPHTADTINTTRAAGGRVVAVGTTALRLLESAARDDGTVAPFEGETDIFITPGHRFQAVDALLTNFHLPRSTLFMLVSAFMGLERMQSAYAHAIAENYRFYSYGDACLLLR

SEQ ID NO: 71625 - protein, 349 aa, Roseovarius aestuarii
  REGION 1..349: note = tr|A0A1X7BPA3|A0A1X7BPA3_9RHOB S-adenosylmethionine:tRNA ribosyltransferase-isomerase; OS = Roseovarius aestuarii OX=475083 GN=queA PE=3 SV=1
MKLSDFDFDLPDGLIATRPVKPRSAARMLVAEGGHIADAHVHDLGRWLRPGDRLVLNDTKVIPARLTGTRRRSGPQGDSTARIEATLLDPGADGSWTALIKPLKKVREGEEIRFSADLSAILVAKADGRALLHFNLTSDDFDAALAQAGAMPLPPYIAAKRPADAQDKTDYQTVFARNPGAVAAPTASLHFDEALLQALTRQGISFTHVTLHVGAGTFLPVKVEDVTTHKMHAEWGEVSAQAAAEIAATKAAGGRVIPVGTTALRLIESAARDGQITPWQGETDIFIYPGFDFNVADALMTNFHLPRSTLMMLVSALMGQDRIRQIYAHAVAQEYRFFSYGDASLLIPG

SEQ ID NO: 71626 - protein, 349 aa, unidentified
  source 1..349: note = Roseovarius albus
  REGION 1..349: note = tr|A0A1X6ZC22|A0A1X6ZC22_9RHOB S-adenosylmethionine:tRNA ribosyltransferase-isomerase; OS = Roseovarius albus OX=1247867 GN=queA PE=3 SV=1
MKTSDFDFDLPEELIAVRPARPRRAARLLVAQGAQITDSTVDQLGDWLLPGDRLVLNDTKVIPARLQGVRSRMSPQGRTEARMEVTLLSPETDGTWRAMIKPLKKIREGEVIQFEAGLEAELTDKPDGQGVLRFNMTGDDFDAALTEIGSMPLPPYIAAKRAADEQDHEDYQTVFAENSGAVAAPTASLHFDEALLAELADKGVQFTHVTLHVGAGTFLPVKVEDVTTHKMHAEWGHVSAQAAEEIRQTKANGGRVIPVGTTALRLIESAARGREIEPWQGETDIFIYPGFTFQVADALMTNFHLPRSTLMMLVSALIGSEEIRQIYAHAIAQKYRFFSYGDSSLLIPT

SEQ ID NO: 71627 - protein, 355 aa, unidentified
  source 1..355: note = Roseovarius atlanticus
  REGION 1..355: note = tr|A0A0T5P079|A0A0T5P079_9RHOB S-adenosylmethionine:tRNA ribosyltransferase-isomerase; OS = Roseovarius atlanticus OX=1641875 GN=queA PE=3 SV=1
MKLSDFDFDLPEALIATRPAKPRPSARLLVAQGDRITDSRVYDLGQYLRPGDRLILNNTKVIPARLSGLRRRDGAQGETEARIEVTLLDATPEGDWRAMIKPLKKLRIGETVRFEAGLEAKLLAKEDGQGVLRFNLSGDDFDAALNAAGAMPLPPYIASKRAADDQDRDDYQTVFAKQTGAVAAPTASLHFDDALLAELAAQGIAFTEVTLHVGAGTFLPVKVEDVTSHRMHAEWGEVSKAAAAEIAATKAAGGRIIPVGTTALRLIESAARDGTIGPWRGETDIFIYPGFRFQVTDALMTNFHLPKSTLMMLVSALMGPNRIKDIYTHAIQNEYRFFSYGDSSLLVPDGGGRTK

SEQ ID NO: 71628 - protein, 362 aa, unidentified
  source 1..362: note = Roseovarius azorensis
  REGION 1..362: note = tr|A0A1H7M548|A0A1H7M548_9RHOB S-adenosylmethionine:tRNA ribosyltransferase-isomerase; OS = Roseovarius azorensis OX=1287727 GN=queA PE=3 SV=1
MDLSDFDFDLPEALIATRPAKPRRAARLLVAEGDRITDAQVADLGRWLRPGDRLVLNDTRVIPARLSGLRHRRGAQGATAARIEVTLLEPGADGTWAALIKPLKKVAVGEEIVFSPVLSAVLEAREDGQGRLRFNLTGEDFDAALAEAGAMPLPPYIAARRAADAQDKVDYQTVWARVPGAVAAPTASLHFDEVLLADLAAMGVTFSHVTLHVGAGTFLPVKVEDVTTHRMHAEWGEVSARAAQEIAATRAAGGRIVPVGTTALRLIETAARATGEVVAWRGETDIFIYPGFDFRVTDALMTNFHLPKSTLMMLVSALMGRTRIGRIYQHAVAEGYRFFSYGDASLLIPGAKADRRGAGGPG

SEQ ID NO: 71629 - protein, 350 aa, unidentified
  source 1..350: note = Roseovarius gaetbuli
  REGION 1..350: note = tr|A0A1X6ZB15|A0A1X6ZB15_9RHOB S-adenosylmethionine:tRNA ribosyltransferase-isomerase; OS = Roseovarius gaetbuli OX=1356575 GN=queA PE=3 SV=1
MKLSDFDFELPEALIATRPARPRTSARLLVANGDAITDTRVSALGDWLCAGDRLVLNDTKVIPARLSGERHRTGAQGATAARIEVTLLDPAADGSWSALLKPLKKISEGEVIVFSPDLSATLEAKLDGQGRLRFNLAGEDFDAALAEAGAMPLPPYIAARRPADAQDKTDYQTVWARHAGAVAAPTASLHFDAALLAELAAMGVTFSHVTLHVGAGTFLPVKVEDVTTHKMHAEWGEVSAEAAAEIAATRAASGRVIPVGTTALRLIETAARATGEIAPWQGETDIFIYPGFEFRVTDALMTNFHLPKSTLMMLVSALVGQDRLREIYRHAVTENYRFFSYGDASLLIPR

SEQ ID NO: 71630 - protein, 350 aa, Roseovarius halotolerans
  REGION 1..350: note = tr|A0A1X6YJ74|A0A1X6YJ74_9RHOB S-adenosylmethionine:tRNA ribosyltransferase-isomerase; OS = Roseovarius halotolerans OX=505353 GN=queA PE=3 SV=1
MKLSDFDFELPEDLIATRPARPRSSARLLVAEGAAIHDSCVRDLGDWLRPGDRLVLNDTAVIPARLSGARRRTGPEGETSARIEVTLLEPGREGDWAALVKPLKKLRVGEAVQFAAGLEAELLAKDEGQARLRFNLEGEAFDSALAEAGAMPLPPYIAARRAADEQDKTDYQTVWARAPGAVAAPTASLHFDEALLKDLHARGIAFSHVTLHVGAGTFLPVKVEDVTTHRMHAEWGEVSEKAAAEIAATKAAGGRVIPVGTTALRLIESAARESGAIAPWRGETDIFIYPGFDFRVSDALMTNFHLPRSTLLMLVSALMGQARIRAIYDHALEQRYRFFSYGDASLLIPG

SEQ ID NO: 71631 - protein, 349 aa, Roseovarius indicus
  REGION 1..349: note = tr|A0A0T5PA51|A0A0T5PA51_9RHOB S-adenosylmethionine:tRNA ribosyltransferase-isomerase; OS = Roseovarius indicus OX=540747 GN=queA PE=3 SV=1
MKLSDFDFDLPERLIATRPARPRSSARLLVADGDAITDAKVADLGRWLRPGDRLVLNDTKVIPARLTGTRRREGATGETEARIEVTLLDPAPDGGWRAMVKPLKKLREGEVVRFGAGLEATCRAKEDGQAVLAFNLEGDEFDAALNQAGAMPLPPYIAARRAADEQDREDYQTVWARNTGAVAAPTASLHFDEALLTALADMGVTFTHVTLHVGAGTFLPVKVEDVTTHKMHAEWGEVSEAAAAEIAETKAAGHRVIPVGTTALRLIESAAQGGQITPWRGETEIFIYPGFKFRVTDALMTNFHLPRSTLMMLVSALMGQGRIRDIYEHAVAEEYRFFSYGDASLLIPG

SEQ ID NO: 71632 - protein, 355 aa, unidentified
  source 1..355: note = Roseovarius litoreus
  REGION 1..355: note = tr|A0A1M7CWZ2|A0A1M7CWZ2_9RHOB S-adenosylmethionine:tRNA ribosyltransferase-isomerase; OS = Roseovarius litoreus OX=1155722 GN=queA PE=3 SV=1
MGERQVKLSDFDFDLPEDLIATRPARPRSSARLLVAQGDAIQDAIVRDLGDWLRPGDRLVLNDTAVIPARLSGVRRREGPEGATQAKIEVTLLEPGPEGDWSALVKPLKKVRDGEVIVFGAGLEAEVLARREGQGLLRFNLEGEAFDTALNAAGAMPLPPYIAARRAADAQDRTDYQTVWARHKGAVAAPTASLHFDAELLERLEAMGVTFSHVTLHVGAGTFLPVKVEDVTTHKMHAEWGRVSEAAAAEIAATKAAGGRVIPVGTTALRLIESAAQASGAIAPWEGETDIFIYPGFTFRVTDALITNFHLPKSTLMMLVSALMGQDRIRKIYDHAVENRYRFFSYGDASLLIPG

SEQ ID NO: 71633 - protein, 350 aa, unidentified
  source 1..350: note = Roseovarius lutimaris
  REGION 1..350: note = tr|A0A1I5CKT0|A0A1I5CKT0_9RHOB S-adenosylmethionine:tRNA ribosyltransferase-isomerase; OS = Roseovarius lutimaris OX=1005928 GN=queA PE=3 SV=1
MKLSDFDFDLPEALIATRPARPRTSARLLVAHGDAITDTRVSALGDWLCPGDRLVLNDTKVIPARLSGKRHRLGAQGASAARIEVTLLEPGADGSWSALIKPLKKISVGETVVFSPDLSATLEAKEDGQGRLRFNLAGEDFDAALAEAGAMPLPPYIAARRPADSQDKTDYQTVWARHAGAVAAPTASLHFDEPLLAQLAGMGVTFSHVTLHVGAGTFLPVKVEDVTSHKMHAEWGEVSAGAAAEIAATRAAGGRVIPVGTTALRLIETAARATGEIAPWQGETDIFIYPGFDFRVTDALMTNFHLPKSTLMMLVSALVGQDRLRQIYAHAVAENYRFFSYGDASLLTPR

SEQ ID NO: 71634 - protein, 350 aa, unidentified
  source 1..350: note = Roseovarius marisflavi
  REGION 1..350: note = tr|A0A1M7BC88|A0A1M7BC88_9RHOB S-adenosylmethionine:tRNA ribosyltransferase-isomerase; OS = Roseovarius marisflavi OX=1054996 GN=queA PE=3 SV=1
MKLSDFDFELPEALIATRPARPRTSARLLVANGDAITDTRVSALGDWLRAGDRLVLNDTKVIPARLGGLRHRAGAQGPSAARIEVTLLEPGADGSWSALIKPLKKISEGEVIVFSPDLSATLEAKEDGQGRLRFNLAGEDFDAALAEAGAMPLPPYIAARRPADAQDKTDYQTVWARHAGAVAAPTASLHFDDALLAELAGMGVTFSHVTLHVGAGTFLPVKVEDVTTHKMHAEWGEVSAEAAADIAATRAAGGRVIPVGTTALRLIETAARATGEIAPWQGETDIFIYPGFEFRVTDALMTNFHLPKSTLMMLVSALVGQDRLREIYRHAVTENYRFFSYGDASLLIPR

SEQ ID NO: 71635 - protein, 362 aa, Roseovarius mucosus
  REGION 1..362: note = tr|A0A0A0HJT4|A0A0A0HJT4_9RHOB S-adenosylmethionine:tRNA ribosyltransferase-isomerase; OS = Roseovarius mucosus DSM 17069 OX=1288298 GN=queA PE=3; SV = 1
MKLSDFDFDLPEALIATRPARPRRAARLLVAEGGAITDAGVADLGRWLRPGDRLVLNDTRVIPARLSGLRHRSGAQGDTAAKIEVTLLEPGAEGTWGALIKPLKKINEGEEIVFSDRLSAVLEAKDEGQGRLRFNLKGDDFDAVLAEAGAMPLPPYIAARRPADEQDKVDYQTVWARAPGAVAAPTASLHFDEALLAELAAMGVGFTHVTLHVGAGTFLPVKVEDVTTHRMHAEWGEVSAKAAAEIAATRATGGRIIPVGTTALRLIETAARATGEIAAWSGDTDIFIYPGFEFRVTDALMTNFHLPKSTLMMLVSALMGQDTIRHVYAHAVAERYRFFSYGDASLLIPMAKPDRRDAQATG

SEQ ID NO: 71636 - protein, 362 aa, Roseovarius mucosus
  REGION 1..362: note = tr|A0A1V0RKZ9|A0A1V0RKZ9_9RHOB S-adenosylmethionine:tRNA ribosyltransferase-isomerase; OS = Roseovarius mucosus OX=215743 GN=queA PE=3 SV=1
MKLSDFDFDLPEALIATRPARPRRAARLLVAEGEGITDAGVADLGRWLRPGDRLVLNDTRVIPARLSGLRHRSGAQGDTAAKIEVTLLEPGADGSWGALIKPLKKVSEGEEIVFSERLSAVLLAKEEGQGRLRFNLVGDDFDAALAEAGAMPLPPYIAARRPADEQDKVDYQTVWARAPGAVAAPTASLHFDEALLAELAALGVGFSHVTLHVGAGTFLPVKVEDVTTHRMHAEWGEVSAKAAAEMAATRAAGGRIIPVGTTALRLIETAARATGEIAAWSGDTDIFIYPGFEFRVADALMTNFHLPKSTLMMLVSALMGQDTIRRIYAHAVAARYRFFSYGDASLLIPAAKADRRGAQGTE

SEQ ID NO: 71637 - protein, 350 aa, Roseovarius nanhaiticus
  REGION 1..350: note = tr|A0A1N7G648|A0A1N7G648_9RHOB S-adenosylmethionine:tRNA ribosyltransferase-isomerase; OS = Roseovarius nanhaiticus OX=573024 GN=queA PE=3 SV=1
MQLSDFDYHLPEDLIAVRPVRPRSAARLLVASGDDLSDAHVGDLPEWLRPGDRLILNDTRVIPARLSGLRRRSGAQGDTEARIEVTLLEPRSDGAWSALIKPLKKLREGEVVTFSEQFSATLIAKEDGQGALEFNLTGDDFDAALAEAGAMPLPPYIAARRAADAADKDDYQTVWARHAGAVAAPTASLHFDAPLLDALGARGVAFTHVTLHVGAGTFLPVKVEDVTTHKMHAEWGEVTGKAAAEIAATRAAGGRIIPVGTTALRLIESAARATGAIQPWQGETDIFIYPGFEFRVTDALMTNFHLPKSTLMMLVSALMGQDAVRRIYAHAVDNRYRFFSYGDASLLIPR

SEQ ID NO: 71638 - protein, 348 aa, Roseovarius nubinhibens
  REGION 1..348: note = tr|A3SR54|A3SR54_ROSNI S-adenosylmethionine:tRNA ribosyltransferase-isomerase OS=Roseovarius nubinhibens (strain ATCC BAA-591 / DSM 15170 / ISM) OX=89187 GN=queA; PE = 3 SV=1
MKLSDFDFDLPEELIATRPVRPRPAARLLVAEGAAIRDAHVRDLGQWLRPGDRLVLNDTKVIPARLSGLRHREGSEAGARIEVTLLEPDGQGQWGALIKPLKKLREGEVVAFAAGLSATLVAKSEGQGLLRFNLEGDDFDAALAEAGAMPLPPYIAAKRPADAQDHEDYQTVFARNKGAVAAPTASLHFDEALLAALRGQGVEMTHVTLHVGAGTFLPVKVEDVTTHKMHAEWGEVSEKAAAEIAATRAAGGRIIPVGTTALRLIETASRETGEIAPWQGETDIFIYPGFTFRATDALMTNFHLPKSTLMMLVSALMGKDRMARVYEHAIAEKYRFFSYGDASLLIPE

SEQ ID NO: 71639 - protein, 54 aa, Roseovarius nubinhibens
  REGION 1..54: note = tr|A0A348WDM2|A0A348WDM2_9RHOB S-adenosylmethionine:tRNA ribosyltransferase-isomerase (Fragment) OS=Roseovarius nubinhibens OX=314263; GN = DCS45_12280 PE=3 SV=1
TDALMTNFHLPKSTLMMLVSALMGKDRMARVYEHAIAEKYRFFSYGDASLLIPE

SEQ ID NO: 71640 - protein, 350 aa, Roseovarius pacificus
  REGION 1..350: note = tr|A0A1M6XP88|A0A1M6XP88_9RHOB S-adenosylmethionine:tRNA ribosyltransferase-isomerase; OS = Roseovarius pacificus OX=337701 GN=queA PE=3 SV=1
MKLSDFDFDLPEALIATRPARPRTSARLLVAEGDAITDAVVRDLGQWLRPGDRLILNDTAVIPARLSGARRRLGPEGETRAKIEVTLLEPGGDGTWTAMVKPLKKLREGEVVEFAAGLEAELLAREDGQARLRFNLEGAAFDAALAEAGAMPLPPYIAARRAADEQDKTDYQTVWARNPGAVAAPTASLHFDDALLAELREMGVAFSHVTLHVGAGTFLPVKVEDVTTHKMHAEWGEVSETAAAEIAATKAAGGRVIPVGTTALRLIESAARGTGQIAPWRGETDIFIYPGFEFRVTDALMTNFHLPRSTLMMLVSALMGPERIRAIYDHAVRGDYRFFSYGDASLLIPG

SEQ ID NO: 71641 - protein, 354 aa, Roseovarius sp.
  REGION 1..354: note = tr|A0A365TZE9|A0A365TZE9_9RHOB S-adenosylmethionine:tRNA ribosyltransferase-isomerase; OS = Roseovarius sp. TE539 OX=2249812 GN=queA PE=3 SV=1
MKLSDFDFDLPERLIATRPVRPRSAARLLVAEGDMITDATVVDLGSWLRPGDRLILNDTKVIPARLSGERHRTGAAGKSVARMEVTLLEPGPDGDWRAMVKPLRKLHEGETVTFGAGLEATCVAKDHGQAILRFNLEGNDFDAALNAAGAMPLPPYIAARRAADAADQEDYQTVWARRAGAVAAPTASLHFDEALLADLAAQGIAFTHVTLHVGAGTFLPVQVEDVTTHRMHAEWGEVSATAAAEISATRAAGGRIIPVGTTALRLIETAARAAARANDGVTAWTGETDIFIYPGFDFRVTDALITNFHLPRSTLMMLVSALMGQGRVRRIYDHAIAREYRFFSYGDASLLIPP

SEQ ID NO: 71642 - protein, 356 aa, Roseovarius sp.
  REGION 1..356: note = tr|A0A246QTV8|A0A246QTV8_9RHOB S-adenosylmethionine:tRNA ribosyltransferase-isomerase; OS = Roseovarius sp. 22II1-1F6A OX=1317112 GN=queA PE=3 SV=1
MKLSDFDFDLPEDLIATRPARPRSSARLLVADGQVPGGPLRDAVVTDLPSFLRPGDRLILNNTRVIPARLSGLRHRDGAEGATAARIGITLLEPRGDGSWAALAKPAKKVRDGEDIVFAPGFSARVEGRAEGQVHLRFSVTGDDFDAALAQAGAMPLPPYIAAKRPADEADHTDYQTVFARHSGAVAAPTASLHFDQPLLERIAAMGVDFSEVTLHVGAGTFLPVKVDDVTTHRMHAEWGEVGAQAAAEINATRAAGGRIIPVGTTALRLIESAATPEGRMKPWDGETDIFIYPGYEFRIADGLMTNFHLPKSTLMMLVSALMGQARMREVYDHAIAERYRFFSYGDSSLLLPGGV

SEQ ID NO: 71643 - protein, 362 aa, Roseovarius tolerans
  REGION 1..362: note = tr|A0A0L6CWS1|A0A0L6CWS1_9RHOB S-adenosylmethionine:tRNA ribosyltransferase-isomerase; OS = Roseovarius tolerans OX=74031 GN=queA PE=3 SV=1
MKLTDFDFDLPQTLIATRPARPRRSARLLVAQGEVIHDARVTDLGHWLRPGDRLVLNDTKVIPARLSGRRHRHGAPGEGAAKIEVTLLEPGADGTWSALIKPLRKVREGEDIVFSDALSAVLVAKDEGQGRLRFNLTGDDFDAALDAAGAMPLPPYIAAKRPADAQDREDYQTVWARNAGAVAAPTASLHFDEVVLDDLRARGVTFTHVTLHVGAGTFLPVKVEDVTSHKMHAEWGEVSAQAAAEIAETRAAGGRIIPVGTTALRLIETAARATGDIVPWQGDTDIFIYPGFEFRVTDALMTNFHLPKSTLMMLVSALMGPDEIRRIYAHAVAQGYRFFSYGDASLLIPAPNPDRRDTSATD

SEQ ID NO: 71644 - protein, 362 aa, Roseovarius tolerans
  REGION 1..362: note = tr|A0A1H7UVB8|A0A1H7UVB8_9RHOB S-adenosylmethionine:tRNA ribosyltransferase-isomerase; OS = Roseovarius tolerans OX=74031 GN=queA PE=3 SV=1
MKLTDFDFDLPQTLIATRPARPRRSARLLVAQGEVIHDARVTDLGHLLQPGDRLVLNDTKVIPARLSGRRHRHGAPGEGAAKIEVTLLEPGADGTWSALIKPLRKVREGEDIVFSDALSAVLVAKGEGQGRLRFNLTGDDFDAALDAAGAMPLPPYIAAKRPADAQDREDYQTVWARNAGAVAAPTASLHFDEVVLDDLRARGVTFTHVTLHVGAGTFLPVKVEDVTSHKMHAEWGEVSAQAAAEIAETRAAGGRIIPVGTTALRLIETAARATGEIVPWQGDTDIFIYPGFEFRVTDALMTNFHLPKSTLMMLVSALMGQDEIRRIYAHAVAQGYRFFSYGDASLLIPAPNPDRRDTSATD

SEQ ID NO: 71645 - protein, 356 aa, unidentified
  source 1..356: note = Rouxiella badensis
  REGION 1..356: note = tr|A0A1X0WJE5|A0A1X0WJE5_9GAMM S-adenosylmethionine:tRNA ribosyltransferase-isomerase; OS = Rouxiella badensis OX=1646377 GN=queA PE=3 SV=1
MRVADFTFELPESLIARYPQSQRSGCRLLSLDGPTGELTHGIFTDVLDKLNPGDLLVFNNTRVIPARVFGRKASGGKIEVLVERVLDSHRVLAHVRASKAPKPGAELLLGDAENIKATMVARHDTLFELEFNEDKDVFTLLDEIGHMPLPPYIDRPDEDADRELYQTVYSERLGAVAAPTAGLHFDRPLMDALKEKGVELAFVTLHVGAGTFQPVRVETIEKHVMHAEYAEVPQEVVDAVLACKARGNRVVAVGTTSVRSLESAANACKDGLIAPFYGDTSIFIFPGYEYQVIDVLITNFHLPESTLIMLVSAFAGYKNTINAYHQAVAEEYRFFSYGDAMFIHRNPLAPQEVVGE

SEQ ID NO: 71646 - protein, 356 aa, unidentified
  source 1..356: note = Rouxiella silvae
  REGION 1..356: note = tr|A0A1X0W6G5|A0A1X0W6G5_9GAMM S-adenosylmethionine:tRNA ribosyltransferase-isomerase; OS = Rouxiella silvae OX=1646373 GN=queA PE=3 SV=1
MRVADFTFELPESLIARYPQSQRSGCRLLSLDGPTGELTHGIFTDVLDKLNPGDLLVFNNTRVIPARVFGRKASGGKIEVLVERVLDSTRVLAHVRASKSPKAGAELLLGDAENIKATMVARHDTLFELEFNEDRDVFTLLDEIGHMPLPPYIDRPDEDADRELYQTVYSERLGAVAAPTAGLHFDQPLMDALKEKGIEFAFVTLHVGAGTFQPVRVDTIEEHIMHAEYAEVPQEVVDAVLACKARGNRVIAVGTTSVRSLESAAKASEDALIAPFFGDTSIFIYPGYEYQVIDVLITNFHLPESTLIMLVSAFAGYKNTLNAYHQAVAEEYRFFSYGDAMFINRNLLAPQEVVGQ

SEQ ID NO: 71647 - protein, 347 aa, Rubellimicrobium mesophilum
  REGION 1..347: note = tr|A0A017HMS7|A0A017HMS7_9RHOB S-adenosylmethionine:tRNA ribosyltransferase-isomerase; OS = Rubellimicrobium mesophilum DSM 19309 OX=442562 GN=queA; PE = 3 SV=1
MKLSDFDFDLPPDRIATRPARPRSSARLLVAGPSTIEDLRVSDLPEVLRPGDRLVLNDTKVIPARLTGTRRRGEAVARIEATLLSDRGEGLWTALLKPLRKVREGEAIDFGQGLSATFEGREGEEGLLRFTLSPEAFAVALAQAGRMPLPPYIEALRPPDEQDREDYQTVWATREGAVAAPTASLHFDEPLLDALRKRGIAFTHVTLHVGAGTFLPVKVDDIAEHKMHAEWGEVTEAAAEQIAATKREGGRVIPVGTTALRLIESAARGGAIAPWRGETDIFITPGFEFQVTDGLMTNFHLPRSTLMMLVSAVLGLDRIREVYDHAIAVGYRFFSYGDASLLLPKGR

SEQ ID NO: 71648 - protein, 347 aa, unidentified
  source 1..347: note = Rubellimicrobium roseum
  REGION 1..347: note = tr|A0A5C4N9U3|A0A5C4N9U3_9RHOB S-adenosylmethionine:tRNA ribosyltransferase-isomerase; OS = Rubellimicrobium roseum OX=687525 GN=queA PE=3 SV=1
MKLSDFDFDLPDGLIATRPARPRSSARLLVAGPEAIDDLHVFDLPEVLRPGDRLVLNDTRVIPARLQGHRRRGEAEARIEATLLTDRGEGLWAALLKPLRKVKEGEVIDFGGGLSATFEGSEEGQGLLRFALSPDAFSEALAQAGRMPLPPYIEALRFPDAQDREDYQTVWARREGAVAAPTASLHFDEPLLARLREKGVEFTHVTLHVGAGTFLPVKVDDIREHRMHAEWGEVTEEAAAGISATRAAGGRVIPVGTTALRLIETAAREGAIRPWRGDTDIFITPGFPFRVADGLMTNFHLPKSTLMMLVSAFLGVERIRQVYAHAIAARYRFFSYGDASLLLPEGR

SEQ ID NO: 71649 - protein, 347 aa, Rubellimicrobium sp.
  REGION 1..347: note = tr|A0A5C4N2T0|A0A5C4N2T0_9RHOB S-adenosylmethionine:tRNA ribosyltransferase-isomerase; OS = Rubellimicrobium sp. YIM 131921 OX=2585369 GN=queA PE=3; SV = 1
MKLSDFDFDLPEELIATRPARPRSSARLLVAGPERIDDMHVSDLPRVLRPGDRLVLNDTKVIPARLTGTRRRGSAEARIEATLLSDRGEGLWSALLKPLRKVREGESIDFGEGLSATLESVEAGQGLLRFALSPDAFAEALARAGRMPLPPYIEALRAADHHDRDDYQTVWAARSGAVAAPTASLHFDEPLLKDLRACGVAFTHVTLHVGAGTFLPVKVDDIRDHRMHAEWGEVTEAAAQEIASTKDEGGRVIPVGTTALRLLESAVQAGTIGPWQGETDIFITPGFKFQVADGLMTNFHLPKSTLMMLVSALLGIERIRSVYAHAIERQYRFFSYGDASLLLPKGR

SEQ ID NO: 71650 - protein, 349 aa, Rubellimicrobium thermophilum
  REGION 1..349: note = tr|S9QMR1|S9QMR1_9RHOB S-adenosylmethionine:tRNA ribosyltransferase-isomerase OS=Rubellimicrobium thermophilum DSM 16684 OX=1123069 GN=queA PE=3 SV=1
MKLSDFDFDLPDGLIATRPARPRSSARLLVATPDELLDRRVWDLPGLLRPGDLLVLNDTKVIPARLRGLRRRGEAAARIEATLLSDRGGGLWMALVRPLRKLREGEVIDFGEGLSATFEGVEEGQARLRFALSPDAFAEALARAGSMPLPPYIEALRPADEADREDYQTVWAAREGAVAAPTASLHFDADLLRSLEAAGIGFVHVTLHVGAGTFLPVKVDDIRDHRMHAEWGEVTEAAAAIIRAARAEGRRVIAVGTTAMRLLETAARAGRGEVVPWQGETDIFITPGFDFRACDGLMTNFHLPRSTLMMLVSAFLGIDRIREVYDHAIREGYRFFSYGDASLLLPGGR

SEQ ID NO: 71651 - protein, 364 aa, unidentified
  source 1..364: note = Rubidibacter lacunae
  REGION 1..364: note = tr|U5DE05|U5DE05_9CHRO S-adenosylmethionine:tRNA ribosyltransferase-isomerase OS=Rubidibacter lacunae KORDI 51-2 OX=582515 GN=queA PE=3 SV=1
MHDADRQLASYNYELPPEQIAQVPLTPRDSSRLLVLPSPTERVHAHFHTLPDWLQANDLLVLNDTRVLPARLYGRKSTGTMVEVLLLEQQGPEKWLALVKPGRRLPTGSAIAFNPPDAGLQATVVDRDESTGGRVLHFTVPDGRSFEEVLAQCGRVPLPPYVKSTAARPEQYQTVYAQRVGAIAAPTAGLHFTEDLLQRLGARGIQQARVTLHVGLGTFRPVETDDITAHAMHSEWLEVPAATVEQIERARSNGGRIIAVGTTVVRALEGAAAEGGQLVPFSGKTNLFIFPGYQPRVVDGLITNFHLPKSSLLMLVSAFIGRPRLLSLYEEAIAQGYRFYSFGDAMAILPAATLQESTPHDVVD

SEQ ID NO: 71652 - protein, 354 aa, unidentified
  source 1..354: note = Rubinisphaera brasiliensis
  REGION 1..354: note = tr|F0SPY5|F0SPY5_RUBBR S-adenosylmethionine:tRNA ribosyltransferase-isomerase OS=Rubinisphaera brasiliensis (strain ATCC 49424 / DSM 5305 / JCM 21570 / NBRC 103401 /IFAM 1448) OX=756272 GN=queA PE=3 SV=1
MTDLNSIEAYDYHLPEELIAQHPVEPRDHSRLLVYRRADQSIVHRRFHNLPEYLRANDCLIWNQTRVVPARLYGRRAETGGKWEGLFLKLLADGDWEIIGQTRGKLKAGEFLEIPHPGSEDVLQLKLIERREGGCWIARPETNGEVSPWDLLDQFGSIPLPPYIQDGHASEADRERYQTVYAQTPGAVAAPTAGLHFTPELIERCQAAGVDCSSVTLHVGLGTFRPVSVDNLDAHQMHREWCEVTSETVGQLQRCYEAGGRRIAVGTTTVRTLETASRESGQLQPWDGESDLFIRPGYQFRSTDGLITNFHLPKSTLLIMLSAMVGREEILRIYEEAISEQYRFYSYGDAMLIL

SEQ ID NO: 71653 - protein, 355 aa, unidentified
  source 1..355: note = Rubinisphaera sp.
  REGION 1..355: note = tr|A0A2E9VW52|A0A2E9VW52_9PLAN S-adenosylmethionine:tRNA ribosyltransferase-isomerase; OS = Rubinisphaera sp. OX=2024857 GN=queA PE=3 SV=1
MVDLNLITSYAYDLPEELIAQSPAEKRDQSRLLVFNRKTGERTHAHFFNLLDYLQPSDCLVVNRTKVVPARLRGIRDQTGGKWEGLFLGLDSEQTWEIIGKTRGKLQPGETITVVNDEGSNRLQLEFIARKDEGRWQVRPVQSEDDTRTHWELLEAVGSVPLPPYIQHGHAQADDRERYQTVYANQPGAAAAPTAGLHFTPELLDQCREKGVTIAEVTLHVGLGTFRPIGVEKLDEHTMHAEWCEVQDETVQQIQHCRENNGRVVAVGTTTVRTLETASQSGTLQPWQGESTLFIRPGFKFHVVDALITNFHLPHSTLLVMLSAFTGYEEIMETYRIAVEERYRFFSYGDAMLIL

SEQ ID NO: 71654 - protein, 359 aa, unidentified
  source 1..359: note = Rubneribacter badeniensis
  REGION 1..359: note = tr|A0A2K2U7M1|A0A2K2U7M1_9ACTN S-adenosylmethionine:tRNA ribosyltransferase-isomerase; OS = Rubneribacter badeniensis OX=2070688 GN=queA PE=3 SV=1
MLTSDFDYDLPPELIAQEPAPDRDGCRLLVMDRATGALEDRVFRDIVDYLHPGDVLVANETRVMPARLIGKKRGTGGAAEVFLLRQHGTPTQNRSALWEVLVRPGKRLKPGSGAVVDFADAAGNTVLSAEVVDWAQNAQKGERVARLSTTLPSLDEALHAVGRTPLPPYIKDYAGDEELYQTVYSRRESSAAAPTAGLHFTPALIDRLREKGVGWETVELEVGLDTFRIVDEDDPERHVIHTEFYTVGQRTADAVNEARERGGRVVAVGTTSVRSLESAWDAEAGRLVPKDREATSLYILPGYEFHAVDALITNFHVPRSTLMMLVSAFSTRDNIMAAYAHAVAERYRMLSFGDAMLIG

SEQ ID NO: 71655 - protein, 359 aa, Rubricoccus marinus
  REGION 1..359: note = tr|A0A259TZZ2|A0A259TZZ2_9BACT S-adenosylmethionine:tRNA ribosyltransferase-isomerase; OS = Rubricoccus marinus OX=716817 GN=queA PE=3 SV=1
MADALAPYDFDLPDALIAQRPAEQRDGSRMLVLHRTSGEIEDRHVTDLPEYLASGDALVFNDTRVMAARLLGHRPTGGKAELFLIERREDGLWRALAKPGRKLREGAEVWLGGESGDAGSGARGLRAEVVGVEDDGKRLVRFTRGGGPLAEAEEREALDEIGQLPLPPYIARPTDRADRERYQTIFARESGAVAAPTAGLHFTDTLLGRLEAGGVGRVHVTLHVGYGTFEPVKAEDLADHRVAAERIAVTPEASGALNRVRAAGGRIVAVGTTSTRTLETSADASGTFYPASGATDLTVTPGYTFTGVDALLTNFHLPKSSLLVLTSTFGGRENVMRAYRHAVAERYRFYSYGDCMLIL

SEQ ID NO: 71656 - protein, 363 aa, Rubricoccus marinus
  REGION 1..363: note = tr|A0A259U0A4|A0A259U0A4_9BACT S-adenosylmethionine:tRNA ribosyltransferase-isomerase; OS = Rubricoccus marinus OX=716817 GN=queA PE=3 SV=1
MRLAPASNLLRHTAPTRLTDFDFDFPRELVAAYPAEPRDSTRLMVVDRAERTIEHKTMVDLPDYFGTGDVLVANDTQVFPARLRGYKDKTEAKVEVFLLRELNPEQRLWDTIVDPARKVRVGNKLVFQDGLEAEVLDNTTSRGRTLRFIFDGSPEALHAHIDRIGETPIPPYLRRPAEAADKVRYQTIFARNRGAVAAPTAGLHFTPELISALEAKGTAVTSVTLHKGLGSFRPVDVEDLSKHRMDAEKIVVTPEATEIVNAALTSNDRTVTACGLTVIRAMESSLSAERTLKAVEGWTDKFILEPYDFLITERLLCNFQRPRSTLLMMKAAFMGHDLLRAAYDEAVKEEYRLFSFGDAMLIL

SEQ ID NO: 71657 - protein, 365 aa, Rubrimonas cliftonensis
  REGION 1..365: note = tr|A0A1H3X3I1|A0A1H3X3I1_9RHOB S-adenosylmethionine:tRNA ribosyltransferase-isomerase; OS = Rubrimonas cliftonensis OX=89524 GN=queA PE=3 SV=1
MRVSDFDFVLPESLIALRPARPRRAARLLAARGAAPGDPLDDRAVEDLPRLLAPGDLLVLNDTRVIPARLRGERRRETSDGSGVARIETTLAARAAPDVWRALARPARRLRPGDSLAFVPWEEDCGAGAPALSATILSLDGGEATLRFDRSGPDLDAAVAVIGAPPLPPYIESRRQPDARDRADYQTVFARRDGSVAAPTAALHFDAEVLAALKARGVLTASVTLHVGPGTFLPVRADNVLDHRMHAEWGEISPEAAAAINAARAAGGRVIAVGTTALRLLESAAEQDGRVAPWRGETDIFITPGYQLRAVDGLMTNFHLPRSTLFMLVCALMGAARMQEVYAHAIASGYRFYSYGDSSLLLPRG

SEQ ID NO: 71658 - protein, 362 aa, unidentified
  source 1..362: note = Rubripirellula obstinata
  REGION 1..362: note = tr|A0A5B1CC82|A0A5B1CC82_9PLAN S-adenosylmethionine:tRNA ribosyltransferase-isomerase; OS = Rubripirellula obstinata OX=406547 GN=queA PE=3 SV=1
MTESQANEIDQYDYDLPPELIAQSPMSNRADARLMLVDRSTGSIDHYHIRDLPELLSAGDTLVMNNSRVIPARLVGYRSETGGRWQGLFLRSDDETGLWEILTKTRGKLQAGETITVRDRDARDGMLLTVVTRTDDGKLLVKPSTPEDMEETFASPADWLHRFGRVPIPPYIRDGQMVDADVVDYQTVYAKSDGSVAAPTAGLHFTKSLLEKVRAAGVGTAEVTLHVGIGTFRPIATERLDEHQMHSEWGQIDEPTVQEITTRRTRGRTIAVGTTSVRVLESAAAAGGGVLKPWTGETNLFIQPGFKFNAIDGLLTNFHLPKSSLLVLISALAGRELALKAYRVAIENEYRFYSYGDAMLIV

SEQ ID NO: 71659 - protein, 326 aa, unidentified
  source 1..326: note = Rubritalea profundi
  REGION 1..326: note = tr|A0A2S7TYX6|A0A2S7TYX6_9BACT S-adenosylmethionine:tRNA ribosyltransferase-isomerase; OS = Rubritalea profundi OX=1658618 GN=queA PE=3 SV=1
MSLRTDDFDFHLPEELIANRPLVDRVGSRMLVIHRDSGKIEHRQFSDIHEYFTPDDLLVLNNTKVIPARVFSNDKAIELVVTDRPSPQLWQCMVRPGKKMKPGRTVEVGDAIGTVIEILENGNRLIQWDKFVDIHQHGSLALPHYMGRDSDHADLDRYQTVFAEEEGAIAAPTAGLHFTPEVLSEIDHAFLTLHVGIGTFRPVKAELIEDHEMHSERYSVSHDTADRINQAKRVTAVGTTCTRVLESLGRESNTLGESKGETDIFIYPGFEFKVVDRLLTNFHLPKSTLIMLVSAFAGKKLTLKAYKEAVKNEYRFYSYGDCMLIL

SEQ ID NO: 71660 - protein, 325 aa, Rubritalea squalenifaciens
  REGION 1..325: note = tr|A0A1M6KRH7|A0A1M6KRH7_9BACT S-adenosylmethionine:tRNA ribosyltransferase-isomerase; OS = Rubritalea squalenifaciens DSM 18772 OX=1123071 GN=queA; PE = 3 SV=1
MLRTDDFDYHLPEELIASQPLENRIGSRMLVLHRDTQTIEHRQFSDLHEYFTPEDLLVLNNTKVIPARVFSNDGKIELVVVDRQSATQWTCMVRPGKKMKPGRTVEVGESTGTVLETLPDGNRIIEWDKPVDLDTYGKLALPHYMGRDAEPEDRDRYQTTFAKEEGAIAAPTAGLHFTPDYLEKFPHTFLTLHVGIGTFRPVMAEFITDHKMHAERYYLSKESAKTINKAKSVTAVGTTVTRVLESLGRKQNLLTEAEGETDIFINPGFEFKQVDRLLTNFHLPKSTLIMLVSAFAGRDFTLRAYKEAVENRYRFFSYGDCMLIL

SEQ ID NO: 71661 - protein, 360 aa, unidentified
  source 1..360: note = Rubrivirga marina
  REGION 1..360: note = tr|A0A271J0H0|A0A271J0H0_9BACT S-adenosylmethionine:tRNA ribosyltransferase-isomerase; OS = Rubrivirga marina OX=1196024 GN=queA PE=3 SV=1
MQVAHPSFRQHSLRLSDFDYEYPRELIAAYPAEPRDTARLMVVDRAEGTIEHRTVRDLPEYFNEGDVLVANDTMVFPARLRGIKENTGAKVEAFLLRELNPEHRLWDSIVDPARKVRVGNKLVFGDGLAAEVIDNTTSRGRTLRFMFDGTPDELYARIDAIGETPIPPYLRRPAEPADRVRYQTIFARKRGAVAAPSAGLHFTPGLLQSLTDQGCEVAYVTLHTGLGSFNPVEVEDLSKHRMDSEFFEVLPEAAETVNAALTHPERTVTACGTTVVRAVESSLSASKTLKAGRGWTDKFIYPVYSFHIPERLLTNFHRPKSTLLMTVAAFAGYDLLMEAYEEAVREEYRMFAFGDAMLVL

SEQ ID NO: 71662 - protein, 350 aa, unidentified
  source 1..350: note = Rubrivirga marina
  REGION 1..350: note = tr|A0A271J394|A0A271J394_9BACT S-adenosylmethionine:tRNA ribosyltransferase-isomerase; OS = Rubrivirga marina OX=1196024 GN=queA PE=3 SV=1
MPDSLAPYDFDLPDGLIAQRPAERRDASRMLVLHRGTGAVEDRQFADLGEFLDPGDALVFNDTRVVPARLVGRRPTGGRAELFLVERAEDGTWSALAKPGRKLTAGAEVLFDEHLGARVEAVEESGRRRVRLLRDGHPFETVEAEEVAIEQIGRMPLPPYVDREADAADRERYQTVFARKRGAIAAPTAGLHFTPGTVEALREQGVVTAEVTLHVGYGTFEPVRADDLREHRVAPERIEVSPATADALNGVRQSGGRVVAVGTTSTRALETSADDAGRFHPVAGPTDLTVTPGYRFRAVDALLTNFHLPKSSLLVLTATFGGLGPVMEAYRHAVREGYRFYSYGDCMLIV

SEQ ID NO: 71663 - protein, 360 aa, unidentified
  source 1..360: note = Rubrivirga sp.
  REGION 1..360: note = tr|A0A271ISR9|A0A271ISR9_9BACT S-adenosylmethionine:tRNA ribosyltransferase-isomerase; OS = Rubrivirga sp. SAORIC476 OX=1961794 GN=queA PE=3 SV=1
MQVAHHSFRQHALRLSDFGFEYPKGLVAAYPAEPRDSARLMVVDRASGTIEHRTVRDLPEYFGAGDVFVANDTMVFPARLRGIKENTGAKIEAFLLRELNSEHRLWDSIVDPARKVRVGNKLVFSDTLAAEVIDNTTSRGRTLRFMFDGSPEALYEAIDAIGETPIPPYLRRKAEPADRVRYQTLFARRRGAVAAPTAGLHFTPDLLQAMTDKGCEVANVTLHLGLGSFQPVEVEDLSKHRMDSEYFEVRPEAVERVNRAMADPDATVTACGTTVLRAMESTLSAAKTLKVGRGWTDKFIYPIHTFHIADRLLTNFHRPRSPRMMMVAAYMGYELLVEAYETAIREEYRLFSFGDAMLVL

SEQ ID NO: 71664 - protein, 349 aa, unidentified
  source 1..349: note = Rubrivirga sp.
  REGION 1..349: note = tr|A0A271JAV1|A0A271JAV1_9BACT S-adenosylmethionine:tRNA ribosyltransferase-isomerase; OS = Rubrivirga sp. SAORIC476 OX=1961794 GN=queA PE=3 SV=1
MPHALADYAFDLPDGLIAQRPAERRDGSRMLVLHRATGALEDARFADLGRYLEPGDALVFNDTRVVPARLVGKRPTGGRAELFLVEKAADGTWSALARPGRRLTAGGEVVFGDGLTAVIEGVEDSGRRRIRILRDGEPLDAAAEEAALEAIGRMPLPPYVDREADATDRERYQTVYARTPGAVAAPTAGLHFTPGTVDGLREAGVVTAEVTLHVGYGTFEPVRAEDLRDHRVAAERIEVSATTAATLNDVRAARGRIVAVGTTSTRALETAADAEGRFHPVSGPTDLTVTPGYRFRAIDGLLTNFHLPSSSLLVLTATFGGREAVMAAYRHAVREGYRFYSYGDCMLIL

SEQ ID NO: 71665 - protein, 344 aa, Rubrivivax benzoatilyticus
  REGION 1..344: note = tr|F3LMZ1|F3LMZ1_9BURK S-adenosylmethionine:tRNA ribosyltransferase-isomerase OS=Rubrivivax benzoatilyticus JA2 = ATCC BAA-35 OX=987059 GN=queA PE=3 SV=1
MTSYALSDFDFPLPPELIAQHPAPERSASRLLDGRGALPVDRVFRELPQLLAPGDLLVFNDTRVIKARLHGEKPTGGSVEALVERVLGGHEVLAHLRASKSPRPGTTVRFADAFDAEVLGRDGVDGSLFHLRLPDDPFVLLERHGHVPLPPYITHEDAAEDVERYQTVFAARPGAVAAPTASLHFDAGVLAALDARGVKRAAVTLHVGAGTFQPVRAENLDEHRMHRERWEVDAATVEAIRETRARGGRIVAAGTTTLRALESAAIGGALEAGAGDTDLFIRPGFEFRVVDLLVTNFHLPKSTLLMLVSAFTGFEHMHALYRHAVEARYRFFSYGDAMLLERRA

SEQ ID NO: 71666 - protein, 344 aa, Rubrivivax gelatinosus
  REGION 1..344: note = tr|A0A4R2MMM1|A0A4R2MMM1_RUBGE S-adenosylmethionine:tRNA ribosyltransferase-isomerase; OS = Rubrivivax gelatinosus OX=28068 GN=queA PE=3 SV=1
MTAYSLSDFDFPLPPELIAQHPAPERSASRLLDGRGALPVDRVFRELPQLLAPGDLLVFNDTRVIKARLHGEKPTGGSVEALVERVLGGHEVLAHLRASKSPRPGTTVRFADAFDAEVLGRDGVDGSLFHLRFPDDPFVLLERHGHVPLPPYITHEDAAEDVERYQTVFAARPGAVAAPTASLHFDAGVLAALDARGVKRAAVTLHVGAGTFQPVRAENLDEHRMHHERWEVDAATVEAIRETRARGGRIVAAGTTTLRALESAAIGGALEAGAGDTDLFIRPGFEFRVVDLLVTNFHLPKSTLLMLVSAFTGFEHMHALYRHAVEARYRFFSYGDAMLLERRA

SEQ ID NO: 71667 - protein, 344 aa, Rubrivivax gelatinosus
  REGION 1..344: note = tr|I0HKA7|I0HKA7_RUBGI S-adenosylmethionine:tRNA ribosyltransferase-isomerase OS=Rubrivivax gelatinosus (strain NBRC 100245 / IL144) OX=983917 GN=queA PE=3 SV=1
MTSYSLSDFDFPLPPELIAQHPAPERSASRLLDGRGALPVDRVFRELPQLLAPGDLLVFNDTRVIKARLHGEKPTGGSVEALVERVLGGHEVLAHLRASKSPRPGTTVRFADAFDAEVLGRDGVDGSLFHLRFPDDPFVLLERHGHVPLPPYITHEDAAEDVERYQTVFAARPGAVAAPTASLHFDAGVLAALDARGVKRAAVTLHVGAGTFQPVRAENLDEHRMHRERWEVDAATVEAIRETRARGGRIVAAGTTTLRALESAAIGGALEAGAGDTDLFIRPGFEFRVVDLLVTNFHLPKSTLLMLVSAFTGFEHMHALYRHAVEARYRFFSYGDAMLLERRA

SEQ ID NO: 71668 - protein, 365 aa, Rubrivivax sp.
  REGION 1..365: note = tr|A0A1E4IFF5|A0A1E4IFF5_9BURK S-adenosylmethionine:tRNA ribosyltransferase-isomerase; OS = Rubrivivax sp. SCN 71-131 OX=1660138 GN=queA PE=3 SV=1
MHEAPDYTLADFDFVLPPELIAQHPAAERSGARLLDGRGALPVDRLVRDLPALLQAGDLMVFNDTRVIKARLFGRKESGGAVEALVERILPGHEVQAHLRASKSPRPGSRVRFAEAFDAEVLGRAGPEGELFQLRFPHDPLALLQQHGHVPLPPYIRHADAPEDESRYQTVFAARPGAVAAPTAALHFDEPLLQQLAARGVRRTQVTLHVGAGTFQRVRVQRIAEHRMHREWFEVGADAVAAIEATRAAGARIVVVGTTALRALESAARGGSLRPATGETDIFITPGFAFRVADLLLTNFHLPRSTLLILVSAFAGFERIRELYRHAVASRYRFFSYGDAMLLQRRALHRPQDSEDDSACSSSNC

SEQ ID NO: 71669 - protein, 352 aa, Rubrivivax sp.
  REGION 1..352: note = tr|A0A520C4Q2|A0A520C4Q2_9BURK S-adenosylmethionine:tRNA ribosyltransferase-isomerase; OS = Rubrivivax sp. OX=50259 GN=queA PE=3 SV=1
MPELTVADFDFDLPPELIAQHPAPERSASRLLDATGNEPVDRVFRELPGLLSPGDLLVFNNTRVIKARLYGIKSTGGSVEALVERVLPGTREVWMHLRASKSPKPGGRIRFADAFDAEVLGRCGPDNGLFHLRFAGDPFALLEAHGHVPLPPYIAHADDADDERRYQTVFAKEPGAVAAPTAALHFDEALLASLAERGVGQAHVTLHVGAGTFQPVRVDRLAEHKMHSEWFEVPQSTVDAIAACHDRGGRVVAVGTTTLRALESAAVGGTLQAGARETDIFITPGFEFRVVDRLVTNFHLPKSTLMMLVSALAGHAQVMALYRHAIAQRYRFFSYGDAMLLDRVTTRQECVR

SEQ ID NO: 71670 - protein, 353 aa, Rubrobacter radiotolerans
  REGION 1..353: note = tr|A0A023X3I8|A0A023X3I8_9ACTN S-adenosylmethionine:tRNA ribosyltransferase-isomerase; OS = Rubrobacter radiotolerans OX=42256 GN=queA PE=3 SV=1
MKTSDLDYELPEALIAQRPVSPRDASRLMVLDAASGEISHKVFRDLPTYLRSGDALVVNETAVIPARLEARRPGGGSVELLFLRERPEAGGWEALARLSKRLRPGMRLAVGEEDGEELEVLGSVGDGRWTLRVAGGADDVLRLLERHGRAPLPPYIQAGGEAGREVESRYTTVYARTPGSAAAPTAGFHFTEGTLEACRSAGADLARVTLHVGVGTFTPVRTENLTEHRMHAEFYSVPQSAARVVDGARRVVAVGTTVARTLESRAASGLDSGDSELFVYPGYRWRAVDALITNFHLPRSTLLAMVMSFGGEEFVREAYRVAVRERYRFYSFGDAMLILNGGRSSGSATGTAR

SEQ ID NO: 71671 - protein, 333 aa, Rubrobacter taiwanensis
  REGION 1..333: note = tr|A0A4R1BHP6|A0A4R1BHP6_9ACTN S-adenosylmethionine:tRNA ribosyltransferase-isomerase; OS = Rubrobacter taiwanensis OX=185139 GN=queA PE=3 SV=1
MRISELDYHLPKDLIAQRPAEPRDSSRLMVVDAKNGKIEHRTFRDLPEYLHPGDAVVLNETRVLPARLFARKPTGGEVELLFLRDTGNGWEVLARPGRRLQEGMTLSANGRPLELARRLGEGKWLVRAENVPRLLEERGHMPLPPYIRPTPEAERSYQTVYARRPGSAAAPTAGFHFTRRTLEEVERAGAELVRVTLHVGTGTFLPVRTEKIEEHRMHAEYYSVPEAAAASIERAERVVAVGTTVARTLESWAQSGEREGETEIYIYPGYRWRAVDALITNFHLPRSTLLAMVMSFAGVELIREAYRVAVEERYRFYSFGDAMLLLGGGRSLP

SEQ ID NO: 71672 - protein, 334 aa, Rubrobacter xylanophilus
  REGION 1..334: note = tr|A0A510HJI6|A0A510HJI6_9ACTN S-adenosylmethionine:tRNA ribosyltransferase-isomerase; OS = Rubrobacter xylanophilus OX=49319 GN=queA PE=3 SV=1
MRTDELDYELPQELIAQRPAEPRDASRLMVVDVPSRKISHHVFRELPGFLHPGDVLVLNETKVIPARLFASRPGGGEVELLFLGERGGVWEALARPSRRLRPGMRLFAGEGEPLEVVKELGEGRWLVRGRDVAGLLGRAGRMPLPPYIEPTPEAEASYQTVYARTPGSAAAPTAGFHFTERVLRGVEESGARIARVVLHVGLGTFAPVRVERLEDHRMHREYYAVPEETARAVEEAERVVAVGTTVVRTLESWARSGVREGESDLFIYPGYEWRAVDALITNFHLPRSTLLALVMSFAGKELVREAYEVAVSERYRFYSFGDAMLLVGGGRSLR

SEQ ID NO: 71673 - protein, 334 aa, Rubrobacter xylanophilus
  REGION 1..334: note = sp|Q1AWD5|QUEA_RUBXD S-adenosylmethionine:tRNA ribosyltransferase-isomerase OS=Rubrobacter xylanophilus (strain DSM 9941 / NBRC 16129) OX=266117 GN=queA PE=3 SV=1
MRTDELDYELPQELIAQRPAEPRDASRLMVVDVPSRGISHHVFRELPRFLGPGDVLVLNETKVIPARLFASRPGGGEVELLFLGERGGAWEALARPSRRLRPGMPLSAGEGERLEVVEELGEGRWLVRGRDVPGLLERAGRMPLPPYIEPTPEAEASYQTVYARTPGSAAAPTAGFHFTGRVLRGVEEAGARIARVVLHVGLGTFAPVREERLEDHRMHREYYAVPEETARAVEEAERVVAVGTTVVRTLESWARSGVREGESELFIYPGYEWRAVDALITNFHLPRSTLLALVMSFAGRELVREAYEVAVRERYRFYSFGDAMLLLGGGRSLR

SEQ ID NO: 71674 - protein, 353 aa, unidentified
  source 1..353: note = Ruegeria arenilitoris
  REGION 1..353: note = tr|A0A238JX44|A0A238JX44_9RHOB S-adenosylmethionine:tRNA ribosyltransferase-isomerase; OS = Ruegeria arenilitoris OX=1173585 GN=queA PE=3 SV=1
MYGAAMKLSDFDFDLPDDLIATRPASPRSSARLLVAQGDAISDDRVFNLPDWLRPGDRLVLNDTRVIPARLSGRRHRDSAQGPVSAAIEATLLEPRADGTWGALLKPLKKIRVGEEIVFSDDLSAVLEGVADGQAHLRFNLKGDDFDRALEQAGAMPLPPYIAAKRPADDRDKTDYQTVWARQAGAVAAPTASLHFDEPLLQALADRGVEFTHVTLHVGAGTFLPVKVEDVTTHKMHAEWGQVSPQAAAEVQATKASGGRVIPVGTTALRLIESAARDGSIQPWEGETDIFIYPGFQFQVTDALMTNFHLPKSTLLMLVSALMGRDRMLRVYDHAIKSGYRFFSYGDASLLIP

SEQ ID NO: 71675 - protein, 348 aa, Ruegeria atlantica
  REGION 1..348: note = tr|A0A0P1F0N6|A0A0P1F0N6_9RHOB S-adenosylmethionine:tRNA ribosyltransferase-isomerase; OS = Ruegeria atlantica OX=81569 GN=queA PE=3 SV=1
MKLSDFDFHLPEDRIATRPASPRSSARLLVAEGDAISDAHVFDLTDWLQPGDRLVLNDTRVIPARLNGRRHRNSAQGPVSAAIEATLLDPQADGTWAALIKPLKKVKLGEDIQFSDQLSATLERVEDGQAYLRFNLSGDDFDAALEQAGAMPLPPYIAAKRPADEQDKTDYQTIWARNSGAVAAPTASLHFDEALMQALGARGVAVTHVTLHVGAGTFLPVKVEDVTTHKMHAEWGSVSAAATQEIRETKAAGGRVIPVGTTALRLIESASRSGQIEPWEGETDIFIYPGFEFHVTDALMTNFHLPKSTLLMLVSALMGQERMRKVYAHAIEQKYRFFSYGDASLLIP

SEQ ID NO: 71676 - protein, 348 aa, Ruegeria atlantica
  REGION 1..348: note = tr|A0A0P1E708|A0A0P1E708_9RHOB S-adenosylmethionine:tRNA ribosyltransferase-isomerase; OS = Ruegeria atlantica OX=81569 GN=queA PE=3 SV=1
MKLSDFDFHLPEDRIATRPASPRSSARLLVADGDMISDAHVFDLPDWLRPGDRLVLNDTRVIPARLNGRRHRNSAQGPVSAAIEATLLDPQADGTWAALIKPLKKVKLGEDIQFSDQLSATLERVEDGQAYLQFNLSGDDFDAALEQVGAMPLPPYIAAKRPADEQDKTDYQTIWARNSGAVAAPTASLHFDEALMQALGARGVAVTHVTLHVGAGTFLPVKVEDVTTHKMHAEWGNVSAAAAQEIRETKAAGGRVIPVGTTALRLIESASRSGQIKPWEGETDIFIYPGFQFHVTDALMTNFHLPKSTLLMLVSALMGQERMRKVYAHAIEQKYRFFSYGDASLLIP

SEQ ID NO: 71677 - protein, 360 aa, unidentified
  source 1..360: note = Ruegeria conchae
  REGION 1..360: note = tr|A0A497ZRL7|A0A497ZRL7_9RHOB S-adenosylmethionine:tRNA ribosyltransferase-isomerase; OS = Ruegeria conchae OX=981384 GN=queA PE=3 SV=1
MAESIGPMYGAAMKLSDFDFHLPEHLIATRPASPRSSARLLLAQQDTIRDQRVHELPDILLPGDRLVLNDTRVIPARLNGHRHRSSAQGPVSAAIEATLLDPQSDGCWAALIKPLKKVKPGEEIVFSDDLSAILDRVADGQAFLRFNLTGEDFDQALEQAGAMPLPPYIAAKRAADEQDKTDYQTVWARNSGAVAAPTASLHFDDALLQALSARGVEFTHVTLHVGAGTFLPVKVEDVATHKMHAEWGRVSAQAAADIAATKAAGGRIIPVGTTALRLIESAARSGQIEPWEGETDIFIYPGFQFHVTDALMTNFHLPKSTLLMLVSALMGQDRVKSIYDHAIADEYRFFSYGDASLLIP

SEQ ID NO: 71678 - protein, 377 aa, unidentified
  source 1..377: note = Ruegeria denitrificans
  REGION 1..377: note = tr|A0A0N7M8M3|A0A0N7M8M3_9RHOB S-adenosylmethionine:tRNA ribosyltransferase-isomerase; OS = Ruegeria denitrificans OX=1715692 GN=queA PE=3 SV=1
MNPKRRLDHHHPTGDQTVAESEKAGYGAAMKLSDFDFHLPEDLIATRPASPRSSARLLVANGDTVSNAHVFDLPDWLQPGDRLVLNDTRVIPARLNGRRHRDSAQGPVSAAIEATLLEPQADGAWAALIKPLKKVRLGEDIRFSDDLSATLERVEDGQAYLRFNLMGEDFDSALEQAGAMPLPPYIAAKRPADEQDKTDYQTIWARNSGAVAAPTASLHFDQVLMQALETRGVTISHVTLHVGAGTFLPVKVEDVTTHKMHAEWGKVSATAAEEIRATKAGGGRVIPVGTTALRLIESASRSGQIEPWEGDTDIFIYPGFEFHVTDALMTNFHLPKSTLLMLVSALMGQGRMRDVYAHAIEQKYRFFSYGDASLLIP

SEQ ID NO: 71679 - protein, 348 aa, Ruegeria faecimaris
  REGION 1..348: note = tr|A0A521APY8|A0A521APY8_9RHOB S-adenosylmethionine:tRNA ribosyltransferase-isomerase; OS = Ruegeria faecimaris OX=686389 GN=queA PE=3 SV=1
MKLSDFDFHLPENLIATRPANPRSSARLLVAEGDAISDAHVFDLPDWLRPGDRLVLNDTRVIPARLTGRRHRDSAQGPVSASIEATLLDPQADGTWAALIKPLKKVKTGEVIRFSDQLSAELDRVADGQAFLRFNLTGQDFDAALEQAGAMPLPPYIAAKRPADAQDKTDYQTIWARNSGAVAAPTASLHFDEALMQALTASGVSVSYVTLHVGAGTFLPVKVEDVTTHKMHAEWGRVSAEAVSEIRETKAIGGRVIPVGTTALRLIESAARSGQIVPWEGDTDIFIYPGFQFYVTDALITNFHLPKSTLLMLVSALMGQDRMQEVYEHAIAQNYRFFSYGDGSLLIP

SEQ ID NO: 71680 - protein, 353 aa, Ruegeria halocynthiae
  REGION 1..353: note = tr|A0A1H2SDZ1|A0A1H2SDZ1_9RHOB S-adenosylmethionine:tRNA ribosyltransferase-isomerase; OS = Ruegeria halocynthiae OX=985054 GN=queA PE=3 SV=1
MYGAAMKLSDFDFHLPEHLIATRPANPRPSARLLVAHGDSIQDHHVFDLPDMLRPGDRLVLNDTRVIPARLSGRRHRESAQGPVSAAIEATLLDPQSDSCWAALIKPLKKVRLGEEIVFSDDLSATLDRVADGQAYLRFNLTGEDFDRALEQAGAMPLPPYIAAKRAADEQDKTDYQTVWARNSGAVAAPTASLHFDDALLNALAERGVEFTHVTLHVGAGTFLPVKVDDVTTHRMHAEWGRVSAQAAAEIAATKAAGGRIIPVGTTALRLIESAARSGRIEPWEGETDIFIYPGFRFHVTDALMTNFHLPKSTLLMLVSALIGQDQVNAIYDHAIAGEYRFFSYGDASLLIP

SEQ ID NO: 71681 - protein, 348 aa, unidentified
  source 1..348: note = Ruegeria intermedia
  REGION 1..348: note = tr|A0A1M4UJX2|A0A1M4UJX2_9RHOB S-adenosylmethionine:tRNA ribosyltransferase-isomerase; OS = Ruegeria intermedia OX=996115 GN=queA PE=3 SV=1
MKLSDFDFDLPEDLIATRPASPRSSARLLVARGDDLTDARVSDLPDWLRPGDRLVLNDTRVIPARLSGRRHRNSAQGPVSAAVEATLLDPQADGSWAALLKPLKKVRVGEEIVFSDDLSAVLDRVVDGQAHLRFNLTGEDFDRALEQAGAMPLPPYIAAKRPADERDKTDYQTVWARHSGAVAAPTASLHFDEALLRALAARGVNFTYVTLHVGAGTFLPVKVEDVTTHKMHAEWGRVSAQAAAEIAATKAAGGRVIPVGTTALRLIESAARGGQIEPWEGETDIFIYPGFEFHVTDALMTNFHLPRSTLLMLVSALMGKDRMLRIYDHAIASRYRFFSYGDASLLIP

SEQ ID NO: 71682 - protein, 348 aa, Ruegeria lacuscaerulensis
  REGION 1..348: note = tr|D0CYK3|D0CYK3_RUELI S-adenosylmethionine:tRNA ribosyltransferase-isomerase OS=Ruegeria lacuscaerulensis (strain DSM 11314 / KCTC 2953 / ITI-1157) OX=644107 GN=que A PE=3 SV=1
MKLSDFDFDLPEDLIATRPANPRTSARLLVAQGDDIADDRVFNLPDWLRPGDRLVLNDTRVIPARLSGRRHRNSAQGPVSAAIEATLLDPQADGTWAALLKPLKKVRVGEEIVFSGDLSAVLERVAEGQAYLRFNLTGEDFDRALEQAGAMPLPPYIAAKRPADERDKTDYQTVWARHSGAVAAPTASLHFDEALLKTLTERGVEFTHVTLHVGAGTFLPVKVEDVTTHKMHAEWGRVSPQAAAEIAATKAAGGRVIPVGTTALRLIESAARGGRIEPWEGETDIFIYPGFTFHVTDALMTNFHLPKSTLLMLVSALMGKDRMLRIYDHAIACRYRFFSYGDASLLIP

SEQ ID NO: 71683 - protein, 349 aa, unidentified
  source 1..349: note = Ruegeria litorea
  REGION 1..349: note = tr|A0A1Y5SN11|A0A1Y5SN11_9RHOB S-adenosylmethionine:tRNA ribosyltransferase-isomerase; OS = Ruegeria litorea R37 OX=1200284 GN=queA PE=3 SV=1
MKLSEFDFDLPDGLIATRPAQPRTSARLLVAEGDAITDSVVRDLTGWLRPGDRLVLNDTRVIPARLSGRRHRDSAQGPVSAKIEVTLLDPAADGCWSALIKPLKKVKPGEVIVFSDDLSAELVGIEDGQGRLRFNLTGDDFDTALAQAGAMPLPPYIAAKRPADERDKTDYQTVWAKNSGAVAAPTASLHFDDSLLSQLHEMGVGFTYVTLHVGAGTFLPVKVEDVTTHKMHSEWGHVSPQAVTEIEATKAAGGRVIPVGTTALRLIESAAQTGRLKPWEGDTDIFIYPGFEFHVTDALMTNFHLPKSTLLMLVSALMGQERMKRVYDHAVQSEYRFFSYGDASLLIPA

SEQ ID NO: 71684 - protein, 349 aa, Ruegeria marina
  REGION 1..349: note = tr|A0A1G6XH19|A0A1G6XH19_9RHOB S-adenosylmethionine:tRNA ribosyltransferase-isomerase; OS = Ruegeria marina OX=639004 GN=queA PE=3 SV=1
MKLSDFDFDLPEGLIATRPARPRSSARLLVAQGDTITDSIVSDLTEWLRPGDRLVLNDTRVIPARLSGSRIRQSAQGEVSARIEVTLLEPQPDGTWAALVKPLRKLLEGETITFSADLSAIVDRIAEGQAYLGFNLAGEDFDAALAEAGAMPLPPYIAAKRAADAQDKTDYQTVWARHSGAVAAPTASLHFDEPLLAALAAHGVSFSHVTLHVGAGTFLPVKVEDVTTHRMHAEWGRVSPEAAAEIAATKAAGGRVIPVGTTALRLIESAARGGAIAPWEGDTDIFIYPGFHFRVADGLMTNFHLPKSTLMMLVSALMGQERIRRIYAHAVDSGYRFFSYGDASLLFPG

SEQ ID NO: 71685 - protein, 348 aa, unidentified
  source 1..348: note = Ruegeria marisrubri
  REGION 1..348: note = tr|A0A0X3TYV1|A0A0X3TYV1_9RHOB S-adenosylmethionine:tRNA ribosyltransferase-isomerase; OS = Ruegeria marisrubri OX=1685379 GN=queA PE=3 SV=1
MKLSDFDFDLPEDLIATRPASPRSSARLLVAQGDAITDATVIDLPDWLRPGDRLVLNDTRVIPARLSGRRHRQSAQGPVSAAIEATLLDPQADGTWAALLKPLKKVKTGEEIVFSDQLSATLERVEDGQAYLRFNLSGEDFDSALEAAGAMPLPPYIAAKRPADERDKTDYQTIWARHSGAVAAPTASLHFDEALLAKLAERGVAFTHVTLHVGAGTFLPVKVEDVTTHKMHAEWGRVSEQAAEEIRATRAAGGRVIPVGTTALRLIESAARGGEIEAWEGETDIFIYPGFEFHVTDALMTNFHLPKSTLLMLVSALMGQDRVRRIYAHAVAERYRFFSYGDASLLIP

SEQ ID NO: 71686 - protein, 349 aa, unidentified
  source 1..349: note = Ruegeria mediterranea
  REGION 1..349: note = tr|A0A2R8CAH6|A0A2R8CAH6_9RHOB S-adenosylmethionine:tRNA ribosyltransferase-isomerase; OS = Ruegeria mediterranea M17 OX=1200281 GN=queA PE=3 SV=1
MKLSDFDFDLPETLIATRPAQPRTSARMLVAEGEVITDAVVRDLTDWLRPGDRLVLNDTRVIPARLSGRRHRDSAQGPVSAKIEVTLLDPAADGSWSALIKPLKKVKPGETIVFSDDLSAELTGVEDGQGRLQFNLSGDDFDAALAQAGAMPLPPYIAAKRPADEQDKTDYQTVWAKNAGAVAAPTASLHFDDDLLQALRDMGVGFTYVTLHVGAGTFLPVKVDDVTTHKMHSEWGRVSEQAVAEIEATKAAGGRVIPVGTTALRLIESAAQTGRLKPWDGDTDIFIYPGFDFHVTDALMTNFHLPKSTLLMLVSALMGQERMAQVYEHAVKSEYRFFSYGDASLLIPA

SEQ ID NO: 71687 - protein, 348 aa, unidentified
  source 1..348: note = Ruegeria meonggei
  REGION 1..348: note = tr|A0A1X6YA27|A0A1X6YA27_9RHOB S-adenosylmethionine:tRNA ribosyltransferase-isomerase; OS = Ruegeria meonggei OX=1446476 GN=queA PE=3 SV=1
MKLSDFDFHLPEDLIATRPASPRSSARLLAAKGDAIADAHVYDLPDWLRSGDRLVLNDTRVIPARLNGRRHRNSAQGPVSAAIEVTLLDPQADGTWAALIKPLKKVKLGEEIRFSDDLSATLDRVEDVQAHLRFNLTGEDFDAALEQAGAMPLPPYIAAKRPADEQDKFDYQTIWARYSGAVAAPTASLHFDAALMQALSARGITFSHVTLHVGAGTFLPVKVEDVTTHKMHAEWGRVSATAAEEIRATKAAGGRVIPVGTTALRLIESAARSGQIEPWEGETDIFIYPGFQFHVTDALMTNFHLPKSTLLMLVSALMGQDRMRDVYAHAIAQKYRFFSYGDASLLIP

SEQ ID NO: 71688 - protein, 349 aa, Ruegeria pomeroyi
  REGION 1..349: note = sp|Q5LRA3|QUEA_RUEPO S-adenosylmethionine:tRNA ribosyltransferase-isomerase OS=Ruegeria pomeroyi (strain ATCC 700808 / DSM 15171 / DSS-3) OX=246200 GN=queA PE=3; SV = 1
MKLSDFDFDLPDDLIATRPAQPRSSARLLVARGDAISDAVVRDLPDWLRPGDRLVLNDTRVIPARLSGTRQRQSAQGPVTARIEITLLEPRADGSWSALAKPLRKLREGETIIFSNDLSADVEAIEDGQALLRFNLTGPDFDAALAQAGAMPLPPYIAAKRAADEQDKTDYQTVWARHSGAVAAPTASLHFDDTLLAALAAHGVTFTHVTLHVGAGTFLPVKVEDVTTHKMHAEWGRVSAEAAAEIAATKAAGGRVIPVGTTALRLIESAARGGQIAPWEGDTDIFIYPGFDFRVADGLMTNFHLPKSTLLMLVSALMGQESIRKIYAHAVENRYRFFSYGDASLLLPG

SEQ ID NO: 71689 - protein, 348 aa, unidentified
  source 1..348: note = Ruegeria profundi
  REGION 1..348: note = tr|A0A0X3U2R7|A0A0X3U2R7_9RHOB S-adenosylmethionine:tRNA ribosyltransferase-isomerase; OS = Ruegeria profundi OX=1685378 GN=queA PE=3 SV=1
MKLSDFDFHLPEDLIATRPASPRSSARMLVASKDTLSDAHVFDLPGLLQPGDRLVLNDTRVIPARLNGRRHRDSAQGPVSAAIEATLLDPQADGTWGALIKPLKKVRLGEDIQFSDDLSATLERAEGGQAYLRFNLTGDDFDAALEQAGAMPLPPYIAAKRPADERDKTDYQTIWARNSGAVAAPTASLHFDEPLMQALAARGVELSHVTLHVGAGTFLPVKVEDVTTHKMHAEWGRVSAEAAEEIRATKEAGGRIIPVGTTALRLIESAGRSGRIEPWEGETDIFIYPGFKFHVADALMTNFHLPKSTLLMLVSALMGQDRMREVYAHAIEQEYRFFSYGDASLLIP

SEQ ID NO: 71690 - protein, 351 aa, Ruegeria sp.
  REGION 1..351: note = tr|A0A4R5VDT6|A0A4R5VDT6_9RHOB S-adenosylmethionine:tRNA ribosyltransferase-isomerase; OS = Ruegeria sp. 318-1 OX=2547397 GN=queA PE=3 SV=1
MKLSDFDFDLPEDLIATRPAVPRSAARLLVSEGDAITDAHVRDLTDWLRPGDRLVLNDTRVIPARLSGERPRPGPQGETRARIEVTLLEPRADGTWAALLKPLKKIRVGEAIEFAAGLSATLEGVAEGQGHLRFNLAGEDFDSALAQAGAMPLPPYIAARRPADERDKTDYQTVWARTSGAVAAPTASLHFDDALLDRLRDMGVSFTYVTLHVGAGTFLPVKVEDVTTHRMHAEWGRVSAAAAAEIAATRAAGGRVIPVGTTALRLIETAARGGQIAAWEGETDIFIYPGFRFHVTDALMTNFHLPKSTLLMLVSALMGQDRIRRIYEHAVEAGYRFFSYGDASLLIPDRR

SEQ ID NO: 71691 - protein, 349 aa, Ruegeria sp.
  REGION 1..349: note = sp|Q1GHP0|QUEA_RUEST S-adenosylmethionine:tRNA ribosyltransferase-isomerase OS=Ruegeria sp. (strain TM1040) OX=292414 GN=queA PE=3 SV=1
MKLGDFDFDLPEELIATRPAVPRSSARLLVAEQDRISDGRVTDLLDWLAPGDRLVLNDTRVIPARLSGQRHRNSAQGPVSARIEVTLLEPQADGSWAGLLKPLKKIKIGETLRFSDALSAELVDVVDGQGRLRFNLAGDDFDAALAEAGAMPLPPYIAAKRPADEQDKTDYQTVWARNSGAVAAPTASLHFDEPLLKALSEKGVTFTYVTLHVGAGTFLPVKVEDVTTHKMHAEWGQVTPEAAAEIAATKAAGNRVIPVGTTALRLIESAARESGAITPWEGETDIFIYPGFEFRVADALMTNFHLPKSTLMMLVSALMGQDRIRAIYAHAVKERYRFFSYGDASLLIP

SEQ ID NO: 71692 - protein, 410 aa, unidentified
  source 1..410: note = Rufibacter immobilis
  REGION 1..410: note = tr|A0A3M9MV62|A0A3M9MV62_9BACT S-adenosylmethionine:tRNA ribosyltransferase-isomerase; OS = Rufibacter immobilis OX=1348778 GN=queA PE=3 SV=1
MPTTNPRQISIADFTYSLPEEKIAQYPLENRDQSKLLLYKNGRISDAQFKELPSLLPPQSLLVFNDTKVVQARLRFQKPTGGVIELFCLEPLDPVREVQQAMQQTYSVIWKCLVGNNKRWREGRLEMPLGPYPSDGSLWAERLAPAEEGFAIHFTWSPGNKTFAEILELAGMLPLPPYMNRDVQESDQERYQTVYASEAGAVAAPTAGLHFTPSVLQQLSAQGHQQGFVTLHVGAGTFKPVKSDLMEYHYMHGEQLSVSRAFLEQLLHHGTKPVIAVGTTSMRTLESLYWLGTGLSLGLLPQEGEELTVPQWFPYDVRTTLSVQEAIEALLQYLDTQRLTHLQATTRILIAPGYQFKICNGLVTNFHQPQSTLLLLVSALIGSTWQKVYKHALANNYRFLSYGDSSLLLP

SEQ ID NO: 71693 - protein, 348 aa, unidentified
  source 1..348: note = Rufibacter immobilis
  REGION 1..348: note = tr|A0A3M9MYF1|A0A3M9MYF1_9BACT S-adenosylmethionine:tRNA ribosyltransferase-isomerase; OS = Rufibacter immobilis OX=1348778 GN=queA PE=3 SV=1
MKLSEFKFDLPNELMATHPAPNRDEARMMVIHRDSGKIEHKVFKDIISYFDDGDVMVTNNTKVFPARLYGNKEKTGAKIEVFLLRELDKRIHLWDVLVDPARKIRVGNKLYFGDSDLVAEVIDNTTSRGRTIKFLYDGPDEEFYKVVHSLGETPLPKYIKREPEPEDEERYQTVYAEVTGAVAAPTAGLHFTREVLKRLELKGVDVAPITLHVGLGTFRQVDVEDLTKHKMDSEQFFVTEETTKIVNKALDAKKRVCAIGTTTMRALESSVSANSRLKPNEGWTDKFIFPPYDFKIANSLITNFHMPESTLLMMAAAFGGYELIVEAYQTAIKEKYKFFSYGDVMLIL

SEQ ID NO: 71694 - protein, 410 aa, unidentified
  source 1..410: note = Rufibacter sp.
  REGION 1..410: note = tr|A0A0H4VQC0|A0A0H4VQC0_9BACT S-adenosylmethionine:tRNA ribosyltransferase-isomerase; OS = Rufibacter sp. DG31D OX=1379910 GN=queA PE=3 SV=1
MSTYHPRQIAISDYNYSLPEEQIAQFPLEERDQSKLLLYRNGRISDARFTDLPSALPPQSLLVFNDTKVVQARLRFQKATGGTIELFCLEPLEPVREVQQAMQQTFSVVWKCLVGNNKRWREGRLEMPLGPYPEDGALWAERLAPAEEGFAIHFTWSPGNQTFAEVLERAGLLPLPPYMNRDAEESDQERYQTIYAAEAGAVAAPTAGLHFTPAVMQEIEARGHEQAFVTLHVGAGTFKPVKSDVMEHHYMHGEQLSVSREFIERLLHHGNRPVIAVGTTSMRTLESLYWLGAGIYLGLLPGEEEELSLPQWFPYDVRTTISVQEALEALLYYLNSHKLTHLQANTHILIAPGYQFKICSGLVTNFHQPQSTLLLLVSALIGPSWQKVYRHALANNYRFLSYGDSSLLLP

SEQ ID NO: 71695 - protein, 410 aa, unidentified
  source 1..410: note = Rufibacter sp.
  REGION 1..410: note = tr|A0A127B0S0|A0A127B0S0_9BACT S-adenosylmethionine:tRNA ribosyltransferase-isomerase; OS = Rufibacter sp. DG15C OX=1379909 GN=queA PE=3 SV=1
MSASHPRQISIADYTYDLPEERIAQFPLEVRDQSRLLVYQQGRMADAHFTDLANALPPHSLLVFNNTKVVQARLRFQKVTGGIIELFCLEPLEPIREVQQAMQQTQSVVWKCLVGNNKRWREGRLEMPLGPNPEDGILFAERLAPAEEGYAIRFSWTPAERTFAEVLEIAGLLPLPPYMNRDAAPEDQNRYQTIYADAAGAVAAPTAGLHFTPRVLEQLNQKKHQAAFVTLHVGAGTFKPVKSEVMEHHYMHPEQLSVSRETVEQLLRHLGQPIIPVGTTSMRTLESLYWLGVGLSMGSLPTEDDQLLVPQWLPYDQRTSLSVQEALESILTYLNQQGLSHLQATTRILIAPGYQFKLCNGIITNFHQPNSTLLLLVAAMIGPSWQKVYRHALANNYRFLSYGDSSLLLP

SEQ ID NO: 71696 - protein, 410 aa, unidentified
  source 1..410: note = Rufibacter tibetensis
  REGION 1..410: note = tr|A0A0P0CP09|A0A0P0CP09_9BACT S-adenosylmethionine:tRNA ribosyltransferase-isomerase; OS = Rufibacter tibetensis OX=512763 GN=queA PE=3 SV=1
MPNTHPSQISISDYTYTLPEEKIAQFPLENRDQSKLLLYKNGRITDGHFKDLPTALPANSLLVFNDTKVVQARLRFQKPTGGVIELFCLEPLEPMREVQQAMQQTYSVIWKCLVGNNKRWREGRLEMPLGPYPADGSLWAERLAPAEEGFAIHFTWSPGHKTFAEILELAGTLPLPPYMNRDAQESDQDRYQTVYASEAGAVAAPTAGLHFTPAVLEQISAKGHQKAFVTLHVGAGTFKPVKAELMEYHYMHGEQLSVSRAFLEQLLYHKSKPVIAVGTTSMRTLESLYWLGAGMSLGLLPVEGEDLFVPQWFPYDVRTTISVQEALEALLYHLDSHKLTHLHATTRILIAPGYQFKICTGLITNFHQPQSTLLLLVSALIGPSWQKVYKHALANNYRFLSYGDSSLLLP

SEQ ID NO: 71697 - protein, 348 aa, unidentified
  source 1..348: note = Rufibacter tibetensis
  REGION 1..348: note = tr|A0A0P0CQM3|A0A0P0CQM3_9BACT S-adenosylmethionine:tRNA ribosyltransferase-isomerase; OS = Rufibacter tibetensis OX=512763 GN=queA PE=3 SV=1
MKLSEFKFDLPNDLMASHPAPNRDEARMMVIHRDSGKIEHKVFKDIIGYFDDGDVMVTNNTKVFPARLYGNKEKTGAKIEVFLLRELDKRIHLWDVLVDPARKIRVGNKLYFGDSDLVAEVIDNTTSRGRTIKFLYDGPDEEFYKVVHSLGETPLPKYIKREPEPEDEERYQTVYAEITGAVAAPTAGLHFTREVLKRLELKGVDVAPVTLHVGLGTFRQVDVEDLTKHKMDSEQFFVNETTAQIVNKALDSKKRVCAVGTTTMRALESSVSANSRLKPNEGWTDKFVFPPYDFKIANSLITNFHMPESTLLMMAAAFGGYELIMEAYNTAIKEKYKFFSYGDVMLIL

SEQ ID NO: 71698 - protein, 349 aa, Rugamonas rubra
  REGION 1..349: note = tr|A0A1I4PWB3|A0A1I4PWB3_9GAMM S-adenosylmethionine:tRNA ribosyltransferase-isomerase; OS = Rugamonas rubra OX=758825 GN=queA PE=3 SV=1
MYSLSDFDFNLPPERIAQFPLPDRSASRLLHLDGDQLVDRQFADIVDQLQAGDLLVMNDTRVLKARFFGVKESGGKIEALVERVLDSRTVLAQVRASKSPPPGCKIRLADAFDVTVGARAGEFFTLHFDADVFELIEAHGRLPLPPYIEHTADSFDETRYQTVFNKVPGAVAAPTAGLHFDQALLAKLAAKGVQFAYVTLHVGAGTFQPVRAEVLAEHKMHTEWYTLPQATVDAVRAARAAGRDVVAVGTTSLRALESASQSGELVAGSADTALFITPGYLFKTVTRLITNFHLPKSTLLMLVSAFAGYAQIRAAYAHAIANEYRFFSYGDAMLLTTQARAPQKNSSNN

SEQ ID NO: 71699 - protein, 343 aa, unidentified
  source 1..343: note = Rugosibacter aromaticivorans
  REGION 1..343: note = tr|A0A0C5JNL5|A0A0C5JNL5_9RHOO S-adenosylmethionine:tRNA ribosyltransferase-isomerase; OS = Rugosibacter aromaticivorans OX=1565605 GN=queA PE=3; SV = 1
MNALTLADFDYALPQRLIAQAPLSQRSASRLLNAGGKSLLDQRITDLPSLLKSGDLLVLNDSRVMHARLQGAKATGGQVEVLVERIVSGNEVLAQVRASKSLKTGSRLILEGLLDVEVLGREGEFYHLRLPGDALETIEAHGRLPLPPYIARAAVAPDETRYQTVYARETGSVAAPTAGLHFDEDLLAKVRAHGVAIVYVTLHVGAGTFQPVRTQTLAEHHMHTERYIISSATAEAIAATKARGGRVIAVGTTSLRALESAATDNGVKVGAGETAIFITPGFEFQVVDALLTNFHLPKSTLLMLVSAFAGVKEIRTAYRHAIEQGYRFFSYGDAMWLTRKTSP

SEQ ID NO: 71700 - protein, 343 aa, unidentified; identical to SEQ ID NO: 71699
  source 1..343: note = Rugosibacter sp.
  REGION 1..343: note = tr|A0A522Y4X9|A0A522Y4X9_9RHOO S-adenosylmethionine:tRNA ribosyltransferase-isomerase; OS = Rugosibacter sp. OX=1914450 GN=queA PE=3 SV=1

SEQ ID NO: 71701 - protein, 343 aa, unidentified
  source 1..343: note = Rugosibacter sp.
  REGION 1..343: note = tr|A0A521KC72|A0A521KC72_9RHOO S-adenosylmethionine:tRNA ribosyltransferase-isomerase; OS = Rugosibacter sp. OX=1914450 GN=queA PE=3 SV=1
MNPLTLADFDYALPQRLIAQAPLSQRSASRLLNAGGKTLLDQRISDLPSVLQPGDLLVMNDSRVMHARLQGIKATGGQVEVLVERIVSGNEVLAQVRASKSLKTGSRLILEGLLDVEVLGREGEFYHLRLPGDALETIEAHGRLPLPPYIARAVIAPDETRYQTVYARETGSVAAPTAGLHFDEDLLAKVRAQGVTIAYVTLHVGAGTFQPVRTQTLAEHHMHTERYAISPATAEAIAATKARGGRVIAVGTTSLRALESAATERDVKVGAGETAIFITPGFEFQVVDALLTNFHLPKSTLLMLVSAFAGVKEIRAAYRHAIEQGYRFFSYGDAMWLTRKPVP

SEQ ID NO: 71702 - protein, 342 aa, unidentified
  source 1..342: note = Ruminiclostridium cellobioparum
  REGION 1..342: note = tr|S0FTM6|S0FTM6_RUMCE S-adenosylmethionine:tRNA ribosyltransferase-isomerase OS=Ruminiclostridium cellobioparum subsp. termitidis CT1112 OX=1195236 GN=queA; PE = 3 SV= 1
MNLQEFDYYLPEELIAQHPLERRDMSRLMVLDRESGEIDHKLFKDITNYFAEGDCLVLNNTRVIPARLLGQKEGSGGKIEFVLLKRIAGDTWEVILRPGKKAKPGARFVFGSGELKAEILEVLEEGNRLVRFIYEGVFEEILDKVGIMPLPPYITEKLEDPERYQTVYAKYNGSAAAPTAGLHFTRELLESLRNKGVQIAYVMLHVGLGTFRPVKVDDITQHKMHSEYYSIGQEACDMINSAKKAGKKVVAVGTTSCRVLETVGGNNNGEMKACDGWTDIFIYPGYRFKIVDRLITNFHLPESTLIMLVSSLAGRENVLGAYAAAVKERYRFFSFGDAMFIK

SEQ ID NO: 71703 - protein, 340 aa, unidentified
  source 1..340: note = Ruminiclostridium cellulolyticum
  REGION 1..340: note = tr|B8I6L9|B8I6L9_RUMCH S-adenosylmethionine:tRNA ribosyltransferase-isomerase OS=Ruminiclostridium cellulolyticum (strain ATCC 35319 / DSM 5812 / JCM 6584 / H10) OX= 394503 GN=queA PE=3 SV=1
MNLHDFDYYLPEELIAQHPLEKRDMSRLMVLDKQTGEIEHKLFKDLFNYLDEGDCLVLNNTRVIPARLLGEKEGTGGKIEFVLLKRVEGDNWEVILRPGKKAKPGSKFVFGNGELKAEILEVLDEGNRLVRFIYDGVFEEILDRVGVMPLPPYITEKLDNPERYQTVYAKVNGSAAAPTAGLHFTKELLDSLVHKGVKIAYVMLHVGLGTFRPVKVDDITQHKMHSEYYSISQETCDIINVTREKGKKVVAVGTTSCRVLETIGKNGKIAPCDGWTDIFIYPGYEFKVVDRLITNFHLPESTLIMLVSSLAGRDNVLHAYSVAVEEKYRFFSFGDAMFIK

SEQ ID NO: 71704 - protein, 342 aa, unidentified
  source 1..342: note = Ruminiclostridium hungatei
  REGION 1..342: note = tr|A0A1V4SGZ9|A0A1V4SGZ9_RUMHU S-adenosylmethionine:tRNA ribosyltransferase-isomerase; OS = Ruminiclostridium hungatei OX=48256 GN=queA PE=3 SV=1
MDLKEFDYYLPEELIAQHPLQKRDLSRLLVLDRETGEIEHKSFMDIVNYLNEGDCLVLNNTRVIPARLLGEKEGSGGKIEFVLLKRIDGDTWEVILRPGKKAKPGARFVFGNGELKAEILQVLEEGNRLVRFIYEGVFEEILDKVGIMPLPPYITQKLEDPERYQTVYAKYNGSAAAPTAGLHFTRELLDTLEKKGVRLAYVMLHVGLGTFRPVKVDDITQHKMHSEFYSIDKEACDTINAAKASGKKVIAVGTTSCRVLETVGGGNNGILRAGEGWTDIFIYPGYEFKIVDRLITNFHLPESTLIMLVSSLAGREKVLNAYSVAVREKYRFFSFGDAMLIK

SEQ ID NO: 71705 - protein, 340 aa, unidentified
  source 1..340: note = Ruminiclostridium papyrosolvens
  REGION 1..340: note = tr|F1THA6|F1THA6_9FIRM S-adenosylmethionine:tRNA ribosyltransferase-isomerase OS=Ruminiclostridium papyrosolvens DSM 2782 OX=588581 GN=queA PE=3 SV=1
MDLHDFDYYLPEELIAQHPMEKRDMSRLMVLNKETGEIEHKLFTDIVNYLDEGDCLVLNNTRVIPARLLGEKEGTGGKIEFVLLKRVEGDKWEVILRPGKKAKPGSRFVFGNGELKAEILEVLDEGNRLVRFIYDGVFEEILDRVGIMPLPPYITEKLENPERYQTVYAKVNGSAAAPTAGLHFTKELLDSLTRKGVKIAYVMLHVGLGTFRPVKVDDITQHKMHSEYYSISQETCDIINDTRQKGKKVVAVGTTSCRVLETVGKSGRIAPCDGWTDIFIYPGYRFKVVDRLITNFHLPESTLIMLVSSLAGRDNVMHAYNVAVEEKYRFFSFGDAMFIK

SEQ ID NO: 71706 - protein, 340 aa, unidentified
  source 1..340: note = Ruminiclostridium papyrosolvens
  REGION 1..340: note = tr|U4R755|U4R755_9FIRM S-adenosylmethionine:tRNA ribosyltransferase-isomerase OS=Ruminiclostridium papyrosolvens C7 OX=1330534 GN=queA PE=3 SV=1
MNLHDFDYYLPEELIAQHPMEKRDMSRLMVLDKETGEIKHKLFKDIVNYLDEGDCLVLNNTRVIPARLLGEKEGTGGKIEFVLLKRVEGDTWEVILRPGKKAKPGSRFVFGNGELKAEILEVLEEGNRLVRFIYDGVFEEILDRVGIMPLPPYITEKLENPERYQTVYAKVNGSAAAPTAGLHFTKELLDSLEQKGVKIAYVMLHVGLGTFRPVKVDDITQHKMHSEYYSISQETCDIINDTRQKGKKVVAVGTTSCRVLETLGKSGSIAPCDGWTDIFIYPGYEFKVVNRLITNFHLPESTLIMLVSSLAGRDNVLHAYNVAVEEKYRFFSFGDAMFIK

SEQ ID NO: 71707 - protein, 341 aa, unidentified
  source 1..341: note = Ruminiclostridium sp.
  REGION 1..341: note = tr|A0A357AGL2|A0A357AGL2_9FIRM S-adenosylmethionine:tRNA ribosyltransferase-isomerase; OS = Ruminiclostridium sp. OX=2053608 GN=queA PE=3 SV=1
MKLHDFWYDLPERLIAQNPLEKRDMSRLLVLDRKKDVLEHKHFSDLPGYLEPGDCLVINNTRVLPARLLGQKEGSGGKIEFVLLKRIEADIWEVILKPGRKAKPGSRFIFGDGLLKAEILEIAEEGNRIVKFFYDGVFEEILDKVGVMPLPPYIHATLQDKERYQTVYSKINGSAAAPTAGLHFTPELFDIIREKGVNIAELTLHVGLGTFRPVKTENILEHHMHKEYYTISPETCALINGTREQGKRVIAVGTTSVRVLETQTREDGRIYPGEGETDIFIYPGYSFRMVDALITNFHLPESTLIMLVSAFAGKDRILNAYQEAIALEYRFFSFGDAMLIL

SEQ ID NO: 71708 - protein, 340 aa, unidentified
  source 1..340: note = Ruminiclostridium sp.
  REGION 1..340: note = tr|A0A4U7JJY5|A0A4U7JJY5_9FIRM S-adenosylmethionine:tRNA ribosyltransferase-isomerase; OS = Ruminiclostridium sp. MA18 OX=2488810 GN=queA PE=3 SV=1
MDLKEFDYYLPEELIAQHPMEKRDMSRLMVLDKASGQIEHRIFKDIVDYFREGDCLVLNNTRVIPARLLGEKEGSGGKIEFVLLKCIKENDWEVILRPGRKAKPGARFVFGNGELKAEILEVLEEGNRLVRFEYEGVFQEVLDRVGIMPLPPYITERLENPERYQTVYAKYNGSAAAPTAGLHFTEELLNTLQNKGVKIAFVMLHVGLGTFRPVKVEDITQHKMHSEYYSISQETCDIINAAKKAGNRVTAVGTTSSRVLETVGANGELHACEGWTDIFIYPGYKFKIVDRLITNFHLPESTLIMLVSALAGRENILKAYAEAVNEKYRFFSFGDAMFIK

SEQ ID NO: 71709 - protein, 340 aa, unidentified
  source 1..340: note = Ruminiclostridium sufflavum
  REGION 1..340: note = tr|A0A318XJ22|A0A318XJ22_9FIRM S-adenosylmethionine:tRNA ribosyltransferase-isomerase; OS = Ruminiclostridium sufflavum DSM 19573 OX=1121337; GN = queA PE=3 SV=1
MDLKEFDYYLPEELIAQHPAEKRDMSRLLVLDKKTGQTEHKIFKDIVDYFNAGDCIVLNNTRVIPARLLGEKEGSGGKIEFVLLKCVKEDDWEVILRPGRKAKPGARFVFGNGELKAEIIEILNEGNRLVRFEYEGVFQEILDRVGVMPLPPYITEKPADPGRYQTVYAKHNGSAAAPTAGLHFTKELLEVLESKGIKIVYVMLHVGLGTFRPVKAEDISQHKMHSEYYSISQAACDTINSVRKAGNKVVAVGTTSSRVLETVGANGELHASEGWTDIFIYPGYKFKIVDRLITNFHLPESTLIMLVSALAGRESILNAYSEAVKERYSFFSFGDAMFIK

SEQ ID NO: 71710 - protein, 342 aa, unidentified
  source 1..342: note = Ruminococcaceae bacterium
  REGION 1..342: note = tr|A0A3D0XSC0|A0A3D0XSC0_9FIRM S-adenosylmethionine:tRNA ribosyltransferase-isomerase; OS = Ruminococcaceae bacterium OX=1898205 GN=queA PE=3 SV=1
MKKSDFYYDLPPERIAQEPLAQRDQSRLMTLERTTGKIGHQRFYELPDLLNPGDCLILNNSRVMPARLYGNKEKTGGRIEFLLLNEKKTDEWEVALKPGRIAKEGARFVFGDGSLKAEILQIIEDGNRIVRFEHNGDFFKLIEKLGEMPLPHYITHKLKDKERYQTVYSKKSGSAAAPTAGLHFTPELLEKLQAKGIKIGYVTLHVGMGTFRPVKTESIEDHIMHNEHYLLPKETAELIRETKKTGGRVIGVGTTSCRTLETVAHEHNGEICAAEGWTGIFIYPGYHFHVLDALITNFHLPESTLIMLVSAFAGREHVLNAYKEAIKENYRFYSFGDAMLLY

SEQ ID NO: 71711 - protein, 341 aa, unidentified
  source 1..341: note = Ruminococcaceae bacterium
  REGION 1..341: note = tr|A0A1G4V421|A0A1G4V421_9FIRM S-adenosylmethionine:tRNA ribosyltransferase-isomerase; OS = Ruminococcaceae bacterium P7 OX=1200751 GN=queA PE=3; SV = 1
MKTSDFYYDLPKELIAQTPVEPRDSSRLLVLDRSTGEVTHRHFYDIIDYLNEGDLIVANDSRVLPARIYGVKDETGARVEFLLLKQISGNRWETLCKPGKKAREGARFSFGDGILRAEVVEVNDDGNRVVDFDCDENFFATLDKIGQMPLPPYITEELKDKERYQTVYSHELGSAAAPTAGLHFTDELMERIRQKGVNIAYVTLHVGLGTFRPVKVDDVTKHKMHSEHYEIPQETADLIRQTKENGGRVIAIGTTSCRTLESVATEYGEIRACDGFTDIFIYPGYQFKVLDGLVTNFHLPESTLIMLVSAFAGYDNVMNAYKIAVEERYRFFSFGDAMMIS

SEQ ID NO: 71712 - protein, 355 aa, Ruminococcus albus
  REGION 1..355: note = tr|E9S7J3|E9S7J3_RUMAL S-adenosylmethionine:tRNA ribosyltransferase-isomerase OS=Ruminococcus albus 8; OX = 246199 GN=queA PE=3 SV=1
MLDINDMKKSDFYYDLPQELIAQTPIEPRNASRMLCLDRYTGEVGHDHFYNLCDHLRKGDLLVLNDSRVLPARIYGETEDTHSFIEFLLVEQRGNLEWEILCRPGKKARVGRRFVFGGGLLRAEITEVLEDGNRIARFECDDSTNLFAALDEIGQMPLPPYITEKLKDKERYQTVYSNEIGSSAAPTAGLHFTKEQLADIEAMGVNIAYVTLHVGLGTFRPVKEDRVLDHKMHREHYELPARTAELINKTKSEGGRVIAVGTTSCRTLESVAALYGDIRPCDGFTEIFIYPGFEFKVLDGLITNFHLPESTLIMLVSAFAGYDNTMNAYKIAVEEKYRFFSFGDSMFIAPDANKK

SEQ ID NO: 71713 - protein, 354 aa, Ruminococcus albus
  REGION 1..354: note = tr|A0A1H7L8Y4|A0A1H7L8Y4_RUMAL S-adenosylmethionine:tRNA ribosyltransferase-isomerase; OS = Ruminococcus albus OX=1264 GN=queA PE=3 SV=1
MLDLNNMKKSDFFYELPQELIAQTPIEPRNASRMLCLDRTTGEVGHDHFYNLCNHLKKGDLLVLNDSRVLPARIYGETEDTHSFIEFLLVEQRGNLEWEILCRPGKKARVGRRFVFGNGLLTAEITEVLEDGNRIAKFECSDSTNFFAALDEIGQMPLPPYITEKLKDKERYQTVYSNEIGSSAAPTAGLHFTKEQLADIEKMGVNIAYVTLHVGLGTFRPVKEDKVLDHKMHREHYELPQRTADLINKTKAEGGRVIAVGTTSCRTLESVAAFHGEIKPCDGFTEIFIYPGFEFKVLDGLITNFHLPESTLIMLVSAFAGYENTMNAYKIAVEEKYRFFSFGDSMFIANGANS

SEQ ID NO: 71714 - protein, 350 aa, unidentified
  source 1..350: note = Ruminococcus bicirculans
  REGION 1..350: note = tr|W0U883|W0U883_9FIRM S-adenosylmethionine:tRNA ribosyltransferase-isomerase OS=Ruminococcus bicirculans; OX = 1160721 GN=queA PE=3 SV=1
MLDINNMKRSDFYYDLPQELIAQTPVEPRNASRMMKINRQTGEVVHDHFYNLCNYLKKGDLLVLNDSKVLPARIYGEREDTGSFIEFLLVEQKENMVWEILCRPGKKAKIGTRFVFGGGKLKAEIIDVLEDGNRIARFECEENFFATLDEIGQMPLPPYITEKLKDKDRYQTVYAHELGSSAAPTAGLHFTEQQLEDLKAMGVNIAYVTLHVGLGTFRPVKEDKVLDHKMHREHYELSRETADMINETKKNGGRVIAVGTTSCRTLESVAAFNDGKIVPCDGYTEIFIYPGFEFKVLDGLVTNFHLPESTLIMLVSAFMGYENTMNAYKIAVEEKYRFFSFGDCMLIISE

SEQ ID NO: 71715 - protein, 341 aa, Ruminococcus bromii
  REGION 1..341: note = tr|A0A1G5B1M6|A0A1G5B1M6_9FIRM S-adenosylmethionine:tRNA ribosyltransferase-isomerase; OS = Ruminococcus bromii OX=40518 GN=queA PE=3 SV=1
MKTSDFYYDLPKELIAQTPVEPRDSSRLLLLDRKSGEISHKHFRDVIDSLNEGDLLVCNDSRVLPARIYGTKAETGARVEFLLLKQISGNKWETLCKPGKKAREGAEFSFGDGILKGKVLEVKDDGNRVVDFDCDENFFATLDKIGQMPLPPYITEELKDKERYQTVYSHELGSAAAPTAGLHFTTELMDKIKAKGVNIAYVTLHVGLGTFRPVKVDDVTKHKMHSEHYEIPKETAELINKTKKNGGRVIAVGTTSCRTLESVATQYGEIKACDGFTDIFIYPGYKFKVLDGLITNFHLPESTLIMLVSAFAGYDKIMNAYKVAVQEKYRFFSFGDAMFIY

SEQ ID NO: 71716 - protein, 341 aa, Ruminococcus bromii
  REGION 1..341: note = tr|A0A413QBV8|A0A413QBV8_9FIRM S-adenosylmethionine:tRNA ribosyltransferase-isomerase; OS = Ruminococcus bromii OX=40518 GN=queA PE=3 SV=1
MKTSDFYYDLPKELIAQTPLEPRDSSRLLVLDREKQTLEHKHFYDIIDYLNEGDLLVANDSRVLPARIYGIKDETGAKVEFLLLKQIANNRWETLCKPGKKAKVGTKFSFGNGILRATVVDVKDDGNRIVDFDCEENFFTTLDKIGQMPLPPYITAELKDKERYQTVYSHELGSAAAPTAGLHFTTELMDRIKAKGVKIAYVTLHVGLGTFRPVKVDDVTKHKMHSEHYEVPEETAKLINETKKNGGRVIAVGTTSCRTLESVAAMYGEIKPCEGFTDIFIYPGFEFKVLDGLITNFHLPESTLIMLVSAFAGYDFIMNAYKEAVKEKYRFFSFGDAMFIS

SEQ ID NO: 71717 - protein, 347 aa, Ruminococcus callidus
  REGION 1..347: note = tr|U2KX70|U2KX70_9FIRM S-adenosylmethionine:tRNA ribosyltransferase-isomerase OS=Ruminococcus callidus ATCC 27760 OX=411473 GN=queA PE=3 SV=1
MKKSDFYYDLPDELIAQTPVEPRDHSRLMQIDRNTGEIQHKHFYDLLEILQPGDLLVMNDSRVLPARLYGEKVDNGTFIEFLLLEQKGDKLWEIICRPGKKAKVGVKFSFGGGRLIGEVVEVKPDGNRIVQFTCEGNFYTALEEVGQMPLPPYIHEKLKDKERYQTVYSKELGSAAAPTAGLHFTKDMLKKLKEKGVNEAYVTLHVGLGTFRPVKEDDVLQHQMHSEHYHLPQETVDMIRETKANGGRVIAVGTTSCRTLEAVATAHNGELVAEDGYTDIFIYPGYSFKVLDGLITNFHLPESTLIMLISAFLGYEKTMHAYEIAVQEKYRFFSFGDAMCILPEKSE

SEQ ID NO: 71718 - protein, 341 aa, Ruminococcus champanellensis
  REGION 1..341: note = tr|D4LEM5|D4LEM5_RUMC1 S-adenosylmethionine:tRNA ribosyltransferase-isomerase OS=Ruminococcus champanellensis (strain DSM 18848 / JCM 17042 / KCTC 15320 / 18P13) OX= 213810 GN=queA PE=3 SV=1
MKKSDFYYDLPEELIAQTPIEPRNQSRLMVIDRETGAVSHQHFYNLCDMLQEGDLLVLNDSRVIPARLYGEKIDNGTFIEFLLLEQKGDKLWELICRPGKKAKVGTRFSFGGGRLIGEVVEVKEDGNRLVQFTCEGNFFTALEDVGQMPLPPYIKAKLQDKERYQTVYSRELGSAAAPTAGLHFTKEMLQQLQDKGVRLAYVTLHVGLGTFRPVKEDDVLQHKMHSEHYAMSQETADLINQTKAAGGRVICVGTTSCRTVESIATFFGKIQACEGYTDIFIYPGYQFKVMDGLITNFHLPESTLIMLVSAFLGYDNTMRAYKTAVEEKYRFFSFGDACFIR

SEQ ID NO: 71719 - protein, 343 aa, Ruminococcus flavefaciens
  REGION 1..343: note = tr|A0A1K1PM85|A0A1K1PM85_RUMFL S-adenosylmethionine:tRNA ribosyltransferase-isomerase; OS = Ruminococcus flavefaciens OX=1265 GN=queA PE=3 SV=1
MELLKSDFYYELPEELIAQTPIEPRNASRMMCVDRKTGAITHDHFYNLCEHLKEGDLLVMNDSRVIPARLYGEKIGNQTFIEFLLLEQKGDKRWEIICRPGKKAKVGTRFSFGGGRLVAEVVEVKDDGNRIVQFECEGNFFTALEDVGQMPLPPYIKEKLENRERYQTVYSKELGSAAAPTAGLHFTPEMLDDLRARGIKTAFVTLHVGLGTFRPVKEDNVLDHKMHSEHYYLPKETADLINETKKNGGRVIAVGTTTCRTLESVATFYGDISEHEGYTDIFIYPSYEFKCIDGLITNFHLPESTLIMLVSAFMGYDNTMNAYKTAVAERYRFFSFGDSMCIL

SEQ ID NO: 71720 - protein, 343 aa, Ruminococcus flavefaciens
  REGION 1..343: note = tr|W7UUQ2|W7UUQ2_RUMFL S-adenosylmethionine:tRNA ribosyltransferase-isomerase OS=Ruminococcus flavefaciens 007c OX=1341157 GN=queA PE=3 SV=1
MELLKSDFYYDLPEELIAQTPIEPRNASRMMCVDRRTGAVTHDHFYNLCDHLKEGDLLVMNDSRVIPARLYGEKIGNGTFIEFLLLEQKGDKLWEIICRPGKKAKVGTRFSFGGGRLTAEVVEVKDDGNRIVQFQCEGNFFTALEDVGQMPLPPYIKEKLENRERYQTVYSRELGSAAAPTAGLHFTPEMLDDLRSCGIKTAFVTLHVGLGTFRPVKEDNVLDHKMHSEHYFLPQETADLINETRKNGGRVIAVGTTTCRTLESVATFYNEISEHDGYTDIFIYPSYEFKCIDGLITNFHLPESTLIMLVSAFMGYENTMNAYKTAVQERYRFFSFGDSMCIL

SEQ ID NO: 71721 - protein, 341 aa, Ruminococcus gnavus
  REGION 1..341: note = tr|A0A2N5NXP6|A0A2N5NXP6_RUMGN S-adenosylmethionine:tRNA ribosyltransferase-isomerase; OS = Ruminococcus gnavus OX=33038 GN=queA PE=3 SV=1
MKTSDFYYDLPEELIAQDPLEDRSGSRLLFLDKETGKTEHHIFRDVIDYLNPGDCLVINDTKVIPARLIGEKEGTGAKIEVLLLKRGENDVWETLVKPGKKAKPGTRISFGEGLLVGEVVDVVEEGNRLIHFEYKGIFEEILDQLGQMPLPPYITHQLEDRSRYNTVYAAHEGSAAAPTAGLHFTPKLLKEIQEKGVDIARVTLHVGLGTFRPVKVEDVTEHHMHSEFYMVDAEAAEKINKAKEHGGRVICVGTTSCRTIESAADENGRLKPCSGWTEIFIYPGYQFKILDGLITNFHLPESTLIMLVSALAGKEHVMAAYEEAVKERYRFFSFGDAMMIL

SEQ ID NO: 71722 - protein, 341 aa, Ruminococcus gnavus
  REGION 1..341: note = tr|A7B6Y9|A7B6Y9_RUMGV S-adenosylmethionine:tRNA ribosyltransferase-isomerase OS=Ruminococcus gnavus (strain ATCC 29149 / VPI C7-9) OX=411470 GN=queA PE=3 SV=1
MKTSDFYYDLPEELIAQDPLEDRSGSRLLFLDKETGKTEHHIFRDVIDYLNPGDCLVINDTKVIPARLIGEKEGTGAKIEVLLLKRGENDVWETLVKPGKKAKPGTRISFGEGLLVGEVVDVVEEGNRLIHFEYKGIFEEILDQLGQMPLPPYITHQLEDRSRYNTVYAAHEGSAAAPTAGLHFTPKLLKEIQEKGVDIARVTLHVGLGTFRPVKVEDVTEHHMHSEFYMVDAEAAEKINKAKEHGGRVICVGTTSCRTIESAADENGRLKPCSGWTEIFIYPGYQFKILDGLITNFHLPESTLIMLVSALAGKEHVMAAYEEAVKERYRFFSFGDAMIIL

SEQ ID NO: 71723 - protein, 341 aa, Ruminococcus lactaris
  REGION 1..341: note = tr|A0A3E4LV77|A0A3E4LV77_9FIRM S-adenosylmethionine:tRNA ribosyltransferase-isomerase; OS = Ruminococcus lactaris OX=46228 GN=queA PE=3 SV=1
MKTSDFYYDLPEELIAQDPLEDRSSSRLLVLDKKTGKTEHHVFREITDYLNSGDCLVLNDTKVIPARLIGVKEETGAKIEVLLLKRGADDVWETLVKPGKKARPGARISFGDGLLVGEVMEVVEEGNRLIHFEYDGIFEEILDQLGQMPLPPYITHQLQDKDRYNTVYAAHSGSAAAPTAGLHFTPELLKEIEEKGVDIARVTLHVGLGTFRPVKVDDVENHHMHSEFYMIDEEAAEKINRAKENGRKVICVGTTSCRTIESAADENGKLKACSGWTEIFIYPGYQFKVLDELITNFHLPESTLVMLVSALAGREHVLAAYEEAVKERYRFFSFGDAMMIL

SEQ ID NO: 71724 - protein, 342 aa, Ruminococcus lactaris
  REGION 1..342: note = tr|V8C3V6|V8C3V6_9FIRM S-adenosylmethionine:tRNA ribosyltransferase-isomerase OS=Ruminococcus lactaris CC59_002D OX=1073376 GN=queA PE=3 SV=1
MKTSDFYYDLPEELIAQDPLEDRSSSRLLVLDKKTGKTEHHVFREITDYLNPGDCLVLNDTKVIPARLIGVKEETGAKIEVLLLKRGADDVWETLVKPGKKARPGARISFGDGLLVGEVMEVVEEGNRLIHFEYDGIFEEILDQLGQMPLPPYITHQLQDKDRYNTVYAAHSGSAAAPTAGLHFTPELLKEIEEKGVDIARVTLHVGLGTFRPVKVDDVENHHMHSEFYMIDEEAAEKINRAKENGRKVICVGTTSCRTIESAADENGKLKACSGWTEIFIYPGYQFKVLDELITNFHLPESTLVMLVSALAGREHVLAAYEEAVKERYRFFSFGDAMFIKD

SEQ ID NO: 71725 - protein, 341 aa, Ruminococcus obeum; identical to SEQ ID NO: 64239
  REGION 1..341: note = tr|R7DCA2|R7DCA2_9FIRM S-adenosylmethionine:tRNA ribosyltransferase-isomerase OS=Ruminococcus obeum CAG:39; OX = 1263107 GN=queA PE=3 SV=1

SEQ ID NO: 71726 - protein, 341 aa, Ruminococcus sp.
  REGION 1..341: note = tr|A0A417LAX7|A0A417LAX7_9FIRM S-adenosylmethionine:tRNA ribosyltransferase-isomerase; OS = Ruminococcus sp. TM09-4 OX=2293244 GN=queA PE=3 SV=1
MKTSDFYYDLPQELIAQDPLEDRSSSRLMHLSLKDGSIEHRHFTDVLDYMEEGDCLVINDTKVIPARLYGHKEETGALIEILLLKRRENDIWECLVKPGKKARPGAKITFGNGILKGEIIDVVDEGNRLIQFHYEGIFEEILDQLGEMPLPPYITHKLKDKNRYQTVYAKNEGSAAAPTAGLHFTKELLEKVKEKGVNIAHVTLHVGLGTFRPVKVDDVESHHMHSEFYIVEEDQAKLINDTKKAGKRVIAVGTTSCRTLESATGEDGILKSGSGWTEIFIYPGYHFKMIDALITNFHLPESTLVMLVSALAGKENIMHAYETAVQEKYRFFSFGDAMIII

SEQ ID NO: 71727 - protein, 341 aa, Ruminococcus sp.
  REGION 1..341: note = tr|A0A374DN80|A0A374DN80_9FIRM S-adenosylmethionine:tRNA ribosyltransferase-isomerase; OS = Ruminococcus sp. AM36-18 OX=2293209 GN=queA PE=3 SV=1
MKTSDFYYDLPKELIAQTPLEPRDSSRLLVLDREKQTLEHKHFYDIIDYLNEGDLLVANDSRVLPARIYGIKDETGAKVEFLLLKQVANNRWETLCKPGKKARVGTKFSFGNGILRATVVDVKDDGNRIVDFDCEENFFTTLDKIGQMPLPPYITAELKDKERYQTVYSHELGSAAAPTAGLHFTTELMDRIKAKGVKIAYVTLHVGLGTFRPVKVDDVTKHKMHSEHYEVPEETAKLINETKKNGGRVIAVGTTSCRTLESVAAMYGEIKPCEGFTDIFIYPGFEFKVLDGLITNFHLPESTLIMLVSAFAGYDFIMNAYKEAVKEKYRFFSFGDAMFIS

SEQ ID NO: 71728 - protein, 349 aa, Rummeliibacillus sp.
  REGION 1..349: note = tr|A0A3N6AH31|A0A3N6AH31_9BACL S-adenosylmethionine:tRNA ribosyltransferase-isomerase; OS = Rummeliibacillus sp. TYF005 OX=2058214 GN=queA PE=3 SV=1
MKLEDFDYYLPEELIAQTPLKDRASSRLMVLDRETGEVSHHHFRDILDELHEGDCLILNNTRVLPARLIGVKEETGAHIEVLLLKQTSDDQWETLVKPAKRVKVGTEITFGDGLLKATCTGELEHGGRMFKFDYEGIFIEILEKLGTMPLPPYIHEQLEDQERYQTVYSKELGSAAAPTAGLHFTEELLDQIRAKGVKVAFLTLHVGIGTFRPVSVENIEEHDMHAEFYNLSEETAKVINDTKANGGRVIAVGTTSTRTLETIAHRNDGQIVAESGWTTIFIYPGFEYQAIDGMVTNFHLPKSTLVMMISALAGRENVLNAYKIAVENKYRFFSFGDAMFIRPKAKKGN

SEQ ID NO: 71729 - protein, 349 aa, Rummeliibacillus stabekisii
  REGION 1..349: note = tr|A0A143HCM0|A0A143HCM0_9BACL S-adenosylmethionine:tRNA ribosyltransferase-isomerase; OS = Rummeliibacillus stabekisii OX=241244 GN=queA PE=3 SV=1
MKLEDFDYELPEELIAQVPLKDRTSSRLMVLDRETGEVSHHHFRDIVNELQEGDCLILNDTRVLPARLIGVKEETGAHIEVLLLKQTSDDEWETLVKPAKRVKVGTVLTFGEGLLKATCTGELAHGGRMFKFEYEGIFIEILEKLGTMPLPPYIHEKLEDQERYQTVYSKELGSAAAPTAGLHFTEELLEEIRQKGVKVAFLTLHVGIGTFRPVSVENIEEHDMHAEFYHLTEETASIIKETQANGGRVIAVGTTSTRTLETIAHRNNGNIVAESGWTTIFIYPGFEYLAVDGMVTNFHLPKSTLVMMISALAGRENVLNAYKIAVENKYRFFSFGDAMFIRPKRKKGN

SEQ ID NO: 71730 - protein, 359 aa, Rummeliibacillus stabekisii
  REGION 1..359: note = tr|A0A511BZL4|A0A511BZL4_9BACL S-adenosylmethionine:tRNA ribosyltransferase-isomerase; OS = Rummeliibacillus stabekisii OX=241244 GN=queA PE=3 SV=1
MKLEDFDYELPEELIAQVPLEDRTSSRLMVLDRETGEVSHHHFRDIVNELQEGDCLILNDTRVLPARLIGVKEETGAHIEVLLLKQTSDDEWETLVKPAKRVKVGTVLTFGEGLLKATCTGELAHGGRMFKFEYEGIFIEILEKLGTMPLPPYIHEKLEDQERYQTVYSKELGSAAAPTAGLHFTEELLEEIRQKGVKVAFLTLHVGIGTFRPVSVENIEEHDMHAEFYHLTEETASIIKETQANGGRVIAVGTTSTRTLETIAHRNNGNIVAESGWTTIFIYPGFEYLAVDGMVTNFHLPKSTLVMMISALAGRENVLNAYKTAVENKYRFFSFGDAMFIRPKRKKERKLNYVSSNSI

SEQ ID NO: 71731 - protein, 347 aa, Runella sp.
  REGION 1..347: note = tr|A0A3C0V0N1|A0A3C0V0N1_9BACT S-adenosylmethionine:tRNA ribosyltransferase-isomerase; OS = Runella sp. OX=1960881 GN=queA PE=3 SV=1
MKLSEFKFDLPQSLVALYPADRGDSRLMVVNRQTKKIEHKKFSEIIDYFSEGDVMVVNDTKVFPARLYGQKEKTGAKIEVFLLRELNREMRLWDVLVDPARKIRVGNKLYFGDSDLVAEVIDNTTSRGRTIRFLYDGNHDELMRAIDELGETPLPRDIKRKVEDADRERYQTIFAQHVGAVAAPTAGMHFTKVIQRRMEIKGINFAPITLHVGVGTFRQVDVEDLTKHKTDSENYAISEPSTAIINNALDNKKKVCAIGTTSLKALESSVSANNRVKPFVGWTDKFIFPPYDFKISNALLTNFHLPESILLMMTCAFGGHELIMEAYDIAIKEKYKFFSYGDAMLII

SEQ ID NO: 71732 - protein, 347 aa, Runella sp.
  REGION 1..347: note = tr|A0A344TKX0|A0A344TKX0_9BACT S-adenosylmethionine:tRNA ribosyltransferase-isomerase; OS = Runella sp. HYN0085 OX=2259595 GN=queA PE=3 SV=1
MKLSEFKFDLPQSLIALYPADRGESRLMVVNRQTKKIEHKKFSEIIDYFEEGDAMVVNDTKVFPARLYGQKEKTGAKIEVFLLRELNREMRLWDVLVDPARKIRVGNKLYFGDSDLVAEVIDNTTSRGRTIRFLYDGNHDELMRAIDELGETPLPRDIKRKVEDADRERYQTIFAQHVGAVAAPTAGMHFTKVIQRRMEIKGINFTPITLHVGVGTFRQVDVEDLTKHKTDSENFAITEASANVINEALDKGKRVCAIGTTSLKALESSVSANNRVKPFEGWTDKFIFPPYDFKISNALLTNLHLPESILLMMTCAFGGHDLVMEAYEEAMKEKYKFFSYGDAMLII

SEQ ID NO: 71733 - protein, 342 aa, unidentified
  source 1..342: note = Ruthenibacterium lactatiformans
  REGION 1..342: note = tr|A0A0D8J326|A0A0D8J326_9FIRM S-adenosylmethionine:tRNA ribosyltransferase-isomerase; OS = Ruthenibacterium lactatiformans OX=1550024 GN=queA PE=3; SV = 1
MQKSDFYFDLPKELIAQEPCEPRDAARLLCLGRASGELRHAVFRDLPGLLQPGDLLVVNNSKVLPARLIGHKEGTGAVCELLLLRQVKGDVWECLAKPGKRLHAGTRIIFGDGTLTAVVRDTMEDGNKHAEFFYDTPTLYEKLDAFGKMPLPPYIQKQLDDQSQYQTVYAKELGSAAAPTAGLHFTPELMDTLRKEGVRFAEVTLHVGLGTFRPVKEDDILDHKMHSEWYSVSEETARLIRETKAAGRRVIAVGTTSCRTLEAVATKYGEVRACSGDTDIFIYPGYQYKAIDGLITNFHLPESTLIMLVSAFCGYENTMRAYRVAVEEKYRFFSFGDAMYIG

SEQ ID NO: 71734 - protein, 344 aa, Saccharibacillus sp.
  REGION 1..344: note = tr|A0A4Y6USP3|A0A4Y6USP3_9BACL S-adenosylmethionine:tRNA ribosyltransferase-isomerase; OS = Saccharibacillus sp. ATSA2 OX=2583377 GN=queA PE=3 SV=1
MNVEDYDFELPERLIAQTPLAERSSSRLLTLDKRTGEMAHAHFYDILDMLHPGDTLILNDTRVMPARLHGIKPETGARIELLLLKNIEGDRWETLAKPGKKAKVGSVLRFGDELEAVVLEEGDMGARIIEFRYEGIFQEILDRLGEMPLPPYIKERLDDRERYQTVYAKHEGSAAAPTAGLHFTEELLDRLRAKGVEIGFVTLHVGLGTFRPVSVENVEEHVMHEEYYELSAETAELINRTRARGGRVISVGTTSTRTLESAARRTLDDQGRLGADSGWTQIFLYPGQDFKIVDALITNFHLPKSTLVMLVSALAGRDRVLAAYREAVEREYRFFSFGDAMFIY

SEQ ID NO: 71735 - protein, 344 aa, Saccharibacillus sp.
  REGION 1..344: note = tr|A0A254NJM3|A0A254NJM3_9BACL S-adenosylmethionine:tRNA ribosyltransferase-isomerase; OS = Saccharibacillus sp. O23 OX=2009338 GN=queA PE=3 SV=1
MNVEDYDFELPERLIAQTPLAERTASRLLTLNKTTGETEHLHFYDIFDKLNPGDTLILNDTRVMPARLHGIKPETGARVELLLLKNIEGDRWETLAKPGKKIKTGAVLSFGDELEAVVLEEGDMGARIIEFRYEGIFQEILDRLGEMPLPPYIKERLDDRERYQTVYAKHEGSAAAPTAGLHFTEELLDKLRAKGVDIGFVTLHVGLGTFRPVSVENVEEHVMHEEYYELPAETAELINRTRERGGRVVSVGTTSTRTLESAARRTMDADGRLGADSGWTQIFLYPGEDFKVVDALITNFHLPKSTLVMLVSALAGREHVLSAYREAVEKEYRFFSFGDAMFIY

SEQ ID NO: 71736 - protein, 354 aa, Saccharibacter sp.
  REGION 1..354: note = tr|A0A060QBI0|A0A060QBI0_9PROT S-adenosylmethionine:tRNA ribosyltransferase-isomerase; OS = Saccharibacter sp. AM169 OX=1343158 GN=queA PE=3 SV=1
MTDDLSLFDFTLPRDHIATEPARPRDMAQLLHVVPPALAGTDDATLSLHRIRNLPELLKEGDLLVANDTEVIRAKMEARRGDAKIGITLDRILPEGQWHALARNSRKLRPGDRLHFEDDPVTADVLTNEGDGAVTLRFSVEGDEFDDFLERRAALALPPYIARPNGPTEADNSDYRTIFSRFRGAVAAPTAGLHFTEELLEALAARGIQKQTLTLHVGAGTFLPVRSTIAEHKMHAEWGHIDEETARLINETRANGGRVVAVGTTSLRLLESAADEQGIVHPWTGETSIFIRPGYRFRAVDALLTNFHLPRSTLFMLVCAFAGTETMRHAYHHAIAEGLRFYSYGDACLLERAP

SEQ ID NO: 71737 - protein, 409 aa, unidentified
  source 1..409: note = Saccharicrinis carchari
  REGION 1..409: note = tr|A0A521BDR4|A0A521BDR4_9BACT S-adenosylmethionine:tRNA ribosyltransferase-isomerase; OS = Saccharicrinis carchari OX=1168039 GN=queA PE=3 SV=1
MLLQNKKMNTQDIKIEHYTYLLPEHRIAKYPLKERSDSKLLIYNKGIREDKFCNIPSLLPSKSLLLFNNTKVIQARVLFKKETGAQIEVFCLEPVQPADISMAFEAKTKSVWKCIVGNSKKWKDGKLYKNIAHAGKTIRLAISRKQTLEDAQVIEFEWDNNEVSFGEVLEAIGKTPIPPYLKRESEQLDTLRYQTIYSNYKGSVAAPTAGLHFTKEILNQLYDRGIKTGNVTLHVGAGTFKPVKSKSIGEHEMHTEHFFVDMETLNLILEYKGNITSTGTTTVRTLESLYWLGVKLLEGNKDLFINQWDAYQLPKHYSLTEAIGKLKAYLIDNDYSTLESYTGILIAPGYEFKVVDRLITNFHQPNSTLLLLVAAFTKGEAWKKIYEYALNNDFRFLSYGDSSLLYKGQ

SEQ ID NO: 71738 - protein, 349 aa, unidentified
  source 1..349: note = Saccharicrinis carchari
  REGION 1..349: note = tr|A0A521CHV7|A0A521CHV7_9BACT S-adenosylmethionine:tRNA ribosyltransferase-isomerase; OS = Saccharicrinis carchari OX=1168039 GN=queA PE=3 SV=1
MKLSKFKYNLPEELIALHPSPNRDEARMMVLDRNTGKIDHKVFKDLVGYFNDQDVMIFNNTKVFPARLHGNKEKTGAEIEVFLLRELNKEQKLWDVLVDPARKIRIGNKLYFGENDEMVAEVIDNTTSRGRTLRFLYDGPYDEFKKTLFGLGETPLPKNINREVVPEDKERYQTIFAKHEGAVAAPTAGMHFSRELMKRLEILGVDFAEVTLHVGLGNFRSVDVEDLTKHKMDSEQIFITKEACNIINKGKENRQRICAVGTTVMRTIESSVSTYGHVKPFEGWTNKFIFPPYDFKVANSMVSNLHLPLSTLMMMTAAFAGYDHLMNAYEVAIKEKYRFGTYGDAMLII

SEQ ID NO: 71739 - protein, 349 aa, unidentified
  source 1..349: note = Saccharicrinis fermentans
  REGION 1..349: note = tr|W7YMA0|W7YMA0_9BACT S-adenosylmethionine:tRNA ribosyltransferase-isomerase OS=Saccharicrinis fermentans DSM 9555 = JCM 21142 OX=869213 GN=queA PE=3 SV=1
MKLSKFKYNLPEELIALHPTHNRDEARMLVMDRKTGEIEHKVFKDLVTYFTDQDVMIFNNTKVFPARLYGNKEKTGAEIEVFLLRELNRDQKLWDVLVDPARKIRIGNKLYFGENDEMVAEVIDNTTSRGRTLRFLYDGPYDEFKKSLYGLGETPLPKIINRKVEPEDRERYQTIYAKHEGAVAAPTAGMHFSRELMKRLEIIGVNFAEITLHVGLGNFRSVDVEDLTKHKMDSEQIFITEEACDIINQGKERRQRICAVGTTVMRTIESSVSTFGHVKPFEGWTNKFIFPPYEFNVANCMVSNFHLPLSTLMMMAAAFGGYDNVMNAYEVAVKEKYRFGSYGDAMLII

SEQ ID NO: 71740 - protein, 409 aa, unidentified
  source 1..409: note = Saccharicrinis fermentans
  REGION 1..409: note = tr|W7YIC6|W7YIC6_9BACT S-adenosylmethionine:tRNA ribosyltransferase-isomerase OS=Saccharicrinis fermentans DSM 9555 = JCM 21142 OX=869213 GN=queA PE=3 SV=1
MNTQAIRIEDYTYELPENKIAKYPLQNRSDSKLLVFNQNIREYSFNDISSLLPPNSLLLFNNTKVIQARLNFQKQTGANIEIFCLEPVEPSDIAMIFQAKEKATWKCIVGNSKKWKEGSLSRDIYVNGTEVHLSISREKNMEDTQLIQFCWNSKDVSFGDLLDAIGNIPIPPYLNRKSEAIDTFRYQTVYSNHKGSVAAPTAGLHFTDEILAQIRKNNIHTAPVTLHVGAGTFKPVKSALIGEHEMHIEHFFVDMPTLDLILKYEEDITSVGTTTVRTLESLYWLGVKLLENKNELYVNQWDAYHLPQHYNLQEAIGRLKQYLIDEKRNILESHTGILIAPGYDFKVVNRLITNFHQPNSTLLLLVSAFTKGDNWKRIYDYALTHDFRFLSYGDSSLLYRGEESTQSKY

SEQ ID NO: 71741 - protein, 350 aa, Saccharophagus degradans
  REGION 1..350: note = sp|Q21KW2|QUEA_SACD2 S-adenosylmethionine:tRNA ribosyltransferase-isomerase OS=Saccharophagus degradans (strain 2-40 / ATCC 43961 / DSM 17024) OX=203122 GN=queA; PE = 3SV=1
MRRQDFSYELPDELIARRPTETRTGSRLLMLDGPSGELAHKQFPDLLNLVEEGDLMVFNNTRVIPARVFGQKASGGKLEILAERILDAHSILAHVRSSKAPKPGSIIILQDGTEVEMVARHEALFELRFPADTTALDVLENIGHMPLPPYIDREDEADDKERYQTVYGTQKGAVAAPTAGLHFDDVLLAKLKDKGVQQAFVTLHVGAGTFQPVRVDNIFEHHMHSEVMHVSQEVCDLIKATKAAGKRVIAVGTTSVRCLETAAQNGVVEPYQGDTDIFIYPGYQYKVVDALVTNFHLPESTLLMLVSAFAGYKHTMNAYQQAVAQCYRFFSYGDAMFITHNAEACKEEIK

SEQ ID NO: 71742 - protein, 348 aa, Saccharospirillum sp.
  REGION 1..348: note = tr|A0A2T6E3C9|A0A2T6E3C9_9GAMM S-adenosylmethionine:tRNA ribosyltransferase-isomerase; OS = Saccharospirillum sp. MSK14-1 OX=1897632 GN=queA PE=3; SV = 1
MDVRDFDFNLPDELIARQPAAERTGSRLLCLDGATGAIAHRQFPDLLDQLEPGDLLVFNNTRVIPARLFGQKASGGKIEVLIERMTGEQTALAHVRSSRSPKAGARLELEGGIELEVTGRDDNLFKLRCLNDTPLVELLEQHGHMPLPPYIDRADEASDRDRYQTVYAERRGAVAAPTAGLHFDEALLKKLADKGVNTAFVTLHVGAGTFQPVKADKVEDHHMHSEWIEVSDAVVEAVRETRARGGRVIAVGTTSVRSLESAAASGELQPFTGDTNIFIYPGYRFAVVDALVTNFHLPQSTLIMLISAFAGREAVMAAYQAAIDERYRFFSYGDAMFVSRQTLPEEPA

SEQ ID NO: 71743 - protein, 354 aa, Sagittula sp.
  REGION 1..354: note = tr|A0A2K8W600|A0A2K8W600_9RHOB S-adenosylmethionine:tRNA ribosyltransferase-isomerase; OS = Sagittula sp. P11 OX=2009329 GN=queA PE=3 SV=1
MKLSDFDFDLPERLIATRPARPRTSARLLVCDGGAISDATVADLPDWLRPGDRLVLNDTRVIPARLSGVRRRIGEAGETEAQIEVTLLEPHADGCWSALLKPLKKVRDGEVIRFSDDLEAVLMSRADGQAVLRFNLSAEDFDAALNAAGAMPLPPYIAARRPADAQDKEDYQTVWARNRGAVAAPTASLHFDEPLLQRIADMGVSFTHVTLHVGAGTFLPVKVEDVTTHRMHGEWGEVTPEAAAEIAETRAAGGRVIPVGTTALRLIETAARGGQIAPFRGVTDIFIYPGFTFHVTDALMTNFHLPKSTLLMLVSALMGQDCIREVYAHAVAEGYRFFSYGDASLLIPSRTGAP

SEQ ID NO: 71744 - protein, 354 aa, Sagittula stellata
  REGION 1..354: note = tr|A3JYK3|A3JYK3_9RHOB S-adenosylmethionine:tRNA ribosyltransferase-isomerase OS=Sagittula stellata E-37; OX = 388399 GN=queA PE=3 SV=1
MKLSDFDFELPERLIATRPARPRTAARLLVCDGGVISDATVAELPDWLRPGDRLVLNDTQVIPARLSGVRRRVGEAGETEAQIEVTLLEPRADGCWSALLKPLKKVRDGEIVRFSDDLEAMLMSRQDGQAILRFNLAAADFDAALNAAGAMPLPPYIAARRPADAQDKEDYQTVWARNRGAVAAPTASLHFDESLLKRIADMGVAFTHVTLHVGAGTFLPVKVEDVTTHRMHGEWGEVTPQAAAEIAATRAAGGRVIPVGTTALRLIESAAREGEIAPFHGVTDIFIYPGFSFNVTDALMTNFHLPKSTLLMLVSALMGQDCIREVYAHAVAEDYRFFSYGDASLLIPPGPRTS

SEQ ID NO: 71745 - protein, 351 aa, Salegentibacter agarivorans
  REGION 1..351: note = tr|A0A1I2KLI1|A0A1I2KLI1_9FLAO S-adenosylmethionine:tRNA ribosyltransferase-isomerase; OS = Salegentibacter agarivorans OX=345907 GN=queA PE=3 SV=1
MGMKLSHFNFELPDELLAEYPSENRDEARLMVLNRKEQTIEHKQFKDILDYFEPEDVMVLNNTKVFPARLYGNKEKTGARIEVFLLRELNPETKLWDVLVDPARKIRIGNKLYFGDDESLVAEVIDNTTSRGRTLRFLYDGSYEDFRKKLKELGETPLPKYIKRNVEPEDQERYQTIYAKEEGAVAAPTAGLHFSKHLLKRLEIKGVDFAEVTLHVGLGTFSPVEVEDLSKHKMDSEEAFIEKKATQTINKAKLENRRVCAVGTTVMRVLESSVSSNHTLNEFGGWTNKFIFPPYDFSIANCMITNFHTPKSTLLMMISAFAGHDFMKRAYEEAVKEKYRFYTYGDAMLII

SEQ ID NO: 71746 - protein, 351 aa, unidentified
  source 1..351: note = Salegentibacter echinorum
  REGION 1..351: note = tr|A0A1M5GDV0|A0A1M5GDV0_9FLAO S-adenosylmethionine:tRNA ribosyltransferase-isomerase; OS = Salegentibacter echinorum OX=1073325 GN=queA PE=3 SV=1
MGMKLSNFNFELPPELLAEYPSENRDEARLMVLNRKEQTIEHKQFKDILDYFEPEDVMVLNNTKVFPARLYGNKEKTGARIEVFLLRELNPETKLWDVLVDPARKIRIGNKLYFGEDESLVAEVIDNTTSRGRTLRFLYDGSYEDFRIKLKELGETPLPKYIKRDVQPEDQERYQTIYAKNEGAVAAPTAGLHFSKHLLKRLEIKGIDFAEVTLHVGLGTFSPVEVEDLSKHKMDSEEAFIEKRATETINKAQKENRKICAVGTTVMRVMESAVSSNHTLNEFSGWTNKFIFPPYDFSIANCMITNFHTPKSTLLMMISAFAGHDFMKRAYEEAVKEKYKFYTYGDAMLII

SEQ ID NO: 71747 - protein, 351 aa, Salegentibacter flavus
  REGION 1..351: note = tr|A0A1I4YWS6|A0A1I4YWS6_9FLAO S-adenosylmethionine:tRNA ribosyltransferase-isomerase; OS = Salegentibacter flavus OX=287099 GN=queA PE=3 SV=1
MGMKLSQFNFELPPELLAEYPAENRDEARLMVLNRKEQTIEHKQFKDILDYFDPEDVMVLNNTKVFPARLYGNKEKTGARIEVFLLRELNPETKLWDVLVDPARKIRIGNKLYFGEDESLVAEVIDNTTSRGRTLRFLYDGSYEDFRKKLQELGETPLPKYIKREVQPEDQERYQTIYAKEEGAVAAPTAGLHFSKHLLKRLEIKGVDFAEVTLHVGLGTFSPVEVEDLSKHKMDSEEAFITKKATDTINKAKLENRRVCAVGTTVMRVLESAVSSNQTLNEYGGWTNKFIFPPYDFSIANCMVTNFHTPKSTLLMMVSAFAGHDFMKKAYEEAVKEKYRFYTYGDAMLII

SEQ ID NO: 71748 - protein, 351 aa, Salegentibacter holothuriorum
  REGION 1..351: note = tr|A0A1T5DSJ3|A0A1T5DSJ3_9FLAO S-adenosylmethionine:tRNA ribosyltransferase-isomerase; OS = Salegentibacter holothuriorum OX=241145 GN=queA PE=3; SV = 1
MGMKLSHFNFELPDELLAEYPSENRDEARLMVLNRKEQTIEHKQFKDILDYFEPEDVMVLNNTKVFPARLYGNKEKTGARIEVFLLRELNPETKLWDVLVDPARKIRIGNKLYFGDDESLVAEVIDNTTSRGRTLRFLYDGSYEDFRKKLKELGETPLPKYIKRDVQPEDQERYQTIYAKEEGAVAAPTAGLHFSKHLLKRLEIKGVDFAEVTLHVGLGTFSPVEVEDLSKHKMDSEEAFIEKKATETINRAKRENRRVCAVGTTVMRVMESAVSSNHTLNEFGGWTNKFIFPPYDFSIANCMITNFHTPKSTLLMMISAFAGHDFMKRAYEEAVREKYRFYTYGDAMLII

SEQ ID NO: 71749 - protein, 349 aa, Salegentibacter mishustinae
  REGION 1..349: note = tr|A0A0Q9ZP60|A0A0Q9ZP60_9FLAO S-adenosylmethionine:tRNA ribosyltransferase-isomerase; OS = Salegentibacter mishustinae OX=270918 GN=queA PE=3 SV=1
MKLSHFNFELPDELLAEYPSENRDEARLMVLNRKEQTIEHKQFKDILDYFEPEDVMVLNNTKVFPARLYGNKEKTGARIEVFLLRELNPETKLWDVLVDPARKIRIGNKLYFGDDESLVAEVIDNTTSRGRTLRFLYDGSYEDFRKKLKELGETPLPKYIKRDVQPEDQERYQTIYAKEEGAVAAPTAGLHFSKHLLKRLEIKGVDFAEVTLHVGLGTFSPVEVEDLSKHKMDSEEAFIEKKATETINKAKLENRKVCAVGTTVMRVMESAVSSNHTLNEFSGWTNKFIFPPYDFSIANCMITNFHTPKSTLLMMISAFAGHDFMKRAYEEAVKEKYRFYTYGDAMLII

SEQ ID NO: 71750 - protein, 349 aa, Salegentibacter salarius
  REGION 1..349: note = tr|A0A2N0TRY5|A0A2N0TRY5_9FLAO S-adenosylmethionine:tRNA ribosyltransferase-isomerase; OS = Salegentibacter salarius OX=435906 GN=queA PE=3 SV=1
MKLSHFNFELPDELLAEYPSENRDEARLMVLNRKEQTIEHKQFKDILDYFEPEDVMVLNNTKVFPARLYGNKEKTGARIEVFLLRELNPETKLWDVLVDPARKIRIGNKLYFGDDESLVAEVIDNTTSRGRTLRFLYDGSYEDFRKKLKELGETPLPKYIKRDVQPEDQERYQTIYAKEEGAVAAPTAGLHFSKHLLKRLEIKGVDFAEVTLHVGLGTFSPVEVEDLSKHKMDSEEAFIERKATETINKAKRENRRVCAVGTTVMRVMESAVSSNHTLNEFSGWTNKFIFPPYDFSIANCMITNFHTPKSTLLMMISAFAGHDFMKRAYEEAVKEKYRFYTYGDAMLII

SEQ ID NO: 71751 - protein, 351 aa, Salegentibacter salegens
  REGION 1..351: note = tr|A0A1M7IG67|A0A1M7IG67_9FLAO S-adenosylmethionine:tRNA ribosyltransferase-isomerase; OS = Salegentibacter salegens OX=143223 GN=queA PE=3 SV=1
MGMKLSHFNFELPDELLAEYPSENRDEARLMVLNRKEQTIEHKQFKDILDYFKPEDVMVLNNTKVFPARLYGNKEKTGARIEVFLLRELNPETKLWDVLVDPARKIRIGNKLYFGDDESLVAEVIDNTTSRGRTLRFLYDGSYEDFRKKLKDLGETPLPKYIKRDVEPEDQERYQTIYAKEEGAVAAPTAGLHFSKHLLKRLEIKGVDFAEVTLHVGLGTFSPVEVEDLSKHKMDSEEAFIEKKATQTINKAKLENRRVCAVGTTVMRVLESAVSSNHTLNEFGGWTNKFIFPPYDFSIANCMITNFHTPKSTLLMMISAFAGHDFMKRAYEEAVKEKYRFYTYGDAMLII

SEQ ID NO: 71752 - protein, 349 aa, Salegentibacter salinarum
  REGION 1..349: note = tr|A0A2N0TME7|A0A2N0TME7_9FLAO S-adenosylmethionine:tRNA ribosyltransferase-isomerase; OS = Salegentibacter salinarum OX=447422 GN=queA PE=3 SV=1
MKLSHFNFELPDELLAEYPSENRDEARLMVLNRKEQTIEHKQFKDILDYFEPEDVMVLNNTKVFPARLYGNKEKTGARIEVFLLRELNPETKLWDVLVDPARKIRIGNKLYFGEDESLVAEVIDNTTSRGRTLRFLYDGSYEDFRKKLKDLGETPLPKYIKRNVEPEDQERYQTIYAKEEGAVAAPTAGLHFSKHLLKRLEIKGVDFAEVTLHVGLGTFSPVEVEDLSKHKMDSEEAFIERKATQTINRAKLENRRVCAVGTTVMRVLESAVSSNHTLNEFNGWTNKFIFPPYDFSIANCMITNFHTPKSTLLMMISAFAGHDFMKRAYEEAVKEKYRFYTYGDAMLII

SEQ ID NO: 71753 - protein, 351 aa, Salegentibacter sp.
  REGION 1..351: note = tr|A0A4R6G7C6|A0A4R6G7C6_9FLAO S-adenosylmethionine:tRNA ribosyltransferase-isomerase; OS = Salegentibacter sp. 24 OX=2183986 GN=queA PE=3 SV=1
MGMKLSHFNFELPDELLAEYPSENRDEARLMVLNRKEQTIEHKQFKDILDYFEPEDVMVLNNTKVFPARLFGNKEKTGARIEVFLLRELNPETKLWDVLVDPARKIRIGNKLYFGDDESLVAEVIDNTTSRGRTLRFLYDGSYEDFRKKLKELGETPLPKYIKRDVEPEDQERYQTIYAKEEGAVAAPTAGLHFSKHLLKRLEIKGIDFAEVTLHVGLGTFSPVEVEDLSKHKMDSEEAFIERKATQTINKAKLENRRVCAVGTTVMRVLESAVSSNHTLNEFGGWTNKFIFPPYDFSIANCMITNFHTPKSTLLMMISAFAGHDFMKRAYEEAVKEKYRFYTYGDAMLII

SEQ ID NO: 71754 - protein, 349 aa, Salegentibacter sp.
  REGION 1..349: note = tr|A0A1L6R808|A0A1L6R808_9FLAO S-adenosylmethionine:tRNA ribosyltransferase-isomerase; OS = Salegentibacter sp. T436 OX=1729720 GN=queA PE=3 SV=1
MKLSHFNFELPDELLAEYPSENRDEARLMVLNRKEQTIEHKQFKDILDYFEPEDVMVLNNTKVFPARLYGNKEKTGARIEVFLLRELNPETKLWDVLVDPARKIRIGNKLYFGDDESLVAEVIDNTTSRGRTLRFLYDGSYEDFRKKLKELGETPLPKYIKRNVEPEDQERYQTIYAKEEGAVAAPTAGLHFSKHLLKRLEIKGVDFAEVTLHVGLGTFSPVEVEDLSKHKMDSEEAFIEKKATQTINKAKLENRRVCAVGTTVMRVLESSVSSNHTLNEFGGWTNKFIFPPYDFSIANCMITNFHTPKSTLLMMISAFAGHDFMKRAYEEAVKEKYRFYTYGDAMLII

SEQ ID NO: 71755 - protein, 349 aa, unidentified
  source 1..349: note = Salibacterium halotolerans
  REGION 1..349: note = tr|A0A1I5UF40|A0A1I5UF40_9BACI S-adenosylmethionine:tRNA ribosyltransferase-isomerase; OS = Salibacterium halotolerans OX=1884432 GN=queA PE=3 SV=1
MNVEDFNFSLPEELIAQTPLEKRDASRLMVLDPKAEKTHHDSFRSILDYLDAGDCLVLNDTRVLPARLFGEKETGGRVEVLLLKQEEQDVWETLIKPAKRVKPGTVLYFGGTKLKAECLDTMEHGGRLLRFSYDGVFLEILEELGEMPLPPYIKEKLDDQERYQTVFAREEGSAAAPTAGLHFTDNLLAEAKHKGVHVTTITLHVGLGTFRPVEAETVEDHHMHAEFYQISEGTALLLNETRENGGKIAAVGTTSARTLETAADGNGRFEKISGWTDIFIYPGYTFRGIDALLTNFHLPKSTLVMMVSALAGREFLMQAYQEAVGHRYRFFSFGDAMFIMKGSQHRWQQ

SEQ ID NO: 71756 - protein, 349 aa, unidentified
  source 1..349: note = Salibacterium qingdaonense
  REGION 1..349: note = tr|A0A1I4JCP3|A0A1I4JCP3_9BACI S-adenosylmethionine:tRNA ribosyltransferase-isomerase; OS = Salibacterium qingdaonense OX=266892 GN=queA PE=3 SV=1
MNVEDFNFSLPEELIAQTPLEKRDASRMMVLDPEAGKTHHDSFRSILDYLDAGDCLVLNDTRVLPARLFGEKETGGRVEVLLLKQEEQDVWETLIKPAKRVKPGTVLYFGGTKLKAECLDTLDHGGRLLRFSYDGVFLEILEELGEMPLPPYIKEKLEDQERYQTVFAREEGSAAAPTAGLHFTQELLGEAKNKGVHVTTITLHVGLGTFRPVEAETVEDHHMHAEFYQISEGTALLLNETRENGGKIVAAGTTSARTLETAADENGRFEKVSGWTDIFIYPGYTFRGMDALLTNFHLPKSTLVMMVSALAGREFLMDAYQEAVRQRYRFFSFGDAMFIMKGSQHRWQQ

SEQ ID NO: 71757 - protein, 347 aa, unidentified
  source 1..347: note = Salilacibacter sp.
  REGION 1..347: note = tr|A0A514LLS6|A0A514LLS6_9ACTN S-adenosylmethionine:tRNA ribosyltransferase-isomerase; OS = Salilacibacter sp. NKC3-5 OX=2502791 GN=queA PE=3 SV=1
MKMDAFDFELPESLIAQRPLPNRDAARMLVLDRESGDIDHQRFSDIGSFFQAGDCLVLNDTRVLPARLFGEKKETGANVEVLLLNEGNADEWETLVKPAKKVKVGTEIIFGDGRLTAVCIGLNEHGGRLLRFHYNGFFMEILDALGTMPLPPYITEQLEEPERYQTVYANKQGSAAAPTAGLHFTEERLDELRAIGVEICYITLHVGLGTFRPVSVERVEDHEMHAEHYEVSAETAVTLNEAKKAGREIIACGTTSARTLETIMHTYGEFKKTSGWTDIFIYPGFDFRGVDGLITNFHLPKSTLIMLVSAFAGKEAIMRAYREAIAEQYRFFSFGDAMYIRKGAISV

SEQ ID NO: 71758 - protein, 344 aa, Salimicrobium flavidum
  REGION 1..344: note = tr|A0A1N7IHU6|A0A1N7IHU6_9BACI S-adenosylmethionine:tRNA ribosyltransferase-isomerase; OS = Salimicrobium flavidum OX=570947 GN=queA PE=3 SV=1
MTTDINQYDFDLPEELIAQTPLKDRASSRMMVLKTGEEKIEHRTFTDIKEYIQAGDCLVLNDTKVLPARLYGMKEDTGGKVEVLLLHQHEGDVWEVLMKPAKKVKEGTVLSFGDGSLKAVCTKEMEHGGRLVEFSYEGIFLEVLDALGEMPLPPYITEQLEDRDRYQTVYAKEEGSAAAPTAGLHFTENLLQELEDSGVNLVYLTLHVGLGTFRPVSVENVEEHDMHAEFYTLDEEAAERLNKAKEEQGRIISIGTTSTRTLETIYREHGRFTADSGWTDIFIYPPQQVKSIDGLVTNFHLPKSTLIMLVSAIAGRDFILEAYRRAVTEKYRFFSFGDAMLILK

SEQ ID NO: 71759 - protein, 344 aa, Salimicrobium halophilum
  REGION 1..344: note = tr|A0A1G8PMN3|A0A1G8PMN3_9BACI S-adenosylmethionine:tRNA ribosyltransferase-isomerase; OS = Salimicrobium halophilum OX=86666 GN=queA PE=3 SV=1
MTMDINHYDFDLPEELIAQTPLKNRDASRLMVMDTKKREIEHRVFSDIREYIHPGDCLVLNDTKVLPARLYGVKEETGGKVEVLLLHQHEGDTWEVLMKPAKKVKEGTVLTFGDGRLKAVCTKELEHGGRLVEFSYEGIFLEVLESLGEMPLPPYITEQLEDRDRYQTVYAKEEGSAAAPTAGLHFTEDLMQELQDNGVELIYLTLHVGLGTFRPVSVDNVEDHDMHAEFYTLSEESADRLNKVKEKGGRIISVGTTSTRTLETIYRGNDRFVAERGWTDIFIYPPQEVESIDGLITNFHLPKSTLIMLVSAIAGRDFILEAYNRAVTERYRFFSFGDAMLILK

SEQ ID NO: 71760 - protein, 344 aa, unidentified
  source 1..344: note = Salimicrobium jeotgali
  REGION 1..344: note = tr|K2H961|K2H961_9BACI S-adenosylmethionine:tRNA ribosyltransferase-isomerase OS=Salimicrobium jeotgali; OX = 1230341 GN=queA PE=3 SV=1
MTTDINEYDFELPEELIAQTPLKDRDSSRLMVLNTEAEKIEHRVFSDVKDYLHPGDCLVLNDTKVLPARLYGVKEDTGGKVEVLLLHQREGDEWEVLMKPAKKVKEGTELTFGDGRLKAVCTKELEHGGRIVEFSYEGIFLEVLDSLGEMPLPPYITEQLEDRDRYQTVYAKEEGSAAAPTAGLHFTERLFRELEESGVELVYLTLHVGLGTFRPVSVENVEEHDMHAEFYTLGEDSAGTLNRIRENGGRIISVGTTSTRTLETIYREHQRFVAQSGWTDIFIYPPHQVESIDGLVTNFHLPKSTLIMLVSAIAGREFILEAYRRAVTKRYRFFSFGDAMLILK

SEQ ID NO: 71761 - protein, 344 aa, Salimicrobium salexigens
  REGION 1..344: note = tr|A0A1N7JPA1|A0A1N7JPA1_9BACI S-adenosylmethionine:tRNA ribosyltransferase-isomerase; OS = Salimicrobium salexigens OX=908941 GN=queA PE=3 SV=1
MTTDINEYDFELPEELIAQTPLKDRDSSRLMVLNTEAEEIEHRVFSDVKDYLHPGDCLVLNDTKVLPARLYGVKEDTGGKVEVLLLHQREGDEWEVLMKPAQKVKEGTELTFGDGRLKAVCTKELEHGGRIVEFSYEGIFLEVLDSLGEMPLPPYITEQLEDRDRYQTVYAKEEGSAAAPTAGLHFTEKLLRELEESGVELVYLTLHVGLGTFRPVSVENVEEHDMHAEFYTLGEESAGTLNRIKENGGRIISVGTTSTRTLETIYREHQRFVGESGWTDIFIYPPHQVESIDGLVTNFHLPKSTLIMLVSAIAGRDFILEAYRRAVTEKYRFFSFGDAMLILK

SEQ ID NO: 71762 - protein, 344 aa, Salimicrobium sp.
  REGION 1..344: note = tr|A0A2A3AAS1|A0A2A3AAS1_9BACI S-adenosylmethionine:tRNA ribosyltransferase-isomerase; OS = Salimicrobium sp. WN024 OX=2029857 GN=queA PE=3 SV=1
MTTDINEYDFELPEELIAQTPLKDRDSSRLMVLNTEAEKIEHRVFSDVKDYLHPGDCLVLNDTKVLPARLYGVKEDTGGKVEVLLLHQREGDEWEVLMKPAKKVKEGTELTFGDGRLKAVCTKELEHGGRIVEFSYEGIFLEVLDSLGEMPLPPYITEQLEDRDRYQTVYAKEEGSAAAPTAGLHFTERLLRELEESGVELVYLTLHVGLGTFRPVSVENVEEHDMHAEFYTLGEDSAGTLNRIRENGGRIISVGTTSTRTLETIYREHQRFVAQSGWTDIFIYPPHQVESIDGLVTNFHLPKSTLIMLVSAIAGREFILEAYRRAVTKRYRFFSFGDAMLILK

SEQ ID NO: 71763 - protein, 373 aa, unidentified
  source 1..373: note = Salinarimonadaceae bacterium
  REGION 1..373: note = tr|A0A0P7Y3X7|A0A0P7Y3X7_9RHIZ S-adenosylmethionine:tRNA ribosyltransferase-isomerase; OS = Salinarimonadaceae bacterium HL-109 OX=1653334 GN=queA; PE = 3 SV=1
MRVDEFDFELPEDRIALRPVEPRDAARMLVVRPGTTPELSDAQVRDLPDLLAPGDVLVLNDTRVIPARLYAKRVRGEIVAGVEIMLHKREGAARWRAFARPAKKLQPGDRLVFGSESAGPVCEAGRLEATIAGKAEGGDVAIDFDLAGPALDEAIAVIGELPLPPYIAGKRAADARDRADYQTIYAREEGAVAAPTAGLHFTDDLFARLNACGIARHFVTLHVGAGTFLPVKVEDTRDHRMHAETGFVSRETADALNAARAAGGRIVAVGTTSLRLLESAATEDGTIAPFAGDTDIFITPGYRFRAVDALMTNFHLPKSTLMMLVSALSGLDTMRRAYHHAVEAGYRFYSFGDSSLLFRDAAGQDGMKDDVDG

SEQ ID NO: 71764 - protein, 359 aa, Salinarimonas sp.
  REGION 1..359: note = tr|A0A5B2V9K0|A0A5B2V9K0_9RHIZ S-adenosylmethionine:tRNA ribosyltransferase-isomerase; OS = Salinarimonas sp. BN140002 OX=1638099 GN=queA PE=3 SV=1
MRVDLFDFHLPEDRIALRPASPRDAARMLVVRPGEGLEDRTVRDLPDLLDPHDVLVLNDTKVIPARLYGLRARGEATARVEIMLHKREGLDRWRAFARPAKRLQPGDRIRFGEDAESTACELVRLDAEVEERGEGGEVLLRFALQGPYLDEAIVRLGELPLPPYIQAKRGGADERDRADYQTIYARDEGAVAAPTAGLHFTDELFARLDARGIARHFVTLHVGAGTFLPVKAEDTAEHRMHAEWGTIPARVADALNAARARGGRIVAVGTTSMRLLESAAAEDGTIQPFSGDTDIFITPGYRFRAVDALMTNFHLPRSTLFMLVSAFSGLETMRAAYDHAITGGYRFYSYGDSSLLFRA

SEQ ID NO: 71765 - protein, 342 aa, Salinibacillus kushneri
  REGION 1..342: note = tr|A0A1I0G975|A0A1I0G975_9BACI S-adenosylmethionine:tRNA ribosyltransferase-isomerase; OS = Salinibacillus kushneri OX=237682 GN=queA PE=3 SV=1
MKVEDFDFDLPESLIAQTPLENRSESRLMVLNREKQRMSHRYFYNIVEYLNPGDCLVLNNTKVLPARLFGVKQDTGAKIEILLLHQVGGDKWEVLLKPAKKVKEGTRIEFGNGLMTCICQEKKEHGGAIVEFHYDGIFYEQLDKLGEMPLPPYIKEQLDDRDRYQTVYAKEKGSAAAPTAGLHFTKELLDEIQNLGVHMAYVTLHVGLGTFRPVNVDDIENHEMHAEFYHMDEETAELLNDVKAKGNRIITVGTTSTRTLETIARDQDGDFKAQSGWTDIFIYPPYQFRAVDALITNFHLPKSTLIMMISAFAGREFVLNAYREAVQKKYRFFSFGDAMFIE

SEQ ID NO: 71766 - protein, 349 aa, Salinibacter ruber
  REGION 1..349: note = tr|D5H9S0|D5H9S0_SALRM S-adenosylmethionine:tRNA ribosyltransferase-isomerase OS=Salinibacter ruber (strain M8) OX=761659 GN=queA PE=3 SV=1
MKRSEFSYDVPEELVAEYPADPPDSSRMMVLDRESHDINHDKHFHDLPEYFSEGDVLVVNDTKVYPARLYGQKKKTGADIQVFLLRELNPESRLWDVVVDPARKIRIGNKLYFDDDLIAEVIDNTTSRGRTIRFSFDDVNEALYQKIRDIGETPLPPYIDREVEEEDRDRYQTIFAENRGAVAAPKSTLHFTEDVLERLKEKGVHVVPITLHIGRGKSKPVDVEDLSKHRTDSEEYDIPEETAEAVNRALASDENTVTACGTTVARALESSLSADETVKPDHSWTDLFVYPEYEFKIVERMITNFHRPESMLMMMGAAFAGYDFLFEAYEEAFEEEYRLFAFGDAIFIK

SEQ ID NO: 71767 - protein, 349 aa, Salinibacter ruber; identical to SEQ ID NO: 71766
  REGION 1..349: note = tr|Q2S209|Q2S209_SALRD S-adenosylmethionine:tRNA ribosyltransferase-isomerase OS=Salinibacter ruber (strain DSM 13855 / M31) OX=309807 GN=queA PE=3 SV=1

SEQ ID NO: 71768 - protein, 348 aa, Salinibacter sp.
  REGION 1..348: note = tr|A0A2P6BXK0|A0A2P6BXK0_9BACT S-adenosylmethionine:tRNA ribosyltransferase-isomerase; OS = Salinibacter sp. 10B OX=1923971 GN=queA PE=3 SV=1
MKRSEFSYEYPEELIAEYPADPRDSCRMMVVDREQQEVDHEQFKNLPDYFTEGDVLVVNNTKVYPARLYGQKKKTGADIEVFLLRELNPESRLWDVMVDPARKIRIGNKLEFDDDLTAEVIDNTTSRGRTIRFSFDYTNEELYAKIRELGETPLPPYIDREVEEEDRQRYQTIFAKHRGAVAAPTAGLHFTEELVDRLEEKGVQVMPITLHVGRGTFRPVDVEDLTKHRMDSEEFIIPQETADAVNRALLSEENTVTACGTTVVRALESSLSADEMLKADHSWTDLFVYPEYDFKITERMITNFHRPESTLYMMASAFMGYDFAFEVYDKAFEEEYRLFSFGDAMLIE

SEQ ID NO: 71769 - protein, 349 aa, Salinicoccus alkaliphilus
  REGION 1..349: note = tr|A0A1M7BSN2|A0A1M7BSN2_9STAP S-adenosylmethionine:tRNA ribosyltransferase-isomerase; OS = Salinicoccus alkaliphilus DSM 16010 OX=1123231 GN=queA; PE = 3 SV=1
MKLEEFDFELPEALIAQTPLKDRAASRLLALNKNDGTIEDHTFSEVVRYFNEGDVLVLNDTKVLPARLYGVKQDTGAKIEMLLLTPLEDGYEVLIRPAKKVKAGTKVVFGNGELIAECTATFDEGIRHVKLHHEGILENVLDVLGEMPLPPYIKERLEDKDRYQTVFARESGSAAAPTAGLHFTEELLAEIEASGVKIVYITLHVGLGTFRPVSAETIEDHKMHSEYYLISRETADILNEAKSAGNRIISVGTTSTRTLETVMRDHGAFKEASGFTDIFIYPGFSYKAVDTLITNFHLPKSSLVMLVSAFSSRGMILDAYAHAVDEKYRFFSFGDAMIIHGGENDGDTL

SEQ ID NO: 71770 - protein, 344 aa, Salinicoccus halodurans
  REGION 1..344: note = tr|A0A0F7HKZ2|A0A0F7HKZ2_9STAP S-adenosylmethionine:tRNA ribosyltransferase-isomerase; OS = Salinicoccus halodurans OX=407035 GN=queA PE=3 SV=1
MKLDEFDFDLPEALIAQTPLSDRSGSRLLALDKTGGTIEDRHFTDIIDYLDAGDTLVLNDTRVLPARLYGVKAETGAKIEMLMLKPIENGYEVLIKPAKRVKPGTKIVFGGGLLKAVCTDTFDEGIRHVELMYDGVLENVLDELGEMPLPPYIKETLDDKERYQTVYARHSGSAAAPTAGLHFTEALLKEIEDKGINIATITLHVGLGTFRPVSADEIEDHKMHSEFYIMNEETADLLNKTRQNGRKIISVGTTSTRTLETIMRDYGEFRAASGFTDIFIYPGFEYRAVDALITNFHLPKSSLMMLVSAFANRDMIMETYRHAVDEKYRFFSFGDAMIIYEGDY

SEQ ID NO: 71771 - protein, 351 aa, unidentified
  source 1..351: note = Salinicoccus kekensis
  REGION 1..351: note = tr|A0A285UDI0|A0A285UDI0_9STAP S-adenosylmethionine:tRNA ribosyltransferase-isomerase; OS = Salinicoccus kekensis OX=714307 GN=queA PE=3 SV=1
MILKLEEFDFELPEKLIAQTPLEDRTASRLLALNKDDGTIEDRTFSDIIKYFDKGDVLVLNDTKVLPARLYGVKEDTGAKIEMLLLTPLEGGYEVLIRPARKVKEGTKIVFGNGELIAECTATFDEGIRHMKLHHEGILENVLDALGEMPLPPYIKERLEDKDRYQTVYAKETGSAAAPTAGLHFTDELLDEIEASGVKIVYITLHVGLGTFRPVSAETIEDHKMHSEYYLITGETADILNEAKSAGKRIISVGTTSTRTLETVMRDHGAFKAASGFTDIFIYPGFRYQAVDTLITNFHLPKSSLVMLVSAFSSREKILDAYQHAVEKGYRFFSFGDAMIIHGGKKDGNTL

SEQ ID NO: 71772 - protein, 349 aa, Salinicoccus qingdaonensis
  REGION 1..349: note = tr|A0A1G9AI49|A0A1G9AI49_9STAP S-adenosylmethionine:tRNA ribosyltransferase-isomerase; OS = Salinicoccus qingdaonensis OX=576118 GN=queA PE=3 SV=1
MKLEEFDFDLPEELIAQTPLKDRSSSRLLALDKTDGQIEDTTFNDILKYFKEGDVLVLNDTKVLPARLYGVKEDTGAKIEMLLLTPVENGYEVLIRPAKKVKTGTRVVFGNGELIAECTGIFDEGIRHMKLHHEGILENVLDELGEMPLPPYIKETLEDKDRYQTVYAKETGSAAAPTAGLHFTNELLDEISSAGVKIVTITLHVGLGTFRPVSAETIEDHKMHSEYYMMSADAAEVLNAAKENGRNIISVGTTSTRTLETIMGKYDTFKASSGFTDIFIYPGFEYKAVDVLITNFHLPKSSLVMLVSAFSSREMILNAYQHAVNNQYRFFSFGDAMIIHGGADDGHSL

SEQ ID NO: 71773 - protein, 344 aa, Salinicoccus roseus
  REGION 1..344: note = tr|A0A3N4T7U7|A0A3N4T7U7_9STAP S-adenosylmethionine:tRNA ribosyltransferase-isomerase; OS = Salinicoccus roseus OX=45670 GN=queA PE=3 SV=1
MKLEEFDFELPESLIAQTPLKDRAQSRLLGLNKADGTVSDGKFEDIVKYLNPGDALVLNDTKVLPARLFGVKRETGAKVEMLLLKPIEGGYEVLIRPARKVKKGTEIDFGDGLLKAVCTGTFDEGIRHVSLHHEGLLENVLDELGEMPLPPYIKETLEDKDRYQTVYAKNTGSAAAPTAGLHFTEALLERIRAQGVHIAYITLHVGLGTFRPVSAENIEDHKMHSEFYIMNRETADVLNEVRENGGKVVSVGTTSTRTLETIMRDHGRFEEASGFTDIFIYPGFQYRAVDALITNFHLPKSSLMMLVSAFSDKDAIMKAYQHAIDEKYRFFSFGDAMIIYEDEE

SEQ ID NO: 71774 - protein, 344 aa, Salinicoccus roseus
  REGION 1..344: note = tr|A0A265E9G9|A0A265E9G9_9STAP S-adenosylmethionine:tRNA ribosyltransferase-isomerase; OS = Salinicoccus roseus OX=45670 GN=queA PE=3 SV=1
MKLEEFDFELPESLIAQTPLKDRAQSRLLGLNKADGTVSDGKFEDIVKYLNPGDALVLNDTKVLPARLFGVKRETGAKVEMLLLKPIAGGYEVLIRPARKVKEGTEIDFGDGLLKAVCTGTFDEGIRHVSLHHEGLLENVLDELGEMPLPPYIKETLEDKDRYQTVYAKNTGSAAAPTAGLHFTEALLERIRAQGVHIAYITLHVGLGTFRPVSAENIEDHKMHSEFYIMNRETADVLNGVRENGGKVVSVGTTSTRTLETIMRDHDRFEEASGFTDIFIYPGFQYRAVDALITNFHLPKSSLMMLVSAFSDKNTIMKAYQHAIDEKYRFFSFGDAMIIYEDEE

SEQ ID NO: 71775 - protein, 344 aa, unidentified
  source 1..344: note = Salinicoccus sediminis
  REGION 1..344: note = tr|A0A0M2SMD9|A0A0M2SMD9_9STAP S-adenosylmethionine:tRNA ribosyltransferase-isomerase; OS = Salinicoccus sediminis OX=1432562 GN=queA PE=3 SV=1
MKLDEFDFDLPESLIAQTPLSDRSGSRLLALDKTDGSIEDRHFTDITDYLEAGDTLVLNDTRVLPARLYGVKAKTGAKIEMLMLKPIENGYEVLIKPAKRVKPGTEIVFGEGLLRAVCTDVFDEGIRHVELIYDGVLETVLDALGEMPLPPYIKETLDDKERYQTVYAKNSGSAAAPTAGLHFTEALLEEIEAEGINIATITLHVGLGTFRPVSADDIEDHKMHSEFYIMNEETADLLNKTRESGKKIISVGTTSTRTLETIMRDHGVFTAASGFTDIFIYPGFDYRAIDALITNFHLPKSSLMMLVSAFSGRDMIMGAYRHAVEAEYRFFSFGDAMIIYEGDK

SEQ ID NO: 71776 - protein, 344 aa, Salinicoccus sp.
  REGION 1..344: note = tr|A0A558AYI5|A0A558AYI5_9STAP S-adenosylmethionine:tRNA ribosyltransferase-isomerase; OS = Salinicoccus sp. CT19 OX=2493691 GN=queA PE=3 SV=1
MKLEEFDFDLPESLIAQTPLLKRAESRLLALDKRTGSVSDTKFENITAYLNPGDALVLNDTKVLPARLFGVKKDTGAKIEMLLLKPIEGGYEVLIRPAKRVKPGTEIDFGDGLLTAVCTDTFAEGIRHVSLHHDGLLENVLDELGEMPLPPYIKETLDDKDRYQTVYAKHAGSAAAPTAGLHFTEALLDEIRHKGVHISYITLHVGLGTFRPVSVDDIEEHKMHSEFYIMTDETASTLNAVKENGGKVVSVGTTSTRTLETIMRDHGQFVEASGFTDIFIYPGFKYKAVDALITNFHLPKSSLMMLVSAFSDRETIMNAYRHAIDEEYRFFSFGDAMIIYEDEE

SEQ ID NO: 71777 - protein, 345 aa, Salinicola socius
  REGION 1..345: note = tr|A0A1Q8STU3|A0A1Q8STU3_9GAMM S-adenosylmethionine:tRNA ribosyltransferase-isomerase; OS = Salinicola socius OX=404433 GN=queA PE=3 SV=1
MQRADFHFDLPDELIARYPSEQRTDCRLLCVDGESGALEHARFPDLLARLDPGDVVVFNDTRVIPARLFGQKASGGKVEMLLERPLDAHRGLAHLRASKSPKPGTELIFEGDIRAVVEGRQDALFELRFLGETPLIALLERHGHMPLPPYITREDELADRERYQTVYARREGAVAAPTAGLHFDESMMEALRAKGVETAFVTLHVGAGTFQPVRVDDIREHHMHSEWLEVDESVCERVNRAHAAGNKVVAVGTTSVRCLETASQSGNGELTPYRGETDIFIYPGYRWRCVDALVTNFHLPESTLLMLVSSFAGYDAVMRAYREAVAEQYRFFSYGDAMYLTRQPD

SEQ ID NO: 71778 - protein, 345 aa, Salinicola sp.
  REGION 1..345: note = tr|A0A1S2DIW0|A0A1S2DIW0_9GAMM S-adenosylmethionine:tRNA ribosyltransferase-isomerase; OS = Salinicola sp. MIT1003 OX=1882734 GN=queA PE=3 SV=1
MQRADFHFDLPDELIARYPSEQRTDCRLLCVDGESGALEHARFPDLLSRLEPGDVVVFNDTRVIPARLFGQKASGGKVEMLLERPLDAHRGLAHLRSSKSPKPGTELIFEGDIHAVVEGRRDALFELRFLGETPLIALLEQHGHMPLPPYITREDELTDRERYQTVYARREGAVAAPTAGLHFDETMMEALRAKGVETAFVTLHVGAGTFQPVRVDDIREHHMHSEWLEVDESVCEQVNRAHAAGNKVVAVGTTSVRCLETASQSESGELVPYRGETDIFIYPGYRWRCVDALVTNFHLPESTLLMLVSSFAGYETVMRAYQEAVAEQYRFFSYGDAMFLTRQPN

SEQ ID NO: 71779 - protein, 345 aa, Salinicola sp.
  REGION 1..345: note = tr|A0A1Q8SZD9|A0A1Q8SZD9_9GAMM S-adenosylmethionine:tRNA ribosyltransferase-isomerase; OS = Salinicola sp. MH3R3-1 OX=1928762 GN=queA PE=3 SV=1
MQRADFHFDLPDELIARYPSEQRTDCRLLCVDGESRALEHARFPDLMAKLGPGDVVVFNDTRVIPARLFGQKASGGKVEMLLERPLDSHRGLAHLRSSKSPKPGTELIFEGDIHAVVEGRQDALFELRFLGETPLIALLEQHGHMPLPPYITREDELADRERYQTVYARREGAVAAPTAGLHFDEAMMEALRAKGIETAFVTLHVGAGTFQPVRVDDIREHHMHSEWLEVEESVCEQVNRAHAAGNKVVAVGTTSVRCLETASQNDSGELTPYRGETDIFIYPGYRWRCVDALVTNFHLPESTLLMLVSSFAGYDAVMRAYQEAVTKEYRFFSYGDAMYLTRRPS

SEQ ID NO: 71780 - protein, 345 aa, Salinihabitans flavidus
  REGION 1..345: note = tr|A0A1H8QBH2|A0A1H8QBH2_9RHOB S-adenosylmethionine:tRNA ribosyltransferase-isomerase; OS = Salinihabitans flavidus OX=569882 GN=queA PE=3 SV=1
MKLSDFEFDLPERLIATRPASPRTAARLLVAQGDAITDARVRNLPGWLRAGDRLILNDTKVIPARLTGRRQRAGAQARIEVTLLEPQAVAGRWRALLKPLRKVREGEVITFSDNLSATLVAREDGQGLLEFSLSGADFDAALAEAGAMPLPPYIAARRPADERDKTDYQTVFARHSGAVAAPTASLHFDEALLQQIAAMGVGLTHVTLHVGAGTFLPVKVEDVRAHRMHAEWGRVSAEAAAQIAATRRAGGRIIPVGTTALRLIESAAAGGEIAPWDGETDIFIYPGYEFRVTDALMTNFHLPGSTLMMLVSALMGTQRIHRIYDHAIAEEYRFFSYGDASLLIR

SEQ ID NO: 71781 - protein, 351 aa, Salinimicrobium catena
  REGION 1..351: note = tr|A0A1H5P275|A0A1H5P275_9FLAO S-adenosylmethionine:tRNA ribosyltransferase-isomerase; OS = Salinimicrobium catena OX=390640 GN=queA PE=3 SV=1
MGMKLSHFNFDLPPELLAEYPSEHRDEARLMVLNRKDQTIEHRQFKDLIDYFEPHDVMVLNNTKVFPARLFGNKEKTGARIEVFLLRELNAETRLWDVLVDPARKIRIGNKLYFGEDESLVAEVIDNTTSRGRTLRFLYDGSYEEFRNKLTELGETPLPKYIKREVQPEDQERYQTIYAKQEGAVAAPTAGLHFSKHLLKRLEIKGIDFAEVTLHVGLGTFSPVEVEDLSKHKMDSEEAFIEKPAVETINKAINEKRKVCAVGTTVMRSLESSVSSNKTLNEFSGWTNKFIFPPYDFSIANCMITNFHTPKSTLLMMVSAFAGHDFMKKAYEEAVKEKYKFYTYGDAMLIL

SEQ ID NO: 71782 - protein, 351 aa, unidentified
  source 1..351: note = Salinimicrobium sediminis
  REGION 1..351: note = tr|A0A285X328|A0A285X328_9FLAO S-adenosylmethionine:tRNA ribosyltransferase-isomerase; OS = Salinimicrobium sediminis OX=1343891 GN=queA PE=3 SV=1
MGMKLSHFNFDLPPELLAEYPSENRDEARLMVLNRKDQTIEHKQFKDLIDYFEPNDVMVLNNTKVFPARLFGNKEKTGARIEVFLLRELNAETRLWDVLVDPARKIRIGNKLYFGEDESLVAEVIDNTTSRGRTLRFLYDGSYEEFRDKLTELGETPLPKYIKREVQPEDKERYQTIYAKSEGAVAAPTAGLHFSKHLLKRLEIKGIDFAEVTLHVGLGTFSPVEVEDLSKHKMDSEEAFIEKKAVDTINKAISEKRKVCAVGTTVMRSLESSVSSNRTLNEFSGWTNKFIFPPYDFSIANCMITNFHTPKSTLLMMVSAFAGHDFMKKAYAEAVKEKYKFYTYGDAMLIL

SEQ ID NO: 71783 - protein, 344 aa, unidentified
  source 1..344: note = Salinimonas sediminis
  REGION 1..344: note = tr|A0A346NP41|A0A346NP41_9ALTE S-adenosylmethionine:tRNA ribosyltransferase-isomerase; OS = Salinimonas sediminis OX=2303538 GN=queA PE=3 SV=1
MKLSEFNFSLPEKLIAKYPTQQRSASRLMHLHGPTGTVSHRMFTDMLELVDEGDLLIFNNTRVIPARLKGKKATGGQVEVLVERILPDDTVLAHVRASKAPKPGAGLVLEEHVNVTVIGRQDALFHLQFEHDQSVLNLLEAYGHMPLPPYIDRPDETSDKERYQTVYNQKPGAVAAPTAGLHFDDAILTALRNKGVTLGFVTLHVGAGTFQPVRVDNILEHQMHAEYAEVDEAVVEAVLRTKAAGKRVIAVGTTSVRSIESAAKAAEQELIAPFFADTDIFIYPGFNFKVIDAMFTNFHLPESTLMMLISAFAGRDNVMNAYQQAIDNDYRFFSYGDSMFIEKA

SEQ ID NO: 71784 - protein, 344 aa, Salinimonas sp.
  REGION 1..344: note = tr|A0A5B7YBS9|A0A5B7YBS9_9ALTE S-adenosylmethionine:tRNA ribosyltransferase-isomerase; OS = Salinimonas sp. KX18D6 OX=2572577 GN=queA PE=3 SV=1
MKLSDFNFSLPEHLIAKYPTEQRSASRLMHLNGTDGEVKHRMFADMLELVEEGDLLIFNNTRVIPARLKGKKPTGGQVEVLVERILDNNCVLAHVRASKAPKPDTQLILEDAVNVTVTGRQDALFLLRFDHDESVLALLEKYGHMPLPPYIDRPDESSDKERYQTVYNQKPGAVAAPTAGLHFDDAILQRLADKGVQTGFVTLHVGAGTFQPVRVDNILEHQMHAEYAEVPEDVVEQVRQTKAKGKRVIAVGTTSVRSLESAAKAAGDEIIAPFFDDTDIFIYPGFNFKVVDAMFTNFHLPESTLMMLISAFARRDNVMNAYAQAIDREYRFFSYGDSMFIEKA

SEQ ID NO: 71785 - protein, 344 aa, unidentified
  source 1..344: note = Saliniradius amylolyticus
  REGION 1..344: note = tr|A0A2S2E567|A0A2S2E567_9ALTE S-adenosylmethionine:tRNA ribosyltransferase-isomerase; OS = Saliniradius amylolyticus OX=2183582 GN=queA PE=3 SV=1
MKVSDFHFELPDHLIARYPSAERTASRLLTLDGCTGQFQHRRFNDILELLNPGDLLVFNNTRVIPARLLGQKASGGKVEVLVERILDDHLVLAHVRANKSPKPGTKLVVGNDLELEITGRRQALFEVQFPKHEPVLTQLEEHGHMPLPPYIDRPDEDSDKERYQTVYGEKPGAVAAPTAGLHFDETILQKLTDKGVNQAFVTLHVGAGTFQPVRVENIHDHIMHSEYAEVPQEVVDAIQATKAAGNKVVAVGTTSVRSLESAAQASKDALIAPFYDDTSIFIYPGYDFQVVDAMVTNFHLPESTLMMLVSAFSGREHIMNAYAEAVAEEYRFFSYGDAMFLTRQ

SEQ ID NO: 71786 - protein, 443 aa, unidentified
  source 1..443: note = Salinisphaera halophila
  REGION 1..443: note = tr|A0A423Q2Q4|A0A423Q2Q4_9GAMM S-adenosylmethionine:tRNA ribosyltransferase-isomerase; OS = Salinisphaera halophila YIM 95161 OX=1051139 GN=queA; PE = 3 SV=1
MEADAGRGGRATGPGLIDLQPARRYSPHGTDVDADAAALGTRPASLSVGPSRPRIVGTGSITRPARPPCANQARAAAALAAAGAGRQNPRQPPTEPVLMDKRDFDYDLPEQRIAQRPPARRSASRLLHLDREGGRADRAITDLVDLLEPGDLLVFNDTRVLAARLYGQKASGGRVEVMLERVLDSVRISAKIRANKPPRADTRIAIGDFMLQVTARRGELYTLTLEAGTVAALLDAHGHVPLPPYIRRADTPADLERYQTLWARHEGAVAAPTAGLHFDTPLLEALAARGVAFGYATLHVGSGTYQRLREGDVRSQRLHAERVAVDDALCALIGRTRAAGRRVVAVGTTVVRSLESAARQPGTEGRIAPFSGETALFIKPGDPFHVVDAVLTNFHEPQSSLLMLVAAFAGRERVLEAYAHAVNAEYRFLSYGDAMFIERTAAG

SEQ ID NO: 71787 - protein, 340 aa, Salinisphaera hydrothermalis
  REGION 1..340: note = tr|A0A084IM58|A0A084IM58_SALHC S-adenosylmethionine:tRNA ribosyltransferase-isomerase; OS = Salinisphaera hydrothermalis (strain C41B8) OX=1304275; GN = queA PE=3 SV=1
MDKRDFDYVLPEASIAQAPLAERRASRLLALDRQSGAVDDRRVVDLPALLDPHDLLVFNDTRVLAARMHGHKATGGAVEVMLERILDSRRLTAKIRANKPPRAEAEIRIGDYRLSVAARHGELYTLALDGDASVHDLLDAHGHMPLPPYIRRPDEITDRERYQTVWARHDGAVAAPTAGLHFDEVLLDALAARGVNFGYVTLHVGSGTYQRLREGDVRQQTLHAERLQVDALLCEQAAAARAAGGRVIAVGTTAVRSLETAARANGDQLGPYQGETQLFLKPGDTFHAVDAIFTNFHEPQSSLLMLISAFAGRDNVLAAYAHAVEAGYRFLSYGDAMLIR

SEQ ID NO: 71788 - protein, 342 aa, unidentified
  source 1..342: note = Salinisphaera japonica
  REGION 1..342: note = tr|A0A423PMP3|A0A423PMP3_9GAMM S-adenosylmethionine:tRNA ribosyltransferase-isomerase; OS = Salinisphaera japonica YTM-1 OX=1209778 GN=queA PE=3; SV = 1
MVMDKTDFDYALPEARIAQAPLAERRASRMLCVDRTSGALADRRIVDLLDLLEAGDLLVFNDTRVLAARLYGHKTTGGAVEIMLERILAAERISAKIRANKPPRPGTRIIIGGFTLEVTARHGELYHLAIADAASLDALLGAHGHMPLPPYIRRDDQASDRTRYQTVWARHDGAVAAPTAGLHFDETLLAGLAERGVAFGYVTLHVGSGTYQRLREGDLAGQRLHAERVFVDADVCDAVARTKAAGGRVIAVGTTAIRSLETAARAGGGPMVPYADETELFIKPGDPFHVVDGVITNFHEPQSSLLMLIAAFAGRESVLAAYAHAIACEYRFLSYGDAMFIR

SEQ ID NO: 71789 - protein, 345 aa, unidentified
  source 1..345: note = Salinisphaera orenii
  REGION 1..345: note = tr|A0A423PKA5|A0A423PKA5_9GAMM S-adenosylmethionine:tRNA ribosyltransferase-isomerase; OS = Salinisphaera orenii MK-B5 OX=856730 GN=queA PE=3 SV=1
MDKRDFDYDLPEHRIAQRPPARRSASRLLHLDREGERADRAITDLVDLLEPGDLLVFNDTRVLAARLYGQKASGGRVEVMLERVLDSVRISAKIRANKPPRADTRIAIGDFMLQVTARRGELYTLTLETGTVAALLDTHGHVPLPPYIRRADTPADLERYQTLWARHEGAVAAPTAGLHFDTPLLEALAARGVAFGYATLHVGSGTYQRLREGDVRSQRLHAERVAVDDALCALIERTRAAGRRVVAVGTTVVRSLESAARQPGTEGRIAPFSGETALFIKPGDPFHVVDAVLTNFHEPQSSLLMLVAAFAGRERVLEAYAHAVNAEYRFLSYGDAMFIERTAAG

SEQ ID NO: 71790 - protein, 342 aa, Salinisphaera shabanensis
  REGION 1..342: note = tr|U2FRR8|U2FRR8_9GAMM S-adenosylmethionine:tRNA ribosyltransferase-isomerase OS=Salinisphaera shabanensis E1L3A OX=1033802 GN=queA PE=3 SV=1
MDKHDFDYDLPAEAIAQQPLAERSASKLLTLDRHTGALVDGRITELVERLAPGDLVVFNDTRVLAARLFGHKASGGAVEVMLERILDSRRISAKIRANKPPRAGTVIEIGETTLEVEAREGELYTLMQTGGDSITTMLDVHGHVPLPPYIRREDTTADRSRYQTVWARHDGAVAAPTAGLHFDEALLGTLAQRGVEFGYATLHVGSGTYQRLREGDLAGQRLHAERVHVPAVLCEQVEAAKTRGSRVIAVGTTVVRSLESAARQPDTNGRIAPFEGETALFLKPGDDFHVVDAMVTNFHEPQSSLLMLVSAFAGREHVFAAYEHAKRSGYRFLSYGDAMFIG

SEQ ID NO: 71791 - protein, 342 aa, Salinisphaera sp.
  REGION 1..342: note = tr|A0A2E0IVL4|A0A2E0IVL4_9GAMM S-adenosylmethionine:tRNA ribosyltransferase-isomerase; OS = Salinisphaera sp. OX=1914330 GN=queA PE=3 SV=1
MNKHDFDYDLPADSIAQQPLARRSASRLLTLARDDGHLIDGAITDLPDRLAQGDLLVFNDTRVLAARLFGHKHSGGAVEVMLERILDSQRISAKIRANKPPKPGAGIVIGDTTLEVAAREGELYTLAHVAGDSIATMIEAHGHVPLPPYIRREDTAGDRARYQTVWARHDGAVAAPTAGLHFDDALLTALADKGVDFGYVTLHVGSGTYQRLREGDLADQRLHAERVHVDERLCAQVAATRARGGRVVAVGTTVVRSLESAARQPQAEGRLQPFAGETALFIKPGDPFHVVDAMLTNFHEPQSSLLMLVSAFASREAVLNAYEHAKTGGYRFLSYGDAMFIG

SEQ ID NO: 71792 - protein, 341 aa, Salinisphaera sp.
  REGION 1..341: note = tr|A0A2Z3J2N4|A0A2Z3J2N4_9GAMM S-adenosylmethionine:tRNA ribosyltransferase-isomerase; OS = Salinisphaera sp. LB1 OX=2183911 GN=queA PE=3 SV=1
MDKHDFDYILPEASIAQAPLAERRASRLLRLDRRDGTWADRRVVDLPELLGRNDLLVFNDTRVLAARMHGRKATGGAVEVMLERILDSARLTAKIRANKPPRIDAEIIIGATRLTVAARHGELYTLVLADPASSVHDLLDAHGHMPLPPYIRRPDEIADRERYQTVWARHDGAVAAPTAGLHFDAVLLDALAGRGVDFGTVTLHVGSGTYQRLREGDVRAQRLHAERLQVGQALCDQAAAARAAGGRVIAVGTTAVRSLETAARAHNGRLGPYAGETQLFLKPGDDFHAVDAIFTNFHEPQSSLLMLVSAFAGRDNVLAAYAHAVEAGYRFLSYGDAMFIA

SEQ ID NO: 71793 - protein, 339 aa, unidentified
  source 1..339: note = Salinisphaeraceae bacterium
  REGION 1..339: note = tr|A0A2D4SAK4|A0A2D4SAK4_9GAMM S-adenosylmethionine:tRNA ribosyltransferase-isomerase; OS = Salinisphaeraceae bacterium OX=2026789 GN=queA PE=3 SV=1
MRLEDFDYPLPPEAIAQQPLPVRSDSRMLHLDRAGERLDDRRVRALPACLAPGDLLVLNDTRVLAARLFGRKNTGGAVEIFLERILDSRRLSAKLRASRTPRAGGRLYVGEFALQVESRNDELFILHCDRDISDLLDAHGHVPLPPYIQRPDAETDVERYQTVWARHAGAVAAPTAGLHFDQPLLDALRQRGVATAQVTLHVGSGTYQRVRQSDIEQHRLHHERLIVGDSLCRAINETRQRGGRVVAVGTTVVRSLETAARHAATGEIEPYAGETDLFIRPGFDFRVVDAMVTNFHEPQSTLLMLVSAFAGRQRVLDAYAHALRQGYRFLSYGDAMLLT

SEQ ID NO: 71794 - protein, 375 aa, unidentified
  source 1..375: note = Salinispira pacifica
  REGION 1..375: note = tr|V5WJ57|V5WJ57_9SPIO S-adenosylmethionine:tRNA ribosyltransferase-isomerase OS=Salinispira pacifica; OX = 1307761 GN=queA PE=3 SV=1
MKTKDFYFDLPEELVAQHPSETRGGSRLLVYDRKNEYRSQNTSHGAEDRVTHDMVSRLADHIPRDTLMVFNNTRVRKARVYATSDTGSRVEFLFLAPMISGNPEGSTAHIGTGFSSLPQDQPSDTWQVMVSKTKRQKPGRSYEFPADLKGEIIATEESLRIIRLDRQIDESYFSREGHVPLPPYIEREDDSSDDRRYQTVYASREGSVAAPTAGLHITQSILEALDARGIRRCEITLHVGLGTFLPVRSESILDHNMHSEEYEVSQESAELITRHKQAGAPVLAVGTTSVRTLESAWNAEQMKLPAGRNSTDIFIYPGYKFQVVDMLMTNFHTPESTLLMLVSAFAGKDEILRVYREAVDEKYRFFSYGDAMLIR

SEQ ID NO: 71795 - protein, 350 aa, unidentified
  source 1..350: note = Salinivibrio kushneri
  REGION 1..350: note = tr|A0A4P8H5E6|A0A4P8H5E6_9GAMM S-adenosylmethionine:tRNA ribosyltransferase-isomerase; OS = Salinivibrio kushneri OX=1908198 GN=queA PE=3 SV=1
MQLSDFHFELPDELIARYPQPDRSASRLLSLDGTSGEVVHRQFKDILELVEPGDLMVFNNTRVIPARVYGRKASGGKIEVLVERVLDEQRFLAHVRASKAPKPGAELFLGDEGQVAAQMVARHDALFEIQLNSDKGVVDTLNDIGHMPLPPYIDRPDEDSDKERYQTVYGEKPGAVAAPTAGLHFDDAVMAALKEKGVNIAFVTLHVGAGTFQPVRVDNIEEHTMHAEYAEVPQEVVDAVNQTRAQGKRVIAVGTTSVRSLESAAQAAKQKGEPLSPFFNDTQIFIYPGYEWQLVDVLVTNFHLPESTLIMLVSAFAGYQHTMAAYRAAVEARYRFFSYGDAMFITRQHN

SEQ ID NO: 71796 - protein, 350 aa, unidentified
  source 1..350: note = Salinivibrio kushneri
  REGION 1..350: note = tr|A0A1V3GIC4|A0A1V3GIC4_9GAMM S-adenosylmethionine:tRNA ribosyltransferase-isomerase; OS = Salinivibrio kushneri OX=1908198 GN=queA PE=3 SV=1
MQLSDFHFELPDELIARYPQPDRSASRLLSLDGTSGEVVHRQFKDILELVEPGDLMVFNNTRVIPARVYGRKASGGKIEVLVERVLDEQRFLAHVRASKAPKPGAELFLGDEGQVAAQMVARHDALFEIQLNSDKGVVDTLNEIGHMPLPPYIDRPDEDSDKERYQTVYGEKPGAVAAPTAGLHFDDAVMAALKEKGVNIAFVTLHVGAGTFQPVRVDNIEEHTMHAEYAEVPQEVVDAVNQTRAQGKRVIAVGTTSVRSLESAAQEAKQKGEPLSPFFNDTQIFIYPGYEWQLVDVLVTNFHLPESTLIMLVSAFAGYQHTMAAYRAAVEARYRFFSYGDAMFITRQHN

SEQ ID NO: 71797 - protein, 350 aa, Salinivibrio sharmensis
  REGION 1..350: note = tr|A0A1V3H3D7|A0A1V3H3D7_9GAMM S-adenosylmethionine:tRNA ribosyltransferase-isomerase; OS = Salinivibrio sharmensis OX=390883 GN=queA PE=3 SV=1
MQLSDFHFELPDELIARYPQPDRSASRLLSLDGTSGDVVHRQFKDILDLVEPGDLMVFNNTRVIPARVYGRKASGGKIEVLVERVLDEQRFLAHVRASKAPKPGAELFLGDEGQVAAQMVARHDALFEIQLNSDKGVVDTLNDIGHMPLPPYIDRPDEESDKERYQTVYNQKPGAVAAPTAGLHFDDAIMAALKEKGVNIAFVTLHVGAGTFQPVRVDNIEEHTMHAEYAEVPQEVVDAVNQTRAQGKRVIAVGTTSVRSLESAAQAAKQKGEPLSPFFNDTQIFIYPGYEWQLVDVLVTNFHLPESTLIMLVSAFAGYQHTMAAYRAAVEERYRFFSYGDAMFITRQHN

SEQ ID NO: 71798 - protein, 359 aa, Salinivibrio sp.
  REGION 1..359: note = tr|A0A1V3HY18|A0A1V3HY18_9GAMM S-adenosylmethionine:tRNA ribosyltransferase-isomerase; OS = Salinivibrio sp. IB872 OX=1766123 GN=queA PE=3 SV=1
MQLSDFHFELPDELIARYPQPDRSASRLLSLDGTSGEVVHRQFKDILELVEPGDLMVFNNTRVIPARVYGRKASGGKIEVLVERVLDERRFLAHVRASKAPKPGAELFLGDDGQIPAEMVARHDALFEIQLNGDKGVVDTLNDIGHMPLPPYIDRPDEESDKERYQTVYNQKPGAVAAPTAGLHFDDAIMAALKEKGVNIAFVTLHVGAGTFQPVRVDNIEEHVMHAEYAEVPQEVVDAVNHTRAQGKRVIAVGTTSVRSLESAAQAAKQNGEPLAPFFNDTQIFIYPGYQWQLVDVLVTNFHLPESTLIMLVSSFAGYEHTMAAYRTAVEERYRFFSYGDAMFITRQQDADSSTTTRD

SEQ ID NO: 71799 - protein, 350 aa, Salinivibrio sp.
  REGION 1..350: note = tr|A0A1V3GST9|A0A1V3GST9_9GAMM S-adenosylmethionine:tRNA ribosyltransferase-isomerase; OS = Salinivibrio sp. ML290 OX=1909468 GN=queA PE=3 SV=1
MQLSDFHFELPDELIARYPQPDRSASRLLSLDGTSGEVVHRQFKDILDLVEPGDLMVFNNTRVIPARVYGRKASGGKIEVLVERVLDERRFLAHVRASKAPKPGAELFLGDDGQVPAKMVARHDALFEIQLHDDKGVVDTLNDIGHMPLPPYIDRPDEESDKERYQTVYNQKPGAVAAPTAGLHFDDAIMAALKEKGVNIAFVTLHVGAGTFQPVRVDNIEEHTMHAEYAEVPQEVVDAVNQTRARGKRVIAVGTTSVRSLESAAQAAKQKGEPLSPFFNDTQIFIYPGYEWQLVDVLVTNFHLPESTLIMLVSAFAGYQHTMAAYRAAVEERYRFFSYGDAMFITRQHH

SEQ ID NO: 71800 - protein, 349 aa, unidentified
  source 1..349: note = Salinivirga cyanobacteriivorans
  REGION 1..349: note = tr|A0A0S2HZU3|A0A0S2HZU3_9BACT S-adenosylmethionine:tRNA ribosyltransferase-isomerase; OS = Salinivirga cyanobacteriivorans OX=1307839 GN=queA_1; PE = 3 SV=1
MKLSQFNYKLPEELIALHPAHNRDESRLMVVHRDSGKIEHKEFKDVLNYFKEDDAMIFNNTKVFPARLYGNKEKTGAKIEVFLLRELNRDQRLWDVLVDPARKIRIGNKLYFGENNSLVAEVIDNTTSRGRTLRFLFDGPYEEFKKTLYAHGETPLPKFIKREVKEEDRDRYQTIYAKHEGAVAAPTAGMHFSRELMKRLEILGVNFGFITLHVGLGNFRTVEVEDLTKHKMDSEQILITEDAANIVNSARERKSSICAVGTTVMRTLESSVSTNGMVKPYDGWTNKFIFPPYEFSVADSMISNFHLPLSTLLMMVSAFGGYDLIKDAYQTAIKEKYRFGTYGDAMLIL

SEQ ID NO: 71801 - protein, 419 aa, unidentified
  source 1..419: note = Salinivirga cyanobacteriivorans
  REGION 1..419: note = tr|A0A0S2I528|A0A0S2I528_9BACT S-adenosylmethionine:tRNA ribosyltransferase-isomerase; OS = Salinivirga cyanobacteriivorans OX=1307839 GN=queA_2; PE = 3 SV=1
MLIFVAQNFHKSKYFVLNSEQMKDIDINKYNYELPSERIAKYPLKKRDASKLLVYNKGAIEDHIFSELPELLPRDTRMFFNNTKVLYARLPFEKITGAQIEIFCLEPHDPADYSMNLTTRKRCQWKCLVGNLKKWKSGVLKLKGHDKIGLEASMIEKTPEHVVVEFTWKTDFSFAEILEEAGNVPIPPYLNRAAEEEDKSTYQTTYSKIDGSVAAPTAGLHFTPEVFQQLKAQHIPLHEVTLHVSAGTFRPVDHDNVRRHQMHEEYIHVDRATIASLIDNKNNVLAVGTTTVRTLESLYWIGVQILNNKPNQEHFFNVEQWEPYKEVGSSTTQEALKAILEYMDRFRLDYITGNTRIIIVPGYEHRVVDLLLTNFHQPKSTLLLLLASFIGDEWQKMYQHALNNNYRFLSYGDSCLIKL

SEQ ID NO: 71802 - protein, 349 aa, unidentified
  source 1..349: note = Salinivirgaceae bacterium
  REGION 1..349: note = tr|A0A2N6A128|A0A2N6A128_9BACT S-adenosylmethionine:tRNA ribosyltransferase-isomerase; OS = Salinivirgaceae bacterium OX=2053305 GN=queA PE=3 SV=1
MKLSQFNYKLPEELIALDPSDNRDESRLMVIDRESGKIEHKVFKDVLGYFKEDDVMVFNNTKVFPARLYGNKEKTGAKIEVFLLRELNRDQRLWDVLVDPARKIRIGNKLYFGENNSLVAEVIDNTTSRGRTLRFLFDGPYEEFKKTLYAHGETPLPKFIKRDVKTEDKERYQTIFAKHEGAVAAPTAGMHFSRELMKRLEILGVHFGFVTLHVGLGNFRTVEVEDLTKHKMDSEKIIIDDKATEIINSARERKSKICAVGTTVMRTLESSVSTNGMVKPFDGWTNKFIFPPYEFSVAQSMISNFHLPLSTLLMMVSAYGGYDLTMEAYQVAIKEKYRFGTYGDAMMII

SEQ ID NO: 71803 - protein, 187 aa, unidentified
  source 1..187: note = Salinivirgaceae bacterium
  REGION 1..187: note = tr|A0A2N5ZMJ9|A0A2N5ZMJ9_9BACT S-adenosylmethionine:tRNA ribosyltransferase-isomerase (Fragment) OS=Salinivirgaceae bacterium OX=2053305; GN = C0599_10090 PE=3 SV=1
NRSIDWHEVTLHVGAGTFRPVDKEDVREHRMHQEFITVKRDAIVNLLNNLDHIIAVGTTTVRTLESLYWIGAQILKKMPDHEVFFHVEQWEPYKNEILPEPRASLEALLQYLDMYNIDHIIGNTEIIIVPGYKHQIVKGLITNFHQPKSTLLLLLASFVGDDWKRMYNHALDNGYRFLSYGDSCLIL

SEQ ID NO: 71804 - protein, 342 aa, unidentified
  source 1..342: note = Salipaludibacillus aurantiacus
  REGION 1..342: note = tr|A0A1H9RKC2|A0A1H9RKC2_9BACI S-adenosylmethionine:tRNA ribosyltransferase-isomerase; OS = Salipaludibacillus aurantiacus OX=1601833 GN=queA PE=3; SV = 1
MDVSQFDYDLPEELIAQTPLKDRIGSKLLIMDKIDGNINHGRFPDLLNYLEKGDTLVLNNTKVIPARLFGVKKETGAKIELLLLKEEENHTWEALVKPAKRVREGTVIDFGNGLLTGVCKEEMKEGRRKITFHFNGIFHEILDQLGEMPLPPYIQEQLEEKDRYQTVYAEHRGSAAAPTAGLHFTTDLLEEVQRKGVKIAYVTLHVGLGTFRPVSVDTVEDHTMHAEYYEIGDETAELLNKTKTNGGRIIAVGTTSARTLETIARDNEGDFKRSSGWTDIFIFPGYQFKAIDGLLTNFHLPKSTLVMLVSAFAGKDNILAAYKEAVERRYRFFSFGDAMLLI

SEQ ID NO: 71805 - protein, 347 aa, unidentified
  source 1..347: note = Salipaludibacillus aurantiacus
  REGION 1..347: note = tr|A0A1H9Q978|A0A1H9Q978_9BACI S-adenosylmethionine:tRNA ribosyltransferase-isomerase; OS = Salipaludibacillus aurantiacus OX=1601833; GN = SAMN05518684_10298 PE=3 SV=1
MNTVMPPAFTVPERLNASSPPEARGLRRDFVKMMVLSRQSGSWIDTSFSQLPGFLREGDLLVLNNSRTIPAVFKADIERNGFICKRNQEVRLARRLSEKVWEVLVPELNLQKNDQMHFSSRLSAEVINFKPELPFTVVEFSAASARLFEELYSTGEPVRYEYIHHPWSLDYYQTVYANVPGSVEMPSAGRAFSWELLQKLQAAGIRTAFLQLHTGLSYLLDDRWHQHPSHNKEHYSIPAATLSAVKQTKKDGGRVVPVGTTVVRALETAARRKSNLSSISGWTDLYINEATPLRVADGLITGFHEPEASHLDMLSAFLNRNQLITAYQHALKKGYLWHEFGDINFII

SEQ ID NO: 71806 - protein, 342 aa, unidentified
  source 1..342: note = Salipaludibacillus keqinensis
  REGION 1..342: note = tr|A0A323TX31|A0A323TX31_9BACI S-adenosylmethionine:tRNA ribosyltransferase-isomerase; OS = Salipaludibacillus keqinensis OX=2045207 GN=queA PE=3; SV = 1
MDVSQFDYELPEELIAQTPLKNRDSSKLLVMDRHSGEIQHKQFPALLEYLKSGDTLVLNNTKVIPARLFGMKKETGAKIELLLLKENGNHTWEALVKPAKRIKVGTEIDFGEGLLTGVCEEELAEGRRKIKFSFSGIFHEILDQLGEMPLPPYIQEQLEEKDRYQTVYAEHRGSAAAPTAGLHFTEDMLKEVTNRGIRLAYVTLHVGLGTFRPVAVENVQEHTMHSEYYQLDEITAKLLNETKRQGGRIVAVGTTSARTLETIARDHHGQFVSASGWTDIFIYPGYTFRAIDGLLTNFHLPKSTLVMLVSAFAGKEAILSAYKEAVSKKYRFFSFGDAMLLI

SEQ ID NO: 71807 - protein, 342 aa, unidentified
  source 1..342: note = Salipaludibacillus neizhouensis
  REGION 1..342: note = tr|A0A3A9K7N9|A0A3A9K7N9_9BACI S-adenosylmethionine:tRNA ribosyltransferase-isomerase; OS = Salipaludibacillus neizhouensis OX=885475 GN=queA PE=3; SV = 1
MDLSQFDYNLPEELIAQTPLKNREASKLLVLDKNTGICEHHHFYDLLSFLKQGDTLVLNNTKVIPARLFGIKDETGAKIELLLLKEKEDHIWEALVKPAKRVKVGTVIDFGEGLLTGRCMEELPEGRRMIQFEFKGIFHEILDQLGEMPLPPYIQEQLEEKDRYQTVYAEHKGSAAAPTAGLHFTKNMLENLQEAGIKIAYITLHVGLGTFRPVSVDNIDDHQMHSEFYQMNEESANILNESKKNKERIFAIGTTSARTLETITRDHHGEFKASSGWTDIFIYPGFNFQAIDGLLTNFHLPKSTLVMLVSALAGRERILHAYEEAIKNNYRFFSFGDAMLIC

SEQ ID NO: 71808 - protein, 349 aa, unidentified
  source 1..349: note = Salipiger aestuarii
  REGION 1..349: note = tr|A0A327XUD4|A0A327XUD4_9RHOB S-adenosylmethionine:tRNA ribosyltransferase-isomerase; OS = Salipiger aestuarii OX=568098 GN=queA PE=3 SV=1
MQLSDFDFDLPEDRIATRPAVPRSSARLLVATGDAITDGVVTDLVDWLRPGDRLVLNDTRVIPARLTGWRERDSAQGQTRARIEITLLEPRADGSWAALVKPLKRLRDGETVVFSDGLSARMTGREDGQGLFRFNLAGPDFDAALEAAGAMPLPPYIAAKRQADARDKSDYQTVWADRTGAVAAPTASLHFDTALLDALSARGVDFTRVTLHVGAGTFLPVKVDDVTTHKMHGEWGEVTPRAADEIAATQAAGGRIIPVGTTALRLIETAARDTGAIAPWRGVTDIFIYPGFEFRVTDALMTNFHLPRSTLMMLVSALVGRDRVMRIYDHAIARGYRFFSYGDASLLIP

SEQ ID NO: 71809 - protein, 349 aa, unidentified
  source 1..349: note = Salipiger bermudensis
  REGION 1..349: note = tr|Q0FP83|Q0FP83_SALBH S-adenosylmethionine:tRNA ribosyltransferase-isomerase OS=Salipiger bermudensis (strain DSM 26914 / JCM 13377 / KCTC 12554 / HTCC2601); OX = 3142 65 GN=queA PE=3 SV=1
MHLSDFDFDLPDELIATRPANPRSSARLLVAEGDTITDAVVRDLTQWLRPGDRLVLNDTKVIPARLSGARTRESAQGVTQAQIEITLLEPRPGGLWAALVKPLKKLREGETVVFSEALSATLEAREDGQGLLRFNLEGEDFDAALAEAGAMPLPPYIAAKRAADAQDKTDYQTVWAERTGAVAAPTASLHFDAGLLAALEAHGVAFTKVTLHVGAGTFLPVKVDDVTTHKMHGEWGEVSESAAAEIAATKAAGGRVIPVGTTALRLLETAARDSGAIAAWQGVTDIFIYPGFAFRVTDALMTNFHLPKSTLMMLVSALMGRERMMGIYEHAISERYRFFSYGDSSLLIP

SEQ ID NO: 71810 - protein, 349 aa, unidentified
  source 1..349: note = Salipiger marinus
  REGION 1..349: note = tr|A0A1G8RA18|A0A1G8RA18_9RHOB S-adenosylmethionine:tRNA ribosyltransferase-isomerase; OS = Salipiger marinus OX=555512 GN=queA PE=3 SV=1
MLLSDFDFPLPEDLIATRPASPRSAARLLVAEGACLTDAVVRDLPDWLRPGDRLVLNDTRVIPARLSGLRHRHGAQGDTAAQIELTLLEPRPGGLWAALVKPLKKLREGETVVLSDELSATLAGREDGQGLFRFNLTGEDFDAALARAGAMPLPPYIAAKRPADEQDKTDYQTVWARHSGAVAAPTASLHFDAPLLAALEAHGVSFTHVTLHVGAGTFLPVKVEDVTTHRMHGEWGEVTAPAAAEIAATKAAGGRVIPVGTTALRLIETAARDSGQVVPWQGVTDIFIYPGFTFRAADALMTNFHLPKSTLMMLVAAFMGKARIDRVYAHALAERYRFFSYGDASLLIP

SEQ ID NO: 71811 - protein, 349 aa, Salipiger mucosus
  REGION 1..349: note = tr|S9S4B1|S9S4B1_9RHOB S-adenosylmethionine:tRNA ribosyltransferase-isomerase OS=Salipiger mucosus DSM 16094 OX=1123237 GN=queA PE=3 SV=1
MKLSDFDFDLPEDLIATRPARPRSSARLLVAEGDAVTDAVVRDLADWLRPGDRLVLNDTRVIPARLSGTRRRAGAQGESEAKIEVTLLEPRADGLWSALVKPLKKLREGETVTFSPALSATLEAREEGQGLLRFNLTGEDFDAALAEAGAMPLPPYIAARRAADAQDRDDYQTVWARNAGAVAAPTASLHFDEPLLAALRDHGVDFTHVTLHVGAGTFLPVKVEDVTTHKMHGEWGEVSESAAAEIADTKARGGRVIPVGTTALRLIETAARESGAIAPWRGTTEIFIYPGFEFRVADALMTNFHLPKSTLLMLVSALMGRERMLRIYAHAVAERYRFFSYGDASLLIP

SEQ ID NO: 71812 - protein, 349 aa, unidentified
  source 1..349: note = Salipiger profundus
  REGION 1..349: note = tr|A0A1U7DBT9|A0A1U7DBT9_9RHOB S-adenosylmethionine:tRNA ribosyltransferase-isomerase; OS = Salipiger profundus OX=1229727 GN=queA PE=3 SV=1
MKLSDFDFDLPEDLIATRPASPRSSARLLVADGDRIQDAIVRDLTDWLRPGDRLVLNDTRVIPARLSGTRTRDGAQGTTQAQIELTLLEPRADGCWAALVKPLKKLREGETVVFSDRLSAVLEAREEGQGLFRFNLAGEDFDAALAEAGAMPLPPYIAAKRAADARDKEDYQTVWAERSGAVAAPTASLHFDAPLLAALEAQGVTFSKVTLHVGAGTFLPVKVDDVTAHKMHGEWGEVTDTAAAEIAATKAAGGRVIPVGTTALRLIETAARETGTIAPWQGVTDIFIYPGFAFRVTDALMTNFHLPKSTLMMLVSALMGRERMMRVYAHAIAERYRFFSYGDASLLIP

SEQ ID NO: 71813 - protein, 349 aa, Salipiger sp.
  REGION 1..349: note = tr|A0A4Q3YY49|A0A4Q3YY49_9RHOB S-adenosylmethionine:tRNA ribosyltransferase-isomerase; OS = Salipiger sp. IMCC34102 OX=2510647 GN=queA PE=3 SV=1
MKLSDFDFDLPDDRIALRPARPRTSAKLLVATPDEIRDAHVRDLVDLLQPGDRLVLNDTKVIPARLTGTRTRTGAAGTTSARIEVTLLSPTPEGWQALVKPLKKVRDGEVIAFKAGLRARVLGRAEGQAHLAFDTQGADFDAALDRAGQMPLPPYIAALRPADAADRDDYQTAWARATGAVAAPTASLHFDAKLLQALAAKGVETTFVTLHVGAGTFLPVKVDDIADHRMHAEWGEVTPEAAAQIAATKAAGGRVIPVGTTALRLIETAARAGEIGPWTGETDIFITPGFTFHVADALMTNFHLPKSTLMMLVSAFIGVERIRQIYDHAIANDYRFFSYGDASLLLPRG

SEQ ID NO: 71814 - protein, 349 aa, unidentified
  source 1..349: note = Salipiger thiooxidans
  REGION 1..349: note = tr|A0A1G7DMN1|A0A1G7DMN1_9RHOB S-adenosylmethionine:tRNA ribosyltransferase-isomerase; OS = Salipiger thiooxidans OX=282683 GN=queA PE=3 SV=1
MKLSDFDFDLPEALIATRPANPRSSARLLVADGDRLTDAVVRDLTQWLRPGDRLVLNDTKVIPARLSGTRERDGAQGLTRAQIEVTLLEPRADGCWAALVKPLKKLREGETVVFSDALSAVLESREEGQGLLRFNLVGEDFDAALAEAGAMPLPPYIAARRAADAQDKQDYQTVWAERNGAVAAPTASLHFDEPLLESLRAHGVAFTKVTLHVGAGTFLPVKVEDVTTHRMHGEWGEVSDSAAAEIAATKAAGGRVIPVGTTALRLLETAARDTGAIAPWQGVTDIFIYPGFTFRVTDALMTNFHLPKSTLMMLVSALMGQERMKRIYDHAITERYRFFSYGDSSLLIP

SEQ ID NO: 71815 - protein, 349 aa, unidentified
  source 1..349: note = Salisediminibacterium haloalkalitolerans
  REGION 1..349: note = tr|A0A1H9VD23|A0A1H9VD23_9BACI S-adenosylmethionine:tRNA ribosyltransferase-isomerase; OS = Salisediminibacterium haloalkalitolerans OX=1464123; GN = queA PE=3 SV=1
MDVSYFDYELPEELIAQTPLKDRSSSRLLVMDKDSGQTDHRVFHELDEFLQPGDRLVLNNTKVLPARLFGVKEETKAKTEVLLLNEESDHTWEVLVKPAKKIKVGTRVSFGGGLLTGECTDILPEGRRKIRFEFEGIFQEILDRLGEMPLPPYIQETLDEQDRYQTVYAKHRGSAAAPTAGLHFTEEMLKQLEEKGVGISYVTLHVGLGTFRPVAVDTVEAHTMHAEFYEVSEETAKALNATANGEGRIVAVGTTSARTLETIVRDYGKFQAASGWTDIFIYPGFTFRAVDSLLTNFHLPKSTLMMLVSAFAGRDAIMNAYREAVDHRYRFFSFGDAMFLTDGLAEGYQ

SEQ ID NO: 71816 - protein, 343 aa, unidentified
  source 1..343: note = Saliterribacillus persicus
  REGION 1..343: note = tr|A0A368XEQ2|A0A368XEQ2_9BACI S-adenosylmethionine:tRNA ribosyltransferase-isomerase; OS = Saliterribacillus persicus OX=930114 GN=queA PE=3 SV=1
MNIEDFDFELPEELIAQTPLIDRTASKMMVLHAAENTISHERFYNISNYLKPGDCLVLNDTKVLPARLYGSKTDTNAKVEVLLLTQEQDDNWEVLVKPAKKVKIGTTITFGDNKLTATCIKELEHGGRILRFSYSGIFYEVLDELGEMPLPPYIKEQLPDKDRYQTVFAKEQGSAAAPTAGLHFTEELLDEIKSKGVEIAFITLHVGLGTFRPVSVETIEDHHMHAEFYRMTKETADQLNQVKKKGGRVISVGTTSTRTLETIARDHHGEFKNCSGWTDIFIYPPYTFKAIDGLITNFHLPKSTLIMLISAFAGREFILNAYQEAVKEKYRFFSFGDAMLIFK

SEQ ID NO: 71817 - protein, 354 aa, unidentified
  source 1..354: note = Salmonella abony
  REGION 1..354: note = tr|A0A5I1FIH3|A0A5I1FIH3_SALAB tRNA preQ1(34) S-adenosylmethionine ribosyltransferase-isomerase QueA; OS = Salmonella abony OX=29482 GN=queA PE=4 SV=1
MRVTDFSFELPESLIAHYPQPERSRCRLLSLEGPTGALTHGTFTDLLDKLNPGDLLVFNNTRVIPARLFGRKASGGKIEVLVERMLDDKRILAHIRASKAPKPGTELLLGDDESIHATMTARHGALFEVEFNDPRPVLDILNAIGHMPLPPYIDRPDEDADRELYQTVYSKKPGAVAAPTAGLHFDEPLLAALREKGVEMAFVTLHVGAGTFQPVRVDTIEDHIMHSEYAEVPQEVVDAVLAAKARGNRVIAVGTTSVRSLESAAQAAKSDLIEPFFGDTQIFIYPGYQYKVIDALITNFHLPESTLIMLVSAFAGYQHTMNAYKTAVEQKYRFFSYGDAMFITYNPQAISERP

SEQ ID NO: 71818 - protein, 354 aa, unidentified
  source 1..354: note = Salmonella abony
  REGION 1..354: note = tr|A0A5J0DY62|A0A5J0DY62_SALAB tRNA preQ1(34) S-adenosylmethionine ribosyltransferase-isomerase QueA; OS = Salmonella abony OX=29482 GN=queA PE=4 SV=1
MRVTDFSFELPESLIAHYPQPERSRCRLLSLEGPTGALTHGTFTDLLDKLNPGDLLVFNNTRVIPARLFGRKASGGKIEVLVERMLDDKRILAHIRASKAPKPGTELLLGDDESIHATMTARHGALFEVEFNDPRPVLDILNAIGHMPLPPYIDRPDEDADRELYQTVYSEKPGAVAAPTAGLHFDEPLLAALREKGVEMAFVTLHVGAGTFQPVRVDTIEDHIMHSEYAEVPQEVVDAVLAAKARGNRVIAVGTTSVRSLESAAQAAKSDLIEPFFGDTQIFIYPGYQYKVIDALITNFHLPESTLIMLVSAFAGYQHTMNAYKTAVEQKYRFFSYGDAMFITYNPQAIFERP

SEQ ID NO: 71819 - protein, 359 aa, unidentified
  source 1..359: note = Salmonella agona
  REGION 1..359: note = tr|B5F5Y7|B5F5Y7_SALA4 S-adenosylmethionine:tRNA ribosyltransferase-isomerase OS=Salmonella agona (strain SL483) OX=454166 GN=SeAg_B1621 PE=3 SV=1
MLTEKYDFRITDQMTIPLRPHWIANDSYREKCKMLVLNRSKGEIHKVDFSKVTDYIKEGDVICFNDSTIINHMFICKTRRNRLIKVVLEGFLPNNRVIISGLLKERLNANDVFSLVDNPEISIKVEQKFSEESQYRAVVENHEALICYLASHGERLDEYVDSSLFYKYPDAYRSVFSKKYGSLEIPSAGIHFTWDLIQRIKDKGGLISFITLHVASTEMLSNRKIQTKCVEEVTINEEYYEVPQATADIINTAKQNGGRIFAVGTTVTRCLESAYSREHNCLKASSGWTALYIHPGYQLKVVDCLLTNLHQPKTTHMVLTGQFAGVDLLMKAYASEDIQSCQFDMFGDCMLIIQDEGQG

SEQ ID NO: 71820 - protein, 354 aa, unidentified
  source 1..354: note = Salmonella agona
  REGION 1..354: note = sp|B5EWT8|QUEA_SALA4 S-adenosylmethionine:tRNA ribosyltransferase-isomerase OS=Salmonella agona (strain SL483) OX=454166 GN=queA PE=3 SV=1
MRVTDFSFELPESLIAHYPQPERSRCRLLSLEGPTGALTHGTFTDLLDKLNPGDLLVFNNTRVIPARLFGRKASGGKIEVLVERMLDDKRILAHIRASKAPKPGTELLLGDDESIHATMTARHGALFEVEFNDPRPVLDILNAIGHMPLPPYIDRPDEDADRELYQTVYSEKPGAVAAPTAGLHFDEPLLAALREKGVEMAFVTLHVGAGTFQPVRVDTIEDHIMHSEYAEVPQEVVDAVLAAKARGNRVIAVGTTSVRSLESAAQAAKRDLIEPFFGDTQIFIYPGYQYKVIDALITNFHLPESTLIMLVSAFAGYQHTMNAYKTAVEQKYRFFSYGDAMFITYNPQAISERP

SEQ ID NO: 71821 - protein, 359 aa, unidentified
  source 1..359: note = Salmonella anatum
  REGION 1..359: note = tr|A0A3Y5SE67|A0A3Y5SE67_SALAN S-adenosylmethionine:tRNA ribosyltransferase-isomerase; OS = Salmonella anatum OX=58712 GN=ZD17_08270 PE=3 SV=1
MLTEKYDFRITDQMTIPLRPHWIANDSYREKCKMLVLNRSKGEIHKVDFSKVTDYIKEGDVICFNDSTIINHMFICKTRQNRLIKIVLEGFLPNNRVIISGLLKERLNANDVFYLVDNPEISIKIEQKFSEESQYRAVVENHEALICYLASHGERLDEYVDSSLFYKYPDAYRSVFSKKYGSLEIPSAGIHFTWDLIQKIKDKGGLISFITLHVASTEMLSNRKIQTKCVEEVTINEEYYEVPQATADIINTAKQNGGRIFAVGTTVTRCLESAYSREHNCLKASSGWTELYIHPGYQLKVVDCLLTNLHQPKTTHMVLTGHFAGVDLLMKAYASEDIQSCQFDMFGDCMLIIQDEGQG

SEQ ID NO: 71822 - protein, 359 aa, unidentified
  source 1..359: note = Salmonella anatum
  REGION 1..359: note = tr|A0A2T8MGA6|A0A2T8MGA6_SALAN S-adenosylmethionine:tRNA ribosyltransferase-isomerase; OS = Salmonella anatum OX=58712 GN=AA325_03560 PE=3 SV=1
MLTEKYDFRITDQMTIPLRPHWIANDSYREKCKMLVLNRSKGEIHKVDFSKVTDYIKEGDVICFNDSTIINHMFICKTRRNRLIKIVLEGFLPNNRVIISGLLKERLNANDVFYLVDNPEISIKVEQKFSEESQYRAVVENHESLICYLASHGERLDEYVDSSLFYKYPDAYRSVFSKKYGSLEIPSAGIHFTWDLIQRIKDKGGLISFITLHVASTEMLSNRKIQTKCVEEVTINEEYYEVPQATADIINTAKQNGGRIFAVGTTVTRCLESAYSREHNCLKASSGWTALYIHPGYQLKVVDCLLTNLHQPKTTHMVLTGQFAGVDLLMKAYASEDIQSCQFDMFGDCMLIIQDEGQG

SEQ ID NO: 71823 - protein, 356 aa, unidentified
  source 1..356: note = Salmonella arizonae
  REGION 1..356: note = sp|A9MM58|QUEA_SALAR S-adenosylmethionine:tRNA ribosyltransferase-isomerase OS=Salmonella arizonae (strain ATCC BAA-731 / CDC346-86 / RSK2980) OX=41514; GN = queA PE=3SV=1
MRVTDFSFELPESLIAHYPQPERSRCRLLSLEGPTGALTHGTFTDLLDKLNPGDVLVFNNTRVIPARLFGRKASGGKIEVLVERMLDDKRILAHIRASKAPKPGTELLLGDDENIHATMTARHGALFEVEFNDERPVLDILNAIGHMPLPPYIDRPDEDADRELYQTVYSEKPGAVAAPTAGLHFDKPLLAALREKGIEMAFVTLHVGAGTFQPVRVDTIEDHIMHSEYAEVPQEVVDAVLAAKARGNRVIAVGTTSVRSLESAAQAAKSDLIEPFFGDTQIFIYPGYQYKVIDALVTNFHLPESTLIMLVSAFAGYEHTMNAYKAAVEQKYRFFSYGDAMFITYNPQAIFERVGE

SEQ ID NO: 71824 - protein, 354 aa, unidentified
  source 1..354: note = Salmonella berta
  REGION 1..354: note = tr|A0A3V6R428|A0A3V6R428_SALBE S-adenosylmethionine:tRNA ribosyltransferase-isomerase; OS = Salmonella berta OX=28142 GN=queA PE=3 SV=1
MRVTDFSFELPESLIAHYPQPERSRCRLLSLEGPTGALTHGTFTDLLDKLNPGDLLVFNNTRVIPARLFGRKASGGKIEVLVERMLDDKRILAHIRASKAPKPGTELLLGDDESIHATMTARHGALFEVEFNDPRPVLDILNAIGHMPLPPYIDRPDEDADRELYQTVYSEKPGAVAAPTAGLHFDEPLLAALREKGIEMAFVTLHVGAGTFQPVRVDTIEDHIMHSEYAEVPQEVVDAVLAAKARGNRVIAVGTTSVRSLESAAQAAKNDLIEPFFGDTQIFIYPGYQYKVIDALITNFHLPESTLIMLVSAFAGYQHTMNAYKTAVEQKYRFFSYGDAMFITYNPQAISERP

SEQ ID NO: 71825 - protein, 354 aa, unidentified
  source 1..354: note = Salmonella berta
  REGION 1..354: note = tr|A0A3U8PAG3|A0A3U8PAG3_SALBE S-adenosylmethionine:tRNA ribosyltransferase-isomerase; OS = Salmonella berta OX=28142 GN=queA PE=3 SV=1
MRVTDFSFELPESLIAHYPQPERSRCRLLSLEGPTGALTHGTFTDLLDKLNPGDLLVFNNTRVIPARLFGRKASGGKIEVLVERMLDDKRILAHIRASKAPKPGTELLLGDDESIHATMTARHGALFEVEFNDPRPVLDILNAIGHMPLPPYIDRPDEDADRELYQTVYSEKPGAVAAPTAGLHFDEPLLAALREKGVEMAFVTLHVGAGTFQPVRVDTIEDHIMHSEYAEVPQEVVDAVLAAKARGNRVIAVGTTSVRSLESAAQAAKSDLMEPFFGDTQIFIYPGYQYKVIDALITNFHLPESTLIMLVSAFAGYQHTMNAYKTAVEQKYRFFSYGDAMFITYNPQAISERP

SEQ ID NO: 71826 - protein, 354 aa, unidentified
  source 1..354: note = Salmonella blockley
  REGION 1..354: note = tr|A0A5H8H6L4|A0A5H8H6L4_SALBL tRNA preQ1(34) S-adenosylmethionine ribosyltransferase-isomerase QueA; OS = Salmonella blockley OX=57741 GN=queA PE=4 SV=1
MRVTDFSFELPESLIAHYPQPERSRCRLLSLEGPTGALTHGTFTDLLDKLNPGDLLVFNNTRVIPARLFGRKASGGKIEVLVERMLDDKRILAHIRASKAPKPGTELLLGDDESIHATMTARHGALFEVEFNDPRPVLDILNAIGHMPLPPYIDRPDEDADRELYQTVYSEKPGAVAAPTAGLHFDEPLLAALREKGVEMAFVTLHVGAGTFQPVRVDTIEDHIMHSEYAEVPQEVVDAVLAAKARGNRVIAVGTTSVRSLESAAQAAKSDLIEPFFGDTQIFIYPGYQYKVIDALITNFHLPESTLIMLVSAFAGYQHTMNAYKTAVEQKYRFFSYGDAMFITYNPQAISERP

SEQ ID NO: 71827 - protein, 354 aa, Salmonella bongori
  REGION 1..354: note = tr|A0A0K0H7Z3|A0A0K0H7Z3_SALBC S-adenosylmethionine:tRNA ribosyltransferase-isomerase; OS = Salmonella bongori (strain ATCC 43975 / DSM 13772 / NCTC 12419) OX=218493 GN =queA PE=3 SV=1
MRVTDFSFELPESLIAHYPQPERSRCRLLSLDGPTGALTHGTFTDLLDKLNPGDLLVFNNTRVIPARLFGRKASGGKIEVLVERMLDDKHVLAHIRASKAPKPGTELLLGDEENIHATMIARHGALFEVEFNDERPVLDILNAIGHMPLPPYIARPDEDADRELYQTVYSEKPGAVAAPTAGLHFDEPLLARLRDKGIEMAFVTLHVGAGTFQPVRVETIEDHIMHSEYAEVPQDVVDAVLAAKARGNRVIAVGTTSVRSLESAAQAAKDTLIAPFFGDTQIFIYPGYQYKVIDALVTNFHLPESTLIMLVSAFAGYKHTMHAYHEAVKAEYRFFSYGDAMFITYNPQAITEVP

SEQ ID NO: 71828 - protein, 354 aa, Salmonella bongori; identical to SEQ ID NO: 71827
  REGION 1..354: note = tr|A0A5I6N141|A0A5I6N141_SALBN tRNA preQ1(34) S-adenosylmethionine ribosyltransferase-isomerase QueA; OS = Salmonella bongori CFSAN000510 OX=1299282 GN=queA PE=4; SV = 1

SEQ ID NO: 71829 - protein, 354 aa, unidentified
  source 1..354: note = Salmonella choleraesuis
  REGION 1..354: note = sp|Q57SF9|QUEA_SALCH S-adenosylmethionine:tRNA ribosyltransferase-isomerase OS=Salmonella choleraesuis (strain SC-B67) OX=321314 GN=queA PE=3 SV=1
MRVTDFSFELPESLIAHYPQPERSRCRLLSLEGPTGALTHGTFTDLLDKLNPGDLLVFNNTRVIPARLFGRKASGGKIEVLVERMLDDKRILAHIRASKAPKPGTELLLGDDESIHATMTARHGALFEVEFNDPRPVLDILNAIGHMPLPQYIDRPDEDADRELYQTVYSEKPGAVAAPTAGLHFDEPLLAALREKGVEMAFVTLHVGAGTFQPVRVDTIEDHIMHSEYAEVPQEVVDAVLAAKARGNRVIAVGTTSVRSLESAAQAAKSDLIEPFFGDTQIFIYPGYQYKVIDALITNFHLPESTLIMLVSAFAGYQHTMNAYKTAVEQKYRFFSYGDAMFITYNPQAISERP

SEQ ID NO: 71830 - protein, 357 aa, unidentified
  source 1..357: note = Salmonella derby
  REGION 1..357: note = tr|A0A4Z8T6A0|A0A4Z8T6A0_SALDE S-adenosylmethionine:tRNA ribosyltransferase-isomerase; OS = Salmonella derby OX=28144 GN=FG671_001140 PE=3 SV=1
MLTEKYDFRITDQMTIPLRPHWIANDSYREKCKMLVLNRSKGEIHKVDFSKVTDYIKEGDVICFNDSTIINHMFICKTRQNRLIKIVLEGFLPNNRVIISGLLKERLNANDVFSLIDNPEISIKIEQRFSEESQYRAVVENHEALICYLASHGERLDEYVDSSLFYKYPDAYRSVFSKKYGSLEIPSAGIHFTWDLIQRIKDKGGLISFITLHVASTEMLSNRKIQTKCVEEVTINEEYYEVPQATADIINTAKQNGGRIFAVGTTVTRCLESAYSREHNCLKASSGWTALYIHPGYQLKVVDCLLTNLHQPKTTHMVLTGQFAGVDLLMKAYASEDIQSCQFDMFGDCMLIIQDVG

SEQ ID NO: 71831 - protein, 354 aa, unidentified
  source 1..354: note = Salmonella derby
  REGION 1..354: note = tr|A0A3V6WDY7|A0A3V6WDY7_SALDE S-adenosylmethionine:tRNA ribosyltransferase-isomerase; OS = Salmonella derby OX=28144 GN=queA PE=3 SV=1
MRVTDFSFELPESLIAHYPQPERSRCRLLSLEGPTGALTHGTFTDLLDKLNPGDLLVFNNTRVIPARLFGRKASGGKIEVLVERMLDDKRILAHIRASKAPKPGTELLLGDDESIHATMTARHGALFEVEFNDPRPVLDILNAIGHMPLPPYIDRPDEDADRELYQTVYSEKPGAVAAPTAGLHFDEPLLAALREKGVEMAFVTLHVGAGTFQPVRVDTIEDHIMHSEYAEVPQEVVDAVLAAKARRNRVIAVGTTSVRSLESAAQAAKSDLIEPFFGDTQIFIYPGYQYKVIDALITNFHLPESTLIMLVSAFAGYQHTMNAYKTAVEQKYRFFSYGDAMFITYNPQAISERP

SEQ ID NO: 71832 - protein, 359 aa, unidentified
  source 1..359: note = Salmonella diarizonae
  REGION 1..359: note = tr|A0A3R0B6Y2|A0A3R0B6Y2_SALDZ S-adenosylmethionine:tRNA ribosyltransferase-isomerase; OS = Salmonella diarizonae OX=59204 GN=EL06_22900 PE=3 SV=1
MLTEKYNFRIVDTMTIPLRPHWISNDAYREKCKMLVLNRSKEEFHKVDFIKIIDYIKEGDVVCFNDSTIINHMFICKTKCNILVKIILEGFLPENRVIISGLLKEKFDGGDVLYLVDNTNVSIVIEQEFSEENQYQAVVENHDALIYYLVSHGERLDEYVDSSFFYKYPDAYRSVFSKKYGSLEIPSAGIHFTWDLIQKIKDKGGLIAFITLHVASAEILTNRKIQTKCVEDVTINEEYYDVPQATADAINTAKKNGGRIFAVGTTVTRCLESAYSREHNCLKASSGWTALYIHPGYQLKVVDCLLTNLHQPKTTHMVLTGQFAGVDLLMKAYASEEIQSCQFDMFGDCMLIIQDEGQG

SEQ ID NO: 71833 - protein, 354 aa, unidentified
  source 1..354: note = Salmonella diarizonae
  REGION 1..354: note = tr|A0A2I5HJR3|A0A2I5HJR3_SALDZ S-adenosylmethionine:tRNA ribosyltransferase-isomerase; OS = Salmonella diarizonae OX=59204 GN=queA PE=3 SV=1
MRVTDFSFELPESLIAHYPQPERSRCRLLSLEGPTGALTHGTFTDLLDKLNPGDLLVFNNTRVIPARLFGRKASGGKIEVLVERMLDDKRILAHIRASKAPKPGTELLLGDDESIHATMTARHGALFEVEFNDQRPVLDILNAIGHMPLPPYIDRPDEDADRELYQTVYSEKPGAVAAPTAGLHFDEPLLAALREKGIEMAFVTLHVGAGTFQPVRVDTIEDHIMHSEYAEVPQEVVDAVLAAKARGKRVIAVGTTSVRSLESAAQAAKSDLIEPFFGDTQIFIYPGYQYKVIDALVTNFHLPESTLIMLVSAFAGYEHTMNAYKAAVEQKYRFFSYGDAMFITYNPQAIFERP

SEQ ID NO: 71834 - protein, 354 aa, unidentified; identical to SEQ ID NO: 71824
  source 1..354: note = Salmonella dublin
  REGION 1..354: note = tr|A0A3T3IJQ5|A0A3T3IJQ5_SALDU S-adenosylmethionine:tRNA ribosyltransferase-isomerase; OS = Salmonella dublin OX=98360 GN=queA PE=3 SV=1

SEQ ID NO: 71835 - protein, 354 aa, unidentified; identical to SEQ ID NO: 71824
  source 1..354: note = Salmonella dublin
  REGION 1..354: note = sp|B5FKQ9|QUEA_SALDC S-adenosylmethionine:tRNA ribosyltransferase-isomerase OS=Salmonella dublin (strain CT_02021853) OX=439851 GN=queA PE=3 SV=1

SEQ ID NO: 71836 - protein, 287 aa, Salmonella enterica
  REGION 1..287: note = tr|A0A5F1JM90|A0A5F1JM90_SALET S-adenosylmethionine:tRNA ribosyltransferase-isomerase (Fragment) OS=Salmonella enterica subsp. enterica serovar Wilhelmsburg OX=19601 26 GN=C9E92_15730 PE=3 SV=1
MFICKTRQNRLIKIVLEGFLPNNRVIISGLLKERLNANDVFYLVDNPEISIKIEQRFSEESQYRAVVENHEALICYLASHGERLDEYVDSSLFYKYPDAYRSVFSKKYGSLEIPSAGIHFTWDLIQKIKDKGGLISFITLHVASTEMLSNRKIQTKCVEEVTINEEYYEVPQATADIINTAKQNGGRIFAVGTTVTRCLESAYSREHNCLKASSGWTALYIHPGYQLKVVDCLLTNLHQPKTTHMVLTGQFAGVDLLMKAYASEDIQSCQFDMFGDCMLIIQDEGQG

SEQ ID NO: 71837 - protein, 359 aa, Salmonella enterica
  REGION 1..359: note = tr|A0A402MNG6|A0A402MNG6_SALET S-adenosylmethionine:tRNA ribosyltransferase-isomerase; OS = Salmonella enterica subsp. enterica serovar Braenderup str. CFSAN001740 OX=1 299119 GN=AIK92_02665 PE=3 SV=1
MLTEKYDFRITDQMTIPLRPHWIANDSYREKCKMLVLNRSKGEIHKVDFSKVTDYIKEGDVICFNDSTIINHMFICKTRRNRLIKIVLEGFLPNNRVIISGLLKERLNANDVFYLVDNPEISIKIEQRFSEDSQYRAVVENHEALICYLASHGERLDEYVDSSLFYKYPDAYRSVFSKKYGSLEIPSAGIHFTWDLIQRIKDKGGLISFITLHVASTEMLSNRKIQTKCVEEVTINEEYYEVPQATADIINTAKQNGGRIFAVGTTVTRCLESAYSREHNCLKASSGWTALYIHPGYQLKVVDCLLTNLHQPKTTHMVLTGQFAGVDLLIKAYTSEHIQSCQFDMFGDCMLIIQDEGQG

SEQ ID NO: 71838 - protein, 354 aa, unidentified
  source 1..354: note = Salmonella enteritidis
  REGION 1..354: note = tr|A0A403FIM3|A0A403FIM3_SALEN S-adenosylmethionine:tRNA ribosyltransferase-isomerase; OS = Salmonella enteritidis OX=149539 GN=queA PE=3 SV=1
MRVTDFSFELPESLIAHYPQPERSRCRLLSLEGPTGALTHGTFTDLLDKLNPGDLLVFNNTRVIPARLFGRKASGGKIEVLVERMLDDKRILAHIRASKAPKPGTELLLGDDESIHATMTARHGALFEVEFNDQRPVLDILNAIGHMPLPPYIDRPDEDADRELYQTVYSEKPGAVAAPTAGLHFDEPLLAALREKGIEMAFVTLHVGAGTFQPVRVDTIEDHIMHSEYAEVPQEVVDAVLAAKARGNRVIAVGTTSVRSLESAAQAAKSDLIEPFFGDTQIFIYPGYQYKVIDALVTNFHLPESTLIMLVSAFAGYEHTMNAYKAAVEQKYRFFSYGDAMFITYNPQAIFERP

SEQ ID NO: 71839 - protein, 354 aa, unidentified; identical to SEQ ID NO: 71824
  source 1..354: note = Salmonella enteritidis
  REGION 1..354: note = sp|B5QTF3|QUEA_SALEP S-adenosylmethionine:tRNA ribosyltransferase-isomerase OS=Salmonella enteritidis PT4 (strain P125109) OX=550537 GN=queA PE=3 SV=1

SEQ ID NO: 71840 - protein, 354 aa, unidentified
  source 1..354: note = Salmonella gallinarum
  REGION 1..354: note = tr|A0A3V9NJ79|A0A3V9NJ79_SALGL S-adenosylmethionine:tRNA ribosyltransferase-isomerase; OS = Salmonella gallinarum OX=594 GN=queA PE=3 SV=1
MRVTDFSFELPESLIAHYPQPERSRCRLLSLEGPTGALTHGTFTDLLDKLNPGDLLVFNNTRVIPARLFGRKASGGKIEVLVERMLDDKRILAHIRASKAPKPGTELLLGDDESIHATMTARHGALFEVEFNDPRPVLDILNAIGHMPLPPYIDRPDEDADRELYQTVYSEKPGAVAAPTAGLHFDEPLLAALREKGIEMAFVTLHVGAGTFQPVRVDTIEDHIMHSEYAEVPQEVVDAVLAAKARGNRVIAVGTTSVRSLESAAQAAKNDLIEPLFGDTQIFIYPGYQYKVIDALITNFHLPESTLIMLVSAFAGYQHTMNAYKTAVEQKYRFFSYGDAMFITYNPQAISERP

SEQ ID NO: 71841 - protein, 354 aa, unidentified; identical to SEQ ID NO: 71840
  source 1..354: note = Salmonella gallinarum
  REGION 1..354: note = sp|B5R6Q6|QUEA_SALG2 S-adenosylmethionine:tRNA ribosyltransferase-isomerase OS=Salmonella gallinarum (strain 287/91 / NCTC 13346) OX=550538 GN=queA PE=3 SV=1

SEQ ID NO: 71842 - protein, 359 aa, unidentified
  source 1..359: note = Salmonella hadar
  REGION 1..359: note = tr|A0A3V2VYM3|A0A3V2VYM3_SALHA S-adenosylmethionine:tRNA ribosyltransferase-isomerase; OS = Salmonella hadar OX=149385 GN=D7N39_08900 PE=3 SV=1
MLTEKYDFRITDQMTIPLRPHWIANDSYREKCKMLVLNRSKGEIHKVDFSKLTDYIKEGDVICFNDSTIINHMFICKTRQNRLIKIVLEGFLPNNRVIISGLLKERLNANDVFYLVDNPEISIKIEQRFSEESQYRAVVENHEALIFYLASHGERLDEYVDSSLFYKYPDAYRSVFSKKYGSLEIPSAGIHFTWDLIQRIKDKGGLISFITLHVASTEMLSNRKIQTKCVEEVTINEEYYEVPQATADIINTAKQNGGRIFAVGTTVTRCLESAYSREHNCLKASSGWTALYIHPGYQLKVVDCLLTNLHQPKTTHMVLTGQFAGVDLLIKAYTSEHIQSCQFDMFGDCMLIIQDEGQG

SEQ ID NO: 71843 - protein, 354 aa, unidentified
  source 1..354: note = Salmonella hadar
  REGION 1..354: note = tr|A0A3V2W4Q6|A0A3V2W4Q6_SALHA S-adenosylmethionine:tRNA ribosyltransferase-isomerase; OS = Salmonella hadar OX=149385 GN=queA PE=3 SV=1
MRVTDFSFELPESLIAHYPQPERSRCRLLSLEGPTGALTHGTFTDLLDKLNPGDLLVFNNTRVIPARLFGRKASGGKIEVLVERMLDDKRILAHIRASKAPKPGTELLLGDDESIHATMTARHGALFEVEFNDPRPVLDILNAIGHMPLPPYIDRPDEDADRELYQTVYSEKPGAVAAPTAGLHFDEPLLAALREKGIEMAFVTLHVGAGTFQPVRVDTIEDHIMHSEYAEVPQEVVDAVLAAKVRGNRVIAVGTTSVRSLESAAQAAKSDLIEPFFGDTQIFIYPGYQYKVIDALITNFHLPESTLIMLVSAFAGYQHTMNAYKTAVEQKYRFFSYGDAMFITYNPQAIFERP

SEQ ID NO: 71844 - protein, 354 aa, unidentified; identical to SEQ ID NO: 71826
  source 1..354: note = Salmonella heidelberg
  REGION 1..354: note = sp|B4T8P4|QUEA_SALHS S-adenosylmethionine:tRNA ribosyltransferase-isomerase OS=Salmonella heidelberg (strain SL476) OX=454169 GN=queA PE=3 SV=1

SEQ ID NO: 71845 - protein, 357 aa, unidentified
  source 1..357: note = Salmonella houtenae
  REGION 1..357: note = tr|A0A1J6Z9X7|A0A1J6Z9X7_SALHO S-adenosylmethionine:tRNA ribosyltransferase-isomerase; OS = Salmonella houtenae OX=59205 GN=RK55_018655 PE=3 SV=1
MLTEKYNFRISDTMAIPLRPNWISNNAYREKCKMLILNRSNGDFHKVDFSKIIDYIKKGDVVCFNDSTIINNMFICKTKRNRLIKIILEGFLPENGVIISGLLKENFDAHEVLYLADNFDVSFVIGQKFSEKYQYQAVVENHDALISYLVSHGERLDEYVDSSLFYKYPDAYRSVFSKKYGSLEIPSAGIRFTWELIKKIKDKGGLIAFITLHVASTEILSNRKIQTRCVEDFTINKEYYDVSQAAADTINTAKKNGGRIFAIGTTVARCLESAYSGTHSFVKASSGWTALYIHPGYQLKVVDCLLTNLHQPKTTHMVLTGQFAGVDLLMKAYTSKDIQSCQFDMFGDCMLIIRTTD

SEQ ID NO: 71846 - protein, 357 aa, unidentified
  source 1..357: note = Salmonella houtenae
  REGION 1..357: note = tr|A0A3Y1WXT8|A0A3Y1WXT8_SALHO S-adenosylmethionine:tRNA ribosyltransferase-isomerase; OS = Salmonella houtenae OX=59205 GN=queA_1 PE=3 SV=1
MLTEKYNFRISDTMAIPLRPNWISNNAYREKCKMLILNRSNGDFHKVDFSKIIDYIKKGDVVCFNDSSMINNMFICKTKRNRLIKIILEGFLPENGVIISGLLKENFDAHEVLYLADNFDVSFVIGQKFSEKYQYQAVVGNHDALISYLVSHGERLDEYVDSSLFYKYPDAYRSVFSKKYGSLEIPSAGIRFTWELIKKIKDKGGLIAFITLHVASTEILSNRKIQTRCVEDFTINKEYYDVSQAAAYTINTAKKNGGRVFAIGTTVARCLESAYSGTHSFVKASSGWTALYIHPGYQLKVVDCLLTNLHQPKTTHMVLTGQFAGVDLLMKAYTSKDIQSCQFDMFGDCMLIIRTTD

SEQ ID NO: 71847 - protein, 357 aa, unidentified
  source 1..357: note = Salmonella infantis
  REGION 1..357: note = tr|A0A5F1JA36|A0A5F1JA36_SALIN S-adenosylmethionine:tRNA ribosyltransferase-isomerase; OS = Salmonella infantis OX=595 GN=C9E95_15390 PE=3 SV=1
MLTEKYDFRITDQMTIPLRPHWIANDSYREKCKMLVLNRSKGEIHKVDFSKLTDYIKEGDVICFNDSTIINHMFICKTRQNRLIKIVLEGFLPNNRVIISGLLKERLNANDVFYLVDNPEISIKIEQKFSEESQYRAVVENHEALICYLASHGERLDEYVDSSLFYKYPDAYRSVFSKKYGSLEIPSAGIHFTWDLIQKIKDKGGLISFITLHVASTEMLSNRKIQTKCVEEVTINEEYYEVPQATADIINTAKQNGGRIFAVGTTVTRCLESAYSREHNCLKASSGWTALYIHPGYQLKVVDCLLTNLHQPKTTHMVLTGQFAGVDLLMKAYASEDIQSCQFDMFGDCMLIIQDEG

SEQ ID NO: 71848 - protein, 354 aa, unidentified; identical to SEQ ID NO: 71829
  source 1..354: note = Salmonella infantis
  REGION 1..354: note = tr|A0A3W0HM41|A0A3W0HM41_SALIN S-adenosylmethionine:tRNA ribosyltransferase-isomerase; OS = Salmonella infantis OX=595 GN=queA PE=3 SV=1

SEQ ID NO: 71849 - protein, 292 aa, unidentified
  source 1..292: note = Salmonella montevideo
  REGION 1..292: note = tr|A0A3V6Q7H9|A0A3V6Q7H9_SALMO S-adenosylmethionine:tRNA ribosyltransferase-isomerase (Fragment) OS=Salmonella montevideo OX=115981; GN = CVB19_02000 PE=3 SV=1
MLTEKYDFRITDQMTIPLRPHWIANDSYREKCKMLVLNRSKGEIHKVDFSKVTDYIKEGDVICFNDSTIINHMFICKTRQNRLIKIVLEGFLPNNRVIISGLLKERLNANDVFYLVDNPEISIKIEQKFSEESQYRAVVENHEALICYLASHGERLDEYVDSSLFYKYPDAYRSVFSKKYGSLEIPSAGIHFTWDLIQKIKDKGGLISFITLHVASTEMLSNRKIQTKCVEEVTINEEYYEVPQATADIINTAKQNGGRIFAVGTTVTRCLESAYSREHNCLKASSGWTELY

SEQ ID NO: 71850 - protein, 359 aa, unidentified
  source 1..359: note = Salmonella montevideo
  REGION 1..359: note = tr|A0A3V3HD24|A0A3V3HD24_SALMO S-adenosylmethionine:tRNA ribosyltransferase-isomerase; OS = Salmonella montevideo OX=115981 GN=CM22_02695 PE=3 SV=1
MLTEKYDFRITDQMTIPLRPHWIANDSYREKCKMLVLNRSKGEIHKVDFSKVTDYIKEGDVICFNDSTIINHMFICKTRQNRLIKIVLEGFLPNNRVIISGLLKERLNANDVFYLVDNPEISIKIEQKFSEESQYRAVVENHEALICYLASHGERLDEYVDSSLFYKYPDAYRSVFSKKYGSLEIPSAGIHFTWDLIQKIKDKGGLISFITLHVASTEMLSNRKIQTKCVEEVTINEEYYEVPQATADIINTAKQNGGRIFAVGTTVTRCLESAYSREHNCLKASSGWTELYIHPGYQLKVVDCLLTNLHQPKTTHMVLTGQFAGVDLLMKAYASEDIQSCQFDMFGDCMLIIQDEGQG

SEQ ID NO: 71851 - protein, 354 aa, unidentified; identical to SEQ ID NO: 71824
  source 1..354: note = Salmonella moscow
  REGION 1..354: note = tr|A0A5H7LFJ9|A0A5H7LFJ9_SALMC tRNA preQ1(34) S-adenosylmethionine ribosyltransferase-isomerase QueA; OS = Salmonella moscow OX=28146 GN=queA PE=4 SV=1

SEQ ID NO: 71852 - protein, 354 aa, unidentified; identical to SEQ ID NO: 71826
  source 1..354: note = Salmonella muenchen
  REGION 1..354: note = tr|A0A3T3ET79|A0A3T3ET79_SALMU S-adenosylmethionine:tRNA ribosyltransferase-isomerase; OS = Salmonella muenchen OX=596 GN=queA PE=3 SV=1

SEQ ID NO: 71853 - protein, 359 aa, unidentified
  source 1..359: note = Salmonella muenchen
  REGION 1..359: note = tr|A0A3T3ELM7|A0A3T3ELM7_SALMU S-adenosylmethionine:tRNA ribosyltransferase-isomerase; OS = Salmonella muenchen OX=596 GN=DCV92_02960 PE=3 SV=1
MLTEKYDFRITDQMTIPLRPHWIANDSYREKCKMLVLNRSKGEIHKVDFSKLTDYIKEGDVICFNDSTIINHMFICKTRQNRLIKIVLEGFLPNNRVIISGLLKERLNANDVFYLVDNPEISIKIEQRFSEESQYRAVVENHEALICYLASHGERLDEYVDSSLFYKYPDAYRSVFSKKYGSLEIPSAGIHFTWDLIQRIKDKGGLISFITLHVASTEMLSNRKIQTKCVEEVTINEEYYEVPQATADIINTAKQNGGRIFAVGTTVTRCLESAYSREHNCLKASSGWTALYIHPGYQLKVVDCLLTNLHQPKTTHMVLTGQFAGVDLLMKAYASEDIQSCQFDMFGDCMLIIQDEGQG

SEQ ID NO: 71854 - protein, 354 aa, unidentified; identical to SEQ ID NO: 71826
  source 1..354: note = Salmonella muenster
  REGION 1..354: note = tr|A0A5I4XC92|A0A5I4XC92_SALMS tRNA preQ1(34) S-adenosylmethionine ribosyltransferase-isomerase QueA; OS = Salmonella muenster OX=82689 GN=queA PE=3 SV=1

SEQ ID NO: 71855 - protein, 162 aa, unidentified
  source 1..162: note = Salmonella newport
  REGION 1..162: note = tr|A0A3V9X6S1|A0A3V9X6S1_SALNE S-adenosylmethionine:tRNA ribosyltransferase-isomerase (Fragment) OS=Salmonella newport OX=108619 GN=queA PE=3; SV = 1
LREKGVEMAFVTLHVGAGTFQPVRVDTIEDHIMHSEYAEVPQEVVDAVLAAKARGNRVIAVGTTSVRSLESAAQAAKSDLIEPFFGDTQIFIYPGYQYKVIDALITNFHLPESTLIMLVSAFAGYQHTMNAYKTAVEQKYRFFSYGDAMFITYNPQAISERP

SEQ ID NO: 71856 - protein, 354 aa, unidentified
  source 1..354: note = Salmonella newport
  REGION 1..354: note = sp|B4SWP5|QUEA_SALNS S-adenosylmethionine:tRNA ribosyltransferase-isomerase OS=Salmonella newport (strain SL254) OX=423368 GN=queA PE=3 SV=1
MRVTDFSFELPESLIAHYPQPERSRCRLLSLEGPTGALTHGTFTDLLDKLNPGDLLVFNNTRVIPARLFGRKASGGKIEVLVERMLDDKRILAHIRASKAPKPGTELLLGDDESIHATMTARHGALFEVEFNDPRPVLDILNAIGHMPLPPYIDRPDEDADRELYQTVYSEKPGAVAAPTAGLHFDEPLLAALREKGVEMAFVTLHVGAGTFQPVRVDTIEDHIMHSEYAEVPQEVVDAVLVAKVRGNRVIAVGTTSVRSLESAAQAAKSDLIEPFFGDTQIFIYPGYQYKVIDALITNFHLPESTLIMLVSAFAGYQHTMNAYKTAVEQKYRFFSYGDAMFITYNPQAIFERP

SEQ ID NO: 71857 - protein, 354 aa, unidentified
  source 1..354: note = Salmonella oranienberg
  REGION 1..354: note = tr|A0A5I4Q340|A0A5I4Q340_SALON tRNA preQ1(34) S-adenosylmethionine ribosyltransferase-isomerase QueA; OS = Salmonella oranienberg OX=28147 GN=queA PE=4 SV=1
MRVTDFSFELPESLIAHYPQPERSRCRLLSLEGPTGALTHGTFTDLLDKLNPGDLLVFNNTRVIPARLFGRKASGGKIEVLVERMLDDKRILAHIRASKAPKSGTELLLGDDESIHATMTARHGALFEVEFNDPRPVLDILNAIGHMPLPPYIDRPDEDADRELYQTVYSEKPGAVAAPTAGLHFDEPLLAALREKGVEMAFVTLHVGAGTFQPVRVDTIEDHIMHSEYAEVPQEVVDAVLAAKARGNRVIAVGTTSVRSLESAAQAAKSDLIEPFFGDTQIFIYPGYQYKVIDALITNFHLPESTLIMLVSAFAGYQHIMNAYKTAVEQKYRFFSYGDAMFITYNPQAIFERP

SEQ ID NO: 71858 - protein, 359 aa, unidentified
  source 1..359: note = Salmonella oranienberg
  REGION 1..359: note = tr|A0A4S3DYP6|A0A4S3DYP6_SALON S-adenosylmethionine:tRNA ribosyltransferase-isomerase; OS = Salmonella oranienberg OX=28147 GN=AHW54_02540 PE=3 SV=1
MLTEKYDFRITDQMTIPLRPHWIANDSYREKCKMLVLNRSKGEIHKVDFSKLTDYIKEGDVICFNDSTIINHMFICKTRQNRLIKIVLEGFLPNNRVIISGLLKERLNANDVFYLVDNPGISIKIEQKFSEESQYRAVVENHEALICYLASHGERLDEYVDSSLFYKYPDAYRSVFSKKYGSLEIPSAGIHFTWDLIQRIKDKGGLISFITLHVASTEMLSNRKIQTKCVEEVTINEEYYEVSQATADIINTAKQNGGRIFAVGTTVTRCLESAYSREHNCLKASSGWTALYIHPGYQLKVVDCLLTNLHQPKTTHMVLTGQFAGVDLLMKAYASEDIQSCQFDMFGDCMLIIQDEGQG

SEQ ID NO: 71859 - protein, 297 aa, unidentified
  source 1..297: note = Salmonella paratyphi
  REGION 1..297: note = tr|A0A0H2WNW5|A0A0H2WNW5_SALPA S-adenosylmethionine:tRNA ribosyltransferase-isomerase; OS = Salmonella paratyphi A (strain ATCC 9150 / SARB42); OX = 295319 GN=SPA1315 PE=3SV=1
MLTEKYDFRITDQMTIPLRPHWIANDSYREKCKMLVLNRSKGEIHKVDFSKVTDYIKEGDVICFNDSTIINYMFICKTRRNRLIKIVLEGFLPNNRVIISGLLKERLNANDVFYLVDNPEISIKVEQKFSEESQYRAVVENHDALICYLASHGERLDEYVDSSLFYKYPDAYRSVFSKKYGSLDVDKGNFSITTYYPPEPPLKHLLNPFRKNDIPQAPEFTIGMLIASARAGRWLYELIHAWGLLSVLHHHGAHNVYYVKCTRTIKRHVKAAGFVHVKKLLAHKFDPFPAVTLREFC

SEQ ID NO: 71860 - protein, 354 aa, unidentified
  source 1..354: note = Salmonella paratyphi
  REGION 1..354: note = sp|B5BDC9|QUEA_SALPK S-adenosylmethionine:tRNA ribosyltransferase-isomerase OS=Salmonella paratyphi A (strain AKU_12601) OX=554290 GN=queA PE=3 SV=1
MRVTDFSFELPESLIAHYPQPERSRCRLLSLEGPTGALTHGTFTDLLDKLNPGDLLVFNNTRVIPARLFGRKASGGKIEVLVERMLDDKRILAHIRASKAPKPGTELLLGDDESIHATMTARHGALFEVEFNDPRPVLDILNAIGHMPLPPYIDRPDEDADRELYQTVYSEKPGAVAAPTAGLHFDEPLLAALREKGVEMAFVTLHVGAGTFQPVRVDTIEDHIMHSEYAEVPQEVVDAVLAAKARGNRVIAVGTTSVRSLESAAQAAKSDLIEPFFGDTQIFIYPGYQYKVIDALITNFHLPESTLIMLVSAFAGYQHTMNAYKTAVEQKYRFFSYGDAMFITYNPRAISERP

SEQ ID NO: 71861 - protein, 354 aa, unidentified; identical to SEQ ID NO: 71826
  source 1..354: note = Salmonella potsdam
  REGION 1..354: note = tr|A0A5I2XEE8|A0A5I2XEE8_SALPO tRNA preQ1(34) S-adenosylmethionine ribosyltransferase-isomerase QueA; OS = Salmonella potsdam OX=597 GN=queA PE=4 SV=1

SEQ ID NO: 71862 - protein, 354 aa, unidentified; identical to SEQ ID NO: 71826
  source 1..354: note = Salmonella rubislaw
  REGION 1..354: note = tr|A0A5I6URQ7|A0A5I6URQ7_SALRU tRNA preQ1(34) S-adenosylmethionine ribosyltransferase-isomerase QueA; OS = Salmonella rubislaw OX=598 GN=queA PE=4 SV=1

SEQ ID NO: 71863 - protein, 354 aa, unidentified
  source 1..354: note = Salmonella rubislaw
  REGION 1..354: note = tr|A0A3V7IKQ3|A0A3V7IKQ3_SALRU S-adenosylmethionine:tRNA ribosyltransferase-isomerase; OS = Salmonella rubislaw OX=598 GN=queA PE=3 SV=1
MRVTDFSFELPESLIAHYPQPERSRCRLLSLEGPTGALTHGTFTDLLDKLNPGDLLVFNNTRVIPARLFGRKASGGKIEVLVERMLDDKRILAHIRASKAPKPGTELLLGDDESIHATMTARHGALFEVEFNDPRPVLDILNAIGHMPLPPYIDRPDEDADRELYQTVYSEKPGAVAAPTAGLHFDEPLLAALREKGVEMAFVTLHVGAGTFQPVRVDTIEDHIMHSEYAEVPQEVVDAVLAAKVRGNRVIAVGTTSVRSLESAAQAAKSDLIEPFFGDTQIFIYPGYQYKVIDALITNFHLPESTLIMLVSAFAGYQHTMNAYKTAVEQKYRFFSYGDAMFITYNPQAISERP

SEQ ID NO: 71864 - protein, 359 aa, unidentified
  source 1..359: note = Salmonella schwarzengrund
  REGION 1..359: note = tr|A0A0N1QZC1|A0A0N1QZC1_SALSV S-adenosylmethionine:tRNA ribosyltransferase-isomerase; OS = Salmonella schwarzengrund (strain CVM19633) OX=439843; GN = SeSA_A1653 PE=3 SV= 1
MLTEKYNFRITDQMTIPLRPHWIANDSYREKCKMLVLNRSKGEIHKVDFSKVTDYIKEGDVICFNDSTIINHMFICKTRRNRLIKIVLEGFLPNNRVIISGLLKERLNANDVFYLVDNPGISIKIEQKFSEESQYRAVVENHEALICYLASHGERLDEYVDSSLFYKYPDAYRSVFSKKYGSLEIPSAGIHFTWDLIQRIKDKGGLISFITLHVASTEMLSNRKIQTKCVEEVTINEEYYEVSQATADIINTAKQNGGRIFAVGTTVTRCLESAYSREHNCLKASSGWTALYIHPGYQLKVVDCLLTNLHQPKTTHMVLTGQFAGVDLLMKAYASEDIQSCQFDMFGDCMLIIQDEGQG

SEQ ID NO: 71865 - protein, 354 aa, unidentified
  source 1..354: note = Salmonella schwarzengrund
  REGION 1..354: note = sp|B4TZH8|QUEA_SALSV S-adenosylmethionine:tRNA ribosyltransferase-isomerase OS=Salmonella schwarzengrund (strain CVM19633) OX=439843 GN=queA PE=3 SV=1
MRVTDFSFELPESLIAHYPQPERSRCRLLSLEGPTGALTHGTFTDLLDKLNPGDLLVFNNTRVIPARLFGRKASGGKIEVLVERMLDDKRILAHIRASKAPKPGTELLLGDDESIHATMTARHGALFEVEFNDPRPVLDILNAIGHMPLPPYIDRPDEDADRELYQTVYSEKPGAVAAPTAGLHFDEPLLAALREKGIEMAFVTLHVGAGTFQPVRVDTIEDHIMHSEYAEVPQEVVDAVLAAKARGNRVIAVGTTSVRSLESAAQAAKSDLIEPFFGDTQIFIYPGYQYKVIDALITNFHLPESTLIMLVSAFAGYQHTMNAYKTAVEQKYRFFSYGDAMFITYNPQAIFERP

SEQ ID NO: 71866 - protein, 359 aa, unidentified
  source 1..359: note = Salmonella senftenberg
  REGION 1..359: note = tr|A0A3V2HW02|A0A3V2HW02_SALSE S-adenosylmethionine:tRNA ribosyltransferase-isomerase; OS = Salmonella senftenberg OX=28150 GN=NL78_02275 PE=3 SV=1
MLTEKYDFRITDQMTIPLRPHWIANDLYREKCKMLVLNRSKGEIHKVDFSKVTDYIKEGDVICFNDSTIINHMFICKTRQNRLIKIVLEGFLPNNRVIISGLLKERLNANDVFSLIDNPEISIKIEQRFSEESQYRAVVENHEALICYLASHGERLDEYVDSSLFYKYPDAYRSVFSKKYGSLEIPSAGIHFTWDLIQRIKDKGGLISFITLHVASTEMLSNRKIQTKCVEEVTINEEYYEVPQATADIINTAKQNGGRIFAVGTTVTRCLESAYSREHNCLKASSGWTALYIHPGYQLKVVDCLLTNLHQPKTTHMVLTGQFAGVDLLMKAYASEDIQSCQFDMFGDCMLIIQDEGQG

SEQ ID NO: 71867 - protein, 359 aa, unidentified
  source 1..359: note = Salmonella senftenberg
  REGION 1..359: note = tr|A0A3Y5ZBH3|A0A3Y5ZBH3_SALSE S-adenosylmethionine:tRNA ribosyltransferase-isomerase; OS = Salmonella senftenberg OX=28150 GN=AC863_00390 PE=3 SV=1
MLTEKYDFRITDQMTIPLRPHWIANDSYREKCKMLVLNRSKGEIHKVDFSKLTDYIKEGDVICFNDSTIINHMFICKTRQNRLIKIVLEGFLPNNRVIISGLLKERLNANDVFYLVDNPEISIKVEQKFSEESQYRAVVENHETLICYLASHGERLDEYVDSSLFYKYPDAYRSVFSKKYGSLEIPSAGIHFTWDLIQRIKDKGGLISFITLHVASTEMLSNRKIQTKCVEEVTINEEYYEVPQATADIINTAKQNGGRIFAVGTTVTRCLESAYSREHNCLKASSGWTALYIHPGYQLKVVDCLLTNLHQPKTTHMVLTGQFAGVDLLMKAYASEDIQSCQFDMFGDCMLIIQDEGQG

SEQ ID NO: 71868 - protein, 354 aa, Salmonella sp.; identical to SEQ ID NO: 71826
  REGION 1..354: note = tr|A0A509CJ01|A0A509CJ01_9ENTR S-adenosylmethionine:tRNA ribosyltransferase-isomerase; OS = Salmonella sp. NCTC 6947 OX=2583581 GN=queA_2 PE=3 SV=1

SEQ ID NO: 71869 - protein, 356 aa, Salmonella sp.; identical to SEQ ID NO: 65353
  REGION 1..356: note = tr|A0A1F2K4H2|A0A1F2K4H2_9ENTR S-adenosylmethionine:tRNA ribosyltransferase-isomerase; OS = Salmonella sp. HMSC13B08 OX=1581094 GN=queA PE=3 SV=1

SEQ ID NO: 71870 - protein, 354 aa, unidentified
  source 1..354: note = Salmonella thompson
  REGION 1..354: note = tr|A0A3Y9ZK64|A0A3Y9ZK64_SALTH tRNA preQ1(34) S-adenosylmethionine ribosyltransferase-isomerase QueA; OS = Salmonella thompson OX=600 GN=queA PE=3 SV=1
MRVTDFSFELPESLIAHYPQPERSRCRLLSLEGPTGALTHGTFTDLLDKLNPGDLLVFNNTRVIPARLFGRKASGGKIEVLVERMLDDKRILAHIRASKAPKPGTELLLGDDESIHATMTARHGALFEVEFNDPRPVLDILNAIGHMPLPPYIDRPDEDADRELYQTVYSEKPGAVAAPTAGLHFDEPLLAALREKGVEMAFVTLHVGAGTFQPVRVDTIEDHIMHSEYAEVPQEVVDAVLAAKVRGNRVIAVGTTSVRSLESAAQAAKSDLIEPFFGDTQIFIYPGYQYKVIDALITNFHLPESTLIMLVSAFAGYQHTMNAYKTAVEQKYRFFSYGDAMFITYNPQAIFERP

SEQ ID NO: 71871 - protein, 354 aa, unidentified; identical to SEQ ID NO: 71826
  source 1..354: note = Salmonella thompson
  REGION 1..354: note = tr|A0A3V3G284|A0A3V3G284_SALTH S-adenosylmethionine:tRNA ribosyltransferase-isomerase; OS = Salmonella thompson OX=600 GN=queA PE=3 SV=1

SEQ ID NO: 71872 - protein, 354 aa, unidentified
  source 1..354: note = Salmonella typhi
  REGION 1..354: note = sp|Q8Z8Y1|QUEA_SALTI S-adenosylmethionine:tRNA ribosyltransferase-isomerase OS=Salmonella typhi OX=90370; GN = queA PE=3 SV=1
MRVTDFSFELPESLIAHYPQPERSRCRLLSLEGPTGALTHGTFTDLLDKLNPGDLLVFNNTRVIPARLFGRKASGGKIEVLVERMLDDKRILAHIRASKAPKPGTELLLGDDESIHATMTARHGALFEVEFNDPRPVLDILNAIGHMPLPPYIDRPDEDADRELYQTVYSEKPGAVAAPTAGLHFDEPLLAALREKGVEMAFVTLHVGAGTFQPVRVDTIEDHIMHSEYAEVPQEVVDAVLAAKARGNRVIAVGTTSVRSLESAAQAAKSDLIEPFFGDTQIFIYPGYQYKVIDALITNFHLPESTLIMLVSAFAGYQHTMNAYKTAVEQKYRFFSYGDAMFITCNPQAISERP

SEQ ID NO: 71873 - protein, 354 aa, unidentified; identical to SEQ ID NO: 71872
  source 1..354: note = Salmonella typhi
  REGION 1..354: note = tr|A0A4U8MWK0|A0A4U8MWK0_SALTI S-adenosylmethionine:tRNA ribosyltransferase-isomerase; OS = Salmonella typhi OX=90370 GN=queA PE=3 SV=1

SEQ ID NO: 71874 - protein, 354 aa, unidentified; identical to SEQ ID NO: 71826
  source 1..354: note = Salmonella typhimurium
  REGION 1..354: note = sp|Q8ZRD9|QUEA_SALTY S-adenosylmethionine:tRNA ribosyltransferase-isomerase OS=Salmonella typhimurium (strain LT2 / SGSC1412 / ATCC 700720) OX=99287 GN=queA; PE = 3 SV= 1

SEQ ID NO: 71875 - protein, 354 aa, unidentified; identical to SEQ ID NO: 71826
  source 1..354: note = Salmonella typhimurium
  REGION 1..354: note = tr|A0A3Z2EZS4|A0A3Z2EZS4_SALTU S-adenosylmethionine:tRNA ribosyltransferase-isomerase; OS = Salmonella typhimurium (strain ATCC 68169 / UK-1); OX = 990282 GN=queA PE=3 SV= 1

SEQ ID NO: 71876 - protein, 359 aa, unidentified; identical to SEQ ID NO: 71853
  source 1..359: note = Salmonella virchow
  REGION 1..359: note = tr|A0A3V4B4Y5|A0A3V4B4Y5_SALVI S-adenosylmethionine:tRNA ribosyltransferase-isomerase; OS = Salmonella virchow OX=48409 GN=A6P03_06310 PE=3 SV=1

SEQ ID NO: 71877 - protein, 354 aa, unidentified
  source 1..354: note = Salmonella virchow
  REGION 1..354: note = tr|A0A5I7PEV3|A0A5I7PEV3_SALVI tRNA preQ1(34) S-adenosylmethionine ribosyltransferase-isomerase QueA; OS = Salmonella virchow OX=48409 GN=queA PE=4 SV=1
MRVTDFSFELPESLIAHYPQPERSRCRLLSLEGPTGALTHGTFTDLLDKLNPGDLLVFNNTRVIPARLFGRKASGGKIEVLVERMLDDKRILAHIRASKAPKPGTELLLGDDESIHATMTARHGALFEVEFNDPRPVLDILNAIGHMPLPPYIDRPDEDADRELYQTVYSEKPGAVAAPTAGLHFDEPLLAALREKGIEMAFVTLHVGAGTFQPVRVDTIEDHIMHSEYAEVPQEVVDAVLAAKVRGNRVIAVGTTSVRSLESAAQAAKSDLIEPFFGDTQIFIYLGYQYKVIDALITNFHLPESTLIMLVSAFAGYQHTMNAYKTAVEQKYRFFSYGDAMFITYNPQAIFERP

SEQ ID NO: 71878 - protein, 350 aa, Salsuginibacillus halophilus
  REGION 1..350: note = tr|A0A2P8HFX6|A0A2P8HFX6_9BACI S-adenosylmethionine:tRNA ribosyltransferase-isomerase; OS = Salsuginibacillus halophilus OX=517424 GN=queA PE=3 SV=1
MNVDAFDFELPEELIAQKPLQDRDASRLMVLDPSTGEMNHESFLDILKYINPGDALVINDTRVLPARLYGEKDTGAHVEILLLKQIEGDRWETLVKPARRIKPGAKLSFGDGRLTAECVDTLDHGGRVLEFSYEGIFYEVLEALGEMPLPPYITETLDDQERYQTVFAKHRGSAAAPTAGLHFTEEMLKQAEAKGVHLASITLHVGLGTFRPVSAEQVEEHVMHAEFYQMTAGTAELLEEVKAAGGRVIAVGTTSARTLETVACDNGGAFREASGWTDIFIYPGYVFHGIDGLMTNFHLPKSSLLMLVSALAGRENILSAYAEAVRRQYRFFSFGDAMLILEGSQHQWQQ

SEQ ID NO: 71879 - protein, 355 aa, Samsonia erythrinae
  REGION 1..355: note = tr|A0A4R3VTD4|A0A4R3VTD4_9GAMM S-adenosylmethionine:tRNA ribosyltransferase-isomerase; OS = Samsonia erythrinae OX=160434 GN=queA PE=3 SV=1
MRVADFSFELPDSLIAHYPQTERSGCRLLTLEGSTGNLTHGVFTDLLEKLNPGDLLVFNNTRVIPARLFGRKASGGKLEVLVERVLDEHRVLAHVRASKAPKPGTELLLGDDESVKATMAARHDALFELHFDDSRDVLSILNDIGHMPLPPYIDRPDEDADRELYQTVYSRRPGAVAAPTAGLHFDEPMLAALREKGIEMAFVTLHVGAGTFQPVRVETIEDHIMHAEYAEVPQDVVDSVLACKARGNRVIAVGTTSVRSLESAAQASQDALIAPFFGDTRIFIYPGYHYRIIDALVTNFHLPESTLIMLVSAFAGYRNTMSAYREAVAQQYRFFSYGDAMFITRNPAAEQENVG

SEQ ID NO: 71880 - protein, 338 aa, unidentified
  source 1..338: note = Sandaracinaceae bacterium
  REGION 1..338: note = tr|A0A520R7D1|A0A520R7D1_9DELT S-adenosylmethionine:tRNA ribosyltransferase-isomerase; OS = Sandaracinaceae bacterium OX=2510337 GN=EVA89_00910; PE = 3 SV=1
MIAAAEPRADLRAQRLMHLDVSRGALTDGRIANLPELVREGDVWVLNDAATLPASLAGRAAGRDVELRLLGERLDGTWRAVLFGEGSWRDDTDGRPAPPRLSVGDRIVLGGSLGASITEVDASAPRLISVRFEPGGDAFWRALYTLGRPVQYSYLARELSLSEVQTAYAGRPWAVELPSAGRPLAPSSLLALRRRGAEVVTLTHAAGLSATGDAALDARLPLPERYDIPAQTAEAVSRARRDGRRVVAVGTSVTRALEGAFLSHSRVPAGPGETGLVLGPHTPLNVVDALLTGAHDPQSSHYQLLRAFAPDALLERAVRRSRELGYLGHELGDSWLIA

SEQ ID NO: 71881 - protein, 355 aa, unidentified
  source 1..355: note = Sandaracinaceae bacterium
  REGION 1..355: note = tr|A0A520QP65|A0A520QP65_9DELT S-adenosylmethionine:tRNA ribosyltransferase-isomerase; OS = Sandaracinaceae bacterium OX=2510337 GN=queA PE=3 SV=1
METDELDYELPESLIAQRPAEDRDAARLLLVRRGDGAPVHHHVRDLPSLLRPALFVVNDTRVIPARLFGRKESGGKVELLLVQRHGLPGIEETWMAMGRASKPIRAGAHIQVDGGLRVLVEEKLEGGRLRLRLTSDRPVAEVLEAVGHVPLPPYVRRDDEDSDRERYQTVFAREDGAVAAPTAGLHFTERLLTALEAAGHQRVAVTLHVGPGTFRPVSAARLEDHDMHEERYVVPQATVEAIAAAKRDGRPVVAVGTTVVRTLESAARPDGSVAAGPGETALLIQPPYAFRVVDALMTNFHLPRSTLLALVMAFGGVEPLRAAYAEAVAARYRFFSYGDAMLIAGEDALTHEGHA

SEQ ID NO: 71882 - protein, 336 aa, Sandaracinobacter sp.
  REGION 1..336: note = tr|A0A501XSW4|A0A501XSW4_9SPHN S-adenosylmethionine:tRNA ribosyltransferase-isomerase; OS = Sandaracinobacter sp. PAMC 28131 OX=1715348 GN=queA; PE = 3 SV=1
MRVADFDFNLPEDRIALRPAAPRDSARLLRVSPQGLSDHIVRDLPTLLSPGDVLVTNDTRVIPAQLSGRKGDASIDVTLHMRLGPYEWLSFVRNSRRLKPGDRVTFGLDLDGIVLSKGEGGEIHWRFESSEPLEVALERAGQMPLPPYIARKRGIDEADARDYQTIFARHNGAVAAPTAALHFTPELLAALDARGITRETVTLHVGAGTFLPVKADDTADHRMHSEWGHVPADVSARLKVAKAEGRRIIPVGTTSLRLLESSALEPFTGTTDIFITPGYRFRAIDGLMTNFHLPKSTLFMLVSALMGLERMQAAYAHAIQQGYRFYSYGDSSLLLP

SEQ ID NO: 71883 - protein, 352 aa, Sandaracinus amylolyticus
  REGION 1..352: note = tr|A0A0F6WAI3|A0A0F6WAI3_9DELT S-adenosylmethionine:tRNA ribosyltransferase-isomerase; OS = Sandaracinus amylolyticus OX=927083 GN=DB32_008670 PE=3; SV = 1
MKPATEAARARRDGRLLVVDASGRIAHHPRGALPEVLRGARGDRGGDLLVVNDSGTLPASLRGTHLRTGASIEVRLAARLTLDAREIRAWRAIVLGEGDWRARTEDRPAPPALRPGDRLALGTTLRAEIADLDGHPRLVLLTFEGTARDVWEGIAREGAPVQYSHLRAPLALWDAQTAIAGPPVSVEPPSAGFVLDHAMLDRLVARGVEIAMLTHAAGLSSSGDAKLDARFPLPEPYTIPDATARAIRRARREGRRVVALGTTVVRALESAAAYDGEVHAGPGIATLRLGPERPPRVVDAIVSGMHEPGTSHHALLEGFAPRARLLDAAREAEERGYLAHEFGDACLVERAA

SEQ ID NO: 71884 - protein, 347 aa, Sandaracinus amylolyticus
  REGION 1..347: note = tr|A0A0F6SG20|A0A0F6SG20_9DELT S-adenosylmethionine:tRNA ribosyltransferase-isomerase; OS = Sandaracinus amylolyticus OX=927083 GN=queA PE=3 SV=1
MDARELDFDLPEDLIAQTPPAERDAARLLVLSCDTGAIEHRRVLDLPELLAPSLLVVNDTRVLPARLFATKPTGGRVEILLLERTSAPGTRESWNAIARGTKSLRAGMRLSIASGFDAEVIALHEGGELDVALSASPSVRDALAAHGHVPLPPYIRRADDASDLERYQTVFAKDEGSVAAPTAGLHFSDRLLAALDAAGHRIARVTLHVGPGTFAPLRTETLDEHVMHEERWEIADETARAIAEARAEGRPVVAIGTTVVRTLESACDEHGIVRAGAGRTRIFIRPPYPFRAIDALFTNFHLPRSTLLALVMAFAGIEPTRRAYREAVDQRYRFFSYGDAMLIRGKK

SEQ ID NO: 71885 - protein, 346 aa, Sandaracinus sp.
  REGION 1..346: note = tr|A0A2D9T1A7|A0A2D9T1A7_9DELT S-adenosylmethionine:tRNA ribosyltransferase-isomerase; OS = Sandaracinus sp. OX=2024858 GN=queA PE=3 SV=1
MRLEELDYELPDELIAQRPPTDRDGARLLVVDAERGHRHATIRDLPELLEPALWVVNDTRVIPARLHGHKPTGGAVELLLIEPLADDAGDELWRCMGRSSKPIKVGLAVTLAEGFVGHVEAKHEDGTLDVRFEHGGDFDGLLEEHGQMPLPPYVQRPADAADRERYQTIFADRPGAIAAPTAGLHFTDALVAALRERGHELAPVTLHVGPGTFRPVQVEELDEHPMHEERYEVPASTAAAIDAARSEGRAVVAVGTTVARTLESAAIGDGRVQVGPGRTRLFIKPPYEAKVVDHLLTNFHLPRSTLLALVMALGGEDTLRAAYAEAVRARYRFFSYGDAMLIRGRR

SEQ ID NO: 71886 - protein, 403 aa, Sandaracinus sp.
  REGION 1..403: note = tr|A0A2E0TDM9|A0A2E0TDM9_9DELT S-adenosylmethionine:tRNA ribosyltransferase-isomerase; OS = Sandaracinus sp. OX=2024858 GN=queA PE=3 SV=1
MARGIADGSRGAPLAPPPGLRYLRSEPRRPPARLSFPDSSVRLAVKTDDLDYELPDELIAQAPLERRDGARLLVVDAAHDAPGALRDARITDLPELLPPSLIVVNDTRVMPARLFGKKPTGGAVELLLIERLSAPGDTARERWHAMGRASKGLKPGTTVTLGEAGALEAEVLAKRDDGTLEVALSAAGGSVADAIEAAGEMPLPPYIRRDAEASDRERYQTIFAREPGAVAAPTAGLHFSPTLVEAMEAAGHRFARVTLHVGPGTFRPVKHDDLDAHPMHEERYAVSEATAAAIAAARDEGRPILAVGTTVVRTLESAAIAGRRVRAGSGRTDLFIKPPYRAKVVDHVLTNFHLPRSTLLALVMALAGVETTRRAYAHAVATAYRFFSYGDAMLLRGVSEASR

SEQ ID NO: 71887 - protein, 346 aa, unidentified
  source 1..346: note = Sandarakinorhabdus cyanobacteriorum
  REGION 1..346: note = tr|A0A255Y959|A0A255Y959_9SPHN S-adenosylmethionine:tRNA ribosyltransferase-isomerase; OS = Sandarakinorhabdus cyanobacteriorum OX=1981098 GN=queA; PE = 3 SV=1
MLVDDFDFHLPEERIALRPANPRDSARLLTVTGRDVGTLGDFSFLDLPGRLRRGDVLVVNDTRVIPAQLHALKGQAHIGVTLHKRETADQWWSFVKNARRLKPGDRVEFGPGLAGEVLDKADEGGVLWRFSALPGETLEQALERVGQMPLPPYIARRRGTDAQDAADYQTLHAAKDGAVAAPTAGLHFTPRLWEALAAAGITRETVTLHVGAGTFLPVKADKVEDHKMHAEWGSIDAATAARLNSARAAGGRIISVGTTSLRLLESCVSETGEIREFTGDTSIFIYPGYRLKAIDGLITNFHLPRSTLFMLVSALMGLDVMRKTYAHAIEKEYRFYSYGDGSLLLP

SEQ ID NO: 71888 - protein, 340 aa, Sandarakinorhabdus sp.
  REGION 1..340: note = tr|A0A552UHU4|A0A552UHU4_9SPHN S-adenosylmethionine:tRNA ribosyltransferase-isomerase; OS = Sandarakinorhabdus sp. LB1R16 OX=2593303 GN=queA PE=3; SV = 1
MRVADFDFELPPDRIALRPAEPRDSARLLEVTPHALSDLGIADLPGRLRRGDVLVFNDTRVIPAQLSGTRGQARIGVTLHKREGVWRWWAFVRNARRLAVGDTVDFGHGLSGKVLEKADDGAILWEFAASVPFEIALAAAGVMPLPPYIASKRPADDRDAADYQTMFAREAGAVAAPTAGLHFTPALLAALDAAGIARETVTLHVGAGTFLPVKAEDTDDHAMHAEWGSLDAATAARLQAVRASGGRVIAVGTTSLRVLESAGLDAWSGDTRIFITPGYRFRAVHGLLTNFHLPRSTLFMLVSAMMGLDTMRAAYAHAVAHEYRFYSYGDACLLLPDTQA

SEQ ID NO: 71889 - protein, 404 aa, unidentified
  source 1..404: note = Sanguibacteroides justesenii
  REGION 1..404: note = tr|A0A0C3R5F4|A0A0C3R5F4_9PORP S-adenosylmethionine:tRNA ribosyltransferase-isomerase; OS = Sanguibacteroides justesenii OX=1547597 GN=BA92_07575; PE = 3 SV=1
MLEELKGIRIEEYTYDLPDERIAKFPLENRDASKLLIYEGGKIRERRFYEVPDMLNAGQTLIFNNTKVIYARILFQKVTGAAIEVFCLEPYLPADYVRNFAAVKSCEWKCMVGNLKKWKEGTIVCPYHWEGIEGQLRATRMKQEGNDMIVRFDWDSPISFSEVLEHCGKIPIPPYLNRDSEEDDKIRYQTVYSKNEGSVAAPTAGLHFSLSVLDRLRAKGTMMGELTLHVGAGTFKPVKSETIGEHAMHTEHIVVQRELVEHLYECPDHIIAVGTTSVRSLESLYWMGVKRLEGDNDFNLLEQWEAYTLPRHYSLREAMASLLQWYKERDAEMLKAQTTIIIVPGYRFRVISAMFTNFHQPQSTLLLLVAAAIGEDWKKIYRYALEHDFRFLSYGDSSFLKIKK

SEQ ID NO: 71890 - protein, 349 aa, unidentified
  source 1..349: note = Sanguibacteroides justesenii
  REGION 1..349: note = tr|A0A0C3R215|A0A0C3R215_9PORP S-adenosylmethionine:tRNA ribosyltransferase-isomerase; OS = Sanguibacteroides justesenii OX=1547597 GN=queA PE=3; SV = 1
MKLSKFKYKLPTELIALHPMQNRDESRLMVLDRKTGKIEHKVFKDVIDYFEEKDVFVFNDTKVFPARLYGNKEKTGAEIEVFLLRELNRDLRIWDVLVDPARKIRIGNKLYFGEDDSMVAEVIDNTTSRGRTLRFLFDGEYDEFKKELYALGETPLPRFITRKVEPEDAVRYQTIFAKKEGAVAAPTAGMHFSRELMKRMEIKGIDFAYITLHVGLGNFREVDVEDLTKHKMDSEQIIVGSETVKIVNDAKDEKHKVCAVGTTVVRTLESCVTTKGRLTEFDGWTNKFIFPPYDFSVPDAFVSNFHLPYSTLLMMVAAFGGYDFVMEAYNQAVKEKYRFGTYGDAMLIL

SEQ ID NO: 71891 - protein, 349 aa, unidentified
  source 1..349: note = Sapientia aquatica
  REGION 1..349: note = tr|A0A4R5W2C4|A0A4R5W2C4_9BURK S-adenosylmethionine:tRNA ribosyltransferase-isomerase; OS = Sapientia aquatica OX=1549640 GN=queA PE=3 SV=1
MSPTSYSLSDFNFDLPPELIAQTPLPERSASRLLQVDGAQLHDRHFSDLVDQLHAGDVLVFNDTRVLKARFFGVKNTGGKVEVLVERVLFNDPDQRSVLAQIRASKSPAQGSTIRLADAFEVEVGERQGEFYVLNFPSDVFDLLEQFGSLPLPPYIEHSADEFDENRYQTVYSKVPGAVAAPTAGLHFDEAILEKCRAKGIQFAYVTLHVGAGTFQPVRHEDLSQHDMHSEWYNMPEATVAAIQTARANGRDVIAVGTTSLRALESASQSGQLLAGNADTRLFITPGYQFKTVTRLVTNFHLPKSTLLMLVSAFAGYNHIRAAYQHAIAQRYRFFSYGDAMLLTNKFYE

SEQ ID NO: 71892 - protein, 352 aa, Saprospira grandis
  REGION 1..352: note = tr|H6L4G1|H6L4G1_SAPGL S-adenosylmethionine:tRNA ribosyltransferase-isomerase OS=Saprospira grandis (strain Lewin) OX=984262 GN=queA PE=3 SV=1
MKLSQFNFDLPQELIAQYPVENRDESRLMVVHRDSGKIEHRQFRDIIEYFDDGDVFIMNNTKVFPARLYGQKEKTGAKIEVFLLRELNEEQKLWDVLVDPARKIRVGNKLYFNDEDGVELLVAEVVDNTTSRGRTIRFLYDGPNEEFRAQLYKLGQTPLPKYIKRDLEELDTERYQTIYAKEVGAVAAPTAGLHMSHEVMKRLELKGVEFAELTLHVGLGTFRNIEVEDLSKHKMDAEYFKISQPVCDTVNEAIKQGKRRCALGTTSMRSIESSVSAHSLLKPAEGWTNRFIYPPYDFSIADCMITNFHLPKSSLVIMICAFGGYDLMMEAYRQAVEQKYRFYSYGDAMLIL

SEQ ID NO: 71893 - protein, 352 aa, Saprospira grandis
  REGION 1..352: note = tr|J0PAT6|J0PAT6_9BACT S-adenosylmethionine:tRNA ribosyltransferase-isomerase OS=Saprospira grandis DSM 2844 OX=694433 GN=queA PE=3 SV=1
MKLSQFNFDLPQELIAQYPVENRDESRLMVVHRDSGKIEHRQFRDIIEYFDDGDVFIMNNTKVFPARLYGQKEKTGAKIEVFLLRELNEEQKLWDVLVDPARKIRVGNKLYFNDEDGVELLVAEVVDNTTSRGRTIRFLYDGPNEEFRAQLYKLGQTPLPKYIKRDLEELDTERYQTIYAKEVGAVAAPTAGLHMSHEVMKRLELKGVEFAELTLHVGLGTFRNIEVEDLSKHKMDAEYFKISQPVCDTVNEAIKQDKRRCALGTTSMRSIESSVSAHSLLKPAEGWTNRFIYPPYDFSIADCMITNFHLPKSSLVIMICAFGGYDLMMEAYRQAVEQKYRFYSYGDAMLIL

SEQ ID NO: 71894 - protein, 354 aa, unidentified
  source 1..354: note = Saprospiraceae bacterium
  REGION 1..354: note = tr|A0A521VB86|A0A521VB86_9BACT S-adenosylmethionine:tRNA ribosyltransferase-isomerase; OS = Saprospiraceae bacterium OX=2202734 GN=queA PE=3 SV=1
MRSKLSQFNYDFDEKLIAQYPAAHRDESRMMVLHRDTGKIEHKIFKDILEYFSSDDVMIFNNTKVFPARMYGKKEKTGAKIEVFLLRELNSDQKLWDVLVDPARKIRVGNKLYFMDAKGNEILVAEVVDNTTSRGRTIRFLFDGPDEEFRKGLYTLGTTPLPKYIDRNVEKMDFDRYQTVYAKVLGAVAAPTAGLHFSEGLMKRMEIKGINFAEVTLHIGLGTFRTIDVEDLSKHKMDAEYFRVPQAAVDVVNKGKAGNQRICAVGTTSMRATESAVSAGNLLKAAEGWTNLFIFPPYDFHIANAMVTNFHLPKSSLLIMVSAFGGKDLVREAYAEAIKEKYRFFSYGDAMLIL

SEQ ID NO: 71895 - protein, 354 aa, unidentified
  source 1..354: note = Saprospirales bacterium
  REGION 1..354: note = tr|A0A2E4ICR9|A0A2E4ICR9_9BACT S-adenosylmethionine:tRNA ribosyltransferase-isomerase; OS = Saprospirales bacterium OX=2026790 GN=queA PE=3 SV=1
MRTKLSQFKFELPEELIAQYPADVRDESRLMVVHRDTGKIEHKLFKDLIDYFEEDDALIFNNTKVFPARMYGMKEKTGAKIEVFLLRELNKEAMLWDVLVDPARKIRVGNKLYFNDEEGNNILVAEVVDNTTSRGRTIRFFFDGTDEEFRATLRKLGSTPLPKYIDREVEAIDDERYQTVYAKEVGAVAAPTAGLHFSKELMKKLEIKGVEFAEVTLHVGLGTFRSIDVEDLSKHKMDAEYYKINQKAADIVNKAKDSRKRVCAVGTTSMRTIESSVGATRHLKASEGWTNKFIFPPYEFDIPNCMITNFHLPKTSLVIMISAFAGHDLAMEAYAEAIKEKYRFFSYGDAMLIL

SEQ ID NO: 71896 - protein, 396 aa, unidentified
  source 1..396: note = Saprospirales bacterium
  REGION 1..396: note = tr|A0A3B9AHI6|A0A3B9AHI6_9BACT S-adenosylmethionine:tRNA ribosyltransferase-isomerase; OS = Saprospirales bacterium OX=2026790 GN=queA PE=3 SV=1
MLSISDYHYDLPDARIARYPLAERDASKLLEWRDGVIVHHVFRDLPELLTGNETLFFNNTKVIPARMYFRKPTGGLIEVFLLEPVVPHLVELAMRSTQAVEYRCMVGNLKRWAEGSTLERSLGDTTLRVTLLDKASMYVRFEWDDARMPVAKIIELAGEIPIPPYLNRDAEALDAQRYQTVYSKKEGAVAAPTAGLHFTPAVLERLAAKGIGLEELTLHVSAGTFNPVKAENALEHPMHSEQIVLRRQTLEKLVASEKIVAVGTTSMRTLESVYWFGVQLLQNPDAAFDIGQQTAIKPYHGTLPDRSTALKAVLDCFQRRGLEELYGSTQIYLVPGCQFHVCDALITNFHQPGSTLMLLVAAFTGGNYWRKIYQAALDGDYRFLSYGDSSLLWRGV

SEQ ID NO: 71897 - protein, 345 aa, unidentified
  source 1..345: note = Unknown
  REGION 1..345: note = tr|A0A2A5YF62|A0A2A5YF62_9PROT S-adenosylmethionine:tRNA ribosyltransferase-isomerase; OS = SAR116 cluster bacterium MED-G04 OX=1986233 GN=queA; PE = 3 SV=1
MKLSDFDYDLPPEAVASHPAEPRDAARLLDLRRDTLVDRIVSDLPDLLGQGDLMVVNNTRVIPARLEGRRGEAGISVTLHQRIAPDTWRCFAKPARKLRLGDQVEFSSILTAEVTALGEDGERTLTFTLAGDKLDQAIEAHGSMPLPPYIPRPDGPTRDDSASYQTIYARHKGAVAAPTAGLHFTPELMQRIRDKGVNMAEVTLHVGAGTFLPVKTDDVRDHRMHHEWGEITAPVAEAINRTRDEGGRIIAVGTTTLRILEACWKENGCIQEWQAETDLFIIPGFRFGVIDLLMTNFHLPKSTLMMLVSAFAGKGAIDQAYAHALKTGYRFFSYGDACLMERRDD

SEQ ID NO: 71898 - protein, 363 aa, unidentified
  source 1..363: note = Unknown
  REGION 1..363: note = tr|G5ZVJ8|G5ZVJ8_9PROT S-adenosylmethionine:tRNA ribosyltransferase-isomerase OS=SAR116 cluster alpha proteobacterium HIMB100 OX=909943 GN=queA PE=3 SV=1
MTEHPSLLADFDYHLPEELIAQEPARPREAARLLDATGPALSDHIIADLPRLLRAGDLLVVNNTSVLPAALIGQRGAGRARINLHRRLSADTWLAFAKPAKKCPPGTEITFADGFSAVVTDRADGGEVTLRFSVAGEALDACLHQHGQMPLPPYIRRPDGAGEADKHDYQTMFATHAGAVAAPTAGLHFTDGLRDQLLAAGVKFAEVTLHVGAGTFLPVKVDKISDHKMHTEWGSLSTETVQAIQNTKASGGRVIAVGTTCLRILEAAFSHHGHLAPFTGETDIFITPGYQFGVIDMLLTNFHLPKSTLLMLVSAFSGYDFIKSAYAHAFVSGYRFFSYGDACLLACRNQLAADNIQMREGDG

SEQ ID NO: 71899 - protein, 362 aa, unidentified
  source 1..362: note = Unknown
  REGION 1..362: note = tr|A0A2N0LWG7|A0A2N0LWG7_9CHLR S-adenosylmethionine:tRNA ribosyltransferase-isomerase; OS = SAR202 cluster bacterium Io17-Chloro-G8 OX=1926617; GN = queA PE=3 SV=1
MRTSDFDYDLPSELIAQSPVEPRDSSRLLVMHRDTGALEHRHFPDLLEYLLPGDVMVFNQSRVIPARLYGHRADTGSKVEFLLLRRYADATWQAMARPGRRLRAGVVVEIDNLPLFPKGGAEGGFSVEVIAAHDDGLKTVRLSSEEGIERFGHTPLPPYIKETLSDPERYQTVYSRRPGSVAAPTAGLHFTDDLLQKVRDLGVETVFVTLHVGLDTFRPVEEDDPTEHQIHTEYYQIDEQAAEALNQANAEGRRIIAVGTTSVRVLEQAALDLEQRGQTELSATDGEAILFILPGHPFRLVNAMVTNFHLPRSSLLMLVSAFVEHGQGPSTGSGRAEVLAAYTAATERGYRFYSFGDAMLIA

SEQ ID NO: 71900 - protein, 381 aa, unidentified
  source 1..381: note = Unknown
  REGION 1..381: note = tr|A0A2N0KMA2|A0A2N0KMA2_9CHLR S-adenosylmethionine:tRNA ribosyltransferase-isomerase; OS = SAR202 cluster bacterium Casp-Chloro-G2 OX=1926604; GN = queA PE=3 SV=1
MRTSDFDYHLPPELIAQSPIEPRDSSRILVMRRDSGALEHRQFPDVLEYLRPGDVMVFNQSRVIPARLYGRRADTGSKVEFLLLRRNADGDWTAMARPGRRLRPGVVVDIERSPHSPFTEEGTEGGFQVRILEARDDGLKTIRLSSEEGIESFGVTPLPPYIKAVLDDPERYQTVYSRLPGSVAAPTAGLHFTDGLLEKVRAMGVESVFVTLHVGLDTFKPVDEDDPTEHKIHTERYQIDGQAAQTLNRAKAEGRRIIAVGTTSVRVLEQAGQDMERNGQTALSETEGEASIFILPGHRFRMVDAMITNFHLPRSSLLMLVSAFVEHGRAGDGPSTGPHDASGRLSTSSRSSGRDGVLAAYREAIGKGYRFYSFGDAMFIA

SEQ ID NO: 71901 - protein, 350 aa, unidentified
  source 1..350: note = Unknown
  REGION 1..350: note = tr|A0A432GJ66|A0A432GJ66_9DELT S-adenosylmethionine:tRNA ribosyltransferase-isomerase; OS = SAR324 cluster bacterium OX=2024889 GN=queA PE=3 SV=1
MPSHDWKLSSYDYKLPQSLIAQHPAPKRDQSRMLFLERKSGKISNRNFTEIVSLLPESSCLVINNTKVLPARIPGKRQSGGKIEALLIEENNNGDWSAIVRKAGRIKQGERLEFCDGKLLAKAKERLEEGEWLLEFEETERLKERLEDVGLPPLPPYIERRNASDLQNTKDRERYQTCFATEPGAIAAPTAGLHFTPEILTEIGNRGIDILEVTLHVGLGTFSSIDQEDIRKHKMHAEFFSISSQTLRQLQVYQNNNKQMINVGTTSVRVLETLVRQNFQESSGWTDIFIYPPCKFTMTDGLLTNFHLPKSTLMLLVSAFCGRECLLSSYQHAVAEKYRFFSYGDCMLIL

SEQ ID NO: 71902 - protein, 348 aa, unidentified
  source 1..348: note = Unknown
  REGION 1..348: note = tr|A0A2A4TB98|A0A2A4TB98_9DELT S-adenosylmethionine:tRNA ribosyltransferase-isomerase; OS = SAR324 cluster bacterium OX=2024889 GN=queA PE=3 SV=1
MNYSISDYTYELPDRLIAQKPASPRDSSRMLVLNKESQEDLHQAFRELPDFLEENSILVVNNSRVIPARLPGQRETGGAIEALLVQEEALGIWKCKVKNAARIKPGERLAFCQGAIQARLVKKLPDGTCLLQFQDATNLYPALEQHGFAPLPPYIRKARQEEGLRTEDLTTYQTIFAQEYGAVAAPTAGLHFSPQVMDRIREKGIEVLEVTLHVGLGTFEPIRVDDVRQHQMHEERYEISKEVAERITQAKRTGQKVIAVGTTSARTLEAAWQEDHLVSGMGSTDIFIYPPYQFQVVDQLLTNFHLPESTLLMLVSALAGKERMMAAYQGAVEQDYRFYSYGDCMLIQ

SEQ ID NO: 71903 - protein, 339 aa, unidentified
  source 1..339: note = Unknown
  REGION 1..339: note = tr|J4V190|J4V190_9GAMM S-adenosylmethionine:tRNA ribosyltransferase-isomerase OS=SAR86 cluster bacterium SAR86B OX=1123867 GN=queA PE=3 SV=1
MKTEEFNYYLPEELIANYPLEDRSASRLMVYENQLEHKNFFEVKNYFKEGDILVLNETSVIPARLYGKKQTGGMIEIFLERILEGNKILVQIGSSRSPKVDSTLIVNDKELRVEGRQGAFYILKLDNEPLDFFNSYGHVPLPPYIKRPDEEIDKSRYATIYENKELQDSVAAPTAGLHFTAELLEAIKNKGVEVLKVNLSVGAGTFQPVKAEDIKDHKIHSEYAHVTSEVVNKILQAKAKGKKVTAVGTTVTRALESAFHKRTPGDFKGYTELYITPGFSFQAVDRLITNFHLPKSSLLMLVAAFVGMKEMKDLYNHAVENQYRFLSYGDAMMINKKNV

SEQ ID NO: 71904 - protein, 349 aa, unidentified
  source 1..349: note = Unknown
  REGION 1..349: note = tr|A0A2A4X277|A0A2A4X277_9GAMM S-adenosylmethionine:tRNA ribosyltransferase-isomerase; OS = SAR86 cluster bacterium OX=2030880 GN=queA PE=3 SV=1
MQISDFQYDLPEELIANYPAEKRSASRLLCLDASTGKLLHRRFGQLLDFLKPEDLLVFNNTRVIPARLFAQKESGGKVEILIERMLDGNRVMAQLRASKSPKPGTRLVFNADNRSIPGAVVEGRENEFFLLSFDADVDVPALLVREGHMPLPPYIRRSDEELDVERYQTIYAEKEGAVAAPTAGLHFDEDLFAALLAKGVDTAYLTLHVGAGTFQPIRVDNVLEHKMHKELVDVDEKVCQQVAACKERGGRVIAVGTTTVRSLESAAKDSPLAPFHGETDIFIYPGYDFQVVDAMVTNFHLSESTLLMLVSAFSEKDMLLGAYNEAVAQKYRFYSYGDAMFIHHSGDRT

SEQ ID NO: 71905 - protein, 348 aa, unidentified
  source 1..348: note = Unknown
  REGION 1..348: note = tr|A0A0R2W9E7|A0A0R2W9E7_9GAMM S-adenosylmethionine:tRNA ribosyltransferase-isomerase; OS = SAR92 bacterium BACL16 MAG-120619-bin48 OX=1655625; GN = queA PE=3 SV=1
MRRDLFQFDLPDELIAKQPAAQRQGSRLLYLDSQKSDLRHQQFADLLGHIAPGDLMVFNNTKVIPARLFGQKSSGGKIEVLVERVLSQYGVLAHIRASKSPKAGTQLLFDGGHRAEMVARADDLFELNFAAPVLEVLEQIGHMPLPPYIDRADTETDKSRYQTVYAQQLGAVAAPTAGLHFDERMLAAIKAKGAQIAFVTLHVGAGTFQPVRAENIVDHKMHSEWLQVSDEVCEQVLATKAAGGRVIAVGTTSVRCLETAARSGQIMPFEGDTNIFIYPGYRFNVADALLTNFHLSESTLLMLVSAFSGYGPIMSAYREAVAERYRFFSYGDTMFLRHNPNAAKDIPE

SEQ ID NO: 71906 - protein, 348 aa, unidentified
  source 1..348: note = Unknown
  REGION 1..348: note = tr|A0A0R2U411|A0A0R2U411_9GAMM S-adenosylmethionine:tRNA ribosyltransferase-isomerase; OS = SAR92 bacterium BACL26 MAG-121220-bin70 OX=1655626; GN = queA PE=3 SV=1
MRRDHFQFELPNELIARQPAVQRQGSRMLFLDSAENNLQHQQFSDFLSHVESGDLVVFNNTKVIAARLYGQKATGGKVEVLVERLVDAYSVLAHVRASKSPKPGNQIVFSEGFSAEMTGRDDDLFALTFNKPVLDVLDAIGHMPLPPYIDRSDTNEDKTRYQTVYADQLGAVAAPTAGLHFDEKMLEDIQTKGASIAFVTLHVGAGTFQPVRVDNIIDHKMHSEWLLVSLEVCDQVIKTKTNGGRVIAVGTTSVRCLETAARSGQIAPFEGDTNIFIYPGYRFNVVDGLLTNFHLSESTLLMLVSAFSGYHSIMAAYREAVSERYRFFSYGDAMFLLRNPNAEQEVPE

SEQ ID NO: 71907 - protein, 348 aa, unidentified
  source 1..348: note = Unknown
  REGION 1..348: note = tr|A0A520MD51|A0A520MD51_9GAMM S-adenosylmethionine:tRNA ribosyltransferase-isomerase; OS = SAR92 clade bacterium OX=2315479 GN=queA PE=3 SV=1
MRRDHFQFELPNELIARQPAEQRQGSRLLFLDGANNHLEHEQFGDFLTHIESGDLIVFNNTKVIPARLYGQKQSGGKIEVLVERLVSSHSVQAHVRASKAPKPDTQIVFAKDFGAQVTGRADDLFELTFNRPVLEVLECIGHMPLPPYIDREDTEADKSRYQTVYADQLGAVAAPTAGLHFDERMLADIEAKGAKVAFVTLHVGAGTFQPVRVDNISDHQMHSEWLQVSEAVTDQVLQTKANGGRVIAVGTTSVRCLETAAQNGQIAPFEGDTNIFIYPGYRFNVVDGLLTNFHLSESTLLMLVSAFAGHKPIMAAYQEAVSERYRFFSYGDAMFLLHNPNANQDIPQ

SEQ ID NO: 71908 - protein, 347 aa, unidentified
  source 1..347: note = Unknown
  REGION 1..347: note = tr|A0A520LKU8|A0A520LKU8_9GAMM S-adenosylmethionine:tRNA ribosyltransferase-isomerase; OS = SAR92 clade bacterium OX=2315479 GN=queA PE=3 SV=1
MKLDLFDYSLPQKLIAKFPLTERSSSSMLVMDELGNISHRMFTDLLDFLNKGDLLVFNNTRVISARLLGKKDTGGAIELLIERVVKDKVAYALLKSNKKIKLGSRINFVGGHYATVLERKQKLFLISFSSNVSKIIEDIGELPLPPYIDREPIQLDSERYQTVYASESGAIASPTAGLHFDESMLRELQNKGINHCFVTLHVGSGTFKPVKEENILDHDMHAEWISIGNDACDLILATKKNEGRIVAVGTTSLRAIETIGNKNEFKPYEGDTNIFIYPGYEFTLVDMLITNFHLPKSTLLMLVCAFSGYKEIMAAYKEAIDNDYRFFSYGDAMLLNRNSNARFNIPS

SEQ ID NO: 71909 - protein, 364 aa, Sarcina sp.
  REGION 1..364: note = tr|A0A1G9G9R8|A0A1G9G9R8_9CLOT S-adenosylmethionine:tRNA ribosyltransferase-isomerase; OS = Sarcina sp. DSM 11001 OX=1798184 GN=queA PE=3 SV=1
MNTTQTPSPAVPVGHRTADYYFELPQELIAQDPLEDRSSSRLLVMDRNTGEVTHGTFRDILRYLHPGDALILNDTKVIPARLLGEREGTGASIEILLLKRMEKDVWECLVRPGKKLRPGARAVFGDGSLKAEILEVVEGGNRLVRFEFEGIFEEVLDRLGEMPLPPYITHKLKDRGRYQTVYARYEGSAAAPTAGLHFTPELLDEVRALGVQTGFVTLHVGLGTFRPVKVDDVEQHTMHTEWYNVPEETADLINRTHQAGGRVICVGTTSCRTVESAADENGIVHAGSDDTSIFIYPGYHFKTMDGLITNFHLPESTLIMLVSAFAGREHVLKAYEEAVRERYRFFSFGDAMFIADHTKIETVS

SEQ ID NO: 71910 - protein, 310 aa, Sarcina sp.
  REGION 1..310: note = tr|A0A3C0ZXK7|A0A3C0ZXK7_9CLOT S-adenosylmethionine:tRNA ribosyltransferase-isomerase (Fragment) OS=Sarcina sp. OX=2053610 GN=DCP64_13940 PE=3; SV = 1
MNTTQTPSPAVPVGHRTADYYFDLPQELIAQDPLEDRSSSRLLVMDRNTGEVTHGTFRDILRYLHPGDALILNDTKVIPARLLGEREGTGASIEILLLKRMEKDVWECLVRPGKKLRPGARAVFGDGSLKAEILEVVEGGNRLVRFEFEGIFEEVLDRLGEMPLPPYITHKLKDRGRYQTVYARYEGSAAAPTAGLHFTPELLDEVRALGVQTGFVTLHVGLGTFRPVKVDDVEQHTMHTEWYNVPEETADLINRTHQAGGRVICVGTTSCRTVESAADENGIVHAGSDDTSIFIYPGYHFKTMDGLITN

SEQ ID NO: 71911 - protein, 346 aa, Schlegelella thermodepolymerans
  REGION 1..346: note = tr|A0A4R2MM55|A0A4R2MM55_9BURK S-adenosylmethionine:tRNA ribosyltransferase-isomerase; OS = Schlegelella thermodepolymerans OX=215580 GN=queA PE=3; SV = 1
MQRTYTLSDFDFALPAELIAQHPAPQRSASRLLDATGDAPADRVFRDLPQRLAPGDLLVFNDTRVIKARLYGTKATGGSVEALVERILPGHEVLAHLRASKSPRPGTVVRFAGAFDAEVLGRGGPDGGLFHLRFPDDPLVLLERHGHVPLPPYITHADTDEDERRYQTVFADKPGAVAAPTAALHFDDAVLQGLAQRGVRTANVTLHVGAGTFQPVRTENLAEHRMHTEWFEVPAATVQAIEATHATGGRVVSVGTTTLRALESAARGGALRAGCAETDIFITPGFEFRVVDLLITNFHLPKSTLMMLVSAFAGYERVMALYRHAIAQRYRFFSYGDAMVLDRRPA

SEQ ID NO: 71912 - protein, 346 aa, Schlegelella thermodepolymerans
  REGION 1..346: note = tr|A0A2S5T803|A0A2S5T803_9BURK S-adenosylmethionine:tRNA ribosyltransferase-isomerase; OS = Schlegelella thermodepolymerans OX=215580 GN=queA PE=3; SV = 1
MQRTYTLSDFDFALPAELIAQHPAPQRSASRLLDATGDAPADRVFRDLPQRLAPGDLLVFNDTRVIKARLYGAKATGGSVEALVERILPGHEVLAHLRASKSPRPGTVVRFAGTFDAEVLGRGGPDGGLFHLRFPDDPLVLLERHGHVPLPPYITHADTDEDERRYQTVFADKPGAVAAPTAALHFDDAVLQGLAQRGVRTANVTLHVGAGTFQPVRTENLAEHRMHTEWFEVPAATVQAIEATHATGGRVVSVGTTTLRALESAARGGALRAGCAETDIFITPGFEFRVVDLLITNFHLPKSTLMMLVSAFAGYERVMALYRHAIAQRYRFFSYGDAMLLDRRPA

SEQ ID NO: 71913 - protein, 351 aa, Schleiferia sp.
  REGION 1..351: note = tr|A0A401XP21|A0A401XP21_9FLAO S-adenosylmethionine:tRNA ribosyltransferase-isomerase; OS = Schleiferia sp. LA OX=2173829 GN=queA_2 PE=3 SV=1
MKFKLSNFNYKLPKELIANRPVPHRDESRLMVVHRDTGKIEHRIFKDILDYFEEKDLFVLNNTKVFKARLYGYKEKTGARIEVFLLRELNAETRLWDVLVDPARKIRIGNKIYFGEDENLVAEVIDNTTSRGRSIRFLFDGTYEEFRKKLVDLGHMPIPKYLQREADEEDEERYQTIYAKVEGAVAAPVSGLHFSKQLLKRMEIKGVETTEITMHVGLGTFKPVEVEDLSKHKMDSEQVWIYPEAAKKINEALDQNRKVVSIGTTTLRALESSLTTENRIIPFNGWISKFIYPPYTFRLPLKLVTNFHAPMSTILMLKSAFMGHELMMEAYHTAIKENYRFLSYGDAMLIL

SEQ ID NO: 71914 - protein, 406 aa, Schleiferia sp.
  REGION 1..406: note = tr|A0A401XNR1|A0A401XNR1_9FLAO S-adenosylmethionine:tRNA ribosyltransferase-isomerase; OS = Schleiferia sp. LA OX=2173829 GN=queA_1 PE=3 SV=1
MSLIPEIRISDFDYELPAERIAAYPLEERDQSKLLVYKDGMITDAVFNQLSEFLPDGASMYFNQSKVVFTRLFFKIHDSDEKHVEIFCLEPADGLELASALTSKNSVVMKCMVGRAKRWKDQELTMRIPHSRGDIMLYAEKAGRQNDVFLVHFTWSADITFAEILELAGHVPLPPYIKREDEAIDRSRYQTIYARREGSVAAPTAGLHFTERVFESLRKKDVALNFLTLHVGAGTFAPVKSEYIAQHQMHGEYIEITRELLESLLQRKQRIAVGTTSLRTLESIYYLGVRTMLEGDLSIHDLDQWCGFTYPKDIAFEQSIEQLLKVFDLHKIDSGIKLKTHLIIAPGYQIRSVDALVTNFHQPSSTLLLLVSAVTGGEWCKIYDHALAHGYRFLSYGDSSLLFVKK

SEQ ID NO: 71915 - protein, 351 aa, Schleiferia thermophila
  REGION 1..351: note = tr|A0A085L4U3|A0A085L4U3_9FLAO S-adenosylmethionine:tRNA ribosyltransferase-isomerase; OS = Schleiferia thermophila str. Yellowstone OX=1453500; GN = queA PE=3 SV=1
MKYKLSHFNYKLPKELIAIRPLPHRDDSRLMVVHKDSGKIEHKTFKDVLDYFEEKDLFVFNNSKVFKARLYGYKEKTGARIEVFLLRELNAETRLWDVLVDPARKIRIGNKIYFGEDESMVAEVIDNTTSRGRSIRFIFDGTYEEFRKKLVELGHMPIPKYLQREADKEDEERYQTIYAKVEGAVAAPVSGLHFSKQILKKMEIKGIESTEITMHVGLGTFKPVEVEDLSKHKMDSEQVWIYPESARKINQALDENRKVVSVGTTTLRALESSLTTENRIIPFEGWISKFIYPPYKFRLPLKLITNFHAPMSTILMLKSAYMGYELMMEAYNEAIKEKYRFLSYGDAMLIL

SEQ ID NO: 71916 - protein, 351 aa, Schleiferia thermophila; identical to SEQ ID NO: 71915
  REGION 1..351: note = tr|A0A369AAU7|A0A369AAU7_9FLAO S-adenosylmethionine:tRNA ribosyltransferase-isomerase; OS = Schleiferia thermophila OX=884107 GN=queA PE=3 SV=1

SEQ ID NO: 71917 - protein, 345 aa, Schwartzia succinivorans
  REGION 1..345: note = tr|A0A1M4UMY9|A0A1M4UMY9_9FIRM S-adenosylmethionine:tRNA ribosyltransferase-isomerase; OS = Schwartzia succinivorans DSM 10502 OX=1123243 GN=queA; PE = 3 SV=1
MLLSDFDYDLPEERIAQTPVEPRNSSRLMVLDPVEKTIEHQHFYDLKKYLEPGDTLIFNDTRVMPARLIGHREPTGGRVEVFLLRRISGDTWETLVQPGKKARPGTTVKFSDELSCEVMDNTDFGGRIVKFSYEGIFEEVLDRLGETPLPPYIHEKLQDKERYQTVYNREEGSAAAPTAGLHFTKEQMEDLKEYGVNLGFLTLHVGLGTFRPVKTDTIEEHQMHREYYSISDETADLVMRTKAAGHRVIAVGTTSIRTLESAATAKGQIAGKSDSTDIFIYPGYDFKIVDAIITNFHLPKSTLIMLISAFAGREFVLDAYKTAVDEKYRFFSFGDAMFIKRPPKK

SEQ ID NO: 71918 - protein, 342 aa, unidentified
  source 1..342: note = Scopulibacillus darangshiensis
  REGION 1..342: note = tr|A0A4R2NHX8|A0A4R2NHX8_9BACL S-adenosylmethionine:tRNA ribosyltransferase-isomerase; OS = Scopulibacillus darangshiensis OX=442528 GN=EV207_1463; PE = 3 SV=1
METELIDFHLPAELEAAKPAERRGLRRDHVNLMVLDRETGDTVDDIFFHLDRYLNPGDLIVLNNSRTIPAVLHAQKAGVANRVEIRLAQRKDSSRWEALIRDSSVNVGDHYVFSNSLKAEVIDTDPEKPLATLKFSKEGTPLLNDIYELGEPVRYEYILEPWGLDNYQTVFASVPGSVEMPSAGRAFTWELLNKLKDKGAGIAYLQLHTGLTYMLDDKWHQHPSENLEYYEIPAATAKAVNETKRRGGKVIAVGTTVVRALETVASKFGYLKADKGWSDLFIHKDFPLQISDGLVTGFHEPKTTHLALLSAFIDSDKLTKSYQRAIQKGYLWHEFGDINLIL

SEQ ID NO: 71919 - protein, 345 aa, unidentified
  source 1..345: note = Scopulibacillus darangshiensis
  REGION 1..345: note = tr|A0A4R2PCU3|A0A4R2PCU3_9BACL S-adenosylmethionine:tRNA ribosyltransferase-isomerase; OS = Scopulibacillus darangshiensis OX=442528 GN=queA PE=3; SV = 1
MDVSMFDFDLPEELIAQTPLKERTASRLMVLSPENGTVQHRHFTDLTQYLNPGDCLVLNDTKVLPARLLGVKEDTGAKIEVLLLKQTVGDEWECLVKPAKRIKVGSTVVFGEGQLQAECTGVKDEGRRMMIFRYQGIFHEVLDELGKMPLPPYIKEQLEDQDRYQTVFAKNRGSAAAPTAGLHFTDELLDALKAKGVTVAFITLHVGLGTFRPVKAEKIEEHSMHAEFYQMTKGTAELLNRTKEEGGRVIAVGTTVIRTLETIAAKSNGRLTEASGWTDIFIYPGYKYKAIDGMITNFHLPKSTLIMLVSAFAGRDFLLSAYKQAVEEKYRFFSFGDAMLITERI

SEQ ID NO: 71920 - protein, 349 aa, Scytonema hofmannii
  REGION 1..349: note = tr|A0A139WV92|A0A139WV92_9CYAN S-adenosylmethionine:tRNA ribosyltransferase-isomerase; OS = Scytonema hofmannii PCC 7110 OX=128403 GN=WA1_42295; PE = 3 SV=1
MATPFTFTLPIELLAQEPPERRGLGRDRVRLMAIDRINNKVEHTRFDRLSEFLRPGDLLVFNSSRTLPACLNGCEMPRGDCMEVRLAQHLPDDSWLALLFCQRGDPFSCGLRSGMKIDFEQGLTGTVYERDVNIPRLWKLRFSKSGTELMDLLYRLGRPVRYEYVSAPWELDYYQTVYAKEPGSAEMPSAGRAFTWKLLLDLKRQGVNTAYIVLHTGLSSYMDDALDAQHPASEEEYLISESAAQKINQTHFNGGRVIAVGTTVVRALESVADETGKVKAKHGYTRLHITANHRLKTVNGLLTGMHEPEASHLDLLTAFLSADKIRDSYEEAVQKQYLWHEFGDLNLIV

SEQ ID NO: 71921 - protein, 410 aa, Scytonema hofmannii
  REGION 1..410: note = tr|A0A139WYA7|A0A139WYA7_9CYAN S-adenosylmethionine:tRNA ribosyltransferase-isomerase; OS = Scytonema hofmannii PCC 7110 OX=128403 GN=queA PE=3 SV=1
MQEPSTRNNYDSVSNANKEDTELDTCLAGYDYELPQELIAQNPVVPRDNSRLLVVNPNAGLEAATLHYIFRDLPDLLQSGDLLIMNNTRVIPARLYGYKQTGAEIEVLLLEERQHNCWLALVKPGKRFKPGAKIVFEPRLGGDRALGIGHWGLGIGNNKDFSQVSSPQSSVPSPQLTATVLETDEATGGRLLQFDLPEGISLVQLLEVFGEVPLPPYITASDAKSEQYQTVYAEHPGAVAAPTAGLHFTPELLDRLQQRGIDRAFVTLHVGVGTFRPVDVEDIKTHKMHEEWIEVPSATVEKIRLTQASGGRIIAVGTTVVRALEGAASQGELKPFCGKTDIFIYPGYKWRVVNGLITNFHLPRSSLLMLVSALIGRQRLLSVYQEAVASRYRFFSFGDAMLILPQGSRE

SEQ ID NO: 71922 - protein, 348 aa, unidentified
  source 1..348: note = Scytonema millei
  REGION 1..348: note = tr|A0A1D2P506|A0A1D2P506_9CYAN S-adenosylmethionine:tRNA ribosyltransferase-isomerase; OS = Scytonema millei VB511283 OX=1245923 GN=QH73_014060; PE = 3 SV=1
MLTKPFTFKLPAELSAKEPPERRGIARDQVRLMVINRNDYQVEHTYFNSIGEFLRPGDLLVFNTSRTLPASLDGCEITKGQCMEIRLAQHLPDDSWLALPLCQQQPTCSLQTGIDIDFGHGLTATVENRDTHIPQLWKIRFSKSRTELIDTLYRLGRPIRYEYVSAPWDLDYYQTVYAKEPGSAEMPSAGRAFTWKLLFDLKRRGIETAHIVLHTGLSSYMDDELDAQHLASEEEYYISEAAAQKINHTHKQGGRVIAVGTTVVRALESVADAKGNVQPQHGYTRLRVTAEHKLKTVDGLLTGLHEPEASHLDLLTAFLPAHQIKQAYEDAVQRGYLWHEFGDLNLIL

SEQ ID NO: 71923 - protein, 248 aa, unidentified
  source 1..248: note = Scytonema millei
  REGION 1..248: note = tr|A0A1D2PEG1|A0A1D2PEG1_9CYAN S-adenosylmethionine:tRNA ribosyltransferase-isomerase (Fragment) OS=Scytonema millei VB511283 OX=1245923; GN = QH73_020645 PE=3 SV=1
TTPPPYHFLTATVLETDEATGGRLLQFDLPEGMSLVQLLDVFGEVPLPPYITASDAQNEQYQTVYARNPGAVAAPTAGLHFTTELLQRLRDRGIHQAFVTLHVGVGTFRPVEVEDVKTHKMHEEWIEVPSSTVEQIRATQASGGRIIAVGTTVVRALEGAAAKGELQPFCGKTDLFIYPGYKWRVVQGLITNFHLPRSSLLMLVSALISRQRLLNIYQEAIASRYRFYSFGDAMLILPEARNNEKLTH

SEQ ID NO: 71924 - protein, 396 aa, Scytonema sp.
  REGION 1..396: note = tr|A0A1Z4IQW1|A0A1Z4IQW1_9CYAN S-adenosylmethionine:tRNA ribosyltransferase-isomerase; OS = Scytonema sp. HK-05 OX=1137095 GN=queA PE=3 SV=1
MQQQRAKSNLNTIFSHKKEDVEFEISLSGYDYELPQELIAQNPVVPRDSSKLLVVNSPTTGTDAAPLHHIFRDLPELLYPGDLLVMNNTKVMAARLYGRKSTGAEIEVLLLEERQHNCWLALVKPGKRFKAGAKILFEPRGVGGDEGEKGTTSSSSPPDLTATVLETDEATGGRLLQFDLPDGMSLVELLDVFGEVPLPPYITASDAQNEQYQTVYAKTPGAVAAPTAGLHFTTELLERLRDRGIHQAFVTLHVGVGTFRPVEVEDIKTHKMHEEWIEVPSSTVEQIRATQASGGRIIAVGTTVVRALEGAAAKGELQPFCGKTNLFIYPGYQWRVVEGLITNFHLPRSSLLMLVSALIGRQRLLKIYQEAIASRYRFYSFGDAMLILPEATSVGK

SEQ ID NO: 71925 - protein, 392 aa, Scytonema sp.
  REGION 1..392: note = tr|A0A1Z4Q948|A0A1Z4Q948_9CYAN S-adenosylmethionine:tRNA ribosyltransferase-isomerase; OS = Scytonema sp. NIES-4073 OX=2005464 GN=queA PE=3 SV=1
MQQQRTKSNLNTKSSHKKEDVEFESCVSGYDYELPQELIAQNPVVPRDSSKLLVVNSFSTGTQTPPLHRIFRDLPELLHPGDLLVMNNTKVMPARLYGRKSTGAEIEVLLLEERQHNCWLGLVKPGKRFKAGAKIIFEARGVGENKGGTSSSSSPPLLTATVLETDEATGGRLLQFDLPDGMSLVQLLDVFGEVPLPPYITASDAQNEQYQTVYAKTPGAVAAPTAGLHFTTELLERLRDRGIHQAFVTLHVGVGTFRPVEVEDIKTHKMHEEWIEVPSSTVEQIRATQASGGRIIAVGTTVVRALEGAAAKGELQPFCGKTDLFIYPGYQWRVVEGLITNFHLPRSSLLMLVSALIGRERLLNIYQEAIASRYRFYSFGDAMLILPEARNK

SEQ ID NO: 71926 - protein, 388 aa, Scytonema tolypothrichoides
  REGION 1..388: note = tr|A0A0C2QC28|A0A0C2QC28_9CYAN S-adenosylmethionine:tRNA ribosyltransferase-isomerase; OS = Scytonema tolypothrichoides VB-61278 OX=1233231 GN=queA; PE = 3 SV=1
MQQQSAKTNFNPISSPDKEDLELDSSLTGYDYELPQELIAQNPVVPRDHSKLLVVNSLNTDIKQDIVHCIFRNLPEQLKSGDLLVMNNTKVYPARLYGRKSTGAEIEVLLLEERQHNCWLALVKPGKRFTRGAKIIFEARANSSSSPSSLTATVLETDEATGGRLLQFDLPEGVSLVQLLDVFGEVPLPPYITASDAQSEQYQTVYAKVPGAVAAPTAGLHFTPELLQRLGDRGIHQAFITLHVGVGTFRPVEVENVKTHKMHEEWISVPSSTVEQIRATQASGGRIIAVGTTVARALEGAAAKGELQPFCGKTDLFIYPGYQWRVVEGLITNFHLPRSSLLMLVSALIGRKRLLNIYQQAISSQYRFYSFGDAMLILPEATTVNSEQ

SEQ ID NO: 71927 - protein, 339 aa, Sebaldella termitidis
  REGION 1..339: note = tr|D1ALF5|D1ALF5_SEBTE S-adenosylmethionine:tRNA ribosyltransferase-isomerase OS=Sebaldella termitidis (strain ATCC 33386 / NCTC 11300) OX=526218 GN=queA PE=3; SV = 1
MKLSDFDFDLPDNLIAQSAMEPRDHSKLMVLEKNKQVIEHKKFYNISDYLKKGDVLVVNRTRVIPARLFGKKDTGSILECFLLKRIDLNTWEVLLKPAKKLKIGQKLVFLEGKLEAVLKEVKDDGNRILEFIYEGNFEEILDELGEMPLPPYITEQLKDKNRYQTVYAKEGESVAAPTAGLHFTNELLEKLKDSGVELTEIYLDVGLGTFRPVQTENILEHKMHHEKYHIPEESAEIINRAKREGRRIIAVGTTTVRTLESSNNGAEVISGDGETDIFIYGDYKFKIVDALITNFHLPKSTLLMLISAFAGKNFIFTAYETAIQEKYRFYSFGDAMFIY

SEQ ID NO: 71928 - protein, 363 aa, unidentified
  source 1..363: note = Unknown
  REGION 1..363: note = tr|J7GT28|J7GT28_9ENTR S-adenosylmethionine:tRNA ribosyltransferase-isomerase OS=secondary endosymbiont of Heteropsylla cubana OX=134287 GN=queA PE=3 SV=1
MHVTDFSFEVPDNLIARYPQAKRSSCRLLCLDGLGGTIIHQTFNDLVEKLTEGDLLIFNNTKVIPARLYGRKVTGGKIEVLIEKIFDNHRTLAHIRSSKAPKPGSKLLLGDDYSISATMISRYNSLFELHINDNRDIMTLLNDFGHTPLPPYINRLSEIADHELYQTVYAKHPGSVAAPTAGLHFDENLLALLNAKGIKIEFITLHIGAATFQPIRVNLIENHQMHSEYIEVSQNVVDAVNTCKTRGKRVIAVGTTSVRSLESAAAAAAKIGKTNLIPFYGDTSIFIYPGYQFRIVDVIITNFHLPESTLIMLVAAFAGYRHTLTAYREAVTKMYRFFSYGDAMFIVRNPEAHQEQISELLID

SEQ ID NO: 71929 - protein, 348 aa, unidentified
  source 1..348: note = Unknown
  REGION 1..348: note = tr|J3Z3S8|J3Z3S8_9ENTR S-adenosylmethionine:tRNA ribosyltransferase-isomerase OS=secondary endosymbiont of Ctenarytaina eucalypti OX=1199245 GN=queA PE=3 SV=1
MRTADFSFTLPKNLIARYPRAQRSACRLLSLDAKTGTLVHGVFTDLLDKLACGDLLVFNNTRVIPARLFGNKVSGGKIEVLVERVLDNQRVLAHIRASRASKTGTVLLLGDDDRIPVTIVARHESFFELRCNSPDNFLTLLNDHGHIPLPPYIDRPDNNVDRELYQTVYAETPGAVAAPTAGLHFDEPLLSALRLKGVEMTCITLHIGSGTYQPVRVDQIEQHQMHAEYAEVPQEVVDAVLACKSRGNRVVAVGTTSVRSLESAAVGGGGRLEPFFGDTRIFIYPGYYFLVIDAIITNFHLPESTLIMLVAAFAGYKHTLQGYRVAVEKAYRFFSYGDAMFITKHPAQ

SEQ ID NO: 71930 - protein, 348 aa, Sedimentibacter saalensis
  REGION 1..348: note = tr|A0A562JA80|A0A562JA80_9FIRM S-adenosylmethionine:tRNA ribosyltransferase-isomerase; OS = Sedimentibacter saalensis OX=130788 GN=queA PE=3 SV=1
MIENEKNFKTSDFYYHLPEELIAQTPIKERDHSRLLVLDKKTGAVEHKHFYDVIDYLNAGDCLVINETKVLPARLYGTRKDTGAVIELLLLKRIDDKCWETLVKPGKKAKEGTEIVFKENLLTGIITEVQEDGNRIIKFQYEGIFEEILDQLGEMPLPPYIHEKLEDKNRYQTIYAKNPGSAAAPTAGLHFNDELLKKVEEKGIKIARLTLHVGLGTFRPVKAEFISEHKMHSEYYELTQTEADKINSAKIGGFKVFSVGTTSTRTLETIGDENGLVRAQSGWTDIFIFPGYEYKVVDCLITNFHLPESTLVMLVSALAGKENIMNAYNEAVQEKYRFFSFGDAMLIK

SEQ ID NO: 71931 - protein, 353 aa, Sedimentibacter sp.
  REGION 1..353: note = tr|A0A252CMD8|A0A252CMD8_9FIRM S-adenosylmethionine:tRNA ribosyltransferase-isomerase; OS = Sedimentibacter sp. SX930 OX=1955060 GN=queA PE=3 SV=1
MIQKNKRGILSMRTSDFDFYLPEELIAQTPLLDRSSSRLLSLDSKTGEITDKHFTDMVEELQEGDALVLNNTRVLPARLHGVKPDTGGHIEVLLLNNIQGDEWETLVKPGKRVKVGTVISFGDGRLTAEVTQSLDHGGRILNFKYDGVFLEILESLGEMPLPPYIKETLDDQERYQTVYAKEVGSAAAPTAGLHFTAELLEEVANKGVKIVYLTLHVGLGTFRPVSVDDIASHEMHSEFYQLTEEAAQALNEVRSNGGKIVAVGTTSVRTLETIGTKFDGEIKADSGWTKIFISPGYSFKVVQGIITNFHLPKSTLVMLVSAFAGRDSVLSAYEHAVKEKYRFFSFGDAMFIK

SEQ ID NO: 71932 - protein, 343 aa, Sedimenticola selenatireducens
  REGION 1..343: note = tr|A0A2N6CRA9|A0A2N6CRA9_9GAMM S-adenosylmethionine:tRNA ribosyltransferase-isomerase; OS = Sedimenticola selenatireducens OX=191960 GN=queA PE=3; SV = 1
MQRSDFHYDLPDELIAQFPTGNRQDSRLLHLPCGGEGPVDRLFADLPSLLNPGDLLVFNDTRVMRARLFGTKATGGKVELLIERVLEPRRGLAHIRASKSPRAGSRILLEGGNVLEVQGRQEDLFVIAACDADLHELMCQTGHMPLPPYISREDQALDEERYQTVYSQREGAVAAPTAGLHFDQAMLARLDAMGVERAFVTLHVGAGTFRPVRVDRLEEHVMHSEYAEVSPEVCDQVRAARARGARVVAVGTTSVRSLESASREGEIQPFYGDTRLFITPGYRFHSVDALLTNFHLPESTLLMLVAAFSGYERIMAAYQHAVVQRYRFFSYGDAMFLERADWA

SEQ ID NO: 71933 - protein, 343 aa, Sedimenticola selenatireducens
  REGION 1..343: note = tr|A0A557RTW6|A0A557RTW6_9GAMM S-adenosylmethionine:tRNA ribosyltransferase-isomerase; OS = Sedimenticola selenatireducens OX=191960 GN=queA PE=3; SV = 1
MQTSDFHYELPDELIAQFPTRNRQDSRLLHLPAGAQEAVDRQFTDLPGLLNPGDLLVFNDTRVMRARLYGQKESGGRVELLIERVLQPEQGLAHIKASKSPKPGSRILLDGGGLLEVLDRADDLFLVAAVESDLPSLMAQSGHIPLPPYISRDDEALDVERYQTVYSRREGAVAAPTAGLHFGTEMLSLLEAMGIEQAHVTLHVGAGTFRPVRVDRLEDHVMHSEYVEVSAGVCEQVRATRARGGRVIAVGTTSVRSLEAASQEGEIKPFYGDTRLFITPGYAFHSVDAMVTNFHLPESTLLMLVAAFSGYDRIMAAYRHAVERRYRFFSYGDAMFLERIGKV

SEQ ID NO: 71934 - protein, 341 aa, Sedimenticola sp.
  REGION 1..341: note = tr|A0A2N6GC42|A0A2N6GC42_9GAMM S-adenosylmethionine:tRNA ribosyltransferase-isomerase; OS = Sedimenticola sp. OX=1940285 GN=queA PE=3 SV=1
MRRQDFHYILPDELIAQFPSERRGDSRLLCLDGDSGEMQDRHFSDLTALLNPGDLLVFNDTQVMAARVFGYKQSGGRVELLIERVLSPNQGLAHIRASKSPKPGTRIIIEDSVIVEVVGRQDDLFEIASPDISLMELMEKFGHMPLPPYITREDGKLDESRYQTVYAERPGAVAAPTAGLHFDQQMLDRLAEMGVRQARVTLHVGAGTFQPVRVDNLDEHLMHSEYVEVSEETCSLVQRTREAGGRIVAVGTTSVRSLESASQSGRLQPFFGDTRLFIRPGYLFKSVDALITNFHLPESTLLMLVSAFSGYQQIMAAYRHAVEQKYRFFSYGDAMFLTRRP

SEQ ID NO: 71935 - protein, 343 aa, unidentified
  source 1..343: note = Sedimenticola thiotaurini
  REGION 1..343: note = tr|A0A0F7JXK5|A0A0F7JXK5_9GAMM S-adenosylmethionine:tRNA ribosyltransferase-isomerase; OS = Sedimenticola thiotaurini OX=1543721 GN=queA PE=3 SV=1
MQRSDFHYDLPEELIAQFPTGNRRDSRLLHLPAGDASPMDRLFVDLPSLLNPGDLLVFNDTRVMRARLFGAKESGGKVELLIERVLEPNRGLAHIRASKSPRAGSRILLEGGGVLEILGRQDDLFIISSGDVELPDLMRQAGHIPLPPYISRADQAIDEERYQTVYSRQEGAVAAPTAGLHFDQAMLARLDAMGIQRACVTLHVGAGTFRPVRVDRLEDHVMHSEYAEVSEAVCNQVRATRERGGRVVAVGTTSVRSLESASRNGAIEPFRGDTRLFITPGYRFRSVDALLTNFHLPESTLLMLVAAFSGYERIMAAYRHAVDQRYRFFSYGDAMFLERPEDS

SEQ ID NO: 71936 - protein, 343 aa, unidentified
  source 1..343: note = Sedimenticola thiotaurini
  REGION 1..343: note = tr|A0A558D8L4|A0A558D8L4_9GAMM S-adenosylmethionine:tRNA ribosyltransferase-isomerase; OS = Sedimenticola thiotaurini OX=1543721 GN=queA PE=3 SV=1
MQTSDFHYELPDELIAQFPTRNRQDSRLLHLPAGVQEAVDRQFTDLPSLLNPGDLLVFNDTRVMRARLYGRKESGGRVELLIERVLEPERGLAHIKASKSPKPGNLILLDGGGVLEVLGREDDLFLVAAVELDLPSLMAQSGHIPLPPYIERDDEALDVERYQTVYSRREGAVAAPTAGLHFDQAMLTRLDDLGVEQAHVTLHVGAGTFRPVRVDRLEEHVMHSEYVEVSEAVCEQVRATRTRGGRVIAVGTTSVRSLESASQEGEINPFYGDTRLFITPGYKFRSVDAMVTNFHLPESTLLMLVSAFSGYERIMAAYRHAVEQRYRFFSYGDAMLLERVGQA

SEQ ID NO: 71937 - protein, 349 aa, unidentified
  source 1..349: note = Sedimentisphaera cyanobacteriorum
  REGION 1..349: note = tr|A0A1Q2HSU7|A0A1Q2HSU7_9BACT S-adenosylmethionine:tRNA ribosyltransferase-isomerase; OS = Sedimentisphaera cyanobacteriorum OX=1940790 GN=queA; PE = 3 SV=1
MKTKDLEYYLPEELIAQKPADARSSSRLLVLDKQNGTLDDRLFSDIGDYLRVGDCLVLNDTKVLSARFFAKRETGASLEGLYLGQAGENAWHIMLRNARKVKPGEKILLLNRDKEVYMKALACHRMGDGSWFIEPETDRPAEEVLDNIGYAPLPPYISRPGGGENPEMDRKRYQTVFAKKEGAVAAPTAGLHFTEQILSSLEKKGVHTSRVTLHVGAGTFKPVTASELSNHEIHSEKYNLSKDAAEKINAAKENGGRIIAVGTTSVRTLETAAAGGKLEACSGETRLFIVPGVKFNIVDAMITNFHLPRSTLLALVGAFAGMDKIMTAYKHAVEKRYRFFSYGDAMLIY

SEQ ID NO: 71938 - protein, 349 aa, unidentified
  source 1..349: note = Sedimentisphaera salicampi
  REGION 1..349: note = tr|A0A1W6LMX9|A0A1W6LMX9_9BACT S-adenosylmethionine:tRNA ribosyltransferase-isomerase; OS = Sedimentisphaera salicampi OX=1941349 GN=queA PE=3 SV=1
MKTKDLEYYLPEELIAQRPADARSSSRLLVLDKRNGTLDDRLFSDIGDYLRPEDCLVLNDTKVLSARFFAKRETGASLEGLYLGQAGENAWHIMLRNARKVKPGEKILLLDRDKEVYMKALACHRMGDGSWFIEPETDRPAEEVLEKIGYAPLPPYISRPGGGDNPEMDRKRYQTVFAKKEGAVAAPTAGLHFTEQMLSSLEEKGIQMARVTLHVGAGTFKPVTASDLSRHEIHSEKYTVSEEAAEKINTAKENGGRIIAVGTTSVRTLETAAAGGKLEACSGETRLFIVPGVKFNIVDAMITNFHLPRSTLLALVGAFAGMDKIMTAYKHAVEKRYRFFSYGDAMFIY

SEQ ID NO: 71939 - protein, 348 aa, unidentified
  source 1..348: note = Sedimentitalea nanhaiensis
  REGION 1..348: note = tr|A0A1I7BCB7|A0A1I7BCB7_9RHOB S-adenosylmethionine:tRNA ribosyltransferase-isomerase; OS = Sedimentitalea nanhaiensis OX=999627 GN=queA PE=3 SV=1
MKLSDFDFDLPDDRIATRPAVPRSAARLLVACGDELSDAHVRDLPDWLRAGDRLVLNDTRVIPARLSGHRLRSGAQGTTRARIEVTLLEPRPEGVWTALIKPLKKLKIGETVTFQAGLNAELKHIENGQGVLKFNCVGDEFDAALNLAGAMPLPPYIAAKRPADMRDMTDYQTVFARHSGAVAAPTASLHFDDALMHGLREKGIDFTYVTLHVGAGTFLPVKVEDVTSHRMHAEWGRVDAGAAAEIAATKAAGGRIVPVGTTALRLIETAAKDGSIKAWEGETDIFIYPGFQFQVTDALMTNFHLPKSTLMMLVSALMGQDRIALIYDHALNKGYRFFSYGDASLLVP

SEQ ID NO: 71940 - protein, 348 aa, unidentified
  source 1..348: note = Sedimentitalea sp.
  REGION 1..348: note = tr|A0A3T0N3H1|A0A3T0N3H1_9RHOB S-adenosylmethionine:tRNA ribosyltransferase-isomerase; OS = Sedimentitalea sp. W43 OX=2483033 GN=queA PE=3 SV=1
MKLSDFDFDLPDDLIATRPASPRSSARLLVANGDVLHDGTVTDLVNWLQPGDRLVLNDTKVIPARLSGLRHRNSAQGAVAAKIEVTLLEPCADGCWSALLKPLKKIKIGEDVVFGDGFSATLEAIKDGQGQLRFNLAGDDFDAALALAGAMPLPPYIAAKRPADAQDKQDYQTVWARNSGAVAAPTASLHFDEALLAGLAAKGVAFTHVTLHVGAGTFLPVKVEDVTTHKMHAEWGRVSDQAAAEIAATKAAGGRVIPVGTTALRLIESAARGGEIASWEGETDIFIYPGFTFHVADALMTNFHLPKSTLLMLVSALIGQQRVRAIYDHAVTAEYRFFSYGDASLLIP

SEQ ID NO: 71941 - protein, 342 aa, Sediminibacillus albus
  REGION 1..342: note = tr|A0A1G9CIW3|A0A1G9CIW3_9BACI S-adenosylmethionine:tRNA ribosyltransferase-isomerase; OS = Sediminibacillus albus OX=407036 GN=queA PE=3 SV=1
MDINDFDFDLPEELIAQTPLQDRTASRLLVLDRDKQTITHHHFADISAFLQPGDCLVLNDTKVLPARLYGSKQDTGGKVEVLLLHQQDKDEWEVLAKPAKKIKKGTVITFGEGQLTATCIEVKEHGGRVVRFDYQGIFLEVLEQLGEMPLPPYIKEQLPDRDRYQTVYAKEEGSAAAPTAGLHFTKDLLDILKNNGVEIAFITLHVGLGTFRPVSVDSIEDHDMHAEFYHMTEATANQLNRIKADGGRIISVGTTSTRTLETITRDNQGVFQQASGWTDIFIYPPYHFTAIDGLITNFHLPKSTLIMLVSALAGKEFTLKAYQEAIDNRYRFFSFGDAMLIL

SEQ ID NO: 71942 - protein, 342 aa, Sediminibacillus halophilus
  REGION 1..342: note = tr|A0A1G9XSU7|A0A1G9XSU7_9BACI S-adenosylmethionine:tRNA ribosyltransferase-isomerase; OS = Sediminibacillus halophilus OX=482461 GN=queA PE=3 SV=1
MDINDFDFDLPEELIAQTPLEDRTASRLLVMDREKQTISHQHFSDVIDYLSPGDCLVLNDTKVLPARLYGSKQDTGGKIEVLLLHQQQQDEWEVLAKPAKKVKEGTVITFGDGQLRAVCTGVKEHGGRVVRFEYDGIFLEVLEQLGEMPLPPYIKEQLPDKDRYQTVYAKEEGSAAAPTAGLHFTEQLLERIKEKGVELAFVTLHVGLGTFRPVSVDSIEEHDMHSEFYHMSEETANQLNRIKAAGGKIISVGTTSTRTLETITRDNDGKFTQASGWTDIFIYPPYQFTAIDGLITNFHLPKSTLIMLVSALAGKDFILKAYREAVDHRYRFFSFGDAMLIV

SEQ ID NO: 71943 - protein, 409 aa, unidentified
  source 1..409: note = Sediminibacterium ginsengisoli
  REGION 1..409: note = tr|A0A1T4N2J9|A0A1T4N2J9_9BACT S-adenosylmethionine:tRNA ribosyltransferase-isomerase; OS = Sediminibacterium ginsengisoli OX=413434; GN = SAMN04488132_10455 PE=3 SV=1
MHPSHLSIADYTYELPDHHIAAYPVAKRDNSKLLVYKKGVIRESRYAHLAEEIPAGSLLVFNNTKVVEARLLFQKETGGQIEIFCLEPHEQYPDITTAMLQKNRVLWKCLVGGAKKWKDVLLRKEIPSDTGPAVLTARKAEQRTDHYIIEFEWDNNASFAEILHLAGLVPLPPYMNRAAEDTDKERYQTVYAKHDGSVAAPTAGLHFTPELLASLAAKNISSGFVTLHVGAGTFKPVKAPTMETHEMHTEFMEIDRKLVQQLITHISGTIIAVGTTSLRTMESLYWLGVKLIQQPEIPFSELYITQWEAYENKTAPISTTEALEALLSWMDRHSIERLPARTQIIIAPGYRFRVARALITNFHQPQSTLLLLVAAITGNEWRTIYQYALEHDFRFLSYGDGSLLWMNED

SEQ ID NO: 71944 - protein, 349 aa, unidentified
  source 1..349: note = Sediminibacterium ginsengisoli
  REGION 1..349: note = tr|A0A1T4QE01|A0A1T4QE01_9BACT S-adenosylmethionine:tRNA ribosyltransferase-isomerase; OS = Sediminibacterium ginsengisoli OX=413434 GN=queA PE=3; SV = 1
MKLSQFKFDLPLNLIAQNPTKKREDSRMMVVDRKTGSMENKHFRDILEYFDDKDVFAVNNTKVFPARMYGRKEKTGAKIEVFLLRELNKPNRLWDVIVDPARKIRVGNKLYFGDNEELVAEVIDNTTSRGRTIRFLWDDDDESFKKMLEFLGETPLPKYIKRKPDEEDKERYQTVYAKYEGAVAAPTAGLHFSKELIKRCEIQGIRFAEVTLHTGLGTFRPIEVEDLSKHKMDAEYYQITEEACRIVNKAKETGHRICSIGTTTMRAMESSFTAQRMLKPSEGWTNHFIHPPYNFNVADSLVTNFHLPKTSLLIMTCAFAGYDLAMEAYKKAIKDKYRFFSYGDALLII

SEQ ID NO: 71945 - protein, 349 aa, unidentified
  source 1..349: note = Sediminibacterium goheungense
  REGION 1..349: note = tr|A0A4R6ISE7|A0A4R6ISE7_9BACT S-adenosylmethionine:tRNA ribosyltransferase-isomerase; OS = Sediminibacterium goheungense OX=1086393 GN=queA PE=3; SV = 1
MKLSQFKFDLPLNLIAQNPTKRREDSRLMVVDRKSGHMENKHFRDILEYYDDKDVFVVNNTKVFPARMYGRKEKTGAKIEVFLLRELNKPNRLWDVIVDPARKIRVGNKLYFGDNEELVAEVIDNTTSRGRTIRFLWDDDDESFKKMLEFLGETPLPKYIKRKPDEEDKERYQTVYAKHEGAVAAPTAGLHFSKELIKRCEILGIRFAEVTLHTGLGTFRPIEVEDLSKHKMDAEYYAISEEACKIVNKAKEGGHRICSIGTTTMRAMESSFTAQKLLKPSEGWTNHFIHPPYNFNVADSLVTNFHLPKTSLLIMTCAFAGYDLAMEAYKKAIKDKYRFFSYGDALLII

SEQ ID NO: 71946 - protein, 409 aa, unidentified
  source 1..409: note = Sediminibacterium goheungense
  REGION 1..409: note = tr|A0A4R6IX33|A0A4R6IX33_9BACT S-adenosylmethionine:tRNA ribosyltransferase-isomerase; OS = Sediminibacterium goheungense OX=1086393 GN=queA PE=3; SV = 1
MHPKDLSILDFTYELPDEKIARYPLEERDQSKLLIYQNKKISSSTYHELPSLLPPKTLLVFNNTKVVEARLYFQKASGSTIEIFCLEPDDRYADITTAMLQKDQVYWKCMIGGAKKWKENAISLSFTYKNQTVILTAEKKEQKNDHYIISFHWTVPDISFAEVLHAAGNLPLPPYMNREAETNDLERYQTVYAKHDGSVAAPTAGLHFTTTLLSRLEAADIHTSFVTLHVGAGTFKPVKAEVMQDHAMHAEFIDVGIDTIELLKNSISNPIIAVGTTSLRTLESLYWLGILILRVKNISPNELTIDQWLPYETDERTDTVTALDALLNWMKSNGLSRLITKTSIIIAPGYRFRIISGLITNFHQPQSTLLLLVAAITGNDWKDIYHYALTQEFRFLSYGDGSLLWCKKE

SEQ ID NO: 71947 - protein, 443 aa, Sediminibacterium sp.
  REGION 1..443: note = tr|A0A2M8JYY7|A0A2M8JYY7_9BACT S-adenosylmethionine:tRNA ribosyltransferase-isomerase; OS = Sediminibacterium sp. FEMGT703S OX=2080766 GN=queA PE=3; SV = 1
MKHPSLLHIEDFNYELPNEKIAKYPLEQRDQSKLLIWGAGQEMGDSEQIQTDFTPIRENIYANIADELPSGSLLVFNNTKVVEARLLFQKPTGGLVELFCLEPADHYGDITSAMLQKGSVQWKCLVGGAKKWKDGALELIIEEGLDQSANKPALKVFANKLEALPDCFLIQFSWELAELSFAEVLHIAGDIPLPPYLNRATEEADKERYQTIYAKHDGSVAAPTAGLHFTEQVFERLNEKNIPKAYITLHVGAGTFKPVKAEQMKDHEMHAEFIDVSFEAIEQLIAHIEKGIIAVGTTSLRTLESLYWIGVKTIKNPAIGTSDLQVMQWEPYTSDGDGNENKNSQKNIPKEYTAKEALQSLLTWMQRNKAERIITKTQIIIAPGYDFKIIRALVTNFHQPQSTLLLLISAIVGDNWKKIYEFALANEYRFLSYGDGSILYVRD

SEQ ID NO: 71948 - protein, 349 aa, Sediminibacterium sp.
  REGION 1..349: note = tr|A0A2M8JRX3|A0A2M8JRX3_9BACT S-adenosylmethionine:tRNA ribosyltransferase-isomerase; OS = Sediminibacterium sp. FEMGT703S OX=2080766 GN=queA PE=3; SV = 1
MKLSQFKFDLPLNLIAQNPTKRREDSRLMVVDRKSGHMENRYFKDILDYYDDKDVFVVNNTKVFPARMYGRKEKTGAKIEVFLLRELNKPNRLWDVIVDPARKIRVGNKLYFGDNEELVAEVIDNTTSRGRTIRFLWDDDDASFKKMLEFLGETPLPKYIKRKPDEEDKERYQTVYAKHEGAVAAPTAGLHFSKELIKRCEIQGIRFAEVTLHTGLGTFRPIEVEDLSKHKMDAEYYQIDEQACAIVNKAKESGKRICSIGTTTMRAMESSFTAQKLLKPSEGWTNHFIHPPYTFNVADSLVTNFHLPKTSLLIMTCAFAGYDLAIEAYKKAIKDKYRFFSYGDALLIV

SEQ ID NO: 71949 - protein, 349 aa, Sediminicola luteus
  REGION 1..349: note = tr|A0A2A4G4J5|A0A2A4G4J5_9FLAO S-adenosylmethionine:tRNA ribosyltransferase-isomerase; OS = Sediminicola luteus OX=319238 GN=queA PE=3 SV=1
MKLSNFNFELPENLLAEYPAENRDESKLMVIHRETGKIEHKLFKDLIDYFDEGDVMVLNNTKVFPARLYGNKEKTGAKIEVFLLRELNQEQRLWDVLVDPARKIRIGNKLYFGEDESLVAEVIDNTTSRGRTLRFLYDGSYTDFRRKLRELGQTPLPKYIKRDVEPEDEERYQTIYAKHEGAVAAPTAGLHFSKHLLKRLEIKGIDFAELTLHVGLGTFNPVEVEDLSKHKMDSEELVIDERATDVVNNAKKEKRRVCAVGTTVMRGLESAVSSERTLNTHEGWTNKFIFPPYDFSIANCMVTNFHLPKSTLLMMISAFMGHDLMKRAYKEAVLEQYKFYSYGDAMLII

SEQ ID NO: 71950 - protein, 349 aa, Sediminicola sp.
  REGION 1..349: note = tr|A0A0S1S8H6|A0A0S1S8H6_9FLAO S-adenosylmethionine:tRNA ribosyltransferase-isomerase; OS = Sediminicola sp. YIK13 OX=1453352 GN=queA PE=3 SV=1
MKLSHFNFELPNELLAEYPSENRDESKLMVVHRETGKIEHKMFKDLINYFDEDDVMVLNNTKVFPARLYGNKEKTGARIEVFLLRELNEEQRLWDVLVDPARKIRIGNKLYFGEDESLVAEVIDNTTSRGRTLRFLYDGSYTDFRRKLRELGETPLPKYIKRDVEPEDEQRYQTIYAKHEGAVAAPTAGLHFSKHLLKRLEIKGIKFAEVTLHVGLGTFNPVEVEDLSKHKMDSEELIIDEKCTEIVNNAKKNKRRVCAIGTTAMRGLESAVSSNHTLNTFDGWTNKFVFPPYEFSIATAMVTNFHLPKSTLLMMVSAFMGHDLMKKAYKEAIMEGYKFYSYGDAMLII

SEQ ID NO: 71951 - protein, 346 aa, unidentified
  source 1..346: note = Sediminispirochaeta smaragdinae
  REGION 1..346: note = tr|E1R1J9|E1R1J9_SEDSS S-adenosylmethionine:tRNA ribosyltransferase-isomerase OS=Sediminispirochaeta smaragdinae (strain DSM 11293 / JCM 15392 / SEBR 4228); OX = 573413GN=queA PE=3 SV=1
MKTSDFSFDLPEELIAQTPSEKRGASRMLVVDRKSGTFRHLHTSDFPEIVEDDVLLVVNDSKVRKARLFGSSETGGKVEFLLLHPDSQDHCLWTAMVSKAKKQRPGKRFLFPQGIEGIIEAINGDSTGPYRRVRFSIPVDDAYLEVNGHIPLPPYIRREDTELDEERYQTVYARHPGSVAAPTAGLHFTEETFTALKKRSIPVARLTLHVGLGTFLPVRSEEITDHEMHRERYEISQDVADTINRAKYDGRKIVAVGTTSVRTLESAWDTEEGCIRTGSAETRLFIYPGYTFKVVDRLFTNFHTPKSTLLMLVSAFAGKELIDAAYAEALKERYRFFSYGDAMYIQ

SEQ ID NO: 71952 - protein, 348 aa, Sediminitomix flava
  REGION 1..348: note = tr|A0A316A152|A0A316A152_9BACT S-adenosylmethionine:tRNA ribosyltransferase-isomerase; OS = Sediminitomix flava OX=379075 GN=queA PE=3 SV=1
MKLSAFKFDLPEKLVAQYPAETRDEARMMVLHKDTGEIEHKLFKDIIQYFDEGDVFVVNDTKVFPARLYGNKEKTGAKIEVFLLRELNKESHLWDVLVDPARKIRVGNKLYFGDGELVAEVIDNTTSRGRTIRFLFDGDDAEFYKIIDDLGETPLPKDIERAAEPEDRDRYQTIFADRKGAVAAPTAGLHFTPQVMKRLEILGVDVAPITLHVGLGAFREVDVEDLTKHKMDSENFEVRQPTVDVVNNALTNKKKVIAIGTTTMRALETSVSANDLLKPNAGWTDKFIFPPYDFKITKGLLTNFHKPMSTLLMMSAAFGGYENVMAAYEEAKKEEYRFLTYGDCMLII

SEQ ID NO: 71953 - protein, 405 aa, Sediminitomix flava
  REGION 1..405: note = tr|A0A315Z7C0|A0A315Z7C0_9BACT S-adenosylmethionine:tRNA ribosyltransferase-isomerase; OS = Sediminitomix flava OX=379075 GN=queA PE=3 SV=1
MKLTKIALSDYHYDLPADRIAKYPKEKRDESKLLVYREGEISNTVFKEIPTLIPDNHQFFFNNTKVLPARLYFKKETGAIIEIFLFNPVAPTAVISEAMLVKGEATWSTTVGNFKKWKDGQVLETMLNVNGQDVLLAAHIEDREKKLIRFEWSDKALPFVDIISSAGETPLPPYLKRKATEKDKTTYQTVFSKNDGAVAAPTAGLHFSEEVVQNLKGKSIPINELTLHVSAGTFKPIEVENAIDHDMHYEQVIVTKANLEALISGKKNIAVGTTSLRTLESLYWYGVKVMKEGENAPFDIKKLEPYNYEESELPTREESFKSILDLMIKLDKEELAGVTSIFVFPGYKFRVIDALVTNFHLPETTLVLLIAAFIGEDWRKVYEHAMDNDFQFLSYGDSSILFPKQ

SEQ ID NO: 71954 - protein, 349 aa, Segetibacter aerophilus
  REGION 1..349: note = tr|A0A512BAP3|A0A512BAP3_9BACT S-adenosylmethionine:tRNA ribosyltransferase-isomerase; OS = Segetibacter aerophilus OX=670293 GN=queA_1 PE=3 SV=1
MKLSKFIFDLPLNLIAQNPTKKREDSRMMVVHRKTGQLEDLHFRDILNYFDDKDVFVVNNTKVFPARMYGRKEKTGAVVEVFLLRELNAANRLWDVIVDPARKIRVGNKLYFGDNDELVAEVIDNTTSRGRTIKFLWDGAEDDFKKQLEALGETPLPKYIKRKPDEEDRERYQTVYAKHEGAVAAPTAGFHFSKELIKRCEIKGIRFAEVTLHSGLGTFRPLEVEDLHKHKMDAEFYQIDEFACKIVNKAKEDGRRICSIGTTTMRALESSYTSQQLLKPSEGWTNNFIHPPYDFNVANAMVTNFHLPKSSLFILTCAFGGYDLITEAYKKAIKDKYKFSTYGDAMLVL

SEQ ID NO: 71955 - protein, 440 aa, Segetibacter aerophilus
  REGION 1..440: note = tr|A0A512BE89|A0A512BE89_9BACT S-adenosylmethionine:tRNA ribosyltransferase-isomerase; OS = Segetibacter aerophilus OX=670293 GN=queA_2 PE=3 SV=1
MGIREAGTNEFVQKIREINKPLFLKILATMHPKHLSITEFSYDLDPERIAKYPLEERDASKLLVYKSGTVTTSTYKQVAEFLPEETLLIFNNTKVVEARLLFQKPTGGVIEIFCLEPGDQYKDITSAMLQKGKASWKCLVGGASKWKHGMKLQKQVNENGVNFILEASIAGRLPDCFIIDLSWKPEEVSFAEILHIAGFIPLPPYLHRSAEEDDKNRYQTIYAKQDGSVAAPTAGLHFTDEVFERLAAKNIRHDFVTLHVGAGTFKPVKAETMDEHEMHAEFIEVAAEAVERLINYVDKTVVAVGTTSLRTIESLYWMGVKVLHEPAIEVDDIVISQWDPYELEHFGIEVKDALKALFYWMIKKGLNKIITKTQILIAPGYQLKIAKGIITNFHQPQSTLLLLVAAIVGEEWKRIYQYAMDNDFRFLSYGDGCLLWNDSK

SEQ ID NO: 71956 - protein, 345 aa, Seinonella peptonophila
  REGION 1..345: note = tr|A0A1M4TRK8|A0A1M4TRK8_9BACL S-adenosylmethionine:tRNA ribosyltransferase-isomerase; OS = Seinonella peptonophila OX=112248 GN=queA PE=3 SV=1
MDIAEFDFHLPKELIAQKPISERSQSRLLVLNRETGEREHTIFAQLPHYLREGDLLVLNNTRVRPARLIGIKQETGAKIELLLLQPLGEDRWEALVKPARRVKKGTVIQFGNGELVAIAEQESKVDGGRLFRLEYDPQRSIEELFEELGKVPLPPYIHEELNDPERYQTVYSYEVGSAAAPTAGLHFTHVLLDQCNQKGVDVAFLTLHVGLGTFRPVSVSKIEEHKMHAEFFQISQQTLEKIKRTKKRGGRVIAVGTTAVRTLETIGMQIDHVKGDQSGWTDIFIYPGYQFQIVDGMITNFHLPKSTLLMLVSAFCSRERILTAYQEAIDRRYRFFSFGDAMFIY

SEQ ID NO: 71957 - protein, 341 aa, Selenihalanaerobacter shriftii
  REGION 1..341: note = tr|A0A1T4MYF5|A0A1T4MYF5_9FIRM S-adenosylmethionine:tRNA ribosyltransferase-isomerase; OS = Selenihalanaerobacter shriftii OX=142842 GN=queA PE=3; SV = 1
MKVSEFDYNLPEELIAQEPADPRDESRLMVLNRENGNTEEKIFKEIVELIEPGDTIILNDTKVIPARLYGVKEETGGKVEFLLLNEVELDTWEVLVRPGRKVKIGTRVVFGDSDLVAEVKDRTDFGGRVVTFEYDGVFAEILDKLGEMPLPPYITKELENREQYQTVYAKKRGAAAAPTAGLHFTEEVLDALKEKGVNIAYITLHVGLGTFRPVRAETIKDHDMHAEYYEVSDKTAEIINQTKDQDQRVIAVGTTVTRTLETVSNAKGYVQSDKGWTDIFIYPGYEFKVVDALLTNFHLPESTLVMLVSAFCGRENTLAAYRKAVEEEYRFYSFGDAMLII

SEQ ID NO: 71958 - protein, 341 aa, unidentified
  source 1..341: note = Seleniivibrio woodruffii
  REGION 1..341: note = tr|A0A4R1K5L4|A0A4R1K5L4_9BACT S-adenosylmethionine:tRNA ribosyltransferase-isomerase; OS = Seleniivibrio woodruffii OX=1078050 GN=queA PE=3 SV=1
MQTTSKTPVSAYDFHLPEELIAQSPAADRGTSRLLRITRSDGGIKDGTFTDIVGLIDDSCFLVVNSTRVMKARLYGRKPTGGMVEILVLEKLEDNFCLCLTKGNVKTGTILNFPDASAVIEQMREDGTRLIRFSEEPSDVMNRHGHIPLPPYIRREDTQDDASRYQTVYSADEASVAAPTAGLHFTQEILDRLKAKGVQILELSLNIGIGTFRPVKADYLEDHDMHTEKYFISADTAAEINRLKAGGKKLVAVGTTAVRALESASAGGQVRAGYGETDLFIKPGYSFRVIDRLITNFHLPKSTLLVLVTMFAGYDLTMQAYAHAVENGYRFFSYGDAMFIE

SEQ ID NO: 71959 - protein, 335 aa, unidentified
  source 1..335: note = Selenomonadales bacterium
  REGION 1..335: note = tr|A0A316QFY1|A0A316QFY1_9FIRM S-adenosylmethionine:tRNA ribosyltransferase-isomerase; OS = Selenomonadales bacterium OX=2137878 GN=queA PE=3 SV=1
MFDYELPKEFIAQTPAEPRDHSKLLVYERQTDAVRHRHFYNLPEYLRAGDVLVINETRVLPARLMGRRETGGVIELLLLNRREKDIWETLARPGRRIRPGDRLVFSEGLSADVLESLEDGGRLVRFNYDGVFEEILDALGQMPLPPYITERLENKERYQTVYSKETGSSAAPTAGLHFTPELLNKIREMGVKIVPVLLHVGLGTFRPVKVRDVAEHKMHSEYYSLSPQAADAINKAKASGGRIISVGTTSTRVLETVCGEDGVIRARTGWTDIFIYPGYKFKCVDCLITNFHLPQSTLLMLVSAFCSREKILEIYEEAKKEDYRFFSFGDAMLII

SEQ ID NO: 71960 - protein, 346 aa, Selenomonas artemidis
  REGION 1..346: note = tr|E7MZG2|E7MZG2_9FIRM S-adenosylmethionine:tRNA ribosyltransferase-isomerase OS=Selenomonas artemidis F0399 OX=749551 GN=queA PE=3 SV=1
MDISDFDYDLPEERIAQTPLEPRDASRLMVLDPAEQTIEHRHFYELDVLLQPGDVLIFNDTRVIPARLIGARDKTGAKVEVLLLRQIDRDRWEALVKPGKKARIGDRIRFGEELSCGIISHTDFGGRIVKFIYQGIFEEILDRLGEMPLPPYIREKLSDADRYQTIYSRERGSAAAPTAGLHFTEELLVRLKEKGVIFGFVTLHVGLGTFRPVQEQTIENHVMHREYYAIPEETAQIIRRAKAEGRRIVAVGTTSIRTLESAAGETGEIRPTSGWTDIFIYPGYRFKVVDAIITNFHLPKSTLIMLISAFAGRSFILNAYKQAVDEGYRFFSFGDAMLIQGRKKAT

SEQ ID NO: 71961 - protein, 343 aa, Selenomonas flueggei
  REGION 1..343: note = tr|C4V2G6|C4V2G6_9FIRM S-adenosylmethionine:tRNA ribosyltransferase-isomerase OS=Selenomonas flueggei ATCC 43531 OX=638302 GN=queA PE=3 SV=1
MNISDFDYFLPEEQIAQVPADPRDSSRMMVLSPKTQSIEHRHFYQLDEYLTDGDVLIFNDTRVIPARLIGVRQPTGGKAEVFLLRQLERDRWEVLVKPGKKMRVGSVITFGHELSCEVLAYTDFGGRIVKFSYEGIFEEILDRLGTMPLPPYIHETLEDPERYQTIYSREKGSAAAPTAGLHFTESLMDRLRKKGVHLGFVTLHVGLGTFRPVQVDEIEDHVMHSEFYSIPTETADLIRMAKQEGRRVVAVGTTSIRTLESAAVDHGMIEEKRGQTNIFIYPGYQFKIVDAVITNFHLPKSTLIMLVSAFAGREFTLQAYRTAVEENYRFFSFGDAMLIQSRA

SEQ ID NO: 71962 - protein, 343 aa, Selenomonas infelix
  REGION 1..343: note = tr|G5GMP4|G5GMP4_9FIRM S-adenosylmethionine:tRNA ribosyltransferase-isomerase OS=Selenomonas infelix ATCC 43532 OX=679201 GN=queA PE=3 SV=1
MDISDFDYDLPEARIAQTPLEPRDSARLMVLHPKEHTIEHRHFYELGDFLRNGDVLIFNDTRVIPARLIGARSQTGGKVEVFLLRQIDKDQWEVLVKPGKKARVGSVIQFGDELSCEIIADTDFGGRIVRFIYHGIFEEILDRLGSMPLPPYIHEKLEDRERYQTIYSRVKGSAAAPTAGLHFTKNLMERLHEQGIQFGFITLHVGLGTFRPVHVDVIEDHVMHREFYSVPTETAELIQRAKLEGRRVVAVGTTSIRTLEASAASTGHIEAGSGWTDIFIYPGYEFKVVDAVITNFHLPKSTLIMLISAFAGRTFTLEAYRTAVKEQYRFFSFGDAMFISSKS

SEQ ID NO: 71963 - protein, 343 aa, Selenomonas noxia
  REGION 1..343: note = tr|D4S8L5|D4S8L5_9FIRM S-adenosylmethionine:tRNA ribosyltransferase-isomerase OS=Selenomonas noxia ATCC 43541 OX=585503 GN=queA PE=3 SV=1
MDISDFDYDLPQEQIAQVPAEPRDSSRLMVLNPKERTIQHHYFYQLEDFLKKGDVLIFNDTRVIPARLIGEREHTGGKVEIFLLHQMDKNHWEVLVKPGKKARIGTVISFGEELSCEIIDRTDFGGRIVRFIYNGVFEEILDRLGTMPLPPYIHETLEDRERYQTVYNRVKGSAAAPTAGLHFTEALMERLREKGVQFGFITLHVGLGTFRPVHVDVVEDHVMHREFYSIPPETAELVQTAKKEGRRVISVGTTSIRTLEAAVASAGIIAAGSGWTDIFIYPGYQFKVVDAVITNFHLPKSTLIMLVSAFAGRDFTLEAYRTAVEERYRFFSFGDAMMIQMRA

SEQ ID NO: 71964 - protein, 336 aa, Selenomonas noxia
  REGION 1..336: note = tr|G5H1C9|G5H1C9_9FIRM S-adenosylmethionine:tRNA ribosyltransferase-isomerase OS=Selenomonas noxia F0398; OX = 702437 GN=queA PE=3 SV=1
MDISDFDYDLPQEQIAQVPAEPRDSSRLMVLNPKERTIQHHYFYQLEDFLKKGDVLIFNDTRVIPARLIGEREHTGGKVEIFLLHQMDKNHWEVLVKPGKKARIGTVISFGEELSCEIINRTDFGGRIVRFIYNGVFEEILDRLGTMPLPPYIHETLEDRERYQTVYNRVKGSAAAPTAGLHFTEALMERLREKGVQFGFITLHVGLGTFRPVHVDVVEDHVMHREFYSIPPETAELVQTAKKEGRRVISVGTTSIRTLEAAVASAGIIAAGSGWTDIFIYPGYQFKVVDAVITNFHLPKSTLIMLVSAFAGRDFTLEAYRTAVEERYRFFLLEMP

SEQ ID NO: 71965 - protein, 364 aa, Selenomonas ruminantium
  REGION 1..364: note = tr|A0A1H0V401|A0A1H0V401_SELRU S-adenosylmethionine:tRNA ribosyltransferase-isomerase; OS = Selenomonas ruminantium OX=971 GN=queA PE=3 SV=1
MLLLSDFDYELPEERIAQVPIEPRNASRLMVLDPVEKTMEHRHFYDLKEYVEPGDTLIFNDTRVMPARLIGHRDQTGGKVEVFLLRRIDATHWETLVKPGKKARAGYKINFSDELSCTVVDNTDFGGRVVEFQYDGIFEEILDRLGETPLPPYIHEKLEDKERYQTVYNREEGSAAAPTAGLHFTKEQMQELKDMGVNLGFVTLHVGLGTFRPVNVEDIQKHDMHKEFYHVPEETAKLIMDTKKAGHRVIAVGTTSIRTLESAADGMGEISAKSGWTQIFIYPGYDFKIVDAIITNFHLPKSTLIMLISAFAGREFVLDAYKTAVEMKYRFFSFGDAMMLKVKQPREERDAELQALEEAHLSAE

SEQ ID NO: 71966 - protein, 366 aa, Selenomonas ruminantium
  REGION 1..366: note = tr|A0A1M6V8J1|A0A1M6V8J1_SELRU S-adenosylmethionine:tRNA ribosyltransferase-isomerase; OS = Selenomonas ruminantium OX=971 GN=queA PE=3 SV=1
MLLLSDFDYELPEERIAQVPVEPRNSSRLMVLDPVEKTMEHRHFYDLKEYVEPGDTLIFNDTRVMPARLIGHRDQTGGKVEVFLLRRIDSNHWETLVKPGKKARPGHKINFSDELSCVVTDHTDFGGRIVEFQYEGIFEEILDRLGETPLPPYIHEKLEDKERYQTVYNREQGSAAAPTAGLHFTKEQMQELKDMGVNLGFVTLHVGLGTFRPVNVEDIQKHDMHKEFYNVPEETAKLIMETKKAGHRVIAVGTTSIRTLESAADGVGEISAKSGWTQIFIYPGYDFKIVDAIITNFHLPKSTLIMLISAFAGREFVLEAYKKAVEMKYRFFSFGDAMFLKAKQPLAERTEELKALEESHQSAVTE

SEQ ID NO: 71967 - protein, 342 aa, Selenomonas sp.
  REGION 1..342: note = tr|L1N6J8|L1N6J8_9FIRM S-adenosylmethionine:tRNA ribosyltransferase-isomerase OS=Selenomonas sp. oral taxon 138 str. F0429 OX=1127695 GN=queA PE=3 SV=1
MDISDFDYDLPEERIAQLPVEPRDSSRLMVLDPSNHTIEHRRFFQLGDFLKQGDLLIFNDTRVIPARLIGARDTGGKVEVFLLRQIDRDQWEVLVKPGKKMRIGSVVHFGEELSCEIIAHTDFGGRIVRFIYEGIFEEILDRLGNMPLPPYIHEKLEDRERYQTIYSRVKGSAAAPTAGLHFTELLMAELRRKGIQFGFITLHVGLGTFRPVHVDTIEDHVMHSEFYSVPTDTAELIRSAKKDGRRVVAVGTTSIRTLEAAASSTGTVEAGSGWTNIFIYPGYEFKVVDAVITNFHLPKSTLIMLISAFAGRAFTLEAYRTAVAEEYRFFSFGDAMLIQSRQ

SEQ ID NO: 71968 - protein, 345 aa, Selenomonas sp.
  REGION 1..345: note = tr|A0A3D0X2L0|A0A3D0X2L0_9FIRM S-adenosylmethionine:tRNA ribosyltransferase-isomerase; OS = Selenomonas sp. OX=2053611 GN=queA PE=3 SV=1
MLLNDFDYELPEELIAQTPIEPRNASRLMVLDPVEKSISHRHFYDLKEFLSPGDALIFNDTRVMPARLIGRREPTGAKVEIFLLRRIDGNRWETLAKPGKKAQQGTVIRFSDELSCRILDRTDFGGRIVEFSFEGIFEEILDRLGETPLPPYIHEKLEDSERYQTVYSREQGSAAAPTAGLHFTKEQMKELEESGIGLGFVTLHVGLGTFRPVQTETIEEHVMHREYYELPEKTVELIRRTKAAGHRVIAVGTTSIRTLESAADGKNEISAKSGWTDIFIYPGYEFKIVDAIITNFHLPKSTLIMLISAFAGREFVLEAYRKAVEERYRFFSFGDAMMITGPVRQ

SEQ ID NO: 71969 - protein, 343 aa, Selenomonas sputigena
  REGION 1..343: note = tr|C9LW37|C9LW37_SELS3 S-adenosylmethionine:tRNA ribosyltransferase-isomerase OS=Selenomonas sputigena (strain ATCC 35185 / DSM 20758 / VPI D19B-28) OX=546271; GN = que A PE=3 SV=1
MLLKDFDYELPEERIAQKPIEPRNASRLMVLDPVAKTIEHRHFYDLGEFLAPGDALILNDTRVLPARLYGRREPTGAHIEVFLLRRLDKDSWETLVRPGKKAQVGQVIRFSDELCAEVMAHTDFGGRIVKFRYEGVFEEILDRLGETPLPPYIHERLEDKERYQTVYCREEGSAAAPTAGLHFTREQLAELKAQGVHIGFVTLHVGLGTFRPVNVEKIEEHKMHSEYYQLPEETAELIRRTKAAGGRVIAVGTTSIRTLESAAEAQGVISAKSGWTDIFIYPGYRFKIVDALVTNFHLPKSTLLMLISAFAGREFVLHAYEEAVREKYRFFSFGDAMFLRKRG

SEQ ID NO: 71970 - protein, 341 aa, unidentified
  source 1..341: note = Sellimonas intestinalis
  REGION 1..341: note = tr|A0A3E3K2D7|A0A3E3K2D7_9FIRM S-adenosylmethionine:tRNA ribosyltransferase-isomerase; OS = Sellimonas intestinalis OX=1653434 GN=queA PE=3 SV=1
MKKEDFYFKLPEELIAQDPLEDRSASRLLVLDKESGKIEHRMFRDIKAYLKPGDCLVINDTKVIPARLIGSKIGTDAKIEILLLKRKENDIWETLVKPGKKAKPGTKISFGEGLLIGEVIDVVEEGNRLIQFSYQGIFEEILDQLGQMPLPPYITHQLEDKNRYQTVYAKHSGSAAAPTAGLHFTPELLKEIKESGVDIAHVTLHVGLGTFRPVKVENIQEHHMHSEFYHIEASEAEKINRAKRGGHRIICVGTTSCRTIESAAKPDGTLSECSGWTEIFIYPGYQFKVLDCLLTNFHLPESTLIMLVSALAGREHVLHAYEEAVKEQYRFFSFGDAMLIV

SEQ ID NO: 71971 - protein, 380 aa, unidentified
  source 1..380: note = Senegalimassilia anaerobia
  REGION 1..380: note = tr|A0A369L3Y8|A0A369L3Y8_9ACTN S-adenosylmethionine:tRNA ribosyltransferase-isomerase; OS = Senegalimassilia anaerobia OX=1473216 GN=queA PE=3 SV=1
MKTSDFDYDLPQELIAQEPAAVRDACRMLVMDRETGAIEDRIFRDIIDYLEPGDLLVANETRVLPARLLGAKRGTGGQSEVFLLRQLVGSKAQPYADVPQIPGQPVPGENQQAIWEVLVRPGKRLKPGSGAVVDFTDGEGNVALSAEIVDWAEGAQRGERVARLTTTYPSLDEALHAVGHTPLPPYIKHYAGDEELYQTVYSRRESSAAAPTAGLHFTPELIERLREKGIDWETVELEVGLDTFRIVDEEDPLAHKMHTEFYTVPQKTVDAINRTHANGGRVVAVGTTSVRSLESAWDPSADDGAGAITARDRDATSLYLLPGSTFHVVDALVTNFHVPRSTLMMLVSAFSTRENIMNAYQHAIEERYRMLSFGDAMFIR

SEQ ID NO: 71972 - protein, 380 aa, unidentified
  source 1..380: note = Senegalimassilia sp.
  REGION 1..380: note = tr|A0A4Q2K4J3|A0A4Q2K4J3_9ACTN S-adenosylmethionine:tRNA ribosyltransferase-isomerase; OS = Senegalimassilia sp. KGMB04484 OX=2509433 GN=queA PE=3; SV = 1
MKTSDFDYDLPQELIAQEPAAVRDACRMLVMNRQTGALEDRIFRDIIDYLNPGDLLVANETRVMPARLLGAKRGTGGQSEVFLLRQLMGEKATKYADVPHIAGQPAPGENQQAIWEVLVRPGKRLKPGSGAVVDFTDAEGNVALSAEIIDWAEGAQRGERVARLTTTHPSLDQALHAVGHTPLPPYIKHYAGDEELYQTVYSRRESSAAAPTAGLHFTPELIERVKAKGIDWETVELEVGLDTFRIVDEEDPLAHKMHTEFYTVPQKTVDAINRTHAAGGRVIAVGTTSVRSLESAWDPAANDGQGAITPRNRDATSLYLLPGSQFHVVDALITNFHVPRSTLMMLVSAFSSRENVMNAYQHAISERYRMLSFGDAMFIK

SEQ ID NO: 71973 - protein, 349 aa, unidentified
  source 1..349: note = Seonamhaeicola algicola
  REGION 1..349: note = tr|A0A5C7AM19|A0A5C7AM19_9FLAO S-adenosylmethionine:tRNA ribosyltransferase-isomerase; OS = Seonamhaeicola algicola OX=1719036 GN=queA PE=3 SV=1
MKLSNFGFDLPNELLAEYPSENRDESRLMVLNRKEQTIEHKLFKDVIDYFNEDDVLILNNTKVFPARLYGNKEKTGARIEVFLLRELNEEQRLWDVLVDPARKIRIGNKLYFGDDDTLVAEVIDNTTSRGRTLRFLYDGSYTEFRRKLKELGETPLPKYIKRDVQPEDEDRYQTIYAKNEGAVAAPTAGLHFSKHLLKRLEIKGVNFAEVTLHVGLGTFNPVEVEDLSKHKMDSEEITIETPAVNTVNTAIQNKKRVCAVGTTAMRTIESSVSSSGMLNEMQGWTNKFIFPPYDFSIANSMITNFHTPKSTLLMMVSAFAGHDFVMHAYEEAVKEKYRFYSYGDAMLII

SEQ ID NO: 71974 - protein, 349 aa, unidentified
  source 1..349: note = Seonamhaeicola aphaedonensis
  REGION 1..349: note = tr|A0A3D9HMZ5|A0A3D9HMZ5_9FLAO S-adenosylmethionine:tRNA ribosyltransferase-isomerase; OS = Seonamhaeicola aphaedonensis OX=1461338 GN=queA PE=3; SV = 1
MKLSNFGFNLPQELLAEYPSENRDESRLMVLNRKEQTIEHKLFKDIINYFDQDDVLILNNTKVFPARLYGNKEKTGARIEVFLLRELNEEQRLWDVLVDPARKIRIGNKLYFGDDETLVAEVIDNTTSRGRTLRFLYDGSYSDFRRKLQELGETPLPKYIKRDVEPEDEDRYQTIYAKNEGAVAAPTAGLHFSKHLLKRLEIKGVNFAEVTLHVGLGTFNPVEVEDLSKHKMDSEEISINSLAVETVNKAIQNKKRVCAVGTTAMRTIESSVSSNGLLNEMEGWTNKFIFPPYDFSIANCMITNFHTPKSTLLMMVSAFAGHDFIMKAYEEAVKEKYRFYSYGDAMLII

SEQ ID NO: 71975 - protein, 349 aa, unidentified
  source 1..349: note = Seonamhaeicola marinus
  REGION 1..349: note = tr|A0A5D0HEP1|A0A5D0HEP1_9FLAO S-adenosylmethionine:tRNA ribosyltransferase-isomerase; OS = Seonamhaeicola marinus OX=1912246 GN=queA PE=3 SV=1
MKLSNFGFDLPNELLAEYPSENRDEARLMVLNRKEQTIEHKLFKDIIDYFDEDDVLILNNTKVFPARLYGNKEKTGARIEVFLLRELNEEQRLWDVLVDPARKIRIGNKLYFGDDDTLVAEVIDNTTSRGRTLRFLYDGSYSEFRRKLQELGETPLPKYIKRDVEPEDEDRYQTIYAKNEGAVAAPTAGLHFSKHLLKRLEIKGVNFAEVTLHVGLGTFNPVEVEDLSKHKMDSEEIVIDEAAANTVNTAIKNKKRVCAVGTTAMRTIESSVSSNGLLNEMDGWTNKFIFPPYDFSIADCMITNFHTPKSTLLMMVSAFAGHDFIMRAYEEAVKEKYKFYSYGDAMLII

SEQ ID NO: 71976 - protein, 349 aa, unidentified
  source 1..349: note = Seonamhaeicola sp.
  REGION 1..349: note = tr|A0A562YF93|A0A562YF93_9FLAO S-adenosylmethionine:tRNA ribosyltransferase-isomerase; OS = Seonamhaeicola sp. W255 OX=2528206 GN=queA PE=3 SV=1
MKLSNFGFNLPQELLAEYPSENRDESRLMVLNRKEQTIEHKLFKDIIDYFDQDDVLILNNTKVFPARLYGNKEKTGARIEVFLLRELNEEQRLWDVLVDPARKIRIGNKLYFGDDETLVAEVIDNTTSRGRTLRFLYDGSYSDFRRKLQELGETPLPKYIKRDVEPEDEDRYQTIYAKNEGAVAAPTAGLHFSKHLLKRLEIKGVNFAEVTLHVGLGTFNPVEVEDLSKHKMDSEEISIDRFAVETVNKAIQNKKRVCAVGTTAMRTIESSVSSNGLLNEMDGWTNKFIFPPYDFSIANCMITNFHTPKSTLLMMVSAFAGHDFIMKAYEEAVKEKYRFYSYGDAMLII

SEQ ID NO: 71977 - protein, 349 aa, unidentified
  source 1..349: note = Seonamhaeicola sp.
  REGION 1..349: note = tr|A0A1U7DSI8|A0A1U7DSI8_9FLAO S-adenosylmethionine:tRNA ribosyltransferase-isomerase; OS = Seonamhaeicola sp. S2-3 OX=1936081 GN=queA PE=3 SV=1
MKLSNFGFNLPPELLAEYPSENRDEARLMVLNRKEQTIEHKLFKDIIDYFDEDDVLILNNTKVFPARLYGNKEKTGARIEVFLLRELNEEQRLWDVLVDPARKIRIGNKLYFGDDDALVAEVIDNTTSRGRTLRFLYDGSYTEFRRKLQELGETPLPKYIKREVEPEDEERYQTIYAKKEGAVAAPTAGLHFSKHLLKRLEIKGVNFAEVTLHVGLGTFNPVEVEDLSKHKMDSEEVTIAKAAVETVNEAIQNKKRVCAVGTTAMRAIESSVSSNGLLNEIDGWTNKFIFPPYDFSIANCMITNFHTPKSTLLMMVSAFAGHDFIMKAYEEAVKEKYKFYSYGDAMLII

SEQ ID NO: 71978 - protein, 341 aa, unidentified
  source 1..341: note = Serpentinicella alkaliphila
  REGION 1..341: note = tr|A0A4R2TVE9|A0A4R2TVE9_9CLOT S-adenosylmethionine:tRNA ribosyltransferase-isomerase; OS = Serpentinicella alkaliphila OX=1734049 GN=queA PE=3 SV=1
MKTKDFDFFLPEHLIAQHPLEKRDHSRLMVIERDTGDINHKHFYNIIDYLNENDCLVLNDTRVLPARLIGEKEETGGKVEFLLLKRTSLDTWETLVKPGKKAKIGSKFSFGEGMLNLEVVDIGEEGSRIVKFSYDGIFEEVLERLGKMPLPPYITAELEDKERYQTVYSKEVGSAAAPTAGLHFTEELLEKIKNKGVNIVYITLHVGLGTFRPVKAEDISEHKMHSEFYSISEKAAKTINECKSNGNKVIAVGTTSCRTLESASEVPGKIESKTGWTDIFIFPGYKFKIIDSLITNFHLPESTLIMLVSALAGRENILNAYKVAVEEEYRFFSFGDAMLLK

SEQ ID NO: 71979 - protein, 370 aa, unidentified
  source 1..370: note = Serpentinomonas mccroryi
  REGION 1..370: note = tr|A0A060NYG8|A0A060NYG8_9BURK S-adenosylmethionine:tRNA ribosyltransferase-isomerase; OS = Serpentinomonas mccroryi OX=1458426 GN=queA PE=3 SV=1
MERACPALKHTMPSAPPDASRAFTLSDFDYHLPPELIAQHPTPERSAARLLDGTRWPPRDRIFRDLPDFFSPLDLLVFNDTQVMKARLYGEKPSGGKVELLIERVLPSSGHEVLAHLKVSKKPPAGTVLHLWQRDGRSVAARATLLGRWPDEEGTLFRLALDQDPYALMAAHGHVPLPPYIEHADDAQDEERYQTVFAQRPGAVAAPTAALHFDQGVLDALDRLGVQRASVTLHIGAGTFVPCKSENIHEHVMHSEWYEVPAATQQAIADARARGGRVVAVGTTSVRTLESWARTGAASGDTALYITPGFEFALVDRLITNFHLPKSTLMMLVTAFAGYDHVMALYSHAVAQRYRFFSYGDSMLLQRASV

SEQ ID NO: 71980 - protein, 374 aa, unidentified
  source 1..374: note = Serpentinomonas raichei
  REGION 1..374: note = tr|A0A060NLE7|A0A060NLE7_9BURK S-adenosylmethionine:tRNA ribosyltransferase-isomerase; OS = Serpentinomonas raichei OX=1458425 GN=queA PE=3 SV=1
MNHTTHPATPATHRSYTLSDFDYALPPELIAQHPCPERSSARLLDGTGLDPADRVFRDLPGLLRAGDLLVFNDTLVVKARLYGEKPSGGRFELLLERVLGGPRHEVIAHMKVSKKPALGTELLLWNRTGDALVARATLLGRWPDANGALFRLSLSEEPYALMAAHGHVPLPPYIEHTDSEEDEARYQTVFAKNPGAVAAPTAALHFDQAVLDALQAHGVQCASVTLHIGAGTFQPCKSENIAEHVMHSEWYQIPQATQDAIQETRARGGQIVAVGTTSVRSLESWARTGEATGDTALYITPGFEFALVDRLITNFHLPKSTLMMLVTAFAGYDHVMALYRHAVAQRYRFFSYGDSMLLQRARLSGLSTTPSPPP

SEQ ID NO: 71981 - protein, 356 aa, Serratia ficaria
  REGION 1..356: note = tr|A0A240BH50|A0A240BH50_SERFI S-adenosylmethionine:tRNA ribosyltransferase-isomerase; OS = Serratia ficaria OX=61651 GN=queA PE=3 SV=1
MRVADFSFELPESLIARYPQPERSGCRLLQLDGPSGELKHGVFTDLLDNLEAGDLLVFNNTRVIPARMFGRKVSGGKIEVLVERVLDDHRVLAHVRASKAPKPGAELLLGDDESIAATMVARHDTLFELRFNDDRDVFGILNAAGHMPLPPYIDRPDDAADRELYQTVYSEKPGAVAAPTAGLHFDEPLLAALRAKGIEMAFVTLHVGAGTFQPVRVETIEEHVMHAEYAEVPQEVVDAVLACKARGKRVVAVGTTSVRSLESAANASEGALIAPFFGDTSIFIYPGYRYQVIDALVTNFHLPESTLIMLVSAFAGYKNTMNAYRQAVAEQYRFFSYGDAMFISRNPQAENESVGG

SEQ ID NO: 71982 - protein, 356 aa, Serratia fonticola
  REGION 1..356: note = tr|U2M2P3|U2M2P3_SERFO S-adenosylmethionine:tRNA ribosyltransferase-isomerase OS=Serratia fonticola AU-P3(3) OX=1332070 GN=queA PE=3 SV=1
MRVADFSFELPESLIARYPQPERSGCRLLQLDGPSGGLTHGVFTDLLDNLEAGDLLVFNNTRVIPARLFGRKVSGGKIEVLVERVLDDHRVLAHVRASKSPKPGTELLLGDDESIAATMVARHDTLFELRFNDDRDVFTILNAVGHMPLPPYIDRPDEDADRELYQTVYSEKPGAVAAPTAGLHFDEPLLAALRAKGIEMAFVTLHVGAGTFQPVRVETIEEHVMHAEYAEVPQEVVDAVLTCKARGKRVIAVGTTSVRSLESAANACQDAPIAPFFGDTSIFIYPGYHYQVVDALVTNFHLPESTLIMLVSAFAGYKNTMNAYHQAVAEQYRFFSYGDAMFISRNPLAESESVGE

SEQ ID NO: 71983 - protein, 356 aa, Serratia fonticola
  REGION 1..356: note = tr|A0A0F7HCG1|A0A0F7HCG1_SERFO S-adenosylmethionine:tRNA ribosyltransferase-isomerase; OS = Serratia fonticola OX=47917 GN=queA PE=3 SV=1
MRVADFSFELPESLIARYPQPERSGCRLLQLDGPSGGLTHGVFTDLLDNLEAGDLLVFNNTRVIPARLFGRKVSGGKIEVLVERVLDDHRVLAHVRASKSPKPGTELLLGDDESIAATMVARHDTLFELRFNDDRDVFTILNAVGHMPLPPYIDRPDEDADRELYQTVYSEKPGAVAAPTAGLHFDEPLLAALRAKGIEMAFVTLHVGAGTFQPVRVETIEEHVMHAEYAEVPQDVVDAVLACKARGKRVVAVGTTSVRSLESAANACQDALIAPFFGDTSIFIYPGYHYQVIDALVTNFHLPESTLIMLVSAFAGYKNTMNAYHQAVAEQYRFFSYGDAMFISRNPLAESESVGE

SEQ ID NO: 71984 - protein, 356 aa, Serratia liquefaciens
  REGION 1..356: note = tr|A0A515CZJ1|A0A515CZJ1_SERLI S-adenosylmethionine:tRNA ribosyltransferase-isomerase; OS = Serratia liquefaciens OX=614 GN=queA PE=3 SV=1
MRVADFSFELPESLIARYPQSERSGCRLLQLDGPSGALTHGVFTDLLDNLEAGDLLVFNNTRVIPARMFGRKVSGGKIEVLVERVLDDHRVLAHVRASKAPKPGADLLLGDDESIAATMVARHDTLFELRFNDERDVFTILNAVGHMPLPPYIDRPDEDADRELYQTVYSEKPGAVAAPTAGLHFDEPLLAALREKGIEMAFVTLHVGAGTFQPVRVETIEEHVMHAEYAEVPQDVVDAVLACKARGKRVVAVGTTSVRSLESAANASKEALIAPFFGDTSIFIFPGYHYQVVDALVTNFHLPESTLIMLVSAFAGYKNTMNAYQQAVAEQYRFFSYGDAMFISRNPQAEQESVGA

SEQ ID NO: 71985 - protein, 63 aa, Serratia liquefaciens
  REGION 1..63: note = tr|A0A484XBY3|A0A484XBY3_SERLI S-adenosylmethionine:tRNA ribosyltransferase-isomerase; OS = Serratia liquefaciens OX=614 GN=queA_2 PE=3 SV=1
MIDALVTNFHLPESTLIMLVSAFAGYQHTMNAYKVAVEQKYRFFSYGDAMFITYNPQAISERP

SEQ ID NO: 71986 - protein, 356 aa, Serratia marcescens
  REGION 1..356: note = tr|A0A1C0QFF2|A0A1C0QFF2_SERMA S-adenosylmethionine:tRNA ribosyltransferase-isomerase; OS = Serratia marcescens subsp. marcescens OX=211759 GN=queA; PE = 3 SV=1
MRVADFSFELPESLIAHYPQAERSACRLLQLDGPSGALTHGVFTDLLDKLEAGDLLVFNNTRVIPARMFGRKVSGGKIEVLVERVLDDHRVLAHVRASKAPKPGAELLLGDDESIAATMVARHETLFELRFNDERDVFTILNAAGHMPLPPYIARPDEDADRELYQTVYSEKPGAVAAPTAGLHFDEPLLAALRAKGVEMAFVTLHVGAGTFQPVRVETIEDHVMHAEYAEVPQDVVDAVLACKARGKRVVAVGTTSVRSLESAAAASKEALIAPFFGDTSIFIYPGYHYQVIDALVTNFHLPESTLIMLVSAFAGYKNTMNAYQQAVAEQYRFFSYGDAMFISRNPQAENESVGG

SEQ ID NO: 71987 - protein, 356 aa, Serratia marcescens; identical to SEQ ID NO: 71986
  REGION 1..356: note = tr|A0A3E2EP39|A0A3E2EP39_SERMA S-adenosylmethionine:tRNA ribosyltransferase-isomerase; OS = Serratia marcescens subsp. sakuensis OX=211760 GN=queA; PE = 3 SV=1

SEQ ID NO: 71988 - protein, 221 aa, Serratia nematodiphila
  REGION 1..221: note = tr|A0A1W9F600|A0A1W9F600_9GAMM S-adenosylmethionine:tRNA ribosyltransferase-isomerase (Fragment) OS=Serratia nematodiphila DZ0503SBS1 OX=1449981; GN = queA PE=3 SV=1
DVFTILNAAGHMPLPPYIARPDEDADRELYQTVYSEKPGAVAAPTAGLHFDEPLLAALRAKGVEMAFVTLHVGAGTFQPVRVETIEDHVMHAEYAEVPQEVVDAVLACKARGKRVVAVGTTSVRSLESAAAASKEALIAPFFGDTSIFIYPGYHYQVIDALVTNFHLPESTLIMLVSAFAGYKNTMNAYQQAVAEQYRFFSYGDAMFISRNPQAENESVGG

SEQ ID NO: 71989 - protein, 356 aa, Serratia nematodiphila
  REGION 1..356: note = tr|A0A5C7CUG7|A0A5C7CUG7_9GAMM S-adenosylmethionine:tRNA ribosyltransferase-isomerase; OS = Serratia nematodiphila OX=458197 GN=queA PE=3 SV=1
MRVADFSFELPESLIAHYPQAERSACRLLQLDGPSGALTHGVFTDLLDKLEAGDLLVFNNTRVIPARMFGRKVSGGKIEVLVERVLDDHRVLAHVRASKAPKPGAELLLGDDESIAATMVARHETLFELRFNDERDVFTILNAAGHMPLPPYIARPDEDADRELYQTVYSEKPGAVAAPTAGLHFDEPLLAALRAKGVEMAFVTLHVGAGTFQPVRVETIEDHVMHAEYAEVPQEVVDAVLACKARGKHVVAVGTTSVRSLESAAAASKEALIAPFFGDTSIFIYPGYHYQVIDALVTNFHLPESTLIMLVSAFAGYKNTMNAYQQAVAEQYRFFSYGDAMFISRNPQAENESVGG

SEQ ID NO: 71990 - protein, 356 aa, Serratia odorifera
  REGION 1..356: note = tr|D4DWD4|D4DWD4_SEROD S-adenosylmethionine:tRNA ribosyltransferase-isomerase OS=Serratia odorifera DSM 4582 OX=667129 GN=queA PE=3 SV=1
MRVADFSFDLPESLIARYPQPQRSGCRLLQLDGPTGKLTHGVFTDLLDQLEAGDLLVFNNTRVIPARIFGRKASGGKIEVLVERVLDDHRVLAHVRASKAPKPGAALLLGDDDSIPATMVARHDTLFELRFDDPRDVFTILNAVGHMPLPPYIDRPDEDADRELYQTVYSQKPGAVAAPTAGLHFDEPLLAALREKGVEMAFVTLHVGAGTFQPVRVETIEEHVMHAEYAEVPQEVVDAVLACKARGKRVVAVGTTSVRSLESAAKASQDAPIAPFFGDTRIFIYPGYHYQVIDALITNFHLPESTLIMLVSAFAGYQNTMNAYRQAVAEQYRFFSYGDAMFISRNPQAENESVGK

SEQ ID NO: 71991 - protein, 356 aa, Serratia odorifera; identical to SEQ ID NO: 71990
  REGION 1..356: note = tr|A0A447KL78|A0A447KL78_SEROD S-adenosylmethionine:tRNA ribosyltransferase-isomerase; OS = Serratia odorifera OX=618 GN=queA PE=3 SV=1

SEQ ID NO: 71992 - protein, 356 aa, unidentified
  source 1..356: note = Serratia oryzae
  REGION 1..356: note = tr|A0A1S8CMF0|A0A1S8CMF0_9GAMM S-adenosylmethionine:tRNA ribosyltransferase-isomerase; OS = Serratia oryzae OX=2034155 GN=queA PE=3 SV=1
MRVADFSFELPESLIAHYPQPERSACRLLQLDGPTGALTHGVFTDLLDKLEAGDLLVFNNTRVIPARLFGRKVSGGKVEVLVERVLDDHRVLAHVRASKAPKPGTELLLGDDESIAATMLARHDTLFELRFNDERDVFTILNAVGHMPLPPYIDRPDEDADRELYQTVYSEKPGAVAAPTAGLHFDEPLLAALRAKGVEMAFVTLHVGAGTFQPVRVETIEEHVMHAEYAEVPQEVVDAVLACKASGKRVIAVGTTSVRSLESAAKASEDALIAPFFGDTRIFIYPGYHYQVIDALVTNFHLPESTLIMLVSAFAGYQHTMNAYQQAVAERYRFFSYGDAMFISRNPQAESESVGE

SEQ ID NO: 71993 - protein, 356 aa, Serratia plymuthica
  REGION 1..356: note = tr|S4YFL8|S4YFL8_SERPL S-adenosylmethionine:tRNA ribosyltransferase-isomerase OS=Serratia plymuthica S13; OX = 1348660 GN=queA PE=3 SV=1
MRVADFSFELPESLIAHYPQPERSGCRLLQLDGPSGALTHGVFTDLLDNLEAGDLLVFNNTRVIPARMFGRKVSGGKIEVLVERVLDDHRVLAHVRASKAPKPGAELLLGDDESVAATMVARHDTLFELRFNDERDVFTILNAVGHMPLPPYIDRPDEDADRELYQTVYSEKPGAVAAPTAGLHFDEPLLAALRAKGIEMAFVTLHVGAGTFQPVRVETIEEHVMHAEYAEVPQEVVDAVLACKARGKRVVAVGTTSVRSLESAANASKDALIAPFFGDTSIFIFPGYHYQVIDALVTNFHLPESTLIMLVSAFAGYKNTMHAYQQAVAEQYRFFSYGDAMFISRNPQAEHESVGA

SEQ ID NO: 71994 - protein, 356 aa, Serratia plymuthica; identical to SEQ ID NO: 71993
  REGION 1..356: note = tr|A0A318P6T1|A0A318P6T1_SERPL S-adenosylmethionine:tRNA ribosyltransferase-isomerase; OS = Serratia plymuthica OX=82996 GN=queA PE=3 SV=1

SEQ ID NO: 71995 - protein, 356 aa, Serratia proteamaculans
  REGION 1..356: note = sp|A8GAM4|QUEA_SERP5 S-adenosylmethionine:tRNA ribosyltransferase-isomerase OS=Serratia proteamaculans (strain 568) OX=399741 GN=queA PE=3 SV=1
MRVADFSFELPESLIAHYPQPERSGCRLLQLDGPSGELKHGVFTDLLDNLEAGDLLVFNNTRVIPARMFGRKVSGGKIEVLVERVLDDHRVLAHVRASKAPKPGTDLLLGDDESIAATMVARHDTLFELRFNDERDVFTILNAVGHMPLPPYIDRPDEDADRELYQTVYSEKPGAVAAPTAGLHFDEPLLAALREKGIEMAFVTLHVGAGTFQPVRVETIEEHVMHAEYAEVPQEVVDAVLACKARGKRVVAVGTTSVRSLESAANASKEALIAPFFDDTSIFIFPGYHYQVVDALVTNFHLPESTLIMLVSAFAGYKNTMHAYQQAVAEQYRFFSYGDAMFISRNPQAEQESVGA

SEQ ID NO: 71996 - protein, 356 aa, Serratia proteamaculans
  REGION 1..356: note = tr|A0A4Q4LM00|A0A4Q4LM00_9GAMM S-adenosylmethionine:tRNA ribosyltransferase-isomerase; OS = Serratia proteamaculans OX=28151 GN=queA PE=3 SV=1
MRVADFSFELPESLIAHYPQPERSACRLLQLDGPSGELKHGVFTDLLDNLEAGDLLVFNNTRVIPARMFGRKVSGGKIEVLVERVLDDHRVLAHVRASKAPKPGTDLLLGDDESIAATMVARHDTLFELRFNDERDVFTILNAVGHMPLPPYIDRPDEDADRELYQTVYSEKPGAVAAPTAGLHFDEPLLAALREKGIEMAFVTLHVGAGTFQPVRVETIEEHVMHAEYAEVPQEVVDAVLACKARGKRVVAVGTTSVRSLESAANASKEALIAPFFDDTSIFIFPGYHYQVVDALVTNFHLPESTLIMLVSAFAGYKNTMHAYQQAVAEQYRFFSYGDAMFISRNPQAEQESVGA

SEQ ID NO: 71997 - protein, 356 aa, Serratia quinivorans
  REGION 1..356: note = tr|A0A2X2G539|A0A2X2G539_9GAMM S-adenosylmethionine:tRNA ribosyltransferase-isomerase; OS = Serratia quinivorans OX=137545 GN=queA PE=3 SV=1
MRVADFSFELPESLIAHYPQPERSACRLLQLDGPSGELKHGVFTDLLDNLEAGDLLVFNNTRVIPARMFGRKVSGGKIEVLVERVLDDHRVLAHVRASKAPKPGTDLLLGDDESIAATMVARHDTLFELRFNDERDVFTILNAVGHMPLPPYIDRPDEDADRELYQTVYSEKPGAVAAPTAGLHFDEPLLAALREKGIEMAFVTLHVGAGTFQPVRVETIEEHVMHAEYAEVPQDVVDAVLACKARGKRVVAVGTTSVRSLESAANASKEALIAPFFGDTSIFIFPGYHYQVIDALVTNFHLPESTLIMLVSAFAGYKNTMHAYQQAVAEQYRFFSYGDAMFISRNPQAEQESVGA

SEQ ID NO: 71998 - protein, 356 aa, Serratia quinivorans
  REGION 1..356: note = tr|A0A379YWR9|A0A379YWR9_9GAMM S-adenosylmethionine:tRNA ribosyltransferase-isomerase; OS = Serratia quinivorans OX=137545 GN=queA PE=3 SV=1
MRVADFSFELPESLIAHYPQPERSGCRLLQLDGPSGELKHGVFTDLLDNLEAGDLLVFNNTRVIPARMFGRKVSGGKIEVLVERVLDDHRVLAHVRASKAPKPGTDLLLGDDESIAATMVARHDTLFELRFNDERDVFTILNAVGHMPLPPYIDRPDEDADRELYQTVYSEKPGAVAAPTAGLHFDEPLLAALREKGIEMAFVTLHVGAGTFQPVRVETIEEHVMHAEYAEVPQEVVDAVLACKARGKRVVAVGTTSVRSLESAANASKEALIAPFFDDTSIFIFPGYHYQVVDALVTNFHLPESTLIMLVSAFAGYKNTMHAYQQAVAEQYRFFSYGDAMFISRNPLAEQESVGA

SEQ ID NO: 71999 - protein, 397 aa, Serratia rubidaea
  REGION 1..397: note = tr|A0A4U9HAW1|A0A4U9HAW1_SERRU S-adenosylmethionine:tRNA ribosyltransferase-isomerase; OS = Serratia rubidaea OX=61652 GN=queA PE=3 SV=1
MRVADFSFELPESLIARYPQAQRSGCRLLQLDGPSGELTHGVFTDLLDKLEAGDLLVFNNTRVIPARIFGRKASGGKIEVLVERVLDDSRVLAHVRASKAPKPGAELLLGDDESIAATMVARHDALFELRFNDERDVFAILNDVGHMPLPPYIDRPDEDADRELYQTVYSEKPGAVAAPTAGLHFDEPLLAALRDKGVEMAFVTLHVGAGTFQPVRVDSIEDHIMHAEYAEVPQEVVDAVLACKARGKRVVAVGTTSVRSLESAAAASKDALIAPFFDDTSIFIYPGYHYQVIDALVTNFHLPESTLIMLVSAFAGYQHTCSLSAGGGRAVRFFSYGDAMFISRNPQRNKNPSANRRSGRAGAWPATAIIDDTRRFFWAAVARMGVSTTSVRPWRIQ

SEQ ID NO: 72000 - protein, 356 aa, Serratia rubidaea
  REGION 1..356: note = tr|A0A447QQ71|A0A447QQ71_SERRU S-adenosylmethionine:tRNA ribosyltransferase-isomerase; OS = Serratia rubidaea OX=61652 GN=queA PE=3 SV=1
MRVADFSFELPESLIARYPQAQRSGCRLLQLDGPSGELTHGVFTDLLDKLEAGDLLVFNNTRVIPARIFGRKASGGKIEVLVERVLDDSRVLAHVRASKAPKPGAELLLGDDESIAATMVARHDALFELRFNDERDVFAILNDVGHMPLPPYIDRPDEDADRELYQTVYSEKPGAVAAPTAGLHFDEPLLAALRDKGVEMAFVTLHVGAGTFQPVRVDSIEDHIMHAEYAEVPQEVVDAVLACKARGKRVVAVGTTSVRSLESAAAASKDALIAPFFDDTSIFIYPGYHYQVIDALVTNFHLPESTLIMLVSAFAGYQHTMHAYQQAVAEQYRFFSYGDAMFISRNPQAEQESVGE

SEQ ID NO: 72001 - protein, 356 aa, Serratia sp.
  REGION 1..356: note = tr|A0A1B3F8C6|A0A1B3F8C6_9GAMM S-adenosylmethionine:tRNA ribosyltransferase-isomerase; OS = Serratia sp. YD25 OX=1759437 GN=queA PE=3 SV=1
MRVADFSFELPESLIAHYPQAERSACRLLQLDGPSGALTHGVFTDLLDKLEAGDLLVFNNTRVIPARMFGRKVSGGKIEVLVERVLDDHRVLAHVRASKAPKPGAELLLGDDESIAATMVARHETLFELRFNDERDVFTILNAAGHMPLPPYIARPDEDADRELYQTVYSEKPGAVAAPTAGLHFDEPLLAALRAKGVEMAFVTLHVGAGTFQPVRVETIEDHVMHAEYAEVPQEVVDAVLACKARGKRVVAVGTTSVRSLESAAAASKEALIAPFFGDTSIFIYPGYHYQVIDALVTNFHLPESTLIMLVSAFAGYKNTMNAYQQAVAEQYRFFSYGDAMFISRNPQAENESVGG

SEQ ID NO: 72002 - protein, 356 aa, Serratia sp.; identical to SEQ ID NO: 66264
  REGION 1..356: note = tr|A0A4V3BNY3|A0A4V3BNY3_9GAMM S-adenosylmethionine:tRNA ribosyltransferase-isomerase; OS = Serratia sp. BIGb0156 OX=2485132 GN=queA PE=3 SV=1

SEQ ID NO: 72003 - protein, 358 aa, Serratia symbiotica
  REGION 1..358: note = tr|R4I1B6|R4I1B6_9GAMM S-adenosylmethionine:tRNA ribosyltransferase-isomerase OS=Serratia symbiotica str. 'Cinara cedri' OX=568817 GN=queA PE=3 SV=1
MRVTDFSFDLPVSLIAQYPRPIRSSCRLLQLDGPSGEITHSIFTDLVYKLEAGDLLVFNNTRVIPARLFGRKSSGAKIEVLIERVLDEHYVLAHIRASKAPKPGTLLLFGENEKITATIITRHAMLFKLYFNTNSNVFSILNIIGRIPLPPYLNRPDEDTDYELYQTVYSKTPGAIAAPTAGLHFDEPMLEILRTKGIKIAFVTLHVGAGTFQPVRTETIEAHIMHAEYTEVSQEVVNAVLECKARGKRVIAVGTTTVRSLESAANNNDAALITPFFGDTRIFIIPGYHYRVVDVLITNFHLPKSTLIMLVAAFAGYKNTMYAYRQAIINKYRFLSYGDAMLINHNPWAAQESINTSI

SEQ ID NO: 72004 - protein, 359 aa, Serratia symbiotica
  REGION 1..359: note = tr|A0A068SKA2|A0A068SKA2_9GAMM S-adenosylmethionine:tRNA ribosyltransferase-isomerase; OS = Serratia symbiotica SCt-VLC OX=1347341 GN=queA PE=3 SV=1
MRVADFSFELPGSLIARYPQPARSSCHLLQLDGPSGELTHGVFTDLLDKLEAGDLLVFNNTRVIPARIFGRKASGGKVEVMVERVLDDHRVLAHVRASKAPKPGAELLLGDDESIAATMVARHDTLFELCFNDNRDVFSVLNAVGHMPLPPYIDRPDEDADRELYQTVYSEKPGAVAAPTAGLHFDEPLLAALRAKGIKMAFVTLHVGAGTFQPVRVETIEAHVMHAEYTEVSQEVVDAVLDCKARGKRVVAVGTTSVRSLESAANASKPALIAPFFGDTRIFITPGYRYQVVDALVTNFHLPESTLIMLVAAFAGYKNTMNAYQQAVAEQYRFFSYGDAMLISRNPQAEQESVGADAQ

SEQ ID NO: 72005 - protein, 356 aa, Serratia ureilytica
  REGION 1..356: note = tr|A0A5C7C2F5|A0A5C7C2F5_9GAMM S-adenosylmethionine:tRNA ribosyltransferase-isomerase; OS = Serratia ureilytica OX=300181 GN=queA PE=3 SV=1
MRVADFSFELPESLIAHYPQAERSACRLLQLDGPSGALTHGVFTDLLDKLEAGDLLVFNNTRVIPARMFGRKVSGGKIEVLVERVLDDHRVLAHVRASKAPKPGAELLLGDDESIAATMVARHETLFELRFNDERDVFTLLNAAGHMPLPPYIARPDEDADRELYQTVYSEKPGAVAAPTAGLHFDEPLLAALRAKGVEMAFVTLHVGAGTFQPVRVETIEDHVMHAEYAEVPQDVVDAVLACKARGKRVVAVGTTSVRSLESAAAASKEALIAPFFGDTSIFIYPGYHYQVIDALVTNFHLPESTLIMLVSAFAGYKNTMNAYQQAVAEQYRFFSYGDAMFISRNPQAENESVGG

SEQ ID NO: 72006 - protein, 349 aa, Sharpea azabuensis
  REGION 1..349: note = tr|A0A1H6SZF9|A0A1H6SZF9_9LACO S-adenosylmethionine:tRNA ribosyltransferase-isomerase; OS = Sharpea azabuensis OX=322505 GN=queA PE=3 SV=1
MEEKKTMDIELFDYDLPHELIAQTPLEKRDTSRLMVLHKPTGAVEHKHFYDILDYLKPGDVIVRNNTKVIPARLFGTKEETNAHVEVLLLKNTHDDVWECLCGNAKKIKEGSVISFGDGRLKAKCLEVRDEGIRVMEMIYDGIFYEVLDQLGIMPLPPYIKEKLDDPDRYNTVYAKVEGSAAAPTAGLHFTPELFEKVRAKGVEVLDVTLHVGLGTFRPVKVENVFEHHMHSEYYEIDEEVANKLNKAKAEGRRIIAVGTTSCRTLESNIKKYGKFTPTHENTSIFIYPGYTFEGIDALITNFHLPKSTLIMLVSALAGRENILNAYNIAVKEKYRFFSFGDAMFIDNE

SEQ ID NO: 72007 - protein, 345 aa, Shewanella algae
  REGION 1..345: note = tr|A0A3G4UQ96|A0A3G4UQ96_9GAMM S-adenosylmethionine:tRNA ribosyltransferase-isomerase; OS = Shewanella algae OX=38313 GN=queA PE=3 SV=1
MRVADFSFDLPEELIAKFPMEKRSASRLLTLDGNSGALSDCRFTELLNLVQPGDLMVFNNTRVIPARLFGQKATGGKLEILVERMLDDKRVLAHVRSSKSPKEGSEILLDGGFKMLMRARHDALFELELVSGPSVLEVLEQVGHMPLPPYIDRPDEDADKERYQTVYNQTPGAVAAPTAGLHFDDSMLAELKAKGVDIAFVTLHVGAGTFQPVRVDNVLEHKMHSEWAEVPAEVVTKIHNTKAAGKRVIAVGTTSVRSLESAARASEGELQAFKGDTDIFIYPGYEFQVVDAMVTNFHLPESTLIMLVSAFAGFDEVMNAYRHAIAEKYRFFSYGDAMFVTKKAH

SEQ ID NO: 72008 - protein, 345 aa, Shewanella algae
  REGION 1..345: note = tr|A0A1S2TUL0|A0A1S2TUL0_9GAMM S-adenosylmethionine:tRNA ribosyltransferase-isomerase; OS = Shewanella algae OX=38313 GN=queA PE=3 SV=1
MRVADFSFDLPEELIAKFPMEKRSASRLLTLDGNSGALSDCRFTELLNLVQPGDLMVFNNTRVIPARLFGQKATGGKLEILVERMLDDKRVLAHVRSSKSPKEGSEILLDGGFKMLTLARHDALFELELVSGPSVLEVLEQVGHMPLPPYIDRPDEDADKERYQTVYNQTPGAVAAPTAGLHFDDNMLAELKAKGVDIAFVTLHVGAGTFQPVRVDNILEHKMHSEWAEVPAEVVAKIHNTKAAGKRVIAVGTTSVRSLESAARASEGELQAFKGDTDIFIYPGYEFQVVDAMVTNFHLPESTLIMLVSAFAGFDEVMNAYRHAIAEKYRFFSYGDAMFVTKKAH

SEQ ID NO: 72009 - protein, 345 aa, Shewanella amazonensis
  REGION 1..345: note = sp|A1S7P3|QUEA_SHEAM S-adenosylmethionine:tRNA ribosyltransferase-isomerase OS=Shewanella amazonensis (strain ATCC BAA-1098 / SB2B) OX=326297 GN=queA PE=3 SV=1
MRVADFTFDLPDELIARYPMAERTASRLLHLDGSTGALADRQFTDILALIEPGDLMIFNNTRVIPARLFGQKASGGKLEILVERMLDDKRILAHVRSSKSPKPGAEIILDGGFKMTMDARHDALFELSLKDDKTILEVLEAVGHMPLPPYIDRPDEDTDKERYQTVYNERPGAVAAPTAGLHFDESILAALKAKGVDMAFVTLHVGAGTFQPVRVDNVLEHKMHSEWAEVPADVVEKIRATKAAGKRVIAVGTTSVRSLESAAKASEGELEPFCGDTDIFIFPGFEFKVVDAMVTNFHLPESTLIMLVSAFAGFDEVIGAYRHAVEQKYRFFSYGDAMFVTKKAP

SEQ ID NO: 72010 - protein, 345 aa, Shewanella atlantica
  REGION 1..345: note = tr|A0A3S0KHC6|A0A3S0KHC6_9GAMM S-adenosylmethionine:tRNA ribosyltransferase-isomerase; OS = Shewanella atlantica OX=271099 GN=queA PE=3 SV=1
MRVTDFSFDLPDELIARYPMANRTSSRLLSLDGNTGQLADNQFTDILNMVNPGDLMVFNNTRVIPARLFGQKITGGKLEILVERMLDDKRILAHVRCSKSPKVDTIICLDGDYEMKMLGRHDALFELELQSDKTILEVLEEVGHMPLPPYIDRPDEDADKERYQTVYNQNPGAVAAPTAGLHFDDVLLKALAEKGVDTAFVTLHVGAGTFQPVKVDNILEHKMHSEWAEVSQEVVDKVAQTKANGKRVIAVGTTSVRSLESAAKASEGELKEFCSDTDIFIYPGYEFKVVDAMVTNFHLPESTLIMLLSAFAGFDEVKNAYQHAIAQKYRFFSYGDAMFVTKKAN

SEQ ID NO: 72011 - protein, 345 aa, Shewanella baltica
  REGION 1..345: note = tr|A0A165IKK7|A0A165IKK7_9GAMM S-adenosylmethionine:tRNA ribosyltransferase-isomerase; OS = Shewanella baltica OX=62322 GN=queA PE=3 SV=1
MRVADFSFDLPDELIARYPMAQRNASRLLTLDGNSGALGDKQFTDLLGMINPGDLMVFNNTRVIPARMFGQKASGGKLEILVERMLDDKRILAHVRSSKSPKVDSLILLDGGYQMKMVARHDTLFELELLSELTILEVLEAIGHMPLPPYIDRPDEDADKERYQTVYNQNPGAVAAPTAGLHFDDAMLDALKAKGVNIAFVTLHVGAGTFQPVRVDTILEHKMHSEWANVPQDVVDLIAQTKAAGKRVVAVGTTSVRSLESAARASQGELKAFSGDTDIFIYPGYQFQVVDAMVTNFHLPESTLIMLVSAFAGFDHVMAAYQHAIAQKYRFFSYGDAMFVTKKAH

SEQ ID NO: 72012 - protein, 345 aa, Shewanella baltica
  REGION 1..345: note = sp|A3D6B2|QUEA_SHEB5 S-adenosylmethionine:tRNA ribosyltransferase-isomerase OS=Shewanella baltica (strain OS155 / ATCC BAA-1091) OX=325240 GN=queA PE=3 SV=1
MRVADFSFDLPDELIARYPMAQRNASRLLTLDGNSGALGDKQFTDLLGMINPGDLMVFNNTRVIPARMFGQKASGGKLEILVERMLDDKRILAHVRSSKSPKVDSFILLDGGYQMKMVARHDTLFELELLSELTILEVLEAVGHMPLPPYIDRPDEDADKERYQTVYNQNPGAVAAPTAGLHFDDAMLDALKAKDVNIAFVTLHVGAGTFQPVRVDTILEHKMHSEWANVPQDVVDLIAQTKAAGKRVVAVGTTSVRSLESAARASQGELKAFSGDTDIFIYPGYQFQVVDAMVTNFHLPESTLIMLVSAFAGFDHVMAAYQHAIAQKYRFFSYGDAMFVTKKAH

SEQ ID NO: 72013 - protein, 345 aa, Shewanella benthica
  REGION 1..345: note = tr|A9D3Z1|A9D3Z1_9GAMM S-adenosylmethionine:tRNA ribosyltransferase-isomerase OS=Shewanella benthica KT99; OX = 314608 GN=queA PE=3 SV=1
MRVSDYSFELPDELIARYPTAERTASRLLSLDGNTGQVTDKRFTDILNMVNPGDLMVFNNTRVIPARLFGKKQTGGKLELLVERMLDDKSILAHVRCSKSPKVDSIICLDGGYEMIMLARHDALFELKLLSDKTILEVLEDVGHMPLPPYIDRPDEDADKERYQTVYNKTPGAVAAPTAGLHFDNAMLKALADKGVDAAFVTLHVGAGTFQPVKVDNILEHKMHSEWAEVTQEVVDKVRQTKANGKRVIAVGTTSVRSLESAAKASSAELEAFCSDTDIFIYPGYEFQVVDAMVTNFHLPESTLIMLLSAFAGFDEVKNAYRHAIAQKYRFFSYGDAMFVTKKAN

SEQ ID NO: 72014 - protein, 345 aa, Shewanella benthica
  REGION 1..345: note = tr|A0A330M479|A0A330M479_9GAMM S-adenosylmethionine:tRNA ribosyltransferase-isomerase; OS = Shewanella benthica OX=43661 GN=queA PE=3 SV=1
MRVSDYSFELPDELIARYPTAERTASRLLSLDGNTGQVTDKRFTDILNMVNPGDLMVFNNTRVIPARLFGKKQTGGKLELLVERMLDDKSILAHVRCSKSPKVNSIICLDGGYEMVMLARHDALFELKLLSDNTILEVLEEVGHMPLPPYIDRPDEDADKERYQTVYNETPGAVAAPTAGLHFDNAMLKALVDKGVDTAFVTLHVGAGTFQPVKVDNILEHKMHSEWAEVTQEVVDKVIQAKANGKRVIAVGTTSVRSLESAAKASSAQLEAFCSDTDIFIYPGYEFQVVDAMVTNFHLPESTLIMLLSAFAGFDEVKNAYRHAIAQKYRFFSYGDAMFVTKKAN

SEQ ID NO: 72015 - protein, 345 aa, unidentified
  source 1..345: note = Shewanella bicestrii
  REGION 1..345: note = tr|A0A220UNK9|A0A220UNK9_9GAMM S-adenosylmethionine:tRNA ribosyltransferase-isomerase; OS = Shewanella bicestrii OX=2018305 GN=queA PE=3 SV=1
MRVTDFSFDLPDELIARYPMAQRNASRLLTLDGNTGTLADKQFTDLLGMINPGDLMVFNNTRVIPARLFGQKASGGKLEILVERMLDDKRILAHVRSSKSPKVDSIIHLDGGYEMKMAARYDALFELELLSDLTILEVLEAVGHMPLPPYIDRPDEDADKERYQTVYNQNPGAVAAPTAGLHFDDAMLDALKAKGVNIAFVTLHVGAGTFQPVRVDNVLEHKMHSEWANVPQDVVDLIAQTKAAGKRVVAVGTTSVRSLESAARASEGELKAFSGDTDIFIYPGYQFQIVDAMITNFHLPESTLIMLVSAFAGFDHVMAAYQHAITQKYRFFSYGDAMFVTKKAH

SEQ ID NO: 72016 - protein, 345 aa, Shewanella canadensis
  REGION 1..345: note = tr|A0A431WVA6|A0A431WVA6_9GAMM S-adenosylmethionine:tRNA ribosyltransferase-isomerase; OS = Shewanella canadensis OX=271096 GN=queA PE=3 SV=1
MRVTDFSFDLPDELIARYPMANRTSSRLLSLEGNTGLLVDNQFTDILNMVNPGDLMVFNNTRVIPARLFGQKITGGKLEVLVERMLDDKRILAHVRCSKSPKVDSIICLDGGYEMKMLGRHDALFELELQSDKTILEVLEEVGHMPLPPYIDRPDEDADKERYQTVYNQNPGAVAAPTAGLHFDDALLKALSNKGVDTAFVTLHVGAGTFQPVKVDNILEHKMHSEWAEVSQEVVDKVAQTKANGKRVIAVGTTSVRSLESAAKASEGELKEFCSDTDIFIYPGYEFKVVDAMVTNFHLPESTLIMLLSAFAGFDEVKNAYQHAIAQKYRFFSYGDAMFVTKKAN

SEQ ID NO: 72017 - protein, 345 aa, Shewanella chilikensis
  REGION 1..345: note = tr|A0A2V4W069|A0A2V4W069_9GAMM S-adenosylmethionine:tRNA ribosyltransferase-isomerase; OS = Shewanella chilikensis OX=558541 GN=queA PE=3 SV=1
MRVADFSFDLPEELIAKFPMEKRSASRLLTLDGNSGALSDCRFTELLNLVQPGDLMVFNNTRVIPARLFGQKATGGKLEILVERMLDDKRVLAHVRSSKSPKEGSEILLDGGFKMLMIARHDALFELELVSGPSVLEVLEQVGHMPLPPYIDRPDEDADKERYQTVYNQTPGAVAAPTAGLHFDDNMLAELKAKGVDIAFVTLHVGAGTFQPVRVDNVLEHKMHSEWAEVPAEVVTKIHNTKAAGKRVIAVGTTSVRSLESAARASEGELQAFKGDTDIFIYPGYEFQVVDAMVTNFHLPESTLIMLVSAFAGFDEVMNAYRHAIAEKYRFFSYGDAMFVTKKAH

SEQ ID NO: 72018 - protein, 345 aa, Shewanella colwelliana
  REGION 1..345: note = tr|A0A1E5INA3|A0A1E5INA3_SHECO S-adenosylmethionine:tRNA ribosyltransferase-isomerase; OS = Shewanella colwelliana OX=23 GN=queA PE=3 SV=1
MRVADFSFELPDELIARYPMPERTASRLLTLDGPSGRVADKQFTDILDMVNPGDLMVFNNTRVIPARLFGQKQTGGKLEILVERMLDDKRILAHVRSSKSPKPNSIVCLDGGYEMTMLARHDTLFELGLNSDKSILEVLEEVGHMPLPPYIDRPDDDADKERYQTVYNQKPGAVAAPTAGLHFDDTLLSALKEKGVNTAFVTLHVGAGTFQPVRVDNILEHKMHSEWAEVPQTVVDQIKVTKAAGNRVIAVGTTSVRSLESAAKASEGELQAYSSDTDIFIYPGYEFQIVDAMVTNFHLPESTLIMLISAFAGFDAVKEAYQHAIAEKYRFFSYGDAMFVTKKPN

SEQ ID NO: 72019 - protein, 345 aa, Shewanella decolorationis
  REGION 1..345: note = tr|A0A5B8QVU4|A0A5B8QVU4_9GAMM S-adenosylmethionine:tRNA ribosyltransferase-isomerase; OS = Shewanella decolorationis OX=256839 GN=queA PE=3 SV=1
MRVTDFSFDLPDELIARYPMAQRTASRLLTLDGNTGLLADKQFTDLLGMINPGDLMVFNNTRVIPARLFGQKASGGKLEILVERMLDDKRILAHVRSSKSPKVDSIIHLDGGYEMKMAARHDALFELQLLSDLTILEVLEAVGHMPLPPYIDRPDEDADKERYQTVYNQNPGAVAAPTAGLHFDDAMLEALKAKGVNIAFVTLHVGAGTFQPVRVDNVLEHKMHSEWANVPQDVVDLIAQTKAAGKRVVAVGTTSVRSLESAARASEGELKAFSGDTDIFIYPGYQFQIVDAMITNFHLPESTLIMLVSAFAGFDHVMAAYQHAITQKYRFFSYGDAMFVTKKAH

SEQ ID NO: 72020 - protein, 345 aa, Shewanella decolorationis
  REGION 1..345: note = tr|V1E3K9|V1E3K9_9GAMM S-adenosylmethionine:tRNA ribosyltransferase-isomerase OS=Shewanella decolorationis S12 OX=1353536 GN=queA PE=3 SV=1
MRVTDFSFDLPDELIARYPMAQRTASRLLTLDGNTGLLADKQFTDLLGMINPGDLMVFNNTRVIPARLFGQKASGGKLEILVERMLDDKRILAHVRSSKSPKVDSIIHLDGGYEMKMAARHDALFELQLLSDLTILEVLEAVGHMPLPPYIDRPDEDADKERYQTVYNQNPGAVAAPTAGLHFDDAMLEALKAKGVNIAFVTLHVGAGTFQPVRVDNVLEHKMHSEWANVPQDVVDLIAQTKAAGKRVVAVGTTSVRSLESAARASEGELKAFSGDTDIFIYPGYQFQVVDAMITNFHLPESTLIMLVSAFAGFDHVMAAYKHAITQKYRFFSYGDAMFVTKKAH

SEQ ID NO: 72021 - protein, 346 aa, Shewanella denitrificans
  REGION 1..346: note = sp|Q12PE0|QUEA_SHEDO S-adenosylmethionine:tRNA ribosyltransferase-isomerase OS=Shewanella denitrificans (strain OS217 / ATCC BAA-1090 / DSM 15013) OX=318161; GN = queAPE=3 SV=1
MRVADFSFDLPDELIARYPTAQRNASRLLTLDGPTGALADKQFTDLFEMINPGDLMVFNNTRVIPARLFGQKATGGKLEILVERMLDDKRILAHVRSSKSPKVDTLINLDGEHQMKMIARHDALFELELLSELTILEVLEQVGHMPLPPYIDRPDEDADKERYQTVYNKTPGAVAAPTAGLHFDDAMLSALKHKGVNIAFVTLHVGAGTFQPVRVDNVLEHKMHSEWADVPQDVVDLIAQTKAAGNRVIAVGTTSVRSLESAAKACGDKPLATFSGDTDIFIYPGYEFKVVDAMVTNFHLPESTLIMLISAFTGVDEVRYAYQHAIAQKYRFFSYGDAMFLTKKAQ

SEQ ID NO: 72022 - protein, 345 aa, Shewanella fodinae
  REGION 1..345: note = tr|A0A4R2FDH0|A0A4R2FDH0_9GAMM S-adenosylmethionine:tRNA ribosyltransferase-isomerase; OS = Shewanella fodinae OX=552357 GN=queA PE=3 SV=1
MRVADFAFDLPEELIAKFPMPERSASRLLHLDGNTGALNDLHFTDIFDLVEEGDLMVFNNTRVVPARVYGHKASGGKLEILLERMLDDKRMLAHVRSSKSPKSGSEIELDGGYLLKMLARHDALFELELQGDGTILSMLEAVGHMPLPPYIDRPDEDADKERYQTVYSKTPGAVAAPTAGLHFDQALLQKLAAKGIKQAFVTLHVGAGTFQPVRVDDVQKHHMHSEWANVSADVVEAIRATKAAGKRVIAVGTTSVRSLESAAKFNGGDIQPFCGDTDIFIYPGFEFKVVDAMVTNFHLPESTLIMLVSAFAGFEHVMPAYQHAVAQKYRFFSYGDAMFVTKKVN

SEQ ID NO: 72023 - protein, 346 aa, Shewanella frigidimarina
  REGION 1..346: note = sp|Q07ZM1|QUEA_SHEFN S-adenosylmethionine:tRNA ribosyltransferase-isomerase OS=Shewanella frigidimarina (strain NCIMB 400) OX=318167 GN=queA PE=3 SV=1
MRVADFSFDLPDELIARYPTAQRNASRLLTLSGENSELADKKFTDLFNLINPGDLMVFNNTRVIPARLFGQKSTGGKLEILVERMLDDKRILAHVRSSKSPKVDTLIDLDGGYQMKMLARHDALFELELQSDKTILEVLEDVGHMPLPPYIDRPDEDTDKERYQTVYNQTPGAVAAPTAGLHFDDAMLADLKAKGVNIAFVTLHVGAGTFQPVRVDNVLEHKMHSEWANVSQEVVDLIAQTKAAGNRVVAVGTTSVRSLESAARASGDSPLEAFSGDTDIFIYPGFQFKVVDAMVTNFHLPESTLIMLLSAFAGYEAVMKAYQHAITQKYRFFSYGDAMFVTKKAP

SEQ ID NO: 72024 - protein, 346 aa, Shewanella frigidimarina
  REGION 1..346: note = tr|A0A106C3P5|A0A106C3P5_SHEFR S-adenosylmethionine:tRNA ribosyltransferase-isomerase; OS = Shewanella frigidimarina OX=56812 GN=queA PE=3 SV=1
MRVADFSFDLPDELIARYPTAQRNASRLLTLSGENSELADKKFTDLFNLINPGDLMVFNNTRVIPARLFGQKSTGGKLEILVERMLDDKRILAHVRSSKSPKVDTIIDLDGGYQMKMLVRHDALFELELLSDKTILEVLEDVGHMPLPPYIDRPDEDTDKERYQTVYNQTPGAVAAPTAGLHFDDAMLADLKAKGVNIAFVTLHVGAGTFQPVRVDNVLEHKMHSEWANVPQEVVDLIALTKAAGNRVVAVGTTSVRSLESAARASGDSPLEAFSGDTDIFIYPGFQFKVVDAMVTNFHLPESTLIMLLSAFAGYEAVMKAYQHAITQKYRFFSYGDAMFVTKKAP

SEQ ID NO: 72025 - protein, 345 aa, Shewanella halifaxensis
  REGION 1..345: note = sp|B0TND3|QUEA_SHEHH S-adenosylmethionine:tRNA ribosyltransferase-isomerase OS=Shewanella halifaxensis (strain HAW-EB4) OX=458817 GN=queA PE=3 SV=1
MRVADFSFELPDELIARYPTAERTASRLLSLDGNSGELTDLQFTDILEQVNLGDLMVFNNTRVIPARMFGQKQSGGKLEILVERMLDDKRVLAHVRCSKSPKVDSIICLDGGYEMIMVARHDALFELELQSDKTILEVLEDVGHMPLPPYIDRPDEDADKERYQTVYNQNPGAVAAPTAGLHFDDAMLAALKDKGVNTAFVTLHVGAGTFQPVRVDNILDHKMHSEWAEVPQNVVDLIAETKTRGNRVIAVGTTSVRSLESAAKASPEQLEAFSGDTDIFIYPGYQFQVVDAMVTNFHLPESTLIMLLSAFAGFDEVKNAYQHAIAQKYRFFSYGDAMFVTKKAN

SEQ ID NO: 72026 - protein, 345 aa, Shewanella hanedai
  REGION 1..345: note = tr|A0A553JH44|A0A553JH44_SHEHA S-adenosylmethionine:tRNA ribosyltransferase-isomerase; OS = Shewanella hanedai OX=25 GN=queA PE=3 SV=1
MRVTDFSFELPDELIARYPMAERTSSRLLSLEGNSGQLGDQQFTDILDMVNPGDLMVFNNTRVIPARLFGQKETGGKLEVLVERMLDDKRILAHVRSSKSPKVDSKICLDGGYQMTMLARHDALFELELNDDKSILEVLEEVGHMPLPPYIDRPDEDADKERYQTVYNNTPGAVAAPTAGLHFDDELLLKLKEKGVDTAFVTLHVGAGTFQPVKVDDILDHKMHSEWAEVSQEVVDKVANTKAAGGRVIAVGTTSVRSLESAARASEAELQAFCGDTDIFIYPGYQFQVVDAMVTNFHLPESTLIMLLSAFAGFDEVKNAYQHAIAQKYRFFSYGDAMFVTKKAN

SEQ ID NO: 72027 - protein, 346 aa, Shewanella livingstonensis
  REGION 1..346: note = tr|A0A3G8LWM3|A0A3G8LWM3_9GAMM S-adenosylmethionine:tRNA ribosyltransferase-isomerase; OS = Shewanella livingstonensis OX=150120 GN=queA PE=3 SV=1
MRVADFSFDLPDELIARYPTAQRNASRLLTLSGENGQLADKKFTDLLNMINPGDLMVFNNTRVIPARLFGQKSTGGKLEILVERMLDDKRILAHVRSSKSPKVDTLIDLDGGYQMKMLLRHDALFELELLSDKTILEVLEDVGHMPLPPYIDRPDEDADKERYQTVYNQTPGAVAAPTAGLHFDDAMLAELKAKGVNIAFVTLHVGAGTFQPVRVDNILEHKMHSEWANVGQDVVDLIAQTKANGHRVVAVGTTSVRSLESAARASGDGPLTAFCGDTDIFIYPGYQFNIVDSMVTNFHLPESTLIMLLSAFAGFDEVMNAYQHAITQKYRFFSYGDAMFVTKKAP

SEQ ID NO: 72028 - protein, 345 aa, Shewanella loihica
  REGION 1..345: note = sp|A3QFF6|QUEA_SHELP S-adenosylmethionine:tRNA ribosyltransferase-isomerase OS=Shewanella loihica (strain ATCC BAA-1088 / PV-4) OX=323850 GN=queA PE=3 SV=1
MRVADFSFDLPDELIARYPMPNRTASRLLTLDGNSGAVADKQFTDILEMVNPGDLMVFNNTRVIPARVFGQKQTGGKLEILVERMLDDKRILAHVRSSKSPKPGTIICLDGGYEMTMLARHDTLFELELNSESTILEVLEEVGHMPLPPYIDRPDEDADKERYQTVYNQNPGAVAAPTAGLHFDDALLAALKEKGVNVAFVTLHVGAGTFQPVRVDSILDHKMHSEWAEVPQDVVDSIKATKAAGNRVIAVGTTSVRSLESAAKASEGELQAYSNDTDIFIYPGYEFQVVDAMVTNFHLPESTLIMLISAFAGFDEVKNAYQHAIAQKYRFFSYGDAMFVTKKAI

SEQ ID NO: 72029 - protein, 348 aa, unidentified
  source 1..348: note = Shewanella mangrovi
  REGION 1..348: note = tr|A0A094JD15|A0A094JD15_9GAMM S-adenosylmethionine:tRNA ribosyltransferase-isomerase; OS = Shewanella mangrovi OX=1515746 GN=queA PE=3 SV=1
MRVADFAFDLPEELIAKFPTPERSASRLLTLDGNSGTLQDKHFTDILELVNEGDLMVFNNTRVVPARVFGQKASGGKLEILLERMLDEKRMLAHVRSSKSPKEGSEIILDGGYRLKMVARHDALFELELLEDGTILAMLDDVGHMPLPPYIDRPDEAADKERYQTVYNKNPGAVAAPTAGLHFDEGILAALKAKGVQIAFVTLHVGAGTFQPVRVDDVLNHHMHSEWANVPAEVVDAINATKAAGKRVIAVGTTSVRSLESAATFNDGVLKPFCGDTDIFIYPGYQWKVIDAMVTNFHLPESTLIMLVSAFAGYEHVIKAYHHAVAQRYRFFSYGDAMFVTRQTTAND

SEQ ID NO: 72030 - protein, 345 aa, Shewanella marisflavi
  REGION 1..345: note = tr|A0A4Y6J0L5|A0A4Y6J0L5_9GAMM S-adenosylmethionine:tRNA ribosyltransferase-isomerase; OS = Shewanella marisflavi OX=260364 GN=queA PE=3 SV=1
MRVADFSFDLPDELIARYPMPNRTASRLLTLDGNTGAVEDKQFTDILEMVNPGDLMVFNNTRVIPARVFGQKQTGGKLEILVERMLDDKRILAHVRSSKSPKPGTIICLDGGYEMTMLARHDALFELELNSDSTILEVLEEVGHMPLPPYIDRPDEDADKERYQTVYNQNPGAVAAPTAGLHFDDALLAALKAKGVNTAFVTLHVGAGTFQPVRVDNILDHQMHSEWAEVPQDVVDSIKATKAAGHRVIAVGTTSVRSLESAAKASEGELQAYSNDTDIFIYPGYEFQIVDAMVTNFHLPESTLIMLISAFAGFDEVKNAYQHAIAQKYRFFSYGDAMFVTKKAN

SEQ ID NO: 72031 - protein, 345 aa, Shewanella morhuae
  REGION 1..345: note = tr|A0A1N6W5L4|A0A1N6W5L4_9GAMM S-adenosylmethionine:tRNA ribosyltransferase-isomerase; OS = Shewanella morhuae OX=365591 GN=queA PE=3 SV=1
MRVADFCFDLPDELIARYPMAQRNASRLLTLDGNSGALGDKQFTDLLGMINPGDLMVFNNTRVIPARMFGQKASGGKLEILVERMLDDKRILAHVRSSKSPKVDSLIHLDGGYQMKMVARHDTLFELELLAELTILEVLEAVGHMPLPPYIDRPDEDADKERYQTVYNLNPGAVAAPTAGLHFDDAMLEALKAKGVNIAFVTLHVGAGTFQPVRVDTILEHKMHSEWANVPQDVVDLIARTKAAGKRVVAVGTTSVRSLESAARAGGGELKAFSGDTDIFIYPGYQFQVVDAMVTNFHLPESTLIMLVSAFAGFDHVMAAYQHAIAQKYRFFSYGDAMFVTKKAH

SEQ ID NO: 72032 - protein, 345 aa, Shewanella oneidensis
  REGION 1..345: note = sp|Q8ECM2|QUEA_SHEON S-adenosylmethionine:tRNA ribosyltransferase-isomerase OS=Shewanella oneidensis (strain MR-1) OX=211586 GN=queA PE=3 SV=1
MRVTDFSFDLPDELIARYPMAQRNASRLLTLDGNTGTLVDKQFTDLLGMINPGDLMVFNNTRVIPARLFGQKASGGKLEILVERMLDDKRILAHVRSSKSPKVDSIIHLDGGYEMKMMARHDALFELQLLSELSILEVLEAVGHMPLPPYIDRPDEDADKERYQTVYNQNPGAVAAPTAGLHFDDAMLEALKAKGVNIAFVTLHVGAGTFQPVRVDNVLEHKMHSEWANVPQDVVDLIARTKAAGNRVVAVGTTSVRSLESAARASAGQLNAFSGDTDIFIYPGYQFQVVDAMVTNFHLPESTLIMLVSAFAGYEHVMAAYQHAIKQKYRFFSYGDAMFVTKKAH

SEQ ID NO: 72033 - protein, 345 aa, Shewanella oneidensis
  REGION 1..345: note = tr|A0A2W5FK52|A0A2W5FK52_SHEOE S-adenosylmethionine:tRNA ribosyltransferase-isomerase; OS = Shewanella oneidensis OX=70863 GN=queA PE=3 SV=1
MRVTDFSFDLPDELIARYPMAQRTASRLLTLDGNTGTLADKQFTDLLEMINPGDLMVFNNTRVIPARLFGQKTSGGKLEILVERMLDDKRILAHVRSSKSPKVDSIIHLDGGYEMKMAARHDALFELELLSDLTILEVLEAVGHMPLPPYIDRPDEDADKERYQTVYNQNPGAVAAPTAGLHFDDVMLEALKAKGVNITFVTLHVGAGTFQPVRVDNVLEHKMHSEWANVPQDVVDLIAQTKAAGKRVVAVGTTSVRSLESAARASEGELTAFSGDTDIFIYPGYQFQIVDAMITNFHLPESTLIMLVSAFAGFDHVMAAYQHAITQKYRFFSYGDAMFVTKKAH

SEQ ID NO: 72034 - protein, 345 aa, Shewanella pealeana
  REGION 1..345: note = sp|A8H2K7|QUEA_SHEPA S-adenosylmethionine:tRNA ribosyltransferase-isomerase OS=Shewanella pealeana (strain ATCC 700345 / ANG-SQ1) OX=398579 GN=queA PE=3 SV=1
MRVADYSFELPDELIARYPTAERTASRLLSLDGNSGQLADLQFTDILEQVNPGDLMVFNNTRVIPARMFGTKQSGGKLEILVERMLDDKRVLAHVRCSKSPKVDSIVCLDGGYEMVMLARHDALFELSLQSDKTILEVLEEVGHMPLPPYIDRPDEDADKERYQTVYNQNPGAVAAPTAGLHFDDAILAALKAKGVNTAFVTLHVGAGTFQPVRVDNILDHKMHSEWAEVPQTVVDLIGETKARGNRVIAVGTTSVRSLESAAKASQGVLQSFSGDTDIFIYPGYQFQVVDAMVTNFHLPESTLIMLLSAFAGFDEVKNAYQHAIAQKYRFFSYGDAMFVTKKAN

SEQ ID NO: 72035 - protein, 345 aa, Shewanella piezotolerans
  REGION 1..345: note = sp|B8CLC4|QUEA_SHEPW S-adenosylmethionine:tRNA ribosyltransferase-isomerase OS=Shewanella piezotolerans (strain WP3 / JCM 13877) OX=225849 GN=queA PE=3 SV=1
MRVADFSFELPDELIARYPTAERTASRLLSLDGNSGALADLQFTAILEKVQPGDLMVFNNTRVIPARLFGKKQSGGKLEILVERMLDDKRILAHVRCSKSPKVDNIICLDNGYEMKMCARHDALFELELQSDKTILEVLEEVGHMPLPPYIDRPDEDADKERYQTVYNQTPGAVAAPTAGLHFDDAMLAALKDKGVKTAFVTLHVGAGTFQPVRVDEILDHKMHSEWAEVSQDVVDLIALTKANGHRVIAVGTTSVRSLESAARASAAELEAFSGDTDIFIYPGYQFQVVDAMVTNFHLPESTLIMLLSAFAGFDEVKTAYQHAIAQKYRFFSYGDAMFVTKKAN

SEQ ID NO: 72036 - protein, 345 aa, Shewanella psychrophila
  REGION 1..345: note = tr|A0A1S6HT65|A0A1S6HT65_9GAMM S-adenosylmethionine:tRNA ribosyltransferase-isomerase; OS = Shewanella psychrophila OX=225848 GN=queA PE=3 SV=1
MRVTDFSFELPNELIARYPTSERTSSRLLSLEGNTGQVTDKQFTDILNMVNPGDLMVFNNTRVIPARLFGKKQSGGKLELLVERMLDDKSILAHVRCSKSPKVDSIVCLDGGYEMVMLARHDALFELKLQSDKTILEVLEEVGHMPLPPYIDRPDEDADKERYQTVYNESPGAVAAPTAGLHFDDAMLKALSDKGVDTAFVTLHVGAGTFQPVKVDNILEHKMHSEWAEVTQEVVDKVIQTKANGKRVIAVGTTSVRSLEGAAKASVGELKAFCSDTDIFIYPGYEFQVVDAMVTNFHLPESTLIMLLSAFAGFDEVKNAYQHAIAQKYRFFSYGDAMFVTKKAN

SEQ ID NO: 72037 - protein, 345 aa, Shewanella putrefaciens
  REGION 1..345: note = tr|E6XRC7|E6XRC7_SHEP2 S-adenosylmethionine:tRNA ribosyltransferase-isomerase OS=Shewanella putrefaciens (strain 200) OX=399804 GN=queA PE=3 SV=1
MRVADFSFDLPDELIARYPMAQRNASRLLTLDGNSGALGDKQFTELLEMINPGDLMVFNNTRVIPARMFGQKASGGKLEILVERMLDDKRILAHVRSSKSPKVDSLIHLDGGYQMKMVARHDTLFELELLSELTILEVLEAVGHMPLPPYIDRPDEDADKERYQTVYNQNPGAVAAPTAGLHFDDAMLDALKAKGVNIAFVTLHVGAGTFQPVRVDNVLEHKMHSEWANVPQDVVDLIAQTKAAGKRVVAVGTTSVRSLESAARASLGELKAFSGDTDIFIYPGYQFQVVDAMVTNFHLPESTLIMLVSAFAGFDHVMAAYQHAITQKYRFFSYGDAMFVTKKAH

SEQ ID NO: 72038 - protein, 345 aa, Shewanella putrefaciens; identical to SEQ ID NO: 72037
  REGION 1..345: note = sp|A4Y8C3|QUEA_SHEPC S-adenosylmethionine:tRNA ribosyltransferase-isomerase OS=Shewanella putrefaciens (strain CN-32 / ATCC BAA-453) OX=319224 GN=queA PE=3 SV=1

SEQ ID NO: 72039 - protein, 345 aa, Shewanella sediminis
  REGION 1..345: note = tr|A8FXC7|A8FXC7_SHESH S-adenosylmethionine:tRNA ribosyltransferase-isomerase OS=Shewanella sediminis (strain HAW-EB3) OX=425104 GN=queA PE=3 SV=1
MRVTDFSFDLPDELIARYPMANRTSSRLLSLEGNTGKLADNQFTDILNMVNPGDLMVFNNTRVIPARLFGQKITGGKLEILVERMLDDKRILAHVRCSKSPKADSIICLDGDYEMKMLGRHDALFELELQSDKTILEVLEEVGHMPLPPYIDRPDEDADKERYQTVYNQNPGAVAAPTAGLHFDDALLKALSDKGVDTAFVTLHVGAGTFQPVKVDNILEHKMHSEWAEVSQEVVAKVAQTKANGKRVIAVGTTSVRSLESAAKASEGELKEFCSDTDIFIYPGYEFKVVDAMVTNFHLPESTLIMLLSAFAGFDEVKNAYQHAIAQKYRFFSYGDAMFVTKKAN

SEQ ID NO: 72040 - protein, 345 aa, Shewanella sp.
  REGION 1..345: note = tr|A0A3Q9E7Q7|A0A3Q9E7Q7_9GAMM S-adenosylmethionine:tRNA ribosyltransferase-isomerase; OS = Shewanella sp. TH2012 OX=1965282 GN=queA PE=3 SV=1
MRVADFTFDLPDELIARYPMAERTASRLLHLEGNSGALADRQFTDILGLIEPGDLMIFNNTRVIPARLFGQKASGGKLEILVERMLDDKRILAHVRSSKSPKPGAEIILDGGFKMTMDARHDALFELSLKDDKTILEVLEAVGHMPLPPYIDRPDEDADKERYQTVYNERPGAVAAPTAGLHFDETILDALKAKGVDMAFVTLHVGAGTFQPVRVDNVLEHKMHSEWAEVPADVVEKIRATKAAGKRVIAVGTTSVRSLESAAKASEGELQPFCGDTDIFIFPGFEFKVVDAMVTNFHLPESTLIMLVSAFAGFDEVIGAYRHAVEQKYRFFSYGDAMFVTKKAP

SEQ ID NO: 72041 - protein, 345 aa, Shewanella sp.
  REGION 1..345: note = sp|Q0HKF8|QUEA_SHESM S-adenosylmethionine:tRNA ribosyltransferase-isomerase OS=Shewanella sp. (strain MR-4) OX=60480 GN=queA PE=3 SV=1
MRVTDFSFDLPDELIARYPMAQRNASRLLTLDGNTGTLADKQFTDLLGMINPGDLMVFNNTRVIPARLFGQKASGGKLEILVERMLDDKRILAHVRSSKSPKVDSIIHLDGGYEMKMAARHDALFELELLSDLTILEVLEAVGHMPLPPYIDRPDEDADKERYQTVYNQNPGAVAAPTAGLHFDDAMLDALKAKGVNIAFVTLHVGAGTFQPVRVDNVLEHKMHSEWANVPQDVVDLIAQTKAAGKRVVAVGTTSVRSLESAARASEGELKAFSGDTDIFIYPGYQFQIVDAMITNFHLPESTLIMLVSAFAGFDHVMAAYQHAITQKYRFFSYGDAMFVTKKAH

SEQ ID NO: 72042 - protein, 345 aa, Shewanella violacea
  REGION 1..345: note = tr|D4ZIP5|D4ZIP5_SHEVD S-adenosylmethionine:tRNA ribosyltransferase-isomerase OS=Shewanella violacea (strain JCM 10179 / CIP 106290 / LMG 19151 / DSS12); OX = 637905 GN =queA PE=3 SV=1
MRVTDFSFELPNELIARYPTPERTSSRLLSLEGNTGQVTDKQFTDILNMVNPGDLMVFNNTRVIPARLFGKKQTGGKLELLVERILDDKSILAHVRCSKSPKVDSIVCLDGGYEMIMLARHDALFELKLVSDKTILEVLEEVGHMPLPPYIDRPDEDADKERYQTVYNKTPGAVAAPTAGLHFDDAILQALADKGVDTAFVTLHVGAGTFQPVKVDNILEHKMHSEWAEVSQDVVDKVIQTKANGKRVIAVGTTSVRSLESAAKASEGALEAFCSDTDIFIYPGYKFQVVDAMVTNFHLPESTLIMLLSAFAGFDEVKNAYQHAIAQKYRFFSYGDAMFVTKKAN

SEQ ID NO: 72043 - protein, 345 aa, Shewanella woodyi
  REGION 1..345: note = sp|B1KNG3|QUEA_SHEWM S-adenosylmethionine:tRNA ribosyltransferase-isomerase OS=Shewanella woodyi (strain ATCC 51908 / MS32) OX=392500 GN=queA PE=3 SV=1
MRVTDFSFELPDELIARYPMPERTSSRLLSLEGNSGKLGDNQFTDILDMVNPGDLMVFNNTRVIPARLFGQKETGGKLEILVERMLDDKRILAHVRSSKSPKVNTKVCLDGGYEMTMLARHDALFELELNDEKTILEVLEKVGHMPLPPYIDRPDEDADKERYQTVYNDAPGAVAAPTAGLHFDDALLNRLKEKGVDTAFVTLHVGAGTFQPVKVDDVLDHKMHSEWAEVSQEVVDKIAHTKAHGGRVIAVGTTSVRSLESAAKASEDELQPFCRDTDIFIYPGYEFKVVDAMVTNFHLPESTLIMLLSAFAGFDEVKNAYQHAIAQKYRFFSYGDAMFVTKKAN

SEQ ID NO: 72044 - protein, 345 aa, Shewanella xiamenensis
  REGION 1..345: note = tr|A0A073KMQ5|A0A073KMQ5_9GAMM S-adenosylmethionine:tRNA ribosyltransferase-isomerase; OS = Shewanella xiamenensis OX=332186 GN=queA PE=3 SV=1
MRVTDFSFDLPDELIARYPMAQRTASRLLTLDGNTGTLADKQFTDLLEMINPGDLMVFNNTRVIPARLFGQKASGGKLEILVERMLDDKRILAHVRSSKSPKVDSIIHLDGGYEMKMAARHDALFELELLSDLTILEVLEAVGHMPLPPYIDRPDEDADKERYQTVYNQNPGAVAAPTAGLHFDDVMLEALKAKGVNIAFVTLHVGAGTFQPVRVDNVLEHKMHSEWANVPQDVVDLIAQTKAAGKRVVAVGTTSVRSLESAARASEGELTAFSGDTDIFIYPGYQFQIVDAMITNFHLPESTLIMLVSAFAGFDHVMAAYQHAITQKYRFFSYGDAMFVTKKAH

SEQ ID NO: 72045 - protein, 345 aa, Shewanella xiamenensis
  REGION 1..345: note = tr|A0A1E3V266|A0A1E3V266_9GAMM S-adenosylmethionine:tRNA ribosyltransferase-isomerase; OS = Shewanella xiamenensis OX=332186 GN=queA PE=3 SV=1
MRVTDFSFDLPDELIARYPMAQRTASRLLTLDGNTGTLADKQFTDLLEMINPGDLMVFNNTRVIPARLFGQKASGGKLEILVERMLDDKRILAHVRSSKSPKVDSIIHLDGGYEMKMAARHDALFELELLSDLTILEVLEAVGHMPLPPYIDRPDEDADKERYQTVYNQNPGAVAAPTAGLHFDDVMLEALKAKGVNIAFVTLHVGAGTFQPVRVDNVLEHKMHSEWANVPQDVVDLIAQTKAAGKRVVAVGTTSVRSLESAARASEGELKAFSGDTDIFIYPGYQFQIVDVMITNFHLPESTLIMLVSAFAGFDHVMAAYQHAITQKYRFFSYGDAMFVTKKAH

SEQ ID NO: 72046 - protein, 356 aa, Shigella boydii
  REGION 1..356: note = tr|I6DTM3|I6DTM3_SHIBO S-adenosylmethionine:tRNA ribosyltransferase-isomerase OS=Shigella boydii 965-58; OX = 766138 GN=queA PE=3 SV=1
MRVTDFSFELPESLIAHYPMPERSSCRLLSLDGPTGALTHGTFTDLLDKLNPGDLLVFNNTRVIPARLFGRKASGGKIEVLVERMLDDKRILAHIRASKAPKPGAELLLGDDESINATMTARHGALFEVEFNDDRSVLDILNSIGHMPLPPYIDRPDEDADRELYQTVYSEKPGAVAAPTAGLHFDEPLLEKLRAKGVEMAFVTLHVGAGTFQPVRVDTIEDHIMHSEYAEVPQDVVDAVLAAKARGNRVIAVGTTSVRSLESAAQAAKNDLIEPFFDDTQIFIYPGFQYKVIDALVTNFHLPESTLIMLVSAFAGYQHTMNAYKAAVEEKYRFFSYGDAMFITYNPQAINERVGE

SEQ ID NO: 72047 - protein, 356 aa, Shigella boydii
  REGION 1..356: note = sp|Q325J6|QUEA_SHIBS S-adenosylmethionine:tRNA ribosyltransferase-isomerase OS=Shigella boydii serotype 4 (strain Sb227) OX=300268 GN=queA PE=3 SV=1
MRVTDFFFELPESLIAHYPMPERSSCRLLSLDGPTGALTHGTFTDLLDKLNPGDLLVFNNTRVIPARLFGRKASGGKIEVLVERMLDDKRILAHIRASKAPKPGAELLLGDDESINATMTARHGALFEVEFNDDRSVLDILNSIGHMPLPPYIDRPDEDADRELYQTVYSEKPGAVAAPTAGLHFDEPLLEKLRAKGVEMAFVTLHVGAGTFQPVRVDTIEDHIMHSEYAEVPQDVVDAVLAAKARGNRVIAVGTTSVRSLESAAQAAKNDLIEPFFDDTQIFIYPGFQYKVVDALVTNFHLPESTLIMLVSAFAGYQHTMNAYKAAVEEKYRFFSYGDAMFITYNPQAINERVGE

SEQ ID NO: 72048 - protein, 356 aa, Shigella dysenteriae; identical to SEQ ID NO: 62661
  REGION 1..356: note = sp|Q32JF9|QUEA_SHIDS S-adenosylmethionine:tRNA ribosyltransferase-isomerase OS=Shigella dysenteriae serotype 1 (strain Sd197) OX=300267 GN=queA PE=3 SV=1

SEQ ID NO: 72049 - protein, 356 aa, Shigella dysenteriae; identical to SEQ ID NO: 62661
  REGION 1..356: note = tr|E2XC45|E2XC45_SHIDY S-adenosylmethionine:tRNA ribosyltransferase-isomerase OS=Shigella dysenteriae 1617; OX = 754093 GN=queA PE=3 SV=1

SEQ ID NO: 72050 - protein, 356 aa, Shigella flexneri; identical to SEQ ID NO: 62661
  REGION 1..356: note = tr|A0A4P7TQZ0|A0A4P7TQZ0_SHIFM S-adenosylmethionine:tRNA ribosyltransferase-isomerase; OS = Shigella flexneri serotype 5a (strain M90T) OX=1086030; GN = queA PE=3 SV=1

SEQ ID NO: 72051 - protein, 356 aa, Shigella flexneri; identical to SEQ ID NO: 62661
  REGION 1..356: note = sp|Q0T7I4|QUEA_SHIF8 S-adenosylmethionine:tRNA ribosyltransferase-isomerase OS=Shigella flexneri serotype 5b (strain 8401) OX=373384 GN=queA PE=3 SV=1

SEQ ID NO: 72052 - protein, 356 aa, Shigella sonnei
  REGION 1..356: note = tr|A0A5F0C647|A0A5F0C647_SHISO S-adenosylmethionine:tRNA ribosyltransferase-isomerase; OS = Shigella sonnei OX=624 GN=queA PE=3 SV=1
MRVTDFSFELPESLIAHYPMPERSSCRLLSLDGPTGALTHGTFTDLLDKLNPGDLLVFNNTRVIPARLFGRKASGGKIEVLVERMLDDKRILAHIRASKAPKPGAELLLGDDESINATMTARHGALFEVEFNDDRSVLDILNSIGHMPLPPYIDRPDEDADRELYQTVYSEKPGAVAAPTAGLHFDEPLLEKLRAKGVEMAFVTLHVGAGTFQPVRVDTIEDHIMHSEYAEVPQDVVDAVLAAKARGNRVIAVGTTSVRSLESAAQAAKNDLIEPFFDDTQIFIYPGFQYKVVDALVTNFHLPESTLIMLVSAFAGYQHTMNAYKSAVEEKYRFFSYGDAMFITYNPQAINERVGE

SEQ ID NO: 72053 - protein, 356 aa, Shigella sonnei; identical to SEQ ID NO: 62661
  REGION 1..356: note = sp|Q3Z504|QUEA_SHISS S-adenosylmethionine:tRNA ribosyltransferase-isomerase OS=Shigella sonnei (strain Ss046) OX=300269 GN=queA PE=3 SV=1

SEQ ID NO: 72054 - protein, 357 aa, Shigella sp.
  REGION 1..357: note = tr|A0A1D3DGE3|A0A1D3DGE3_9ENTR S-adenosylmethionine:tRNA ribosyltransferase-isomerase; OS = Shigella sp. FC1655 OX=1898038 GN=queA PE=3 SV=1
MRVSDFTFELPEALIAHYPQPQRSGCRLLSLEGETGALSHGIFTDVLDKINAGDLLVFNNTRVIPARIYGRKASGGKIEVLVERMLDEHRVLAHVRASKSPKEGAALVLGEDESVQATMVARHDTLFEIRFDDERDVLTILNSIGHMPLPPYIDRPDEESDKELYQTVYNERPGAVAAPTAGLHFDEPLLQALKEKGVEMAFVTLHVGAGTFQPVRVDNIEEHTMHSEYAEVPQDVVDAVLACKARGNRVIAVGTTSVRSLESAAKATNDALIAPFFDDTQIFIYPGYQYQIIDALITNFHLPESTLIMLVSAFAGYKNTMNAYKEAVEQKYRFFSYGDAMFITRNPLAINEKVGQE

SEQ ID NO: 72055 - protein, 356 aa, Shigella sp.; identical to SEQ ID NO: 66400
  REGION 1..356: note = tr|A0A1E2VJP0|A0A1E2VJP0_9ENTR S-adenosylmethionine:tRNA ribosyltransferase-isomerase; OS = Shigella sp. FC2928 OX=1886517 GN=queA PE=3 SV=1

SEQ ID NO: 72056 - protein, 348 aa, unidentified
  source 1..348: note = Shimia abyssi
  REGION 1..348: note = tr|A0A2P8FFW5|A0A2P8FFW5_9RHOB S-adenosylmethionine:tRNA ribosyltransferase-isomerase; OS = Shimia abyssi OX=1662395 GN=queA PE=3 SV=1
MQLSDFDFDLPDGLIATRPAEPRSSARLLVAEPDRITDGVVTDLVDWLRPGDRLVLNDTKVIPARLSGYRVRRGPEGETQARIEITLLEPRTGGRWAALVKPLKKIREGEEIIFAAGLKGVLEAKEDGQGVLSFDLEGEDFDAALDAAGSMPLPPYIAAKRAADERDKTDYQTVWARHSGAVAAPTASLHFDASLLAALETKGVTFTHVTLHVGAGTFLPVKVENVAEHKMHSEWGRVTPEAAKKIAATKAAGGRVIPVGTTALRLIESAGRGGQIMPWEGPTDIFIYPGFTFHVADALMTNFHLPKSTLMMLVSALMGQERIREIYNHAVAEEYRFFSYGDGSLLLP

SEQ ID NO: 72057 - protein, 350 aa, unidentified
  source 1..350: note = Shimia aestuarii
  REGION 1..350: note = tr|A0A1I4PHE6|A0A1I4PHE6_9RHOB S-adenosylmethionine:tRNA ribosyltransferase-isomerase; OS = Shimia aestuarii OX=254406 GN=queA PE=3 SV=1
MQLSDFDFDLPETLIATRPAEPRSSARLLVAERDRITDARVTDLVDWLRPGDRLVLNDTKVIPARLSGYRERVGPDGPTQARIEVTLLEPRAGGHWAALVKPLKKIREGERIVFAAGLTATLEAKEDGQGILGFDLAGEDFDAALAEAGSMPLPPYIAAKRAADERDKTDYQTVWARHSGAVAAPTASLHFDAPLLATLEAKGVQFTHVTLHVGAGTFLPVKVENVKDHKMHAEWGRVTPEAAAEIAATKAAGGRVIPVGTTALRLIESAARSGVIAPWEGPTDIFIYPGFDFHVADALMTNFHLPKSTLMMLVSALMGAERIRRIYDHAVRSEYRFFSYGDASLLLPSG

SEQ ID NO: 72058 - protein, 348 aa, unidentified
  source 1..348: note = Shimia haliotis
  REGION 1..348: note = tr|A0A1I4BBH7|A0A1I4BBH7_9RHOB S-adenosylmethionine:tRNA ribosyltransferase-isomerase; OS = Shimia haliotis OX=1280847 GN=queA PE=3 SV=1
MQLSDFDFDLPEALIATRPAEPRSSARLLVSDAGRITDGVVTDLMEWLRPGDRLVLNDTKVIPARLMGYRVRTGPEGETQAKMEVTLLEPRAGGAWAALVKPLKKVREGEEIVFAAGLKGTLTAKEDGQGVIAFDLEGEDFDAALQAAGNMPLPPYIAAKRAADEKDKTDYQTVWAKHSGAVAAPTASLHFDDELLAALTAKGVDFTHVTLHVGAGTFLPVKVDNVKEHKMHAEWGRVTPEAAAEIAATKAAGGRVIPVGTTALRLIESAARDGEIKPWEAATDIFIYPGFTFHVADALMTNFHLPKSTLMMLVSALVGHGQIREIYAHAVSNEYRFFSYGDASLLIP

SEQ ID NO: 72059 - protein, 348 aa, Shimia isoporae
  REGION 1..348: note = tr|A0A4R1NM45|A0A4R1NM45_9RHOB S-adenosylmethionine:tRNA ribosyltransferase-isomerase; OS = Shimia isoporae OX=647720 GN=queA PE=3 SV=1
MQLSDFDFELPDALIATRPAEPRSSARLLVSEADKITDGVVTDLVDWLRPGDRLVLNDTKVIPARLMGYRVRSGPEGETQAKMEVTLLEPRAGGAWAALVKPLKKIREGEEIIFAAGLKGTLTSKSEGQGVISFDLEGEDFDAALDAAGNMPLPPYIAAKRAADDKDKTDYQTVWAKHSGAVAAPTASLHFDEALLHRLSQKGVGFTHVTLHVGAGTFLPVKVDNVKEHKMHAEWGRVTPQAADEIAATKASGGRVIPVGTTALRLIESAAREGAIAPWEGKTDIFIYPGFQFHVADALMTNFHLPKSTLMMLVSALVGQDRIREVYTHAVAEEYRFFSYGDASLLIP

SEQ ID NO: 72060 - protein, 351 aa, Shimia marina
  REGION 1..351: note = tr|A0A0P1ET47|A0A0P1ET47_9RHOB S-adenosylmethionine:tRNA ribosyltransferase-isomerase; OS = Shimia marina OX=321267 GN=queA PE=3 SV=1
MQLSDFDFDLPESLIATRPADPRSSARLLVAQGADITDGVVTDLVQWLKPGDRLVLNDTKVIPARLSGYRVRSGPEGETQARMEVTLLEPRAGGAWAALIKPLKKIREGEEIIFAAGLKGRLLSKDEGQGLVQFDLEGPDFDAALEAAGNMPLPPYIAAKRAADEKDKTDYQTVWAKNSGAVAAPTASLHFDEALLAALAARGISFTHVTLHVGAGTFLPVKVEDVKEHKMHAEWGRVSAEAAAEIKGTKASGGRVIPVGTTALRLIESAARATGEIAPWEGETDIFIYPGFAFQVADALMTNFHLPKSTLMMLVSALLGQEEIRQVYAHAIQEGYRFFSYGDASLLIPAE

SEQ ID NO: 72061 - protein, 348 aa, Shimia sp.
  REGION 1..348: note = tr|A0A0N0D9N8|A0A0N0D9N8_9RHOB S-adenosylmethionine:tRNA ribosyltransferase-isomerase; OS = Shimia sp. SK013 OX=1389006 GN=queA PE=3 SV=1
MQLSDFDFDLPDGLIATRPAEPRSSARLLVSEATGITDGVVTDLVDWLQPGDRLVLNDTKVIPARLMGYRVRQGPEGETQAKMDVTLLEPRAGGAWAALIKPLKKIREGEEIVFGAGLTGRLDSKADGQGVIVFDLQGADFDAALELAGNMPLPPYIAAKRAADARDKTDYQTVWAKHAGAVAAPTASLHFDRALLDALKVKGIDVTYVTLHVGAGTFLPVKVENVKEHKMHAERGQVTPEAAAEIAATKANGGRVIPVGTTALRLIESAAKQGAIAPWEGATDIFIYPGFEFHVADALMTNFHLPKSTLMMLVSALVGQDRIREVYAHAVAEKYRFFSYGDASLLIP

SEQ ID NO: 72062 - protein, 357 aa, Shimwellia blattae
  REGION 1..357: note = tr|I2BBT3|I2BBT3_SHIBC S-adenosylmethionine:tRNA ribosyltransferase-isomerase OS=Shimwellia blattae (strain ATCC 29907 / DSM 4481 / JCM 1650 / NBRC 105725 / CDC 9005 -74) OX=630626 GN=queA PE=3 SV=1
MRLSDFSFELPESLIAHYPQAQRSACRLLSLDGPTGALTHGVFTDLLDKLNPGDLLVFNNTRVIPARLFGRKASGGKIELLVERMLDDHRVLAHIRASKSPKPGAELLLGDDESIKATMVARHDALFEVRFDDQRSVLDILNQIGHMPLPPYIDRPDEDADRELYQTVYSKRPGAVAAPTAGLHFDEPLLAALRAKGVELAFVTLHVGAGTFQPVRVESIEEHVMHSEYAEVPQEVVDAVLACKARGNRVIAVGTTSVRSLESAAQAAKDALIAPFFGDTQIFIYPGYQYQVIDALVTNFHLPESTLIMLVSAFAGYQHTLHAYHEAVKAEYRFFSYGDAMYITYNPQAINERPGQD

SEQ ID NO: 72063 - protein, 355 aa, Shinella granuli
  REGION 1..355: note = tr|A0A4R2CKY3|A0A4R2CKY3_9RHIZ S-adenosylmethionine:tRNA ribosyltransferase-isomerase; OS = Shinella granuli OX=323621 GN=queA PE=3 SV=1
MRVDLFDFDLPEDNIALRPVTPREAARLLVVRPGQETPYADRTVGDLPSLLRPGDALVFNDTRVIPAQLEGIRHREGAGGQKVSATLHMRIAGDRWKAFARPGKRIKRGDRIAFGAAEALSAIVEQKGEGGEVTLHFDISGPDLDRAIASVGHIPLPPYIASKREDDEADRRDYQTIYAREEGAVAAPTAGLHFTDALFEKLDALGVERHFVTLHVGAGTFLPVKADDTTDHVMHEEIGHVCEATAAALNAVRARGGRIVSVGTTSLRLLESAADEDGTIRPWSGATGIFITPGYRFRTADMLMTNFHLPKSTLFMLVSAFSGLETMRGAYAHAIATGYRFYSYGDSSLLFRNDR

SEQ ID NO: 72064 - protein, 355 aa, Shinella sp.
  REGION 1..355: note = tr|A0A4Q8MMV4|A0A4Q8MMV4_9RHIZ S-adenosylmethionine:tRNA ribosyltransferase-isomerase; OS = Shinella sp. JR1-6 OX=2527671 GN=queA PE=3 SV=1
MRVDLFDFDLPEENIALRPVSPREAARLLVVEPDRDVPYQDRTVGDLPSLLRPGDALVFNDTRVIPAQLEGIRHRDGAGGQKVSATLHMRIAGDRWKAFARPGKRIKRGDRITFGAAEDLSATVEQKGEGGEVTLHFDLSGPDLDRAIATVGHIPLPPYIASKREEDEADRRDYQTIYAREEGAVAAPTAGLHFTDALFEKLDALGVERHFVTLHVGAGTFLPVKADDTTDHVMHEEIGYVSGETAAALNAVRARGGRIISVGTTSLRLLESAADEDGTIRPWSGATGIFITPGYRFRTADMLMTNFHLPKSTLFMLVSAFSGLETMRGAYAHAIATGYRFYSYGDSSLLFRDHR

SEQ ID NO: 72065 - protein, 352 aa, Shinella sp.
  REGION 1..352: note = tr|A0A4Y8QKB7|A0A4Y8QKB7_9RHIZ S-adenosylmethionine:tRNA ribosyltransferase-isomerase; OS = Shinella sp. MEC087 OX=1967501 GN=queA PE=3 SV=1
MRVDLFDFDLPEENIALRPVTPREAAKLLVVRPGTETPYEDFTVGDLPSLLRAGDALVFNDTRVIPAQLEGIRHREGAGGQAVSATLHMRIAGDRWKAFAKPGKRIKPGDRIAFGTLWATVENKGEGGEVTLHFDASGPELDRAIAIVGHIPLPPYIASKRAEDEADRKDYQTIYAREEGAVAAPTAGLHFTDALFEKLDALGVIRHFVTLHVGAGTFLPVKADDTTEHVMHEEIGYVSEETAASLNAVKARGGRIVSVGTTSLRLLESAADEDGTIKPWSGATGIFITPGYRFRTTDILMTNFHLPKSTLFMLVSAFSGLETMRGAYAHAISSGYRFYSYGDSSLLFRDHA

SEQ ID NO: 72066 - protein, 345 aa, Shuttleworthia satelles
  REGION 1..345: note = tr|C4GAC2|C4GAC2_9FIRM S-adenosylmethionine:tRNA ribosyltransferase-isomerase OS=Shuttleworthia satelles DSM 14600 OX=626523 GN=queA PE=3 SV=1
MDVKDFDYELPEELIAQDPLLKRDQSRLLVLDPETGAMEHRHFYDIRDYLRAGDCLVINNTRVIPARLLGAKEETGAKVEVLLLINHGGDNWETLVKPGRKCREGARISFGEGLLVGQVTKVLEDGNRMIHFSYQGIWEEVLDRLGQMPLPPYIHHQLADKNRYQTVYAKHDGSAAAPTAGLHFTPELLEEIRKSGVEIAEVTLHVGLGTFRPVKADRVEDHDMHSEYYVVGQEAADTINRARANGGRIIAVGTTSTRTLESVAEADGTIPVKSGWTKIFIYPGYQFKAIDGLITNFHLPQSTLLMLVSALAGRDHILKAYREAVEEKYRFFSFGDAMFIKPREK

SEQ ID NO: 72067 - protein, 345 aa, Shuttleworthia sp.
  REGION 1..345: note = tr|X8H246|X8H246_9FIRM S-adenosylmethionine:tRNA ribosyltransferase-isomerase OS=Shuttleworthia sp. MSX8B; OX = 936574 GN=queA PE=3 SV=1
MDVKDFDYELPEELIAQDPLLKRDQSRLLVLDPETGAMEHRHFYDIRDYLRAGDCLVINNTRVIPARLLGAKEETGAKVEVLLLINHGGDNWETLVKPGRKCREGARISFGEGLLVGQVTKVLEDGNRMIHFSYQGIWEEVLDRLGQMPLPPYIHHQLADKNRYQTVYARHDGSAAAPTAGLHFTPELLEEIRKSGVEIAEVTLHVGLGTFRPVKADRVEDHDMHSEYYVVGQEAADTINRARANGGRIIAVGTTSTRTLESVAEADGTIPVKSGWTKIFIYPGYQFKAIDGLITNFHLPQSTLLMLVSALAGRDHILNAYREAVEEKYRFFSFGDAMFIKPREK

SEQ ID NO: 72068 - protein, 349 aa, unidentified
  source 1..349: note = Siansivirga zeaxanthinifaciens
  REGION 1..349: note = tr|A0A0C5W829|A0A0C5W829_9FLAO S-adenosylmethionine:tRNA ribosyltransferase-isomerase; OS = Siansivirga zeaxanthinifaciens CC-SAMT-1 OX=1454006; GN = queA PE=3 SV=1
MKLSNFGFNLPEELLAEYPAENRDESRLMVLDRKKQTIEHRMFKDIVEYFDEDDVLILNNTKVFPARLYGNKEKTGARIEVFLLRELNQEQRLWDVLVDPARKIRIGNKLYFGDDDTLVAEVIDNTTSRGRTLRFLYDGSYTEFRKKLTELGETPLPKYIKREVQPEDEERYQTIYAKNEGAVAAPTAGLHFSKHVLKRLEIKGVKFAEVTLHVGLGTFNPVEVEDLSKHKMDSEELKIDEKAVEIVNAGIKNKKRVCAVGTTAMRAIESSVSSNGQLNEIEGWTNKFIFPPYDFSIANCMITNFHTPKSTLLMMVSAFAGHDFIKKAYEEAVKEKYKFYSYGDAMLIL

SEQ ID NO: 72069 - protein, 351 aa, unidentified
  source 1..351: note = Siccationidurans arizonensis
  REGION 1..351: note = tr|A0A1I6B628|A0A1I6B628_9BACT S-adenosylmethionine:tRNA ribosyltransferase-isomerase; OS = Siccationidurans arizonensis OX=1227077 GN=queA PE=3; SV = 1
MAMKLHEFKFELPEELVALHPARNRDESRLMVVHRATGQIEHRTFKDILDYFNEGDVMVLNDTKVFPARLYGNKEKTGAKIEVFLLRELNKELRLWDVLVDPARKIRVGNKLYFGESDMVAEVIDNTTSRGRTIKFLFDGTDEEFRKALYELGETPIPKEVLNRETEPADKERYQTIYAENIGAVAAPSAGLHFTREVMKRMEIKGVDPAFVTLHVGLGTFRTVDVEDLTKHKMDSENFIVTAPACEIVNKALDAKKKVCAVGTTTIRAMEASVSANARMKPTQGWIDRFIFPPHDFKIANCLLTNFHMPESTLIMLAAAFAGYPLLMEAYKEAIKEKYKFFSYGDAMLIL

SEQ ID NO: 72070 - protein, 426 aa, unidentified
  source 1..426: note = Siccationidurans arizonensis
  REGION 1..426: note = tr|A0A1I6AXC4|A0A1I6AXC4_9BACT S-adenosylmethionine:tRNA ribosyltransferase-isomerase; OS = Siccationidurans arizonensis OX=1227077 GN=queA PE=3; SV = 1
MNAHPRHLSIQDFTYPLPAERIASEPLPDRTASRLLVSRNGTLTDKHFRDLPHELPAGAMLVFNDTRVVRARLLARRPTGGQVELFCLEPVAPHRSLELALQQTGQCTWRCLVGNGRRWKEGPVLLEFETADGQQATLWAERQAQEAGTALIDFRWEPASLPFAEVLRAGGHLPLPPYLGRLDTPTDAVRYQTVYAAAEGAVAAPTAGLHFTPELLTELQQQGFSTGHVTLHVGAGTFQPVKAEHMADHPMHTEPILVSAALLRQLLAHRPRPVLAVGTTSLRTLESLYWLGVGLLRATEVDATQEVGELRMTQWQPYDMAEAAASISAEMALEALLQHLAATGTDTLQASTRLLIAPGYTFRLVDGLITNFHQPESTLLLLVAALMGPEWRTLYNHALTEGYRFLSYGDSSLLLPGTIIDNSSIS

SEQ ID NO: 72071 - protein, 356 aa, unidentified
  source 1..356: note = Siccibacter turicensis
  REGION 1..356: note = tr|A0A2P8VP18|A0A2P8VP18_9ENTR S-adenosylmethionine:tRNA ribosyltransferase-isomerase; OS = Siccibacter turicensis OX=357233 GN=queA PE=3 SV=1
MRVSDFAFELPDSLIAHYPQAQRSACRLLSLDGPTGQLEHGTFTDLLDKLNPGDLLVFNNTRVIPARLFGRKASGGKIEVLVERMLDDKRILAHVRASKAPKPGAELLLGDDESISATMVARHDALFEIAFNDARPVLDILNDIGHMPLPPYIERPDEDADRELYQTVYSQKPGAVAAPTAGLHFDEPLLAKLREKGVEMAFVTLHVGAGTFQPVRVDSIEDHIMHAEYAEVPQDVVDAVLGAKARGNRVIAVGTTSVRSLESAAQAAKNDLIEPFFGDTKIFIYPGYQYRVIDALITNFHLPESTLIMLVSAFAGYKHTMNAYQAAVNAQYRFFSYGDAMFITYNPAAINERPGA

SEQ ID NO: 72072 - protein, 360 aa, unidentified
  source 1..360: note = Siculibacillus lacustris
  REGION 1..360: note = tr|A0A4Q9VRG2|A0A4Q9VRG2_9RHIZ S-adenosylmethionine:tRNA ribosyltransferase-isomerase; OS = Siculibacillus lacustris OX=1549641 GN=queA PE=3 SV=1
MRVDLFDFELPPESIALRPASPRESARLLVVRPGAEPPLVDATVADLPSWLRAGDALVFNDTRVIPAELHGVRIREEARAGVAFNLIERVDASHWRAFARPGKRLKAGDRVLFGATGSACQLGEAWASVTAKDDDGVVDLAFDLAGPDLDAAIRALGSMPLPPYISARRKADDADTRDYQTIYAREEGAVAAPTAGLHFTPALMDRLAALGVERHFVTLHVGAGTFLPVKVDDTADHKMHFESGTLGADTAAALNAVRARGGRIVAVGTTSLRILESACDEAGRLAPWSGATDIFITPGRRVRSVDALMTNFHLPRSTLFMLVSAFSGLDRMRAAYAHAVATGYRFYSYGDASLLFPDPT

SEQ ID NO: 72073 - protein, 340 aa, unidentified
  source 1..340: note = Sideroxydans lithotrophicus
  REGION 1..340: note = tr|D5CQ32|D5CQ32_SIDLE S-adenosylmethionine:tRNA ribosyltransferase-isomerase OS=Sideroxydans lithotrophicus (strain ES-1) OX=580332 GN=queA PE=3 SV=1
MRTDDFDFILPERLIAQHPPLQRGASRLLQVGKTGLKDSQFADLHGLVHGHDLLVLNDTRVLKARLFGEKESGGKVEVLVERVLGEHEVLAQVRASKTPKPGSRLLLAEKLRVKVLGREGEFFHLCFEGAAAVTALLERYGHLPLPPYIAHVAGAEDEERYQTVFAREPGAVAAPTAGLHFGETMLQALRDKKVDIAYVTLHVGAGTFKPVRAENIEEHVMHSERYTIPQATVDAIREAKAKGGRIIAVGTTSLRALESAAASGELVAGSGETSIFITPGYRFGVVDVLLTNFHLPRSTLLMLVCAFGGMEKMLAAYRHAVEKEYRFFSYGDAMLIEREQ

SEQ ID NO: 72074 - protein, 225 aa, unidentified
  source 1..225: note = Sideroxydans sp.
  REGION 1..225: note = tr|A0A1G3JE45|A0A1G3JE45_9PROT S-adenosylmethionine:tRNA ribosyltransferase-isomerase (Fragment) OS=Sideroxydans sp. RIFOXYD2_FULL_59_7; OX = 1802156 GN=A3J99_03930 PE= 3 SV=1
MRTDDFDFELPEHLIAQHPPAQRGGSRLLRVGAAGLEDRLFSELPLFLRAGDLLVLNDTRVLKARLFGQKATGGQVEVMVERVLGAHEVLAKVRASKTPKTGSSFLVADAVTVEVLGREDEFFHLRFAGEAPVEDILERYGKLPLPPYITHAAGAEDDERYQTVFAREQGAVAAPTAGLHFDAAMLDSLRAKGVNIAYVTLHVGAGTFQPVRADDVADHVMHSER

SEQ ID NO: 72075 - protein, 340 aa, unidentified
  source 1..340: note = Sideroxydans sp.
  REGION 1..340: note = tr|A0A1G3IM21|A0A1G3IM21_9PROT S-adenosylmethionine:tRNA ribosyltransferase-isomerase; OS = Sideroxydans sp. GWF2_59_14 OX=1802154 GN=queA PE=3 SV=1
MRTDDFDFILPERLIAQHPPAQRGASRLLQVGRAGLKDGQFAELHGLVRENDLLVLNDTRVIKARLFGEKESGGKVEVLVERVLDEHDVLAQVRVSKTPKPGSRLILAGRVRVQVMGREGEFFHLRFEDAEAVTTLLERHGHLPLPPYITHAAGAEDEARYQTVFAREPGAVAAPTAGLHFGETMLQALRDKKVDIAYVTLHVGAGTFKPVRAENVEEHVMHSERYTIPQATVDAVREARAKGGRIIAVGTTSLRALESAAADGELKAGSGETRIFITPGYRFRVVDVLLTNFHLPRSTLLMLVCAFGGMDKMLAAYRHAVEQEYRFFSYGDAMLIEREQ

SEQ ID NO: 72076 - protein, 369 aa, unidentified
  source 1..369: note = Silicibacter sp.
  REGION 1..369: note = tr|C9D440|C9D440_9RHOB S-adenosylmethionine:tRNA ribosyltransferase-isomerase OS=Silicibacter sp. TrichCH4B; OX = 644076 GN=queA PE=3 SV=1
METRCDGPWTFAQARSIARAMKLSDFDFDLPEDLIATRPAVPRSSARLLVAEQDRITDARVTDLLQWLNAGDRLVLNDTRVIPARLSGQRHRTSAQGPVSARIEVTLLEPQADGCWSGLLKPLKKIKIGETVRFSDGLSAELVDVVEGQGRLRFNLAGDDFDAALAEAGAMPLPPYIAAKRPADEQDKTDYQTVWARSSGAVAAPTASLHFDEPLLAALAAKGVEFTYVTLHVGAGTFLPVKVEDVTSHKMHAEWGQVTAKAAAEIAATKAAGKRVIPVGTTALRLIESAARDSGAIAPWEGETDIFIYPGFTFRVADALMTNFHLPKSTLMMLVSALMGQERMRSVYAHAVTERYRFFSYGDASLLIP

SEQ ID NO: 72077 - protein, 351 aa, unidentified
  source 1..351: note = Silicimonas algicola
  REGION 1..351: note = tr|A0A316G831|A0A316G831_9RHOB S-adenosylmethionine:tRNA ribosyltransferase-isomerase; OS = Silicimonas algicola OX=1826607 GN=queA PE=3 SV=1
MRLSDFDFDLPERLIATRPARPRSSSRLLVATPSTMTDAHSIDLPAFLRPGDRLVLNDTRVIPARLSGVRRRSGEGGDTSARIEATLLEPRADGTWSALLKPLKKVRDGEALAFSPDLSATVEGRDEGTARLRFNLSGDDFDAALAEAGAMPLPPYIEGRRPSDAQDREDYQTVWARETGAVAAPTASLHFDDALLAALAARGIDRSFVTLHVGAGTFLPVKVDDVRDHKMHAERGEITLEAAREINATRSAGGRIVPVGTTALRLIETAAEDDGTLAAWRGATDIFITPGYRFKAADALMTNFHLPKSTLMMLVSAFMGVDRVREIYDHAMRNDYRFFSYGDASLLLPAG

SEQ ID NO: 72078 - protein, 390 aa, unidentified
  source 1..390: note = Silvanigrella aquatica
  REGION 1..390: note = tr|A0A1L4CYR6|A0A1L4CYR6_9PROT S-adenosylmethionine:tRNA ribosyltransferase-isomerase; OS = Silvanigrella aquatica OX=1915309 GN=AXG55_03945 PE=3; SV = 1
MKTDFFNYDLPEELIAQIPLENRSESRLLVCNSNNQSIQDKMFKEIPNVLNEVFQLKKTQSKVLLIANDSRVYPARVRIRRKTGARGEVFFLETGAKKTYRCLLRPKSKLKIDEVIYADIEEEKPLFKVTNLEPPEVSIIGSVSLDDILNQYGEMPLPPYIKRDPHKNKSNINLDKERYQTIYSNMNEIGSSAAPTAGLHFTPEIISECKNSNIEFAYVTLHVGLGTFLPVMAENIESHQMHEEYYHISHNTVEKIAEYIENNWPIVFVGTTSLRTVESFFRLAFPDLNQNTIYKMGSDKKLINYLTPYSNKWLPTKIFIYPKDEKDKFIPLIGKAIITNFHQPGSTLAMLVAALMGVKFWQVFYTHAIEKKYRFFSYGDSSLLVFGANV

SEQ ID NO: 72079 - protein, 390 aa, unidentified
  source 1..390: note = Silvanigrellales bacterium
  REGION 1..390: note = tr|A0A4P2VKX8|A0A4P2VKX8_9PROT S-adenosylmethionine:tRNA ribosyltransferase-isomerase; OS = Silvanigrellales bacterium RF1110005 OX=2493639; GN = JCM31447_08210 PE=3 SV=1
MKTSFFNYELPEELIAQIPLQNRENSRLLVARSLNKSIVDSDFIHIADEINKVFNLKSKNLKALLIANDSRVYPARVRIRRKTGARGEVFLLERGNKDFYRCLLRPKSKIKQGEILYADQDELKPLFKVTSLSPPLVEIINSLPLDTLLEQYGEMPLPPYIQRGKVDNKNLKEIDKERYQNVYSNKMEIGSSAAPTAGLHFTPEIIKKCSENNIEFASVTLHVGLGTFQPVQAENVQQHNMHEEHYIVSKDVAEKITLYLENDWPIIFVGTTALRAVESFYRAALSESNRHSIIQKAKEKNLNNHIYNYVDKWLATRIFIHPTYENEIISPCVGNAIITNFHQPESTLAMLISALMGYHFWNEIYSHAINKKYRFFSYGDSSLLVFGENF

SEQ ID NO: 72080 - protein, 351 aa, Simiduia agarivorans
  REGION 1..351: note = tr|K4KGR0|K4KGR0_SIMAS S-adenosylmethionine:tRNA ribosyltransferase-isomerase OS=Simiduia agarivorans (strain DSM 21679 / JCM 13881 / BCRC 17597 / SA1); OX = 1117647 GN =queA PE=3 SV=1
MRRQDFFYQLPDELIAREPTPERTGSRLFQLDGPTGAMAHGQFEEILGLVEPGDLMVFNDTRVIPARVFGQKSTGGQVEILVERVLDRYNVKAHVRSSKSPKPGAVIALEDGTEITVTGREEALFLLQFPVPALELLEAIGHMPLPPYIDRADAKADRERYQTVYGTKAGAVAAPTAGLHFDDRLLNALKDKGVQLAFVTLHVGAGTFQPVRVDDIKTHVMHSEVMEVTPAVCEQVKATKAAGKRVIAVGTTSVRCLETAARDGEIRPYQGETQIFIYPSYRYQVVDALVTNFHLPESTLLMLVSAFAGYRNTMDAYREAVASRYRFFSYGDAMFITRNPNACDDPIGDTL

SEQ ID NO: 72081 - protein, 340 aa, Simonsiella muelleri
  REGION 1..340: note = tr|V9H9R4|V9H9R4_9NEIS S-adenosylmethionine:tRNA ribosyltransferase-isomerase OS=Simonsiella muelleri ATCC 29453 OX=641147 GN=queA PE=3 SV=1
MHLSEFDFELPEQLIAQNPPTVRGSSRLLVALPNQPIEDKKFSDLINYIEAGDVLIFNNTKVMKARLFGQKASGGKIEALIERVLDEHTALAHIRSSKSPKTGTELIFDGEIHATMLERVGELFKIHFSGSLNVYELLEQHGVLPLPPYIERAAGADDDDRYQTVYAKHQGAVAAPTAGLHFTDEILGSLKDKGVEFAEVTLHVGAGTFQPVRVDNIAEHKMHSEWFQIPDATVSTIQAAQARGNKIWSVGTTSLRAIESAARSGSLKAGSGDTDIFITPRFEFQIIDRLITNFHLPKSTLLMLVSAFSGSLKIREIYQHAIEQEYRFFSYGDAMILGRE

SEQ ID NO: 72082 - protein, 363 aa, Simplicispira metamorpha
  REGION 1..363: note = tr|A0A4R2NH18|A0A4R2NH18_9BURK S-adenosylmethionine:tRNA ribosyltransferase-isomerase; OS = Simplicispira metamorpha OX=80881 GN=queA PE=3 SV=1
MTATPAPFTLSDFDFSLPPELIAQHPAPERSASRLLDGRAAQPADRIFKELPGLLRAGDLLVFNDTRVLKARLFGEKDSGGKLELLIERVLDGAEVVAHLKVSKKPLPGARIHLAGGLHQGGFEATLLGRYPDEDGPLFRFALRGAAGESPWELMERHGHLPLPPYIERQQNQAHDPDEAEDAQRYQTVFARAPGAVAAPTAALHFDEGVLADLAARGIETASVTLHVGAGTFQPVKTENLAEHQMHSEWYDVPLATLAALERCRQRGGRVVAVGTTTVRTLESWARSGQTSGDTNIFITPGFDFQVVDVLLTNFHLPKSTLMMLVSAFAGYVPVMGLYRYAIARGYRFFSYGDAMLLERAKG

SEQ ID NO: 72083 - protein, 371 aa, Simplicispira sp.
  REGION 1..371: note = tr|A0A2U1C822|A0A2U1C822_9BURK S-adenosylmethionine:tRNA ribosyltransferase-isomerase; OS = Simplicispira sp. 125 OX=2135643 GN=queA PE=3 SV=1
MTDLPASAPRTFTLSDFDFVLPPERIAQHPAPERSASRLLDGRNRPPVDRIFHTLPGLLRAGDLLVFNDTRVVKARLFGEKASGGKLELLIERVLTGNEVVAHMKVSKKPLPGSTVHMAGGRSAGGFDATLLSRWPDAQGPLFRFALHGPAQESPWDLMERHGHLPLPPYIERQQNTGNDPDAAEDSQRYQTIFARAPGAVAAPTAALHFDDAVLADLAAQGIERASVTLHVGAGTFQPVKTENLAEHQMHSEWYEIPLPTLAALERCRQRGGRVVAVGTTTVRTLESWARSGLATGDTNIFITPGFAFQVVDLLVTNFHLPKSTLMMLVSAFAGYDQVMELYRHAIAQEYRFFSYGDAMLLERGAPTARL

SEQ ID NO: 72084 - protein, 381 aa, Simplicispira sp.
  REGION 1..381: note = tr|A0A398C8R5|A0A398C8R5_9BURK S-adenosylmethionine:tRNA ribosyltransferase-isomerase; OS = Simplicispira sp. NY-02 OX=2315688 GN=queA PE=3 SV=1
MTSHLPDSTARAFTLSDFDFDLPPERIAQHPAPERSSSRLLDGRGNAPRDRIFRELPALLRDGDLLVFNDTRVVKARIFGEKDSGGKLELLIERVLTGHAGCEVVAHMKVSKKPPVGARIHLAGGMAAGGFDATLLSRWPDAEGPLFRFALHGPAGESAWELMERCGHLPLPPYIARDQASGHDADEAQDSERYQTVFARAPGAVAAPTAALHFDNAVLADLAERGVERASVTLHVGAGTFQPVKTENLAEHRMHAEWYSIPSATLAALERCRQRGGRVVAVGTTTVRTLESWAQSGLAEGETRIFITPGFAFQVVDLLLTNFHLPKSTLMMLVSAFAGYERVMALYRHAVAGQYRFFSYGDAMLLARSAAPASHPESTTE

SEQ ID NO: 72085 - protein, 363 aa, unidentified
  source 1..363: note = Simplicispira suum
  REGION 1..363: note = tr|A0A2S0MY59|A0A2S0MY59_9BURK S-adenosylmethionine:tRNA ribosyltransferase-isomerase; OS = Simplicispira suum OX=2109915 GN=queA PE=3 SV=1
MTSSSPRNFTLADFDFQLPEALIAQHPCAERSASRLLDGTAGAPVDRIFRELPSLVLPGDLLVFNDTRVLKARLFGEKPTGGKAELLIERVLQGQEVVAHVKVSKKPPIGTMLQMAGGFHATLLGRWPDAQGPLFRFRLDGPASETPFELMERHGHMPLPPYIERQQQHENAGDAAEDERRYQTVFARVPGAVAAPTAALHFDDAVLAALAARGVERASVTLHVGAGTFQPVKTDNLAEHRMHAEWYSIPAETLAAIQRCRQRGGRVVAVGTTTVRTLESWAQSGQTEGETRIFITPGFAFQVVDLLLTNFHLPKSTLMMLVSAFAGYERVMALYRHAIAQGYRFFSYGDAMLLARRAPMALA

SEQ ID NO: 72086 - protein, 342 aa, Singulisphaera acidiphila
  REGION 1..342: note = tr|L0DF28|L0DF28_SINAD S-adenosylmethionine:tRNA ribosyltransferase-isomerase OS=Singulisphaera acidiphila (strain ATCC BAA-1392 / DSM 18658 / VKM B-2454 / MOB10) OX =886293 GN=queA PE=3 SV=1
MQTSNFDFTLPGELIAQHPVEPRDQSRLMVIRRQEQRWEHRTFAELPDLLNAGDIIVRNDTRVVPARLLGLREATGGRWEGLFLRALPEGTWEILATTRGRPVEGERVVVGQGLKLILEARGEAGRWIVRPESDEAVHDLLGRHGQVPLPPYIRKGREDPADRLRYQTLYARTPGAVAAPTAGLHFTEDVFRRLAERGVASVDATLHVGLGTFRPIEVERIDEHQLHAEWAELGVPAATLLSEHKRQGGRIIAVGTTSARILETSAITGTIQPFSGETALYLRPGHIFQGLDALLTNFHLPRSSLLVLVSALAGVDLIRAAYAEAIQERYRFYSYGDAMLIL

SEQ ID NO: 72087 - protein, 342 aa, Singulisphaera sp.
  REGION 1..342: note = tr|A0A1N6KRJ8|A0A1N6KRJ8_9BACT S-adenosylmethionine:tRNA ribosyltransferase-isomerase; OS = Singulisphaera sp. GP187 OX=1882752 GN=queA PE=3 SV=1
MQTSEFDFTLPGELIAQHPVEPRDQSRLMVIRRNEQRWEHRTFAELPDLLEASDILVRNNTRVVPARLIGLREATGGRWEGLFLRALPEGTWEILATTRGRPVEGERVVVGDGLKLTLEARGEAGRWIVRPESDEAAHDLLGRHGQIPLPPYIRKGREDPGDRLRYQTLYASAPGAVAAPTAGLHFTDDVFRRLAERGIASVDATLHVGLGTFRPIEVERIDEHRLHAEWAELGVLEATVLNKHKSQGGRIVAVGTTSARILETSSTTGTIRPFSGETALYLRPGHVFQGLDALLTNFHLPRSSLLVLVAALAGVDLVRAAYAEAIRERYRFYSYGDAMLIL

SEQ ID NO: 72088 - protein, 345 aa, unidentified
  source 1..345: note = Sinimarinibacterium flocculans
  REGION 1..345: note = tr|A0A318ED52|A0A318ED52_9GAMM S-adenosylmethionine:tRNA ribosyltransferase-isomerase; OS = Sinimarinibacterium flocculans OX=985250 GN=queA PE=3; SV = 1
MRRSDFDYELPPELIAQQPAAERSASRLLQVAPSGLADRQIRELPALLAPGDLLVFNDTRVIPARLFGVKPTGGRVEILVERVLESGRFLAQLGVSKKPRPGGEIRVGSDRLEVLGRDGDLFELRYHGADGVLDFLERAGRLPLPPYITHAPGAQDAERYQTVFAREPGAVAAPTAGLHFDDALLAALDARGIVRATLTLHVGAGTFQPVRVENLDEHRMHAERYRIDAALCAAIDAARERGGRVVAVGTTVARALESAALAQDAEGRVAPCSAETRLFITPGFRFRVVDRLLTNFHLPQSTLMMLVCAFGGYERLMSAYRHAVAQRYRFFSYGDAMLIERDAAA

SEQ ID NO: 72089 - protein, 353 aa, unidentified
  source 1..353: note = Sinimarinibacterium sp.
  REGION 1..353: note = tr|A0A4U0GQJ5|A0A4U0GQJ5_9GAMM S-adenosylmethionine:tRNA ribosyltransferase-isomerase; OS = Sinimarinibacterium sp. CAU 1509 OX=2562283 GN=queA; PE = 3 SV=1
MRRSDFQYSLPEELIAQRPAEQRSNSRLLRVGPGALLQDRMIAELPELLDARDLLVFNDTRVIPARVFGHKPTGGRVEILVERILDERRFLAQLGVSKKPRAGTLIIVGEDRLEVLGRDDDLFELSYCDDGGVQAFLERAGQLPLPPYIRHQPDRADLERYQTVFAREPGAVAAPTAGLHFDPPLFERLAQRGIETAMLTLHVGAGTFQPVRVDDLSEHRMHAERFHVGAALCAKIEACRARGGRVVAVGTTVARALESAALAQATERTLSPASGETQLFITPGFHFRIVDVLLTNFHLPESTLLMLVSAFAGYERVMAAYRHAVEQRYRFFSYGDAMLIDPSEAGVNAEIAA

SEQ ID NO: 72090 - protein, 355 aa, unidentified
  source 1..355: note = Sinirhodobacter ferrireducens
  REGION 1..355: note = tr|A0A443LV39|A0A443LV39_9RHOB S-adenosylmethionine:tRNA ribosyltransferase-isomerase; OS = Sinirhodobacter ferrireducens OX=1215032 GN=queA PE=3; SV = 1
MKLEDFDFDLPEGLIATRPARPRTAAKLLLAEGDEIRDLHVADLVDLFRPGDRLVLNNTKVIPARLSGTRTRMTGQGEVTAKVEITLLEPQASGEWTALAKPLRKLKEGETIRFSDALSAEVRAIGAAQLRLAFNLTGPDFDAALAAAGAMPLPPYIAALRAPDEADKTDYQTVFARHSGAVAAPTASLHFTRELLEAIHAKGVAFTEVTLHVGAGTFLPVKVEDVETHKMHAEWGEVTAAAAEEINATRAAGGRIIPVGTTALRLIESAAAEDGTMRPFRGTTEIFIYPGYRFRVTDALMTNFHLPKSTLLMLVSALMGQDRIRAIYDHAVKSGYRFFSYGDASLLIPERRKSA

SEQ ID NO: 72091 - protein, 355 aa, unidentified
  source 1..355: note = Sinirhodobacter hungdaonensis
  REGION 1..355: note = tr|A0A3S3NBX2|A0A3S3NBX2_9RHOB S-adenosylmethionine:tRNA ribosyltransferase-isomerase; OS = Sinirhodobacter hungdaonensis OX=2501515 GN=queA PE=3; SV = 1
MKLEDFDFDLPEGLIATRPARPRTAAKLLLAEGDRIRDLHVADLVDLFRPGDRLVLNNTKVIPARLSGTRTRMTGQGEVTAKVEITLLEPQASGEWTALAKPLRKLKEGETIRFSDALSAEVRAIEAAQLRLAFNLSGPDFDAALAAAGAMPLPPYIAALRAPDEADKTDYQTVFARHSGAVAAPTASLHFTMPLLEAIHAKGVAFTEVTLHVGAGTFLPVKVEDVETHKMHSEWGEVTAAAAAEINATRAAGGRIIPVGTTALRLIESAAAGDGTMRPFRGTTEIFIYPGYRFRVTDALMTNFHLPKSTLLMLVSALMGQDRIRAIYDHAVKSGYRFFSYGDASLLIPERRKSA

SEQ ID NO: 72092 - protein, 354 aa, unidentified
  source 1..354: note = Sinirhodobacter populi
  REGION 1..354: note = tr|A0A443KA62|A0A443KA62_9RHOB S-adenosylmethionine:tRNA ribosyltransferase-isomerase; OS = Sinirhodobacter populi OX=2306993 GN=queA PE=3 SV=1
MKLEDFDFDLPEGLIATRPARPRTAARLLLAEGDAIRDLHVSDLVDLFRPGDRLILNNTKVIPARLAGVRERDTGQGRVSAKIEVTLLEPSADGCWSALAKPLRKLKEGETIRFSDALSAEVRGISDAQMKIAFNLTGTDFDAALAEAGAMPLPPYIAALRAPDEADKTDYQTVFARHSGAVAAPTASLHFTRELLEAIHAKGVDFTEVTLHVGAGTFLPVKVEDVETHKMHSEWGEVTEAAAAAINATKAAGGRVIPVGTTALRLIESAAGADGVMRPFRGTTDIFIYPGYRFRVTDALMTNFHLPKSTLLMLVSALMGRERIRAIYAHAVAQGYRFFSYGDASLLIPDRGEP

SEQ ID NO: 72093 - protein, 354 aa, unidentified
  source 1..354: note = Sinirhodobacter populi
  REGION 1..354: note = tr|A0A443KMP7|A0A443KMP7_9RHOB S-adenosylmethionine:tRNA ribosyltransferase-isomerase; OS = Sinirhodobacter populi OX=2306993 GN=queA PE=3 SV=1
MKLEDFDFDLPEGLIATRPARPRTAARLLLAEGDAIRDLHVSDLVDLFRPGDRLILNNTKVIPARLAGVRERDTGQGRVSAKIEVTLLEPSADGCWSALAKPLRKLKEGETIRFSDVLSAEVRGISDAQMKIAFNLTGTDFDAALAEAGAMPLPPYIAALRAPDEADKTDYQTVFARHSGAVAAPTASLHFTRELLEAIHAKGVDFTEVTLHVGAGTFLPVKVEDVETHRMHSEWGEVTEAAAAAINATKAAGGRVIPVGTTALRLIESAAGADGVMRPFRGTTDIFIYPGYRFRITDALMTNFHLPKSTLLMLVSALMGRERIRAIYAHAVAQGYRFFSYGDASLLIPDRGEP

SEQ ID NO: 72094 - protein, 347 aa, Sinobaca qinghaiensis
  REGION 1..347: note = tr|A0A419V3K3|A0A419V3K3_9BACL S-adenosylmethionine:tRNA ribosyltransferase-isomerase; OS = Sinobaca qinghaiensis OX=342944 GN=queA PE=3 SV=1
MNVQDFDFELPEELIAQTPLLNRDRSRLMVVDPQSGEVEHRQFPEVKTFLQKGDALVINDTRVLPARLIGEKDTGAAIEILLLKQLEGDKWETLVKPAKKIKTGTVITFGGGKLTAECTELQEHGGRILQFSYEGVFLEILESLGEMPLPPYIKEKLEDQERYQTVYAENNGSAAAPTAGLHFTEDLLHELKEQGVHIVPLTLHVGLGTFRPVSVDSIEDHDMHSEFYELKQQAAETLNEVRRSGGTITAVGTTSARTLETIAGQNNGLFAAGSGWTNIFIYPGYSFSGIDALLTNFHLPKSTLVMLVSALAGKDTILNAYEEAVNNKYRFFSFGDAMFIKKGGGVT

SEQ ID NO: 72095 - protein, 346 aa, unidentified
  source 1..346: note = Sinobacteraceae bacterium
  REGION 1..346: note = tr|A0A2T5MIN0|A0A2T5MIN0_9GAMM S-adenosylmethionine:tRNA ribosyltransferase-isomerase; OS = Sinobacteraceae bacterium GT1R17 OX=2029166 GN=queA; PE = 3 SV=1
MTTHQRRSDFFYDLPPDLIAQHPVEPRSASRLLHLGTSGVADRAIADLPDLLQPGDLLVFNDTRVIPARLFGQKPTGGRVEILVERVLGDREIIAQVGASKTPKPGGEILVADAVFRMIDRADDMFRLSYEGEGEGDVLSFLERVGQMPLPPYIHHDPDQTDSERYQTVFAREPGAVAAPTAGLHFDESLLARIRERGIRTATLTLHVGAGTFQPMRVELLSEHKMHAERFEVSTELVTAIAQTRERGGRVVAVGTTVTRALESAAAQGTLHAGKGETQIFITPGYTFKVVDLLLTNFHLPESTLMMLVSAFGGYERLMAAYRHAVEARYRFFSYGDAMLIEPLRG

SEQ ID NO: 72096 - protein, 352 aa, unidentified
  source 1..352: note = Sinobacteraceae bacterium
  REGION 1..352: note = tr|A0A522J4Y3|A0A522J4Y3_9GAMM S-adenosylmethionine:tRNA ribosyltransferase-isomerase; OS = Sinobacteraceae bacterium OX=1969813 GN=queA PE=3 SV=1
MLRSDFDYALPLELIAQHPPEVRGTSRLLCVDEAGLRDRHMGEFPAELRAGDLLVLNDTRVIPARLHGRKASGGKVEVMIERYTGTHTAVAQLRVSKSPHAGTELVVDGARLAVEGREHDMYRLRLVAGADSFDALLARAGEVPLPPYITHTPDAADVARYQTVYAKNPGAVAAPTAGLHFTEALLQQVRDRGVDIGFTTLHVGAGTFQPVREDDVSHHHMHSERAFVSPALVAQVQAARARGGRVVAVGTTVVRSLEAAAVGGTLQPFHGETDLFIVPGFEFHVVDALLTNFHLPQSTLLMLVCAFAGYDRMLAAYRHAVAEEYAFFSYGDATWLPFRCDSKNAMKRSSSQ

SEQ ID NO: 72097 - protein, 362 aa, unidentified
  source 1..362: note = Sinobacterium caligoides
  REGION 1..362: note = tr|A0A3N2DZZ1|A0A3N2DZZ1_9GAMM S-adenosylmethionine:tRNA ribosyltransferase-isomerase; OS = Sinobacterium caligoides OX=933926 GN=queA PE=3 SV=1
MKLSDFHFELPDELIARYPTEQRSASRLLRLHGEDSGRLEHLGFTDLLAQVDAGDLLVFNDTRVIPARLYGQKASGGKLEILVERVLDEHSVLCHLRSSRSPKPGAEILLGTDRDAAVTATVVARHDALFELRFDDDRSVFKLLQQLGHMPLPPYIDRPDETADGERYQTVYSDSNKEGAVAAPTAGLHFDEAMLAALQQKGVQLAFVTLHVGAGTFQPVKVDNILEHHMHAEYIEVSAEVAEQVKATHARGSRVIAVGTTSVRCLESAASKNGGIIAPYSGDTDIFIYPGYEFAVVDALLTNFHLPESTLIMLVSALAGREQVMQAYDVAVQEGYRFFSYGDAMFVTPIQPSRGFREHQQQ

SEQ ID NO: 72098 - protein, 349 aa, unidentified
  source 1..349: note = Sinomicrobium oceani
  REGION 1..349: note = tr|A0A1K1R632|A0A1K1R632_9FLAO S-adenosylmethionine:tRNA ribosyltransferase-isomerase; OS = Sinomicrobium oceani OX=1150368 GN=queA PE=3 SV=1
MKLSHFNFDLPKELLAEYPSENRDEARLMVVHRKDGTIEHKMFKDLIDYFEEGDVMVLNNTKVFPARLYGNKEKTGARIEVFLLRELNEEQRLWDVLVDPARKIRIGNKLYFGDDESLVAEVIDNTTSRGRTLRFLYDGSYEDFRRKLKELGETPLPKYIKREVEPEDEERYQTIYAKYEGAVAAPTAGLHFSKHLLKRLEIKGTKFAEVTLHVGLGTFNPVEVEDLSKHKMDSEELLIPESATRVVNEAKRNKKKVCAIGTTVMRALESSVSSERLLNSYEGWTNKFIFPPYDFSIADSMVTNFHTPKSTLLMMVSAFAGHDLIKKAYEEAVKEKYKFYSYGDAMLIL

SEQ ID NO: 72099 - protein, 349 aa, unidentified
  source 1..349: note = Sinomicrobium pectinilyticum
  REGION 1..349: note = tr|A0A3N0E4N3|A0A3N0E4N3_9FLAO S-adenosylmethionine:tRNA ribosyltransferase-isomerase; OS = Sinomicrobium pectinilyticum OX=1084421 GN=queA PE=3; SV = 1
MKLSHFNFDLPKELLAEYPSENRDEARLMVVNRKDGTIEHKMFKDLIDYFDEGDVMVLNNTKVFPARLYGNKEKTGARIEVFLLRELNEEQRLWDVLVDPARKIRIGNKLYFGDDESLVAEVIDNTTSRGRTLRFLYDGSYEDFRQKLKELGETPLPKYIKREVEPEDEERYQTIYAKYEGAVAAPTAGLHFSKHLLKRLEIKGARFAEVTLHVGLGTFNPVEVEDLSKHKMDSEELLIPEEATRIVNEAKRNKKKVCAIGTTVMRALESSVSSEKLLNPYEGWTNKFIFPPYDFSIADCMVTNFHTPKSTLLMMVSAFAGHDLIKKAYEEAVKEKYKFYSYGDAMLIL

SEQ ID NO: 72100 - protein, 349 aa, unidentified
  source 1..349: note = Sinomicrobium sp.
  REGION 1..349: note = tr|A0A329N051|A0A329N051_9FLAO S-adenosylmethionine:tRNA ribosyltransferase-isomerase; OS = Sinomicrobium sp. N-1-3-6 OX=2219864 GN=queA PE=3 SV=1
MKLSHFNFDLPKELLAEYPSENRDEARLMVVHRKDGTVEHKMFKDLIDYFDEGDVMVLNNTKVFPARLYGNKEKTGARIEVFLLRELNEEQRLWDVLVDPARKIRIGNKLYFGDDESLVAEVIDNTTSRGRTLRFLYDGSYEDFRRKLKELGETPLPKYIKRGVEPEDEERYQTIYAKHEGAVAAPTAGLHFSKHLLKRLEIKGVNFAEVTLHVGLGTFNPVEVEDLSKHKMDSEELTIPESATEVVNAAKRNKNKVCAVGTTVMRAMESSVSSERLLNPFDGWTNKFIFPPYDFSIADCMITNFHTPKSTLLMMVSAFAGHDLIKKAYEEAVKEKYKFYSYGDAMLIL

SEQ ID NO: 72101 - protein, 361 aa, Sinorhizobium americanum
  REGION 1..361: note = tr|A0A2S3YQ06|A0A2S3YQ06_9RHIZ S-adenosylmethionine:tRNA ribosyltransferase-isomerase; OS = Sinorhizobium americanum OX=194963 GN=queA PE=3 SV=1
MRVDLFDFDLPETSIALRPASPRDSARMLVVRPEAEPVLSDHGVLDLPAFLRPGDALVFNDTKVIPAQLEGIRQRGEDVATQVSLTLHMRVGPDRWKAFARPARRLKPGDRIGFGHGGTACLLGSLDATVEEKGEAGEVTLRFDLSGPVLDEAIMSVGHIPLPPYIASKRPEDARDRADYQTVYAREEGAVAAPTAGLHFTDRLFARLDEAGIERHFVTLHVGAGTFLPVKADDTDDHVMHEEIGHVDAATAERLNAVRARGGRIVCVGTTSLRLIESAATEEGQICPWSGPTGIFITPGYRFRAADMLMTNFHLPKSTLFMLVSAFAGLDTMRAAYVHAIAAGYRFYSYGDASLLFRKDQ

SEQ ID NO: 72102 - protein, 361 aa, Sinorhizobium americanum
  REGION 1..361: note = tr|A0A4R2BU76|A0A4R2BU76_9RHIZ S-adenosylmethionine:tRNA ribosyltransferase-isomerase; OS = Sinorhizobium americanum OX=194963 GN=queA PE=3 SV=1
MRVDLFDFDLPETSIALRPASPRDSARMLVVRPEAEPVLSDHGVLDLTSFLRPGDALVFNDTKVIPAQLEGIRRRGEDVATQVSLTLHMRVGPDRWKAFARPARRLKPGDRISFGHGGNACLLGSLDATVEEKGGAGEVTLRFDLSGPVLDEAIMSVGHIPLPPYIASKRPEDARDRADYQTLYAREEGAVAAPTAGLHFTDRLFGKLDEAGIERHFVTLHVGAGTFLPVKADDTDDHVMHEEIGHVDAATAERLNAVRARDGRIVCVGTTSLRLIESAATEEGQIRPWSGPTGIFITPGYRFRAVDMLMTNFHLPKSTLFMLVSAFAGLDTMRAAYAHAIAAGYRFYSYGDASLLFRKDQ

SEQ ID NO: 72103 - protein, 361 aa, unidentified
  source 1..361: note = Sinorhizobium fredii
  REGION 1..361: note = tr|A0A2U8G260|A0A2U8G260_RHIFR S-adenosylmethionine:tRNA ribosyltransferase-isomerase; OS = Sinorhizobium fredii CCBAU 45436 OX=1128331 GN=queA; PE = 3 SV=1
MRVDLFDFDLPETSIALRPASPRDSARMLVVRPEAEPVLSDHGVLDLPSFLRPGDALVFNDTKVIPAQLEGIRRRGEDVATQVSLTLHMRVAPDRWKAFARPARRLKPGDRISFGHGGNACLLGSLDATVEDKGEAGEVTLRFDLSGPVLDEAIMSVGHIPLPPYIASKRPEDSRDRTDYQTVYAREEGAVAAPTAGLHFTDRLFAELDEAGIERHFVTLHVGAGTFLPVKADDTDNHVMHEEIGHVDAATAERLNAVRARGGRIVCVGTTSLRLIESAATQDGKIHPWSGPTGIFITPGYRFRAVDMLMTNFHLPKSTLFMLVSAFAGLETMRGAYAHAIAAGYRFYSYGDASLLFRKDQ

SEQ ID NO: 72104 - protein, 361 aa, unidentified
  source 1..361: note = Sinorhizobium fredii
  REGION 1..361: note = tr|A0A249PST8|A0A249PST8_RHIFR S-adenosylmethionine:tRNA ribosyltransferase-isomerase; OS = Sinorhizobium fredii CCBAU 83666 OX=1128334 GN=queA; PE = 3 SV=1
MRVDLFDFDLPETSIALRPASPRDSARMLVVRPEAEPVLCDHGVLDLPSFLRPGDALVFNDTKVIPAQLEGIRRRGEDVATQVSLTLHMRVAPDRWKAFARPARRLKPGDRISFGHGGNACLLGSLDATVEDKGEAGEVTLRFDLSGPVLDEAIMSVGHIPLPPYIASKRPEDSRDRTDYQTVYAREEGAVAAPTAGLHFTDRLFAELDEAGIERHFVTLHVGAGTFLPVKADDTDNHVMHEEIGHVDAATAERLNAVRARGGRIVCVGTTSLRLIESAATQDGKIHPWSGPTGIFITPGYRFRAVDMLMTNFHLPKSTLFMLVSAFAGLETMRGAYAHAIAAGYRFYSYGDASLLFRKDQ

SEQ ID NO: 72105 - protein, 360 aa, unidentified
  source 1..360: note = Sinorhizobium medicae
  REGION 1..360: note = sp|A6U8Y7|QUEA_SINMW S-adenosylmethionine:tRNA ribosyltransferase-isomerase OS=Sinorhizobium medicae (strain WSM419) OX=366394 GN=queA PE=3 SV=1
MRVDLFDFDLPEDSVALRPASPRDSARMLVVRPGGEPVLEDRGVLDLPSFLRQGDALVFNDTKVIPAQLEGVRYRGEHISTPVSLTLHMRVAPDRWKAFARPARRLKPGDRVSFGHGGNACLLGSLDAMVEEKGDAGEVTLRFDLSGPSLDEAIMSVGHIPLPPYIASKRADDARDRTDYQTVYAREEGAVAAPTAGLHFTDRLFAMLDEAGIERHFVTLHVGAGTFLPVKADDTDDHVMHEEIGHVDAVTAAKLNAVRERGGRVVCVGTTSLRLVESAAAEDGTIHAWSGATGIFITPGYRFRAAHMLMTNFHLPKSTLFMLVSAFAGLETMRDAYAHAIATGYRFYSYGDSSLLFRKD

SEQ ID NO: 72106 - protein, 360 aa, unidentified; identical to SEQ ID NO: 72105
  source 1..360: note = Sinorhizobium medicae
  REGION 1..360: note = tr|A0A508WXI2|A0A508WXI2_9RHIZ S-adenosylmethionine:tRNA ribosyltransferase-isomerase; OS = Sinorhizobium medicae OX=110321 GN=queA PE=3 SV=1

SEQ ID NO: 72107 - protein, 360 aa, unidentified; identical to SEQ ID NO: 71302
  source 1..360: note = Sinorhizobium meliloti
  REGION 1..360: note = tr|H0G0K8|H0G0K8_RHIML S-adenosylmethionine:tRNA ribosyltransferase-isomerase OS=Sinorhizobium meliloti CCNWSX0020 OX=1107881 GN=queA PE=3 SV=1

SEQ ID NO: 72108 - protein, 360 aa, unidentified
  source 1..360: note = Sinorhizobium meliloti
  REGION 1..360: note = tr|A0A0E0UBW9|A0A0E0UBW9_SINMB S-adenosylmethionine:tRNA ribosyltransferase-isomerase; OS = Sinorhizobium meliloti (strain BL225C) OX=698936; GN = queA PE=3 SV=1
MRVDLFDFDLPENSIALRPASPRDSARMLVVRPDGAPVFEDRGVLDLPSFLRPGDALVFNDTKVIPAQLEGVRYRGEDISTPVSLTLHMRVAPSRWKAFARPARRLKPGDRISFGHGGSACLLGSLEAVVEEKGDAGEVTLRFDLSGPSLDEAIMAVGHIPLPPYIASKRADDERDRTDYQTVYAREEGAVAAPTAGLHFTDRLFAKLDEGGIERYFVTLHVGAGTFLPVKADDTADHVMHEEIGHVDPVTAAKLNAVRERGGRIVCVGTTSLRLIESAAAEDGNIRPWSGATGIFITPGYRFRAVDMLMTNFHLPKSTLFMLVSAFAGLETMHAAYAHAIATGYRFYSYGDSSLLFRKD

SEQ ID NO: 72109 - protein, 360 aa, unidentified
  source 1..360: note = Sinorhizobium saheli
  REGION 1..360: note = tr|A0A178YLW0|A0A178YLW0_SINSA S-adenosylmethionine:tRNA ribosyltransferase-isomerase; OS = Sinorhizobium saheli OX=36856 GN=queA PE=3 SV=1
MRVDLFDFDLPETSIALRPASPRDSARMLVVRPQGEPVLSDHGVLDLPSFLRPGDALIFNDTKVIPAQLEGIRRRGEDISTPVSLTLHMRVAPDRWKAFARPARRLKPGDRIGFGHGGNACLLGSLDSTVEEKGDAGEVTLRFDLSGPVLDEAIMAVGHVPLPPYIASKRADDARDRADYQTIYAREEGAVAAPTAGLHFTERLFARLDEAGVERHFVTLHVGAGTFLPVKADDTDDHVMHEEIGHVDAATAEKLNAVRARGGRIVCVGTTSLRLIESAATKEGKILPWSGPTGIFITPGHRFRAVDMLMTNFHLPRSTLFMLVSAFAGLDTMRAAYAHAIATGYRFYSYGDSSLLFRKD

SEQ ID NO: 72110 - protein, 360 aa, Sinorhizobium sp.
  REGION 1..360: note = tr|A0A2N8JT45|A0A2N8JT45_9RHIZ S-adenosylmethionine:tRNA ribosyltransferase-isomerase; OS = Sinorhizobium sp. M4_45 OX=2037901 GN=queA PE=3 SV=1
MRVDLFDFDLPENSIALRPASPRDSARMLIVRPDGEPVLEDRGVLDLPSFLRPGDALVFNDTKVIPAQLEGVRYRGEDISTPVSLTLHMRVAPSRWKAFARPARRLKPGDRISFGHGGNACLLGSLEAVVEEKGDAGEVTLRFDLSGPSLDEAIMAVGHIPLPPYIASKRADDARDRTDYQTVYAREEGAVAAPTAGLHFTDRLFASLDEAGIERYFVTLHVGAGTFLPVKADDTADHVMHEEIGHVDPVTAAKLNAVRERGGRIVCVGTTSLRLIESAAAEDGSIRPWSGATGIFITPGYRFRAVDMLITNFHLPRSTLFMLVSAFAGLETMHAAYAHAIATGYRFYSYGDSSLLFRKD

SEQ ID NO: 72111 - protein, 359 aa, Sinorhizobium sp.
  REGION 1..359: note = tr|A0A2A6MKW7|A0A2A6MKW7_9RHIZ S-adenosylmethionine:tRNA ribosyltransferase-isomerase; OS = Sinorhizobium sp. NG07B OX=1538174 GN=queA PE=3 SV=1
MRVDLFDFDLPETSIALRPASPRDSARMLVVRPEPVLSDHGVLDLPAFLRPGDALVFNDTKVIPAQLEGIRQRGEDVATQVSLTLHMRVGPDRWKAFARPARRLKPGDRIGFGHGGTACLLGSLDATVEEKGEAGEVTLRFDLSGPVLDEAIMSVGHIPLPPYIASKRPEDARDRADYQTVYAREEGAVAAPTAGLHFTDRLFARLDEAGIERHFVTLHVGAGTFLPVKADDTDDHVMHEEIGHMDAATAERLNAVRARGGRIVCVGTTSLRLIESAATEEGQIRPWSGPTGIFITPGYRFRAADMLMTNFHLPKSTLFMLVSAFAGLDTMRAAYVHAIAAGYRFYSYGDASLLFRKDQ

SEQ ID NO: 72112 - protein, 407 aa, Siphonobacter aquaeclarae
  REGION 1..407: note = tr|A0A1G9XFF3|A0A1G9XFF3_9BACT S-adenosylmethionine:tRNA ribosyltransferase-isomerase; OS = Siphonobacter aquaeclarae OX=563176 GN=queA PE=3 SV=1
METVPIADFTYDLPDDRIARFPLAERDQSRLLVYRGGAIRHGHFTDLPAELPEGSLLVFNNTKVIPARLFFRKQTGALIELFLLHPVEPTPVIQLAMEVSGSAVWECLIGNRKRWKGGEILVSEIPDGGGSFPLSAQQVDDTHVRLSWDAALPFAEVVQRAGKIPLPPYLDREAEESDLTTYQTVYSEKKGAVAAPTAGLHFTDRVFAALAERGVGTEFLTLHVGAGTFRPVKTENALEHRMHGEQIVVRAANLRKLITETCIIAVGTTSLRTLESLYWLGVQLLSGELAGLSDGFYIEQFVHRKERVALPTYPDAFRAILSHLEAAGREEVTGETGIMIYPGYTFRVIKGLVTNFHQPGSTLMLLVAALVGDDWKRIYSEALEGNYRFLSYGDSSLLWPSGTIFNQ

SEQ ID NO: 72113 - protein, 351 aa, Siphonobacter aquaeclarae
  REGION 1..351: note = tr|A0A1G9NL39|A0A1G9NL39_9BACT S-adenosylmethionine:tRNA ribosyltransferase-isomerase; OS = Siphonobacter aquaeclarae OX=563176 GN=queA PE=3 SV=1
MKLSEFKFDLPQNLIALYPAERGESRLMVVNRQTRQIEHRQFGDIASYFGDGDTMVVNDTKVFPARLYGSKEKTGAKIEVFLLRELNREHRLWDVLVDPARKIRVGNKLYFGDSDLVAEVIDNTTSRGRTIRFLYDGDHSALMKAIHELGETPLPEEIKNRRKATEEDRERYQTIFADDNKVGAVAAPTAGLHFTKNIVKRMEINGTRFTPITLHVGLGTFRQVDVEDLTKHKTDSEPYFIPGGTADIVNDSLDHNKRVCSIGTTVLKTLESSVSANSRLKASEGWTDRFIFPPYDFKISNSLLTNLHLPESVLLMSVCAFGGYDLVMTAYEQAIKEKYKFFSYGDAMLIL

SEQ ID NO: 72114 - protein, 401 aa, unidentified
  source 1..401: note = Siphonobacter curvatus
  REGION 1..401: note = tr|A0A2S7INH6|A0A2S7INH6_9BACT S-adenosylmethionine:tRNA ribosyltransferase-isomerase; OS = Siphonobacter curvatus OX=2094562 GN=queA PE=3 SV=1
MQHLPIADFTYELPDEQIARFPLPVRDESRLLVYRKGTIEHRKFRSLTEELTSDTLLVFNNTRVIPARLHFQRQTGALIELFLLHPVEPSPVIPVVMEETQACVWECMIGNRKRWKAGERLQKEVEINGQSVLLTAELTNAEQSLVRLSWSQPVRFVDVVQAIGKIPLPPYLKREAETSDEQTYQTVYSEKEGAVAAPTAGLHFTDRVFAGLEAKGIRREFLTLHVGAGTFQPVKTENALEHKMHGEQLVITRSNLEHLQAANRIIPVGTTSMRSLESMYWLGVQLIHKEYTSLEQGFRIPQFVHQQYTELPTLHESLAAIVQQMEVEERQEIVGETEIMIFPGYTFRVCQGLVTNFHQPGSTLLLLIAALVGGNWKRIYDEALTQQYRFLSYGDSSLLLP

SEQ ID NO: 72115 - protein, 351 aa, unidentified
  source 1..351: note = Siphonobacter curvatus
  REGION 1..351: note = tr|A0A2S7IKY8|A0A2S7IKY8_9BACT S-adenosylmethionine:tRNA ribosyltransferase-isomerase; OS = Siphonobacter curvatus OX=2094562 GN=queA PE=3 SV=1
MKLSEFKFDLPQNLIALHPAERGDARLMVVNRQTKQIEHRKFGDIVSYFGDGDTMVVNDTKVFPARLYGSKEKTGAQIEVFLLRELNREHRLWDVLVDPARKIRVGNKLYFGDSDLVAEVIDNTTSRGRTIRFLYDGDHSALMKAIHELGETPLPEEIKNRRKTTDEDRERYQTIFADDNKVGAVAAPTAGLHFTKNIVKRMEINGTQFTPITLHVGLGTFRQVDVEDLTKHKTDSEPYFIPPATAEVVNASLDANKRVCSVGNTVLKTLESSVSANARLKPSEGWTDRFIFPPYDFKISNALLTNLHLPESVLLMGVCAFGGYDLVMQAYEIAMKEKYKFFSYGDLMLIL

SEQ ID NO: 72116 - protein, 351 aa, Siphonobacter sp.
  REGION 1..351: note = tr|A0A2N7BF09|A0A2N7BF09_9BACT S-adenosylmethionine:tRNA ribosyltransferase-isomerase; OS = Siphonobacter sp. BAB-5405 OX=1864825 GN=queA PE=3 SV=1
MKLSEFKFDLPQNLIALHPAERGDSRLMVVNRQTKQIEHRKFGDIVSYFGDGDTMVVNDTKVFPARLYGSKEKTGAQIEVFLLRELNREHRLWDVLVDPARKIRVGNKLYFGDSDLVAEVIDNTTSRGRTIRFLYDGDHSALMKAIHELGETPLPEEIKNRRKTTDEDRERYQTIFADDNKVGAVAAPTAGLHFTKNIVKRMEINGTQFTPITLHVGLGTFRQVDVEDLTKHKTDSEPYFIPPVTAEVVNASLDANKRVCSVGNTVLKTLESSVSANSRLKPSEGWTDRFIFPPYDFKISNALLTNLHLPESVLLMGVCAFGGYDLVMQAYEIAMKEKYKFFSYGDLMLIL

SEQ ID NO: 72117 - protein, 401 aa, Siphonobacter sp.
  REGION 1..401: note = tr|A0A261Q3E2|A0A261Q3E2_9BACT S-adenosylmethionine:tRNA ribosyltransferase-isomerase; OS = Siphonobacter sp. BAB-5385 OX=1864822 GN=queA PE=3 SV=1
MQHLPIADFTYELPDEQIARFPLPVRDESRLLVYRKGTIEHRQFRGLTEELASDTLLVFNNTRVIPARLHFQRQTGALIELFLLHPVEPSPVIPVVMEETQACVWECMIGNRKRWKAGERLQKEVEIDGQAVVLTAELTDTERSLVRLSWSVPVRFVDVVQGIGKIPLPPYLKREAEASDEQTYQTVYSEKEGAVAAPTAGLHFTDRVFAELEAKGVRREFLTLHVGAGTFQPVKTENALEHKMHGEQLVITRSNLEHLQAANRIIPVGTTSMRSLESMYWLGVQLIHDEYASLEQGFRIPQFVHEQYTELPTVHESLAAILQKMEAEQRQEIVGETEIMIFPGYTFRVCQGLITNFHQPGSTLLLLIAALVGKDWKRIYDEALDQQYRFLSYGDSSVLLP

SEQ ID NO: 72118 - protein, 344 aa, Skermanella aerolata
  REGION 1..344: note = tr|A0A512DQA4|A0A512DQA4_9PROT S-adenosylmethionine:tRNA ribosyltransferase-isomerase; OS = Skermanella aerolata OX=393310 GN=queA PE=3 SV=1
MRTADFDFELPPELIADEPARPRDAARLLEVQCGALADRHVRDLPGLLMPGDLLVYNDTRVIPARLTGKRGEVRVEATLHKREGADTWHVFAKPGKRLRVGDTIVFASDLSAEVMEKRETGDIALRFSVAGADLMAALHRHGVMPLPPYIHRPDGASAKDADDYQTVFAAREGAVAAPTAGLHFTPELLTRLDERGIRRVPVTLHVGAGTFLPVKVDDIRDHRMHAEWGEISEDTARAIRDTRRAGGRIVSIGTTSLRLLETAAADDGTIGPFSGDTDIFITPGFRFKAVDLLLTNFHLPRSTLFMLVSAFAGMERMRAAYAHAISSGYRFYSYGDTSLIGRAP

SEQ ID NO: 72119 - protein, 344 aa, Skermanella aerolata; identical to SEQ ID NO: 72118
  REGION 1..344: note = tr|A0A0D2UKN3|A0A0D2UKN3_9PROT S-adenosylmethionine:tRNA ribosyltransferase-isomerase; OS = Skermanella aerolata KACC 11604 OX=1385368 GN=queA PE=3; SV = 1

SEQ ID NO: 72120 - protein, 345 aa, Skermanella stibiiresistens
  REGION 1..345: note = tr|W9H113|W9H113_9PROT S-adenosylmethionine:tRNA ribosyltransferase-isomerase OS=Skermanella stibiiresistens SB22 OX=1385369 GN=queA PE=3 SV=1
MRTADFDFELPPDRIADQPASPRDASRLLHVGRTLADMRARDLPDLLDPRDLLVYNDTRVIPARLTGRRGEVKVEVTLHKREGADLWLAFCKPGKRLRVGDTIAFAPDLSAQVLDKRESGDVELRFSVGGSELMAALHRHGVMPLPPYIRRPDGALPDDDRNYQTVFAAREGAVAAPTAGLHFTPDLLARLDARGIRRMPVTLHVGAGTFLPVKVDDIRDHRMHSEWGEIGPDTARAIADTRKAGGRIVAVGTTSLRLLETAAAEDGTLAPFSGDTDIFITPGYRFKIVDLLLTNFHLPRSTLFMLVSAFAGLDRMRAAYAHAIASEYRFYSYGDTSLLEKVPQE

SEQ ID NO: 72121 - protein, 338 aa, Skermania sp.
  REGION 1..338: note = tr|A0A554V6W6|A0A554V6W6_9ACTN S-adenosylmethionine:tRNA ribosyltransferase-isomerase; OS = Skermania sp. ID1734 OX=2597516 GN=FOS14_04420 PE=3 SV=1
MMDFALPPELQAAGPPESRGLARDEVRLLVSDTAGLTHAVFRELPTFLRPDDIVVVNNSATLSAAVDARLGEAAVVVHFSTWLDDGSWVIEVRTTDGRPVPWHILDIGTELRLSGGATAVLRQPWLPPARRLWTADIDVAIPAYLARHGRPITYAYLRQRWSAQYYQTAFGTVAGSAEMPSAGRPFTAELVARLVSTGIAVTPITLHCGVSSPETGEPPSPERFAVSQQTADRVNATRAAGGRVIAIGTTVTRALESATGSDGIVHAASGWTDVVLGPQRPAHVVDGLVTGWHAPGASHLDLLEAVAGAEVVRDAYAAALDAGYLWHEFGDSALLVRY

SEQ ID NO: 72122 - protein, 361 aa, Slackia equolifaciens
  REGION 1..361: note = tr|A0A3N0AT23|A0A3N0AT23_9ACTN S-adenosylmethionine:tRNA ribosyltransferase-isomerase; OS = Slackia equolifaciens OX=498718 GN=queA PE=3 SV=1
MKTEDFDYDLPERCIAQEPAAVRDACKMLVMDRKTGALEDRIFRDIYDYLQPGDVLVANDTRVMPARLLGAKRGTGGQAEVFLLRERFDRELKTGSSAVWDVLVRPGKRLKPGSGAIVDFTDAAGEVALSAEIIDWGDDEGKGERVARLTTPRASLDEALHAVGHTPLPPYIKGYAGDEEMYQTVYSNEEKSAAAPTAGLHFTPELIERLKAKGVEWRTVELEVGLDTFRIVDEDDPLQHKMHTELYTVSQEVVDACDAAHARGNRVIAVGTTSVRSLESAFDRELGRLRARQHEATSLYILPGYEFGVVDALITNFHVPRSTLMMLVSAFSTRDNVMAAYRHAIENDYRMLSFGDAMFIH

SEQ ID NO: 72123 - protein, 359 aa, Slackia exigua
  REGION 1..359: note = tr|D0WG61|D0WG61_SLAES S-adenosylmethionine:tRNA ribosyltransferase-isomerase OS=Slackia exigua (strain ATCC 700122 / DSM 15923 / CIP 105133 / JCM 11022 / KCTC 5966/ S-7) OX=649764 GN=queA PE=3 SV=1
MRTDDFDYDLPERCIAQEPAPVRDACRLLVMDRETGALADRIFRDIEGYLNPGDLLVANSTRVMPARLLGHKRTTGGEAEVFLLRERFDVEPKADASAVWDVLVRPGKRLKPGAIVDFVDGEGAVALSAEIIDWGLEGGKGERIARLSTERPSLDEALHAVGRTPLPPYIKHYAGDEEMYQTVYSHDEKSAAAPTAGLHFTPELIERLRAKGVAWKTVELEVGLDTFRIVDEDDPTQHTMHTEHYTVSQEVVDACDACHARGGRVFAVGTTSVRSLESAFDRETGRLHARDHEATSLYILPGFEFGVVDGLITNFHVPRSTLMMLVSAFSTCENVRAAYRHAIESGYRMLSFGDAMLFI

SEQ ID NO: 72124 - protein, 361 aa, Slackia faecicanis
  REGION 1..361: note = tr|A0A3N0AFF6|A0A3N0AFF6_9ACTN S-adenosylmethionine:tRNA ribosyltransferase-isomerase; OS = Slackia faecicanis OX=255723 GN=queA PE=3 SV=1
MRTDDFDYELPERCIAQEPAPVRDACKMLAMDRATGAIEDRIFRDIYDYLQPGDVLVANDTRVLPARLLGAKRGTGGAAEVFLLRERFDVEPKTDSSAIWEVLVRPGKRLKPGSGAVVDFTDAEGNVALSAEVIGWGADEGRGERLVRLTTPLDSLDAALHAVGHTPLPPYIKGYAGDEEMYQTVFSREEKSAAAPTAGLHFTPELIERLREKGVEWRTVELEVGLDTFRVVDEDDPEKHTIHTEFYTVSQDVIDACDAAHARGNRVIAVGTTSVRSLESAYDRELGRMRARDREATSLYILPGYEFGVVDALITNFHVPRSTLMMLVSAFSTRENIMAAYKHAIENDYRMLSFGDAMLIH

SEQ ID NO: 72125 - protein, 361 aa, Slackia heliotrinireducens
  REGION 1..361: note = tr|C7N4D9|C7N4D9_SLAHD S-adenosylmethionine:tRNA ribosyltransferase-isomerase OS=Slackia heliotrinireducens (strain ATCC 29202 / DSM 20476 / NCTC 11029 / RHS 1) OX=4 71855 GN=queA PE=3 SV=1
MRTDDFDYELPPERIAQEPWPVRDECRLLVMDRKTGEVTDRIFRDVAEYLQPGDVLVANETRVLPARLLGSKRGTGGACEVFLLRERFDVEPKTTHTAVWDVLVRPGRRLKPGTGAMVDFEGPDGNVVLSAEIIDWGSDTGKGERIARLSTPLDSFDEALHAAGHTPLPPYIKGYAGDEEMYQTVYSQAETSAAAPTAGLHFTPELIGSLKAKGVEWHTVELQVGLDTFRVVDEDDPAQHAMHTEFYSVPQSVVDACDAAHARGNRVFAVGTTSVRSLESAFDRESGKLRARDHEATCLFILPGYTFGVVDGLITNFHVPRSTLMMLVSAFSTRENIMAAYKHAIDSEYRMLSFGDAMLIC

SEQ ID NO: 72126 - protein, 374 aa, Slackia isoflavoniconvertens
  REGION 1..374: note = tr|A0A3N0I9R5|A0A3N0I9R5_9ACTN S-adenosylmethionine:tRNA ribosyltransferase-isomerase; OS = Slackia isoflavoniconvertens OX=572010 GN=queA PE=3 SV=1
MKTDDFDYDLPERCIAQEPAAVRDACKMLVMNRETGELEDRIFRDIIEYLEPGDVLVANETRVMPARLLGAKRGTGGQAEVFLLRQRMGTAADAYVATEGPDGALGSNQQAIWEVLVRPGKRLKPGSGAIVDFCDAEGNVALSAEIVDWGADSGRGERIARLTTSRPSLDEALHAVGHTPLPPYIKHYAGDEELYQTVYSRHESSAAAPTAGLHFTPELIERLRAKGIEWHTVELEVGLDTFRIVDEDDPEKHTIHTEFYTVPQETVDACDAAHARGNRVIAVGTTSVRSLESAYDRELGCLRARNREATSLYILPGYTFGVVDALVTNFHVPRSTLMMLVSAFSTRENIMAAYKHAIESDYRLLSFGDAMFIE

SEQ ID NO: 72127 - protein, 374 aa, Slackia isoflavoniconvertens
  REGION 1..374: note = tr|A0A369LEY9|A0A369LEY9_9ACTN S-adenosylmethionine:tRNA ribosyltransferase-isomerase; OS = Slackia isoflavoniconvertens OX=572010 GN=queA PE=3 SV=1
MKTDDFDYDLPERCIAQEPAAVRDACKMLVMNRETGELEDRIFRDIIEYLEPGDVLVANETRVMPARLLGAKRGTGGQAEVFLLRQRMGTAADAYVATEGPDGALGSNQQAIWEVLVRPGKRLKPGSGAIVDFCDAEGNVALSAEIVDWGADSGRGERIARLTTTRPSLDEALHAVGHTPLPPYIKHYAGDEELYQTVYSRHESSAAAPTAGLHFTPELIERLRAKGVEWHTVELEVGLDTFRIVDEDDPEKHTIHTEFYTVPQETVDACDAAHARGNRVIAVGTTSVRSLESAYDRELGRLRARNREATSLYILPGYTFGVVDALVTNFHVPRSTLMMLVSAFSTRENIMAAYKHAIESDYRLLSFGDAMFIE

SEQ ID NO: 72128 - protein, 361 aa, Slackia piriformis
  REGION 1..361: note = tr|K0ZB28|K0ZB28_9ACTN S-adenosylmethionine:tRNA ribosyltransferase-isomerase OS=Slackia piriformis YIT 12062 OX=742818 GN=queA PE=3 SV=1
MRTDDFDYELPERCIAQAPAPVRDACKMLAMDRKSGAIEDRIFRDIYDYLEPGDVLVANNTRVMPARLLGAKRGTGGAAEVFLLRERFDVEPKTGSSAVWEVLVRPGKRLKPGSGAVVDFCDKGGQVALSAEVIGWGADEGKGERLVRLTTPLGSLDDALHAVGHTPLPPYIKGYAGDEEMYQTVYSHNEKSAAAPTAGLHFTPELIERLREKGVEWHTVELEVGLDTFRVVDEEDPEKHTIHTEFYTVSQSVVDACDAAHARGNRVIAVGTTSVRSLESAYDRKEGRLRARDHEATSLYILPGYEFGVVDALITNFHVPRSTLMMLVSAFSTRENIMAAYQHAIEGDYRMLSFGDAMFIH

SEQ ID NO: 72129 - protein, 359 aa, Slackia sp.
  REGION 1..359: note = tr|J6IV40|J6IV40_9ACTN S-adenosylmethionine:tRNA ribosyltransferase-isomerase OS=Slackia sp. CM382; OX = 1111137 GN=queA PE=3 SV=1
MRTDDFDYDLPERCIAQEPAPVRDACRLLVMDRETGALADRIFRDIEGYLNPGDLLVANSTRVMPARLLGRKRTTGGEAEVFLLRERFDVEPKADASAVWDVLVRPGKRLKPGAIVDFVDGEGAVALSAEIIDWGLEGGKGERIARLSTERSSLDEALHAVGRTPLPPYIKHYAGDEEMYQTVYSHDEKSAAAPTAGLHFTPELIERLRAKGVAWKTVELEVGLDTFRIVDEDDPTQHTMHTEHYTVSQEVVDACDACHARGGRVFAVGTTSVRSLESAFDREAGRLRARDHEATSLYILPGFEFGVVDGLITNFHVPRSTLMMLVSAFSTCENVRAAYRHAIESGYRMLSFGDAMLFI

SEQ ID NO: 72130 - protein, 345 aa, Smithella sp.
  REGION 1..345: note = tr|A0A1V5DY05|A0A1V5DY05_9DELT S-adenosylmethionine:tRNA ribosyltransferase-isomerase; OS = Smithella sp. PtaU1.Bin162 OX=1811697 GN=queA PE=3 SV=1
MELKDFSYFLPEELIAQHPYPERDRSRMMRLERESGRISDYSFFQLPEFLQKDDVLVINNSRVIPARLFGKKPTGASLEILLLTKREETDTSSVWEVLLRPAKRLRENDIIVLSTDCEAKVLTRISEKKWLLCFSCTGNFENYLNNHGRAPLPPYIKRKNNDEQFVDDLERYQTIYAKHPGSIAAPTAGLHFSAEVMQALRKKGVQIAPVTLHVGYGTFLPITVNSVEDHAMEPEYYEINPEAVEIINNARRVIAVGTTATRTLESIADEKGLIKAQSGFTNLFIYPGHQFRRVNGLITNFHLPESSLFLLVCAFAGTDFIKKAYLHAVDNRYTFYSYGDCMLII

SEQ ID NO: 72131 - protein, 345 aa, Smithella sp.
  REGION 1..345: note = tr|A0A348W567|A0A348W567_9DELT S-adenosylmethionine:tRNA ribosyltransferase-isomerase; OS = Smithella sp. OX=2053614 GN=queA PE=3 SV=1
MELKDFSYFLPDELIAQHPCQKRDQSHLLVLDKKKEKMADFSFFQLPDFLQSGDVLVINDSRVIPARLFGKKPTGGILEILLLTRKTNEKDSQTWEALLRSAGKLQENDVIDLGNKCEAKVLARISDKKWLLEFFSPYGFEAYLNTYGRVPLPPYIKRKRNAESNITDRERYQTIYAKNPGSVAAPTAGLHFSADVLQTLQKKGIQIAPITLHVGYGTFMPVEVNEVEKHVLESEYYEISSESSQIINNARRAIAVGTTSTRTLESVAGNDGYIAAKSGATNCFIYPGYKFKRVDGLLTNFHLPQSSLFLLVCAFAGTDLIKKAYQHAVESRYLFYSYGDCMLII

SEQ ID NO: 72132 - protein, 343 aa, unidentified
  source 1..343: note = Sneathia amnii
  REGION 1..343: note = tr|A0A0E3UTV1|A0A0E3UTV1_9FUSO S-adenosylmethionine:tRNA ribosyltransferase-isomerase; OS = Sneathia amnii OX=187101 GN=queA PE=3 SV=1
MDIESFDFYLPKELIAQHGVEPRDHSRLLALNRKTGKIEHKHFYNLIDYLKKGDVMVINRTKVIPARLIGHKENGVVIECLLLKRLGLNKWEVLLKPAKRLKVGDTLTFLKDKLSLTLLEIKDDGNRVVEFHYEGVFEAILDELGELPLPPYIKEKLEDKNRYQTVYAKEGESVAAPTAGLHFTKELLEKIREKGVIIAEIYLTVGLGTFRPVQCKNIEDHVMHTEEYEVPKETAEQVNLAKKEGRRVVAIGTTSIRTLESSLNEKGELIAQKSSTGIFIYGDYNFKIVDAIVTNFHLPKSTLVMLISAFTGKDNLFNAYDIAVKEKYRFFSLGDAMYIGDNV

SEQ ID NO: 72133 - protein, 343 aa, Sneathiella sp.
  REGION 1..343: note = tr|A0A2E2QKM3|A0A2E2QKM3_9PROT S-adenosylmethionine:tRNA ribosyltransferase-isomerase; OS = Sneathiella sp. OX=1964365 GN=queA PE=3 SV=1
MKVDAFNFTLPPELIADRPAVPREAAKLLVVGKELEDHTVADLPGLLREGDLLVFNDTKVIPARLRGTRRSAKIEVTLHKNVSADGWHAFAKPAKKLKPSDIIRFSDDFTALVTEKFDGGEVALSFSASGPELMEKLMTYGEIPLPPYISSLRAVDEQDRSDYQTIFAKDEGAVAAPTAGLHFTEELLEQFRARGIGMVTTTLHVGAGTFLPVKVENTEDHRMHAEIGILTQATADAINEARAKGGRIVSVGTTSLRLLESAADASGTIHPFNGETDIFITPGYRFKAIDLLITNFHLPKSTLFMLVSAFSGLETMKAAYAHAIAEKYRFYSYGDCSLLYPKQ

SEQ ID NO: 72134 - protein, 343 aa, Sneathiella sp.
  REGION 1..343: note = tr|A0A2G1YYZ2|A0A2G1YYZ2_9PROT S-adenosylmethionine:tRNA ribosyltransferase-isomerase; OS = Sneathiella sp. OX=1964365 GN=queA PE=3 SV=1
MKVDAFDFVLPQELIADRPAVPREAARLLCVGEAISDRHVADLPDLLREGDLLVFNDTKVIPARLRGLRRSAKIEVTLHKNISADTWHAFAKPAKKLKPSDIIVFGDDFTALVAEKFDGGEVALAFSVAGPDLMEKLMLHGEIPLPPYISSMRPVDEQDRDDYQTIFAKDEGAVAAPTAGLHFTEDLMARFRARGVESVATTLHVGAGTFLPVKAEDTDDHKMHSEIGILTSAAASKINQCRENGGRIVAIGTTSLRLLESAADTNGIVHPFHRETDIFITPGYRFKAVDLLITNFHLPKSTLFMLVSAFSGMDKMHAAYAHAIDKKYRFYSYGDCSLLYPGS

SEQ ID NO: 72135 - protein, 375 aa, unidentified
  source 1..375: note = Snodgrassella alvi
  REGION 1..375: note = tr|X2H6G8|X2H6G8_9NEIS S-adenosylmethionine:tRNA ribosyltransferase-isomerase OS=Snodgrassella alvi wkB2; OX = 1196094 GN=queA PE=3 SV=1
MADKGNMLLLRSLCKPAYNMSFAFFGHIYMHINDFDFDLPPELIAQHPPAERGSSRLLVALPGQSPADSEFIRLADYVAAGDVLVFNNTRVMKARLFGRKASGGQIEALIERVLDNHTALAHVRSSKSPKPGTELIFEGGLHAQMQARQGELFVLHFSGDKTVWELLEAHGHLPLPPYITRSADHDDDERYQTIYAKYEGAVAAPTAGLHFTDTILQQLRDKGVHLTEVTLHVGAGTFQPVRVENIAEHHMHSEWYDVSEEVVAEIEAAQARGNKIWAVGTTAVRALESAARSGKLQAGQGDTNIFITPGYEFKVIDRMITNFHLPKSTLLMLVSAFSGYDEIRAIYQHAIGAGYRFFSYGDAMLLGNLAKTKTE

SEQ ID NO: 72136 - protein, 346 aa, unidentified
  source 1..346: note = Snodgrassella alvi
  REGION 1..346: note = tr|A0A2N9XSH5|A0A2N9XSH5_9NEIS S-adenosylmethionine:tRNA ribosyltransferase-isomerase; OS = Snodgrassella alvi OX=1196083 GN=queA PE=3 SV=1
MHINDFDFDLPPELIAQHPPAVRGSSRLLVALPGQQPADSEFTRLADYIAAGDVLVFNNTRVMKARLFGHKASGGQIEALIERVLDAHTALAHVRSSKSPKPGTELIFEGGMQAQMQARQGELFILHFAGEQTVWELLAAHGHLPLPPYITRSADNDDDERYQTVYAKHEGAVAAPTAGLHFTDTIMQQLRDKGVHLAEVTLHVGAGTFQPVRVENIAEHHMHSEWYDVSEKVVAEIEAAHARGNKVWAVGTTAVRALESAARSGKLQAGQGDTNIFITPGYQFKVIDRMITNFHLPKSTLLMLVSAFSGYDEIRAIYQHAIAAGYRFFSYGDAMLLGNLAQTKTE

SEQ ID NO: 72137 - protein, 346 aa, unidentified
  source 1..346: note = Snodgrassella sp.
  REGION 1..346: note = tr|A0A1C4AU26|A0A1C4AU26_9NEIS S-adenosylmethionine:tRNA ribosyltransferase-isomerase; OS = Snodgrassella sp. R-53583 OX=1798181 GN=queA PE=3 SV=1
MHINDFDFDLPPELIAQHPPAVRGSSRLLVALPGQQPADSEFTRLADYIAAGDVLVFNNTRVMKARLFGHKASGGQIEALIERVLDAHTALAHVRSSKSPKPGTELIFEGGMHAQMQARQGELFILHFAGEQTVWELLAAHGHLPLPPYITRSADNDDDERYQTVYAKHEGAVAAPTAGLHFTDTIMQQLRDKGVHLAEVTLHVGAGTFQPVRVENIAEHHMHSEWYDVSEKVVAEIEAAHARGNKVWAVGTTAVRALESAARSGKLQAGQGDTNIFITPGYQFKVIDRMITNFHLPKSTLLMLVSAFSGYDEIRAIYQHAIAAEYRFFSYGDAMLLGNLAQTKTE

SEQ ID NO: 72138 - protein, 361 aa, unidentified
  source 1..361: note = Snowella sp.
  REGION 1..361: note = tr|A0A2W7B943|A0A2W7B943_9CYAN S-adenosylmethionine:tRNA ribosyltransferase-isomerase; OS = Snowella sp. OX=2164131 GN=queA PE=3 SV=1
MNPNELLSSYDYTLPPELIAQSPVIPRDSSRLLVIQTSTHHHHQRFYDLPQYLEPNDLLVLNNTRVIPARLYGQKSTGTSVEILLLEEKSPDRWLALVKPGKKLKVGSEITFYPSQTSDPNLTLTATVLERDSETGGRILQFFPPSGTSFWDILEQFGEIPFPPYVTQSEAQADQYQTIYAQEPGAVAAPTAGLHFTDELLENLANKGIQTAQITLHVGVGTFRPVETENIREHTMHQEWIEVPQITVDKILATKAKGGRIIAIGTTSVRALEGAAQANLPELLTAYRGKTNLFIYPGYQWQIVDGLITNFHLPKSSLLMLVSALIGRERLLSLYQEAIQENYRFYSFGDAMLILPTARRS

SEQ ID NO: 72139 - protein, 353 aa, Sodalis glossinidius
  REGION 1..353: note = tr|A0A193QGX6|A0A193QGX6_SODGM S-adenosylmethionine:tRNA ribosyltransferase-isomerase; OS = Sodalis glossinidius (strain morsitans) OX=343509; GN = queA PE=3 SV=1
MRVADFSFALPDNLIARYPQAQRSACRLLSLDGQTGALAHQVFTDLLEELAPGDLLVFNNTRVIPARLFGRKVSGGKIEVLVERVLDDKRVLAHVRASKAPKPGSALLLGDDDSIAATMVARHDALFELRFDDARDVLTLLNDAGHMPLPPYIDRPDDVADRELYQTVYGERPGSVAAPTAGLHFDEPLLAALRAKGVEMAFVTLHVGAGTFQPVRVDQIEHHQMHSEYAEVPQEVVDAVLACKARGNRVVAVGTTAVRSLESAAAAGEQALTPFFGDTSIFIYTGYQFRVVDVLITNFHLPESTLIMLVSAFAGYRHTLAAYREAVAQAYRFFSYGDAMFITRNPAAAAERG

SEQ ID NO: 72140 - protein, 353 aa, Sodalis glossinidius; identical to SEQ ID NO: 72139
  REGION 1..353: note = sp|Q2NVA5|QUEA_SODGM S-adenosylmethionine:tRNA ribosyltransferase-isomerase OS=Sodalis glossinidius (strain morsitans) OX=343509 GN=queA PE=3 SV=1

SEQ ID NO: 72141 - protein, 357 aa, unidentified
  source 1..357: note = Sodalis praecaptivus
  REGION 1..357: note = tr|W0HW15|W0HW15_9GAMM S-adenosylmethionine:tRNA ribosyltransferase-isomerase OS=Sodalis praecaptivus; OX = 1239307 GN=queA PE=3 SV=1
MRVADFSFELPDNLIARYPQAERSACRLLSLDGQTGALAHQVFTDLLEKLAPGDLLVFNNTRVIPARLFGRKVSGGKIEVLVERVLDDKRVLAHVRASKAPKAGAALLLGDDDSIAATMVARHDSLFELRFDDPRDVLTLLNDAGHMPLPPYIDRPDEAADRELYQTVYGERPGAVAAPTAGLHFDEPLLAALRAKGVAMAFVTLHVGAGTFQPVRVDRIEQHQMHSEYAEVPQEVVDAVLACKARGNRVVAVGTTSVRSLESAAAAAGENTLAPFFGDTRIFIYPGYHFRVIDALITNFHLPESTLIMLVSAFAGYRHTLAAYREAVAQAYRFFSYGDAMFITRNPAAAQERVGES

SEQ ID NO: 72142 - protein, 363 aa, Sodalis sp.
  REGION 1..363: note = tr|A0A1J7C552|A0A1J7C552_9GAMM S-adenosylmethionine:tRNA ribosyltransferase-isomerase; OS = Sodalis sp. TME1 OX=1912097 GN=queA PE=3 SV=1
MRVADFSFELPDNLIARYPQAERSACRLLSLDGQTGALAHQVFTDLLDKLAPGDLLVFNNTRVIPARLFGRKVSGGKIEVLVERVLDDKRVLAHVRASKAPKAGVALLLGDDDSIAATMVARHDSLFELRFDDPRDVLTLLNDAGHMPLPPYIDRPDEAADRELYQTVYGERPGAVAAPTAGLHFDEPLLAALRAKGVAMAFVTLHVGAGTFQLVRVDRIEQHQMHSEYAEVPQEVVDAVLACKARGNRVVAVGTTSVRSLESAAAAAGENSLAPFFGDTRIFIYPGYHFRVIDALITNFHLPESTLIMLVSAFAGYRHTLAAYREAVAQAYRFFSYGDAMFITRTGTLALPRSAWVSRNRAG

SEQ ID NO: 72143 - protein, 357 aa, Sodalis sp.
  REGION 1..357: note = tr|A0A4R1NHF5|A0A4R1NHF5_9GAMM S-adenosylmethionine:tRNA ribosyltransferase-isomerase; OS = Sodalis sp. 159R OX=2529856 GN=queA PE=3 SV=1
MRVAEFSYELPEALIADYPLTERSACRLLALDGPSGEMTHGVFTDLLDRLAPGDLLVFNNTRVIPARLFGRKLSGGKIEVLVERVLDDHRVLAHVRASKSPKPGAALLLGDDESIAATMVARRDALFELRFDDDRDVLTLLNAAGHVPLPLYIHRHDEETDRESYQTVYSERPGAVAAPTAGLHFDQPMLDALRDKGIEMAFVTLHIGAGTFQPVRVENLEEHVMHSEYAEVPQEVVDAVLACKKRGNRVVAVGTTSVRSLESAAQAARGAVIAPFFGDTDIFIFPGYRFCIIDALITNFHLPESTLIMLVSAFAGYKHTMAAYHEAVALEYRFYSYGDAMFITRNDLAALDAIGER

SEQ ID NO: 72144 - protein, 357 aa, unidentified
  source 1..357: note = Unknown
  REGION 1..357: note = tr|A0A151UL77|A0A151UL77_9GAMM S-adenosylmethionine:tRNA ribosyltransferase-isomerase; OS = Sodalis-like endosymbiont of Proechinophthirus fluctus; OX = 1462730 GN=queA PE =3 SV=1
MRVADFSFKLPDNLIARYPQVERSACRLLSLDGQTGVLAHQVFIDLLDKLAPGDLLVFNNTWVIPALLFGRKVSGGKIEVLVERVLDDKRVLAHVRASKAPKADAELLLGDDNSIATTMVARHNSLFELRFEDPRDVLTLLNDAGHMPLPPYIDRPDDTADRELYQTVYGERRGAVAAPTAGLHFDEPLLEALRAKGVVMAFVTLHVGAGTFQPVRVDRIEQHQMHSEYTEVTQEVVDAVLACKSRGNRVVAVGTTSARSLESAAAASGENTLAPFFGDTRIFIYPGYQFRVIDALITNFHLPESTLIMLVSAFAGYRHTLAAYREAVAQAYRFFSYGDAMFITRNPAAARERVGEP

SEQ ID NO: 72145 - protein, 340 aa, Soehngenia sp.
  REGION 1..340: note = tr|A0A4Z0D548|A0A4Z0D548_9FIRM S-adenosylmethionine:tRNA ribosyltransferase-isomerase; OS = Soehngenia sp. 1933P OX=2562294 GN=queA PE=3 SV=1
MKTEDFNYKLPKELIAQVPLENRTSSRLMIVNRETEEISNNKFTDIVDELNSGDCLVLNDTKVMPARLFGHRPSREEKIEVLLLKRISENIWECLVKPGKKMREDTLIEFGDILKAKVLHITEGGIRVIEFFYSGVFEEVLDELGEMPLPPYITQKLEEKERYQTVYSKNLGSAAAPTAGLHFDNVILNEIENKGVNIAYLTLHVGLGTFRPVKVERIEEHKMHSEYYEINEDCANKINESKAKGGKIVSVGTTSLRTLETVADENGIVKAQSGWTDIFIYPGYRFKIVDELITNFHLPESTLLMLICAFANKDLIMKAYKIAIEEKYRFFSFGDAMLIK

SEQ ID NO: 72146 - protein, 338 aa, unidentified
  source 1..338: note = Solemya elarraichensis
  REGION 1..338: note = tr|A0A1T2L3E8|A0A1T2L3E8_9GAMM S-adenosylmethionine:tRNA ribosyltransferase-isomerase; OS = Solemya elarraichensis gill symbiont OX=1918949 GN=queA; PE = 3 SV=1
MKRSDFQFDLPEELIAQFPPEKRGDSRLLCLNESNGALDDKHFSDLPDLLEKGDLLVFNDTRVMKARLHGVKETGGQVEILVERLIDDSYALAHVRASKSPKPGTRLLIDDGIIEVRGREGDLFELTCTSPGFATLMETKGHVPLPPYIEREDVDEDLERYQTIYGDKVGAVAAPTAGLHFTHELLERLDAKGIHSARVTLHVGAGTFQPVRVDDLADHVMHSEWLEVAESTCEQVRACKEAGGRVVAVGTTSVRALESAAASGQLEAYVGDTELFITPGYKFSVIDALVTNFHLSESTLLMLVSALGGYDNIKRAYQHAIDQRYRFFSYGDAMLITL

SEQ ID NO: 72147 - protein, 349 aa, unidentified
  source 1..349: note = Solemya pervernicosa
  REGION 1..349: note = tr|A0A1T2LB47|A0A1T2LB47_9GAMM S-adenosylmethionine:tRNA ribosyltransferase-isomerase; OS = Solemya pervernicosa gill symbiont OX=642797 GN=queA; PE = 3 SV=1
MKRTDFHYDLPDELIAQRPLPERSASRLLVLDGERGSTQDLQFESVVDLLQTEDLLIFNNTRVIPARLYGQKESGGKVEVLIERVVDEHHALAHIRSSKSPRPGSRLRLENAFDVEVTGRQDALFELRVDSEKPLLELLDRHGHIPLPPYIERAAEQDDLSRYQTVYAERPGAVAAPTAGLHFDDELLKRIDAKGIERAFTTLHVGAGTFQPVRADKLEDHLMHSEHIEVSAALVERIEAARQRGGRIVAVGTTVVRALESAAQSGKLEPYSGETSIFIYPGYRFRVIDALITNFHLPESTLLMLISAFSGYENVMASYRHAVKQGYRFFSYGDAMFCTPSNKTEEVCR

SEQ ID NO: 72148 - protein, 342 aa, unidentified
  source 1..342: note = Solemya velesiana
  REGION 1..342: note = tr|A0A1T2KTK4|A0A1T2KTK4_9GAMM S-adenosylmethionine:tRNA ribosyltransferase-isomerase; OS = Solemya velesiana gill symbiont OX=1918948 GN=queA PE=3; SV = 1
MQRSDFNYHLPEELIAQYPPAKRGDSRLLCLNGEDGEVADRHFSDLPDLLSPEDLLVFNDTRVIPARMHGRKESGGKVEVLIERVIASRRALAHVRASKSPKPGSRILIGEQVLNVIRRQGDLFELEAVDVDLMDLMNQSGHMPLPLYISRDDGELDEERYQTVYAERPGAVAAPTAGLHFDQPMLNRLAEKGIESARVTLHVGAGTFQPVRVDNLDEYVMHSEYLEVSEAVCEKVRETRARRGRVVAVGTTCVRSLEAASADGEIKPFQGDTRLFIKPGYRFRSVDAMVTNFHLPESTLLMLVAAFVGYEVVMAAYRHAVEQHYRFFSYGDAMFLKGKGWK

SEQ ID NO: 72149 - protein, 338 aa, Solemya velum
  REGION 1..338: note = tr|A0A0B0H6T0|A0A0B0H6T0_SOVGS S-adenosylmethionine:tRNA ribosyltransferase-isomerase; OS = Solemya velum gill symbiont OX=2340 GN=queA PE=3 SV=1
MKRTDFQFELPEELIAQFPPEKRGDSRLLSLNSSNGTVDDKHFSDLPDMLDEGDLLVFNDTRVMKARLHGVKETGGQVEILLERLLDDSYALAHVRASKSPKPGTRLLIDDGIIEVRGREGDLFELTCTHPGFASLMENKGHVPLPPYIERDDEVEDLERYQTVYGEKVGAVAAPTAGLHFTHELLERLDAKGIHSARVTLHVGAGTFQPVRVDNLSDHVMHSEWLEVAELTCEQVRACKEEGRRVVAVGTTSVRALESAATSGQLKPYVGDTELFITPGYQFNVIDALVTNFHLSESTLLMLVSALGGVDNIRHAYQHAIDQRYRFFSYGDAMLISP

SEQ ID NO: 72150 - protein, 338 aa, Solemya velum
  REGION 1..338: note = tr|A0A1T2CIB4|A0A1T2CIB4_SOVGS S-adenosylmethionine:tRNA ribosyltransferase-isomerase; OS = Solemya velum gill symbiont OX=2340 GN=queA PE=3 SV=1
MKPTDFQFELPEELIAQFPPEKRGDSRLLSLNSSNGTVDDKHFSDLPDMLDEGDLLVFNDTRVMKARLHGVKETGGQVEILVERLLDDSYALAHVRASKSPKPGTRLLIDDGIIEVRGREGDLFELTCTHPGFASLMENKGHVPLPPYIERDDEVEDLERYQTVYGEKVGAVAAPTAGLHFTHELLERLDAKGIHSARVTLHVGAGTFQPVRVDNLSDHVMHSEWLEVAELTCEQVRACKEEGRRVVAVGTTSVRALESAATSGQLKPYVGDTELFITPGYQFNVIDALVTNFHLSESTLLMLVSALGGVDNIRHAYQHAIDQRYRFFSYGDAMLISP

SEQ ID NO: 72151 - protein, 347 aa, unidentified
  source 1..347: note = Solibacillus isronensis
  REGION 1..347: note = tr|K1KP15|K1KP15_9BACL S-adenosylmethionine:tRNA ribosyltransferase-isomerase OS=Solibacillus isronensis B3W22 OX=1224748 GN=queA PE=3 SV=1
MNVKVEDFDFYLPEELIAQTPLLDRTASRLMVVNPNSLEVEHHTFGHILDELNAGDCLVLNDTRVLPARLMGVKADTGANIELLLLKQTNDDEWETLVKPAKRVKTGTVVTFGDGLLTATCTGELDHGGRTFKFTYDGIFYEILDQLGEMPLPPYIREKLEDQDRYQTVYAKERGSAAAPTAGLHFTQPLIEAIKAKGVEVVFITLHVGLGTFRPVSVDSIEDHDMHSEFYSVSEEAAAVIERVKQAGGKVISVGTTSTRTLETVASKNDGKIVASHGWTNIFIYPGYEYKAIDGLITNFHLPKSTLVMLVSALASKETIMNAYEQAVKEKYRFFSFGDAMFIRPAK

SEQ ID NO: 72152 - protein, 345 aa, Solibacillus silvestris
  REGION 1..345: note = tr|F2F3F9|F2F3F9_SOLSS S-adenosylmethionine:tRNA ribosyltransferase-isomerase OS=Solibacillus silvestris (strain StLB046) OX=1002809 GN=queA PE=3 SV=1
MKVEDFDFYLPEELIAQTPLLDRTASRLMVVNPNSLEVEHHTFGHILDELNAGDCLVLNDTRVLPARLMGVKADTGANIELLLLKQTNDDEWETLVKPAKRVKTGTVVTFGDGLLTATCTGELDHGGRTFKFTYDGIFYEILDQLGEMPLPPYIREKLEDQDRYQTVYAKERGSAAAPTAGLHFTQPLLEAIKAKGVEVVFITLHVGLGTFRPVSVDSIEDHDMHSEFYSVSEEAAAVIERVKQAGGKVISVGTTSTRTLETVASKNDGKIVASHGWTNIFIYPGYEYKAIDGLITNFHLPKSTLVMLVSALASKETIMNAYEQAVKEKYRFFSFGDAMFIRPAK

SEQ ID NO: 72153 - protein, 345 aa, Solibacillus silvestris
  REGION 1..345: note = tr|A0A1A7M0R9|A0A1A7M0R9_9BACL S-adenosylmethionine:tRNA ribosyltransferase-isomerase; OS = Solibacillus silvestris OX=76853 GN=queA PE=3 SV=1
MKVEDFDFYLPEELIAQTPLLDRTASRLMVVNPNSLEVEHHTFGHILDELNAGDCLVLNDTRVLPARLMGVKADTGANIELLLLKQTNDDEWETLVKPAKRVKTGTVVTFGDGLLTATCTGELDHGGRTFKFTYDGIFYGILDQLGEMPLPPYIREKLEDQDRYQTVYAKERGSAAAPTAGLHFTQPLLEAIKAKGVEVVFITLHVGLGTFRPVSVDSIEDHDMHSEFYSVSEEAAAVIERVKQAGGKVISVGTTSTRTLETVASKNDGKIVASHGWTNIFIYPGYEYKAIDGLITNFHLPKSTLVMLVSALASKETIMNAYEQAVKEKYRFFSFGDAMFIRPAK

SEQ ID NO: 72154 - protein, 345 aa, Solibacillus sp.
  REGION 1..345: note = tr|A0A2D1SW17|A0A2D1SW17_9BACL S-adenosylmethionine:tRNA ribosyltransferase-isomerase; OS = Solibacillus sp. R5-41 OX=2048654 GN=queA PE=3 SV=1
MKVEDFDFQLPEELIAQTPLLDRTASRLMVVNPNSLDLEHHTFAKILDEFQAGDCLVLNDTRVLPARLMGVKPDTGANIEVLLLKQTNDDEWETLVKPAKRIKVGTVVTFGEGLLTATCTGELEHGGRLFKFDYDGIFYEILEQLGEMPLPPYIREKLDDQDRYQTVYAKERGSAAAPTAGLHFTEPLLDAIRAKGVEVVFVTLHVGLGTFRPVSVDSIENHDMHSEFYSVTEEAAATINRVKANGGNIISVGTTSTRTLETVASKNDGKIVAEQGWTSIFIYPGYEYKAIDGLITNFHLPKSTLVMLVSALASKETILHAYETAVEEQYRFFSFGDAMFIRPKK

SEQ ID NO: 72155 - protein, 352 aa, unidentified
  source 1..352: note = Solibacter usitatus
  REGION 1..352: note = sp|Q01SU0|QUEA_SOLUE S-adenosylmethionine:tRNA ribosyltransferase-isomerase OS=Solibacter usitatus (strain Ellin6076) OX=234267 GN=queA PE=3 SV=1
MNLSEFDYHLPDELIAQEALADRAASRMLVVHREQGRWEDRCFRDLPEFLRPGDCLVLNDSRVFPARLFGHRSGVHSLAVGKNNPKRHEFLSGAVEVFLLRAVSQDGRDWQALVRPGRKMRTGERIVFDEGLEAEIIARGEFGERTVRFLGSGDLYAAFDRIGHVPLPPYIKRDDSPADRERYQTVFAREKGSVAAPTAGLHFTPEVIERCQAAGADVATVTLHVGLGTFQPLHQEVVEEVKLHTEHYRITADNAGKIGAATRVVAVGTTSVRTLETAARDGVLEGETDIFLYPGVPFRRTGAMLTNFHLPRTSLLVLVSAFAGKDLMLAAYRHAVEARYRFYSYGDCMLIV

SEQ ID NO: 72156 - protein, 351 aa, unidentified
  source 1..351: note = Solimicrobium silvestre
  REGION 1..351: note = tr|A0A2S9H0Y2|A0A2S9H0Y2_9BURK S-adenosylmethionine:tRNA ribosyltransferase-isomerase; OS = Solimicrobium silvestre OX=2099400 GN=queA PE=3 SV=1
MHQPTYSLSDFNFDLPQELIAQTPLSKRSASRLLQVAGSTLIDSNFEDLVQQLSKDDVLVFNDTRVLKARFFGIKNTGGKVEVLVERVLFNNPEQHSVLAQIRASKSPAIGSTIRLADAFEVEVGERAGEFYTLHFPSDVFDLLEAYGKLPLPPYIEHAADDYDETRYQTVYSKVPGAVAAPTAGLHFDEALLEQCRVKGVQFAYVTLHVGAGTFQPVRHEDLSQHDMHSEWYSVPEETLAAVKKAQAAGRDVIAVGTTSLRALESASQSGQLEAGNANTRLFITPGYCFKTVTRLVTNFHLPKSTLLMLVSAFAGYDEIRAAYQHAIAQKYRFFSYGDAMLLTNNVKKES

SEQ ID NO: 72157 - protein, 342 aa, Solimonas aquatica
  REGION 1..342: note = tr|A0A1H9H5D3|A0A1H9H5D3_9GAMM S-adenosylmethionine:tRNA ribosyltransferase-isomerase; OS = Solimonas aquatica OX=489703 GN=queA PE=3 SV=1
MRRADFHYELPPELIAQHPSAERSASRLLHVGATLADRHIRELPQLLSPGDLLVFNDTRVIPARLYGRKSTGGQVEILVERVLDARRFLAQLGVSKKPKAGGVIELGEDRLTVLGREDDLFELQLQGEGEVMAFLERAGRLPLPPYITHAPDAGDAERYQTVFAREPGAVAAPTAGLHFDAPLLAALKARGVQTATLTLHVGAGTFQPLRVEDLSQHRMHAERYVIDAALCEALAQTRARGGRIVAVGTTVTRALESAAAAQDSAALQPMRGETRLFITPGYRFAVVQRLLTNFHLPESTLMMLVCAFGGHERMMAAYRHAVAARYRFFSYGDAMLIEPETP

SEQ ID NO: 72158 - protein, 339 aa, unidentified
  source 1..339: note = Solimonas fluminis
  REGION 1..339: note = tr|A0A2S5TKZ5|A0A2S5TKZ5_9GAMM S-adenosylmethionine:tRNA ribosyltransferase-isomerase; OS = Solimonas fluminis OX=2086571 GN=queA PE=3 SV=1
MRKSDFHYELPEELIAQHPAARRSASRLLHLQPGGGLADRQVRELPELLRPDDLLVFNDTRVIPARLFGRKPSGGKVEILVERVLDEQDFMAQLGVSKKPQAGGLIEVGEDRLTVLGRDEDLFRLRYDGPGAVMDFLQRAGRLPLPPYITHVPDGEDAERYQTVFAQNPGAVAAPTAGLHFDEELLAALRARGLRTATLTLHVGAGTFQPLRVDDLSQHRMHSERYALSPDLVQAIADTRARGGRVVAVGTTVTRALESAAVQNGLQPGEGETRLFITPGYRFAVVDALLTNFHLPESTLMMLVSAFGGYERLMAAYRHAVAQRYRFFSYGDAMLIDNG

SEQ ID NO: 72159 - protein, 340 aa, Solimonas sp.
  REGION 1..340: note = tr|A0A346N304|A0A346N304_9GAMM S-adenosylmethionine:tRNA ribosyltransferase-isomerase; OS = Solimonas sp. K1W22B-7 OX=2303331 GN=queA PE=3 SV=1
MRRSDFQYELPPELIAQHPAARRSASRLLQLRPDGSLADRQIRELPELLRPDDLLVFNDTRVIPARLYGRKPTGGKVEILVERVLDEREFLAQLGVSKKPKAGGLVEVGEDRLTLLGRDDDLFRLRYDGPGTVMDFLQRAGQLPLPPYITHTPGGEDAERYQTVFASNPGAVAAPTAGLHFDEELLAALRARGLRTATLTLHVGAGTFQPLRVDDLSEHRMHSERYQLGTELLQAIAETRERGGRVVAVGTTVTRALESAAAQNGLQAGEGETRLFITPGYRFAVVDVLLTNFHLPESTLLMLVSAFGGYERLMGAYRHAVEQRYRFFSYGDAMLIENPG

SEQ ID NO: 72160 - protein, 351 aa, unidentified
  source 1..351: note = Solirubrobacterales bacterium
  REGION 1..351: note = tr|A0A2W5Y8G2|A0A2W5Y8G2_9ACTN S-adenosylmethionine:tRNA ribosyltransferase-isomerase; OS = Solirubrobacterales bacterium OX=1909295 GN=DLM63_02270; PE = 3 SV=1
MTTALAGQLPELREARVPPEARGLARDDVRLLVASLPGGELRHTRFAELPELLAPGDVVVVNSSATLPAALPAHRADGGALALHLSTPAPDDEGDRWVVELRRDGARVHDGRAGERLALQGGASAELLAPYLGSRLWVAALFLPLPLHDYLARHGEPIRYGHVDGRWPLSAYQTPYATEPGSAEMPSAGRPFSAELVTRLVARGIDVAPLLLHTGVSSLERGERPYPERFAVSRATAERVNLARRLGGRVVAVGTTVVRALESACDEDGLVRARSGWTDLVVEPARGVRAVDGIVSGFHDPDASHLQLLDSIAGGRVLERCYAAAAQAGYLRHEFGDLHLLLPRRTLRGVQ

SEQ ID NO: 72161 - protein, 248 aa, unidentified
  source 1..248: note = Solirubrobacterales bacterium
  REGION 1..248: note = tr|A0A2W5ZT42|A0A2W5ZT42_9ACTN S-adenosylmethionine:tRNA ribosyltransferase-isomerase; OS = Solirubrobacterales bacterium OX=1909295 GN=DLM63_00525; PE = 3 SV=1
MVELRTHERLRFLNPPIGARLELPGGAHAQLLARHLGSDRLCVASLALGEPLDAYLGKHGRPIRYRPDGESWPIEAHHTIFALEPGSAEMPSAGRPFTTELVTELVARGVLVAPVTLHTGVSSLERCEAPYPERYRVPAATARLANAVRAWGGRVIAVGTTVVRALETVAGLDGAIHPGEGSTSLIVTPERGLRALDGVLTGWHESDSSHLELLQAAAGPDLLERCYRAARAEGYVGHEFGDLNLILP

SEQ ID NO: 72162 - protein, 407 aa, unidentified
  source 1..407: note = Solirubrum puertoriconensis
  REGION 1..407: note = tr|A0A0W8EDX4|A0A0W8EDX4_9BACT S-adenosylmethionine:tRNA ribosyltransferase-isomerase; OS = Solirubrum puertoriconensis OX=1751427 GN=queA PE=3 SV=1
MHTPDPRQLSIQDFTYDLPAERIAPEPLPDRDSSRLLVYRQGAIQNRIFRELPNELPNDALLVFNNTKVVRARLYLHKPTGGQIELFCLEPVAPSRAIEPAMQQTGECVWRCLVGNGKRWKIGTVQASFTTPDGQTAVLEAERDAAEEGSSLIRFRWQPAELPFAQVLAGAGRLPLPPYLNREANPTDDERYQTVYAAHDGAVAAPTAGLHFTERVLQALQARGIGSAQLTLHVGAGTFQPVKAAQMADHAMHSEPISATRQVLRQLIAHAPRPIIAVGTTSLRTLESLYWLGCQVVRGGSLSGQVQQWEPYEHTTEVPMQTALQALLDELERRGDDALQASTQLLIAPGYRFRVVQGLITNFHQPESTLLLLVAALLGPGWRTVYDHALANNYRFLSYGDSSLLLP

SEQ ID NO: 72163 - protein, 350 aa, unidentified
  source 1..350: note = Solirubrum puertoriconensis
  REGION 1..350: note = tr|A0A0W8EMX7|A0A0W8EMX7_9BACT S-adenosylmethionine:tRNA ribosyltransferase-isomerase; OS = Solirubrum puertoriconensis OX=1751427 GN=queA PE=3 SV=1
MKLSEFKFELPDNLVAQHPAKNRDESRLMVVHRDSGRIEHRTFKDIIEYFDDGDVMVVNDTKVFPARLYGNKEKTGAKIEVFLLRELNKELHLWDVLVDPARKIRVGNKLYFDDDGIMVAEVIDNTTSRGRTIKFLFDGPEEEFYKALHDLGETPLPKEFIPRDPEASDKERYQTIYAKHTGAVAAPSAGLHFTREVIKRLEIKGVEMVPVTLHVGLGTFRPVDVEDLTKHKMDSENFIVPTDSASMVNRALDHKKRVCAVGTTTMRAMESSVSANARLKPTEGWTDKFIFPPYDFKIANTLLTNFHMPESTLMMMAAAFAGYDLLIEAYQTAIKEKYKFFTYGDAMLIL

SEQ ID NO: 72164 - protein, 349 aa, Solitalea canadensis
  REGION 1..349: note = tr|H8KR02|H8KR02_SOLCM S-adenosylmethionine:tRNA ribosyltransferase-isomerase OS=Solitalea canadensis (strain ATCC 29591 / DSM 3403 / NBRC 15130 / NCIMB 12057 / USAM9D) OX=929556 GN=queA PE=3 SV=1
MKLSQFSFHLPESLVAHKPSETRDEARLMVLHKDSGKIEHKIFKDVLDYFDDKDVMILNNTKVFPARMYGNKEKTGAQIEVFLLRELNREMRLWDVLVDPARKIRVGNKLYFGDNDLLIAEVVDNTTSRGRTIRFLFDGTDEEFREAIEILGETPLPKYIKRKATAEDKERYQTVFAKNEGAVAAPTAGLHFSRELLKRLELKGVDFAEVTLHVGLGTFRPVEVEDLTKHKMDSEHFIIEQKDADIVNHALEQKRRICAVGTTSMRAIESAVSASRTLKAANEWTSKFIFPPYDFSIANTMITNFHTPESTLLMMVAAFGGYEHVMNAYEVAVKEKYHFYSYGDAMLII

SEQ ID NO: 72165 - protein, 349 aa, Solitalea koreensis
  REGION 1..349: note = tr|A0A521DCX8|A0A521DCX8_9SPHI S-adenosylmethionine:tRNA ribosyltransferase-isomerase; OS = Solitalea koreensis OX=543615 GN=queA PE=3 SV=1
MKLSQFSFNLPESLVASTPSEQRDESRLMVLHKDTGKIEHKIFKDILGYFDDKDVMILNNTKVFPARMYGNKEKTGAQIEVFLLRELNREMRLWDVLVDPARKIRVGNKLYFGENDLLIAEVVDNTTSRGRTIRFLFDGTDEEFREAIEILGETPLPKYIKRKATPEDKDRYQTVFAKNEGAVAAPTAGLHFSRELLKRLELKGVEFAEVTLHVGLGTFRSVEVEDLTKHKMDSEHFIIEQREVDKVNKALEEKRRICAVGTTAMRAIESAVSASRILKPANEWTSKFIFPPYDFSIANSMITNFHTPESTLLMMVAAFGGYEHVMNAYEVAVKEKYRFYSYGDAMLII

SEQ ID NO: 72166 - protein, 349 aa, unidentified
  source 1..349: note = Solitalea longa
  REGION 1..349: note = tr|A0A2S5A0W8|A0A2S5A0W8_9SPHI S-adenosylmethionine:tRNA ribosyltransferase-isomerase; OS = Solitalea longa OX=2079460 GN=queA PE=3 SV=1
MKLSQFSFHLPESLVAHKPSETRDEARLMVLHKDSGKIEHKIFKDVLDYFDDKDVMILNNTKVFPARMYGNKEKTGAQIEVFLLRELNKEMRLWDVLVDPARKIRVGNKLYFGDNDLLVAEVVDNTTSRGRTIRFLFDGTDEEFREAIEILGETPLPKYIKRKATAEDKERYQTVFAKNEGAVAAPTAGLHFSRELLKRLELKGVDFAEVTLHVGLGTFRPVEVEDLTKHKMDSEHFIIEQKDADIVNHALEQKRRICAVGTTSMRAIESAVSAGRTLKAANDWTSKFIFPPYDFSIANCMITNFHTPESTLLMMVAAFGGYEHIMNAYEVAVKEKYNFYSYGDAMLII

SEQ ID NO: 72167 - protein, 345 aa, Solobacterium moorei
  REGION 1..345: note = tr|A0A412PIU4|A0A412PIU4_9FIRM S-adenosylmethionine:tRNA ribosyltransferase-isomerase; OS = Solobacterium moorei OX=102148 GN=queA PE=3 SV=1
MKWKTSDFDYNLPEELIAQTPLLDRSSSRMLVIHNTEKKYEDKHFYDIVDYLHAGDVLVRNNTRVIPARLFGTKEETGAHVELLLLRQLPDDVWECLVGNAKVVKLGAIISFHDGRLRAECVEIGEKGLRKMRMIYDGIFNEILDELGNVPLPPYIKEKLNDPERYQTVYAKVRGSAAAPTAGLHFTDEIFTKLKEKGVTVIDVTLHVGLGTFRPMDTEDVEDHDMHSEVYYMSKEAADTLNAAKANGQRIFAIGTTSVRTLESVWNRFGKFEECSGETKLFIYPGYQWHTIDGMLTNFHLPKSTLIMMIASFVGYEFTLEAYRHAVQEKYRFFSFGDCMLITNE

SEQ ID NO: 72168 - protein, 345 aa, Solobacterium moorei
  REGION 1..345: note = tr|E7MPH2|E7MPH2_9FIRM S-adenosylmethionine:tRNA ribosyltransferase-isomerase OS=Solobacterium moorei F0204; OX = 706433 GN=queA PE=3 SV=1
MKWKTSDFDYNLPEELIAQTPLLDRSSSRMLVIHNTEKKYEDKHFYDIVDYLHAGDVLVRNNTRVIPARLFGTKEETGAHVELLLLRQLPDDVWECLVGNAKVVKLGTIISFHDGRLRAECVEIGEKGLRKMRMIYDGIFNEILDELGNVPLPPYIKEKLNDPERYQTVYAKVRGSAAAPTAGLHFTDEIFTKLKEKGVTVIDVTLHVGLSTFRPMDTEDVEDHDMHSEVYYMSKEAADTLNAAKANGQRIFAIGTTSVRTLESVWNRFGKFEECSGETKLFIYPGYQWHTIDGMLTNFHLPKSTLIMMIASFVGYEFTLEAYRHAVQEKYRFFSFGDCMLITNE

SEQ ID NO: 72169 - protein, 349 aa, Soonwooa buanensis
  REGION 1..349: note = tr|A0A1T5D367|A0A1T5D367_9FLAO S-adenosylmethionine:tRNA ribosyltransferase-isomerase; OS = Soonwooa buanensis OX=619805 GN=queA PE=3 SV=1
MKTSDFNFDLPEELLAEHPSEHRDEARLMVLNRKDRTIEHKLFKDVIDYFDEHDLFIFNNTKVFPARLYGNKEKTGAKIEVFLLRELDKETRVWDVLVDPARKIRIGNKLFFTEDESLVAEVIDNTTSRGRTLRFLYDGSYEEFRAKLNELGETPLPKYIKREVEPEDAERYQTIYAKVEGAVAAPTAGLHFSKHLMKRLEIKGVDFAEITLHVGLGTFNPIEVEDLSKHKMESEEVIIDQHNADIINKAVEEKRRICAVGTTTMRAIETSVSSNRKIGPFNGWTNKFIYPPHDFGVANAMITNFHTPKSTLIMMIAAFADKDFIMEAYEEAIKEKYKFYSYGDAMLII

SEQ ID NO: 72170 - protein, 407 aa, Soonwooa buanensis
  REGION 1..407: note = tr|A0A1T5GDK7|A0A1T5GDK7_9FLAO S-adenosylmethionine:tRNA ribosyltransferase-isomerase; OS = Soonwooa buanensis OX=619805 GN=SAMN05660477_02759 PE=3; SV = 1
MMHPRELKIENFTYDLPNENIAYNPANPRDSSKLLVYKKNDISTDIYQHISDYLPSDAVLVFNDTKVIKSRLFFTNETGATIEVFCLEPYGENINYEDYFQKQGSVLWTCLIGKVAKWRTPKLSKILEIDNQNVELTAEIIEKLPDSYVVKLSWSPEEIPFADVVNAAGVTPLPPYIKRVADKTDEETYQTVYSEHDGSVAAPTAGLHFTKRILDDLHSKGIETLFTTLHVGAGTFKPVKSETMDEHIMHSECMNITVDFLEHLLENINRPIIPVGTTSMRTVESIFWMGNKVTNNPNILFENLKVTQWEPYETEIINSAEVAISALINWIKKHEQSHISVETEIIIAPSYTFRIAKGLITNFHQPQSTLLLLVSALIGEKWHELYDYALKNDFRFLSYGDGSLLLP

SEQ ID NO: 72171 - protein, 348 aa, unidentified
  source 1..348: note = Sorangiineae bacterium
  REGION 1..348: note = tr|A0A1W9QHM0|A0A1W9QHM0_9DELT S-adenosylmethionine:tRNA ribosyltransferase-isomerase; OS = Sorangiineae bacterium NIC37A_2 OX=1970199 GN=queA PE=3; SV = 1
MRTELFDYSLPEELIAPYPLPERDGARLCVLGPEEPSEARVRDLPRLVEPGDLLVLNETKVRPARVFCERPRSGSQGGGRVEVVFLRQLEAGQWEALARANRPLRPGDKLAIVEAGLELTVEKKGEQGTIFLRSTEDVEEALARHGQMPLPPYMRRAAEDLDRSRYQTVFAKEVGSAAAPTAGLHLTPELLSEIEAKGVRVARLVLHVGLGTFRPVSTDDLDDHAMHEEWIRVTAEVSEAVRRTREQGGRVVAIGTTVVRALESLADEQGQIAPGERATRLLIQPGYRFRVVDALLTNFHMPKSTLVALVSALGGRERVLAAYEWAIARKFRFLSYGDAMWIPGRMAE

SEQ ID NO: 72172 - protein, 374 aa, Sorangium cellulosum
  REGION 1..374: note = sp|A9FI02|QUEA_SORC5 S-adenosylmethionine:tRNA ribosyltransferase-isomerase OS=Sorangium cellulosum (strain So ce56) OX=448385 GN=queA PE=3 SV=1
MRCELLDYELPEALIASRPPEERDGARLLLVDRGRRAGEVEHAAIRDLDRYIERGALVIVNDTKVVPARLFGRKRGTGGQVELFLLHRLDGAPAGAEDLGGGPQESAPRSERWRAMGRASKPIRPGSVLDIERDGALVAEVLERAEDGVLTVQLSSPAGLSVAAAIDAYGHVPLPPYLGRGDDASDRERYQTIFARVPGAVAAPTAGLHLSPGLVERLRANGVEIASVTLHVGLGTFQPVTVDDLDLHPMHAEVYSIPDATAGAIAGARARGAPVIAIGTTVVRALESAADPARAGLVQAQSGETRLLIQPGYRFRVVDALLTNFHLPRSTLLALVFAFAGRERTLLAYRAAIDAGYRFYSYGDAMLIRGVDAP

SEQ ID NO: 72173 - protein, 341 aa, Sorangium cellulosum
  REGION 1..341: note = tr|A9FKR0|A9FKR0_SORC5 S-adenosylmethionine:tRNA ribosyltransferase-isomerase OS=Sorangium cellulosum (strain So ce56) OX=448385 GN=queA2 PE=3 SV=1
MSPATWPRENPLEERLLHVDPRAGRLRDARIADLPALLEPGDLLVVNDGATMPASLHGATERGAAVEVRLIGELSEGRYSALLFGAGDWHTRTEDRPAPPALGPGDAVTFGEDLSATVERVSPASPRLVEIAFHERGAPLWSALYRRGRPIQYAYVAGPLEIWHAQTRYASRPLCAELPSAGRPLVWGLLLELIRRGVRVASLTHAAGISSTGEPALDALLPLPERFDIPEETVAAVREAKARGRRVIAVGTTVTRALEGCAAQHGGELRAGAGVTDLMLHPGFRPRVVDGLLTGVHDPTESHFRLLEAFAPASLLHRANSYAEEAGYLCHEFGDSYLVLS

SEQ ID NO: 72174 - protein, 325 aa, unidentified
  source 1..325: note = Spartobacteria bacterium
  REGION 1..325: note = tr|A0A2A2XUA3|A0A2A2XUA3_9BACT S-adenosylmethionine:tRNA ribosyltransferase-isomerase; OS = Spartobacteria bacterium AMD-G4 OX=1982325 GN=queA PE=3; SV = 1
MSGQVRDYHYDLPPELIARTPAARRDESRMLVLHRTSGEIEHRRFQDFPSILTEEDIVALNDSRVIKARLLTDPPGVEIFLLENLAGNRWKCLVKPGRKLRPGTRVPIAGTVAEVVEVLPGGERIMQFDEAPDLEVHGHMPLPPYFKREAEKLDDDRYQTVYANSPGSVAAPTAGLHFTPEILSQIHHTFLTLHVGAGTFLPVKTEKIADHEMHEESYSISARSAAALNNAKRIIAVGTTATRVLESQPPGPLQTCEGRTGIFIYPPYEFQRVGALLTNFHLPESTLLMLVSAFAGREAVFKAYQEAISERYRFYSYGDCMLVVD

SEQ ID NO: 72175 - protein, 326 aa, unidentified
  source 1..326: note = Spartobacteria bacterium
  REGION 1..326: note = tr|A0A3D4A795|A0A3D4A795_9BACT S-adenosylmethionine:tRNA ribosyltransferase-isomerase; OS = Spartobacteria bacterium OX=2052183 GN=queA PE=3 SV=1
MNARLLDYDYDLPAELIAQRPLPRRDDSRMMVLRRDAQRIEHRQFTELKTLLNSGDLLVLNNTRVLPARKFSDDGAIEFLFTQRIGPARWKCLVKPGRKMRLGAIAKIDNAILRVEEILPEGERVVSLNEDVDLYAGGSMPLPPYIGRESDAEDERRYQTIFAGAPGALAAPTAGLHFTQEILNEIPHAFVTLHVGTGTFLPVRSEKISAHRMHPEQFSISPVAAAKIDNAKRTLAVGTTTVRVLESARRQNGNLIAQSGSTDLFIYPPYQFRHVDLLFTNFHLPCSTLLMLVCAFAGRDFVLAAYQEAIRERYRFYSYGDCMLIL

SEQ ID NO: 72176 - protein, 334 aa, Sphaerisporangium album
  REGION 1..334: note = tr|A0A367FL02|A0A367FL02_9ACTN S-adenosylmethionine:tRNA ribosyltransferase-isomerase; OS = Sphaerisporangium album OX=509200 GN=DQ384_16480 PE=3; SV = 1
MITFDLPRAREAHEPPEARGLARDHVRLMVSVTDSGSITHHSFTELPDLLRPGDVLVVNDSITLPAAVPLDRLAVHFSTAREDGTWLVELRRRTGTTTAPYPGGAPGEWLPLPGGATLRLLERETPRLWRAALDRDVPGYLRQYGVPIRYSYVEHDWPLSAYQTVFGVRPGSAEMPSAGRPFSHELVTALVSRGILIAPITLHTGVASPEKDEPPYPERFAVPAHTARLVNQAEGRVIAVGTTVVRALETAALGVRGPGRVRAAEGFTSHVVTPAQGVRAVDGLVTGLHEPRSSHLMMLSAIAGEELVARSYEEALREGYLWHEFGDLHLIMHE

SEQ ID NO: 72177 - protein, 341 aa, Sphaerisporangium sp.
  REGION 1..341: note = tr|A0A366M657|A0A366M657_9ACTN S-adenosylmethionine:tRNA ribosyltransferase-isomerase; OS = Sphaerisporangium sp. LHW63015 OX=2248750; GN = DP939_02875 PE=3 SV=1
MTVQAFAFDFDLPAALEAHEPPEARGLARDGVRLMVSWRDTGHIAHRGFADLPDLLAPGDLLVVNDSATLPAAVRLDKLAVHFSTEREDGSWLVELRHRTQAGGTRPYGGGAPGEWLPLPGQATLRLIERETPRLWRARLDRDVRTYLGEHGVPIRYSYIARDRPLADYQTVFARVPGSAEMPSAARPFSQRLVTSLVVRGIGIAPVTLHTGVASPERDEPPYEEWFSVPAATARQVNLARASGARVIAVGTTVVRALESAAGDDGQVRAAAGWTGRVVTPETGVRAVDGLVTGLHEPRSTHLMMLAAIGGAGLIARGYEEALAKEYLWHEFGDAHLILAR

SEQ ID NO: 72178 - protein, 341 aa, Sphaerisporangium sp.
  REGION 1..341: note = tr|A0A2W2GWE5|A0A2W2GWE5_9ACTN S-adenosylmethionine:tRNA ribosyltransferase-isomerase; OS = Sphaerisporangium sp. 7K107 OX=2070365 GN=C1I98_14015; PE = 3 SV=1
MTVQASAFDFELPAAREAHEPPEARGLTRDGVRLMVSWRDTGHIAHRRFADLPDLLEPGDLLVVNDSATLPAAVRLDKLAVHFSTEREDGSWLVELRHRTQAGGTRPYGGGAPGEWLPLPGQATLRLIERETPRLWRARLDRDVRTYLGEHGVPIRYSYIARDWPLADYQTVFARVPGSAEMPSAARPFSQRLVTSLVVRGIGIAPVTLHTGVASPERDEPPYQEWFSVPPATARQVNLARASGARVIAVGTTVVRALESAAGDDGRVRAAAGWTDRVVTPEIGVRAVDGLVTGLHEPRSSHLMMLAAIGGGELIARGYEEALAKEYLWHEFGDTHLILTR

SEQ ID NO: 72179 - protein, 341 aa, Sphaerobacter thermophilus
  REGION 1..341: note = tr|D1C3D8|D1C3D8_SPHTD S-adenosylmethionine:tRNA ribosyltransferase-isomerase OS=Sphaerobacter thermophilus (strain DSM 20745 / S 6022) OX=479434 GN=queA PE=3 SV=1
MADYDYDLPPELIAQHPVEPRDASRLMVVDRASETIAHRRFRDLPSLLSPGDLLIVNDTRVMPARLHGRRPTGGQVELLLLRRLEDGCWEAMGRPARRLRPGTFVHLRDQGGREAVEPAEVVARRGEGLLAVRLPSEVEARLDEFGEMPLPPYIRARLEDPERYQTVFATEVGSAAAPTAGLHFTPRLLAELDAAGIRRATITLHVGLGTFLPVKVEDARQHRMHQEWYHVPADTLAAIRETRAAGRRVVAVGTTACRTLESIAPDLDADDDLSGWTDLFIVPGHQFQVVDALVTNFHLPRSTLLLLVSAFAGRELILRAYEEAVRTRYRFFSFGDAMLIL

SEQ ID NO: 72180 - protein, 346 aa, unidentified
  source 1..346: note = Sphaerochaeta coccoides
  REGION 1..346: note = tr|F4GK42|F4GK42_SPHCD S-adenosylmethionine:tRNA ribosyltransferase-isomerase OS=Sphaerochaeta coccoides (strain ATCC BAA-1237 / DSM 17374 / SPN1) OX=760011; GN = queAPE=3 SV=1
MKTKEFFFDLPEELIAQTPSERRGASHLLVLDKTTGKLTDSSMEDFASFLPEDAVMVINNSKVRKARAYGISGSGGKVEFLFLEENADQTWNVMVTKSKKQKSGKEYVFHAPDGRIGASAQIIRENPDGTKTVSFNAPITEAFFQECGHVPLPPYIKREDTFSDESRYQTIYARPEGSVAAPTAGLHFTGEILDSIRERGVQVVPVTLHVGPGTFLPMRVDDIEDHHMHYERYEVPEDTARIVTDAKANNRPVIAVGTTSIRTLESAWDSVHGMLTPGQGRTNLFITPGFTYRVANHLLTNFHTPESTLLVLVSAFAGKDLIFSAYHHAIERRYHFFSYGDAMFIR

SEQ ID NO: 72181 - protein, 346 aa, unidentified
  source 1..346: note = Sphaerochaeta dissipatitropha
  REGION 1..346: note = tr|A0A375AMK8|A0A375AMK8_9SPIO S-adenosylmethionine:tRNA ribosyltransferase-isomerase; OS = Sphaerochaeta dissipatitropha OX=1945881 GN=queA PE=3; SV = 1
MTIKEYSFDLPEHLIAQTPVDRRGTDRLLVLDKQTGTIIDEQMTNFSSYIEKGSVLVINNSKVRKARVYAVSETGSRVEFLFLEENLDHSWNVMVTKTKKQHVGKHYTFSDAQGSYVRTGCIIKANDDGTRTIRFDQILDEMFFTKLGHVPLPPYIKRDDSFADENRYQTVYAQKEGSVAAPTAGLHFTDEILASVRDKGCTIVAVTLHVGPGTFLPVRTENLEDHHMHYESYEISQESARIINEAKAQGRKIVATGTTSVRTLESAFNTETGLLEHGQGRTNLFIRPPYAFKIVDQLLTNFHTPESTLLVLVSTFAGKELIDKAYRHAVSESYRFFSYGDAMFIC

SEQ ID NO: 72182 - protein, 346 aa, Sphaerochaeta globosa
  REGION 1..346: note = tr|F0RZ21|F0RZ21_SPHGB S-adenosylmethionine:tRNA ribosyltransferase-isomerase OS=Sphaerochaeta globosa (strain ATCC BAA-1886 / DSM 22777 / Buddy) OX=158189; GN = queA P E=3 SV=1
MTIKEYSFDLPEHLIAQTPIDRRGEDRLLVLDKHSGTIIDEQMTHFASYLQEGSILVVNNSKVRKARVFAISETKSRVEFLFLEENLDHSWNVMVTKTKKQHVGKHYTFCTADQSYVRTGCITKANEDGTRTITFNHVLDEDFFLKLGHVPLPPYIKREDCFADENRYQTIYAQKEGSVAAPTAGLHFTQEILASIRAKGCTIVPVTLHVGPGTFLPVRTDNLEDHHMHYESYEIEEESARIINQAKAQGRKIVATGTTSVRTLESAFNTETGLLESGQGRTNLFIRPPYTFKIVDQLLTNFHTPESTLLVLVSTFAGKEKIDRAYRHAVEQSYRFFSYGDAMFIC

SEQ ID NO: 72183 - protein, 346 aa, unidentified
  source 1..346: note = Sphaerochaeta halotolerans
  REGION 1..346: note = tr|A0A372MGM4|A0A372MGM4_9SPIO S-adenosylmethionine:tRNA ribosyltransferase-isomerase; OS = Sphaerochaeta halotolerans OX=2293840 GN=queA PE=3 SV=1
MKIKEFSFDLPPHLIAQTPADKRGEDRLLVLNRSDGSVIDEQMHNFASYLDEGSVVVVNNSKVRKARVYATSDTGSMVEFLFLEENLDNTWQCMVTKAKRQKVGKHYTFSDEEGSYIQKAWITEIGDDGTRTVAFETPLDEEFFRRLGHVPLPPYIKREDSFADEKRYQTIYAEKEGSVAAPTAGLHFTEEILSSIQEKGCTIVPITLHVGPGTFLPVRTEHLDDHTMHYERYNISEEAAKLITQAHKEGRKVVATGTTSVRTLESAFNSETGCLESGEGRTNLFIRPEYQWKVVDQLLTNFHTPESTLLVLVSTFAGKQLIDSAYRHAVDKEYRFFSYGDAMFIR

SEQ ID NO: 72184 - protein, 346 aa, Sphaerochaeta pleomorpha
  REGION 1..346: note = tr|G8QW16|G8QW16_SPHPG S-adenosylmethionine:tRNA ribosyltransferase-isomerase OS=Sphaerochaeta pleomorpha (strain ATCC BAA-1885 / DSM 22778 / Grapes) OX=158190; GN = qu eA PE=3 SV=1
MKIKEFSFDLPPELIAQTPAERRGNDRLLVLDRKNGTYTDAMMQDFVDYLEEGSVIVINNSKVRKARVFGMSETGGRVEFLFLEENLDHSWQVMVTKLKKQRVGKRYHFANEEGSLSYNAEIISENEDGTRTIAFAQPLDESFFQELGHVPLPPYIKREDDFKDETRYQTVFAKTEGSVAAPTAGLHFTQEIIDRILQKGCTFAPITLHVGPGTFLPVRTEDLEDHHMHYERFEVSEETARIVTEAKKAGKKIVATGTTSVRTLESAFNVEQQLLAPGLNRTNLFIMPGYQWKVVDQLLTNFHTPESTLLVLVSTFAGRDHIMGAYAHAVEERYRFYSYGDAMFIR

SEQ ID NO: 72185 - protein, 81 aa, Sphaerochaeta sp.
  REGION 1..81: note = tr|A0A3B9RQH0|A0A3B9RQH0_9SPIO S-adenosylmethionine:tRNA ribosyltransferase-isomerase (Fragment) OS=Sphaerochaeta sp. OX=1972642 GN=DCG32_06545; PE = 3 SV=1
MKIKEYSFELPPELIAQTPIDKRGSDRLMVVDRTTGSVIDSEMSNFVDYLPSGCLLVVNNSKVRKARLYACSETGGTVEFL

SEQ ID NO: 72186 - protein, 344 aa, Sphaerochaeta sp.
  REGION 1..344: note = tr|A0A3D1X3Q2|A0A3D1X3Q2_9SPIO S-adenosylmethionine:tRNA ribosyltransferase-isomerase; OS = Sphaerochaeta sp. OX=1972642 GN=queA PE=3 SV=1
MKTKEFSFDLPENLIAQFPSDKRGESRLLVLDRSTGEFSDSHITDLPSFVEPGSVLVVNNSKVRKARVYAESETGARVEFLFLHELPDHTWTAMVTKSKKQRIGKHYRFDSPSGMQWQASIVGEHEDGKLVRFEQPIDETFFSECGHVPLPPYIKRSDAMSDESRYQTVYADRAGSVAAPTAGLHFTSEILEQIRNKGVEICPVTLHVGPGTFLPVRADHLEDHLMHLEQYDIPVGTAEAVTKAKREGRKIVAVGTTSVRTMESAFDVGTESLPAGPGSTRLFILPPYRFKVVDQLLTNFHTPESTLLVLVSTFAGKEHIMRAYTHAVQEKYRFFSYGDAMFIR

SEQ ID NO: 72187 - protein, 391 aa, unidentified
  source 1..391: note = Sphaerospermopsis kisseleviana
  REGION 1..391: note = tr|A0A1Z4UI78|A0A1Z4UI78_9CYAN S-adenosylmethionine:tRNA ribosyltransferase-isomerase; OS = Sphaerospermopsis kisseleviana NIES-73 OX=1973480; GN = queA PE=3 SV=1
MPNAHYPLPIPCLPFRKMSNLENQGVDLNRSLSGYDYELPTELIAQNPAVPRDSSRLLVIDSLSTGVEKPALDYIFRDLVEILKSGDLLVMNNTKVIPARLYGRKSTGAEVEVLLLEERQHNCWLALVKPGKYFKPGTQIIFDGQKLAAGNELTATVVERDEATGGRLLQFDLPENVPLVQVLEKFGEIPLPPYINASSAADEQYQTVYAQEQGAIAAPTAGLHFTPELLQKLRDIGINQAFLTLHVGVGTFRPVEVEDVTTHQMHEEWIEVSNATVEQIKATKAAGGRIIAVGTTVVRALEGAAQSGDLQPYVGKVNLFIYPGYQWRVVQGLITNFHLPRSSLLMLVSALIGRERLLKIYEQAIASRYRFYSFGDAMLILPQATINAGDW

SEQ ID NO: 72188 - protein, 398 aa, unidentified
  source 1..398: note = Sphaerospermopsis reniformis
  REGION 1..398: note = tr|A0A480A0T4|A0A480A0T4_9CYAN S-adenosylmethionine:tRNA ribosyltransferase-isomerase; OS = Sphaerospermopsis reniformis OX=531300 GN=queA PE=3 SV=1
MPNAQCPMPNAHYPLPIPCLPFRKMSNLENQGVDLDRSLSGYDYELPTELIAQNPAVPRDSSRLLVIDSLSTGVEKPALDYIFRDLVEILKSGDLLVMNNTKVIPARLYGRKSTGAEVEVLLLEERQHNCWLALVKPGKYFKPGTQIIFDGQKLAAGNELTATVVERDEANGGRLLQFDLPENVPLVQVLEKFGEIPLPPYINASSAADEQYQTVYAQEQGAIAAPTAGLHFTPELLQKLRDIGINQAFLTLHVGVGTFRPVEVEDVTTHQMHEEWIEVSNATVEQIKATKAAGGRIIAVGTTVVRALEGAAQSGDLQPYVGKVNLFIYPGYQWRVVQGLITNFHLPRSSLLMLVSALIGRERLLKIYEQAIASRYRFYSFGDAMLILPQATINAGDW

SEQ ID NO: 72189 - protein, 372 aa, Sphaerotilus hippei
  REGION 1..372: note = tr|A0A318H0D6|A0A318H0D6_9BURK S-adenosylmethionine:tRNA ribosyltransferase-isomerase; OS = Sphaerotilus hippei OX=744406 GN=queA PE=3 SV=1
MNLPPSPARHDHVVADFDFELPPELIAQQPAAERTGSRLLDGRAWPPVDRPFADLPGLLQAGDLLVFNDTQVIRARLHGHKDTGGGVEALIERVLPGAGARHEAWAHLRASKSPRAGQRVRFGPAGAQVEAEVLGRCGPEDSLFHLRFPSDVFEVLERIGHVPLPPYITHDDSADDVRRYQTVFAREPGAVAAPTAALHFDEAMLARLADAGIGQARVTLHVGAGTFQPVRVERLADHRMHSEWFEVPADTVAAIARTRAAGGRVVSVGTTTLRALESAAADPTLPVDASGRRLPLAGARETEIFITPGFEFQVVDRLITNFHLPRSTLLMLVSALAGHAHMRALYQHAIEQRYRFFSYGDAMLLDRVATPR

SEQ ID NO: 72190 - protein, 372 aa, Sphaerotilus natans
  REGION 1..372: note = tr|A0A059KJD9|A0A059KJD9_9BURK S-adenosylmethionine:tRNA ribosyltransferase-isomerase; OS = Sphaerotilus natans subsp. natans DSM 6575 OX=1286631; GN = queA PE=3 SV=1
MTAYTVADFDFDLPQELIAQHPAPERSASRLLDGRTLPATERVFRELPDLLSPGDLLVFNDTRVIRARLHGAKDTGGSVEALVERVLPGAADGRHEVWAHLRASKSPRAGQTVHFRNAAGQSFPAEVLGRCGPENGLFHLRLPGDALALLEQFGHVPLPPYITHADDEDDARRYQTVFARVPGAVAAPTAALHFDEGVLAALEARDVRRASVTLHVGAGTFQPVRVESIADHRMHSEWFEVPQATVDAITETRARGGQVIAVGTTTLRSLESAALGTPDRLPRAGARDTDIFITPGFDFRVVDRLVTNFHLPRSTLMMLVSAFAGFDTIRTLYADAIARRMRFFSYGDAMLLQRAASAGNDGDPSGNSAVPR

SEQ ID NO: 72191 - protein, 389 aa, Sphaerotilus natans
  REGION 1..389: note = tr|A0A5C1PXF7|A0A5C1PXF7_9BURK S-adenosylmethionine:tRNA ribosyltransferase-isomerase; OS = Sphaerotilus natans subsp. sulfidivorans OX=639200; GN = queA PE=3 SV=1
MHHSAPPPFPSQALPREPVNHTVADFDFDLPQELIAQHPTPERSASRLLDGRALPATERVFRELPDLLEPGDLLVFNDTRVIRARLHGAKDTGGSVEALVERVLPGTEDGRHEVWAHLRASKSPRAGQTVHFHNAAGERFAAEVLGRCGPENGLFHLRLPGDALTLLEQFGHVPLPPYITHADDEDDARRYQTVFARVPGAVAAPTAALHFDEGVLAALEARGVRRASVTLHVGAGTFQPVRVESISDHRMHSEWFEVPQATVDAIAETRARGGRVIAVGTTTLRSLESAALGTPDRLPRAGARDTDIFITPGFDFRVVDRLVTNFHLPRSTLMMLVSAFAGFDAIRTLYADAIARRMRFFSYGDAMLLQRAASAGNDGDPSGNSAVPR

SEQ ID NO: 72192 - protein, 108 aa, unidentified
  source 1..108: note = Sphingobacteriaceae bacterium
  REGION 1..108: note = tr|A0A4Q3EDA2|A0A4Q3EDA2_9SPHI S-adenosylmethionine:tRNA ribosyltransferase-isomerase (Fragment) OS=Sphingobacteriaceae bacterium OX=2021370; GN = EOP42_32925 PE=3 SV=1
KQADIVNRGIENKRRICAIGTTSMRTIESAVSASHTLKAANDWTSKFIFPPYDFSIANSMVTNFHTPESTLLMMISAFGGYEHVMNAYEVAIKEKYRFYSYGDAMLII

SEQ ID NO: 72193 - protein, 349 aa, unidentified
  source 1..349: note = Sphingobacteriaceae bacterium
  REGION 1..349: note = tr|A0A1X9ZCB2|A0A1X9ZCB2_9SPHI S-adenosylmethionine:tRNA ribosyltransferase-isomerase; OS = Sphingobacteriaceae bacterium GW460-11-11-14-LB5; OX = 1986952 GN=queA PE=3 SV= 1
MKLSQFKFNLPESLVANNPAEQRDEARLMVLHKDSGKIEHKIFKDVLGYFDDKDVMILNNTKVFPARLYGNKEKTGATIEVFLLRELNKELRLWDVLVDPARKIRVGNKLYFGDDDLLVAEVVDNTTSRGRTIRFLFEGTDEEFRKNVEILGETPLPKYIKRKATAEDKERYQTIFAKHEGAVAAPTAGLHFSRELMKRLELKGVEFAEVTLHVGLGTFRTVEVEDLTKHKMDSEQFIIEQKDANIVNKALEEKRKICAVGTTSMRAIESAVSANRTLKAANDWTSKFIFPPYDFSIANSMITNFHTPESTLLMMVSAFGGYENVMNAYEVAVKEKYKFYSYGDAMLII

SEQ ID NO: 72194 - protein, 349 aa, unidentified
  source 1..349: note = Sphingobacteriales bacterium
  REGION 1..349: note = tr|A0A0R2VH45|A0A0R2VH45_9SPHI S-adenosylmethionine:tRNA ribosyltransferase-isomerase; OS = Sphingobacteriales bacterium BACL12 MAG-120802-bin5; OX = 1655599 GN=queA PE=3SV=1
MKLSKFSFDLPESLIAQSPSKERDESKLMVVHRDTGKLENKKFKDILDYFDDGDVMVLNNTKVFNARLYGRKEKTGARIEVFMLRELNSDMHLWDVLVDPARKIRVGNKLYFGEDDMLVAEVVDNTTSRGRTIRFIHDGTSEELRRMLDILGETPLPKYIKRKPTDEDKERYQTIYAKNEGAVAAPTAGLHFTPELMKRLELKGVNFAEVTLHVGLGTFRSIEVEDLSKHKMDAEFIRIDKKAADTVNKGIEAHKRICAIGTTSVRTIETSVSANKLLKPEEGWTNLFIHPPYEFSICNSMITNFHLPKTSLIIMVAAFAGYDLTMEAYKKAIKDKYRFYSYGDAMLII

SEQ ID NO: 72195 - protein, 349 aa, unidentified
  source 1..349: note = Sphingobacteriales bacterium
  REGION 1..349: note = tr|A0A1M3H3H0|A0A1M3H3H0_9SPHI S-adenosylmethionine:tRNA ribosyltransferase-isomerase; OS = Sphingobacteriales bacterium 50-39 OX=1895841 GN=queA; PE = 3 SV=1
MKLSQFKFDLPLNLIAQHPAKKREDSRMMVVHRATGQIENKHFRDILDYFDDKDVFVVNNTKVFPARMYGRKEKTGAKIEVFLLRELNKPNRLWDVIVDPARKIRVGNKLYFGDNDELVAEVIDNTTSRGRTIRFLWDGTDDEFRQVLEVLGETPLPKYIKRKPDEEDKERYQTVYAKHEGAVAAPTAGLHFSKELIKRLEIKGVRFAEVTLHTGLGTFRPIEVEDLSKHKMDAEYYRIEDDACKIVNKARMGGHRICSIGTTTMRAVESSFTAEKLLKPSEGWTNTFIHPPYQFNIADALVTNFHLPKTSLLIMVCAFAGYDLAMEAYKKAIKDKYRFFSYGDAMLVV

SEQ ID NO: 72196 - protein, 410 aa, unidentified
  source 1..410: note = Sphingobacteriia bacterium
  REGION 1..410: note = tr|A0A259HLX4|A0A259HLX4_9BACT S-adenosylmethionine:tRNA ribosyltransferase-isomerase; OS = Sphingobacteriia bacterium 39-39-8 OX=1970578; GN = B7X72_09505 PE=3 SV=1
MLAEQVKKIQIKDYSYELPDERIAKFPLDNRDQSKLLIANQPYQIDQYLNLAQHLPANSFLVFNNTKVVEARILFQKPTGGVIELFCLEPDESYADITTAMLQKGTVQWKCLVGGAKKWKEEFLEKTIIDQGQTITLRARRVAQGAEAYLIEFSWSNEQMSFAELLHIAGLIPLPPYLNRQAENSDAERYQTVYAKHDGSVAAPTAGLHFTEGVFASLASKGIQKDFVTLHVGAGTFKPVKADAMQDHEMHAEFIDVSISFIENLLSRLGDPIVPVGTTSMRTLESLYWLGGKTISNPSISLAELAVYQWDPYERNEVIPASIALASLLQWMKALQLIRLITKTQIIIAPGYQFRICSGLITNFHQPQSTLLLLVSALIGDKWKDLYDHAMKNDFRFLSYGDGCLIWNVS

SEQ ID NO: 72197 - protein, 469 aa, unidentified
  source 1..469: note = Sphingobacteriia bacterium
  REGION 1..469: note = tr|A0A1G3J3U6|A0A1G3J3U6_9BACT S-adenosylmethionine:tRNA ribosyltransferase-isomerase; OS = Sphingobacteriia bacterium RIFOXYD2_FULL_35_12; OX = 1802167 GN=A2546_08000 PE= 3 SV=1
MKHPSLLHIADFTYELPDHKIARYPLEQRDQSKLLIWGSSQNLMGAGHGSEVLESDFAPIRENTYANIADELPSASLLVFNNTKVVEARLLFQKPTGGLIELFCLEPADQYEDITTAMLQKGSVQWKCLVGGAKKWKEGSVQLSVEAPSGVGAAGGGAAASGAGLRIEATKVAALPDCFLIEFRWEPAGLSFAEVLHLAGDIPLPPYLNRATEEADKERYQTIYAKHDGSVAAPTAGLHFTESVFLKLSEKNILKAYVTLHVGAGTFKPVKAAQMKDHEMHAEFIDVTVETVEQLLAHVEKGIIAVGTTSLRTLESLYWIGVKTIRNPAISSDNLHVTQWEPYVSAGEIAENKSAQKNIPKEYTSGGDIVLPTATESLQSLLQWMQKNNASRIITKTQIIIAPGYSFKIIRALITNFHQPQSTLLLLVSAIVGENWKKIYQYALANEYRFLSYGDGSILWVAKPESVEN

SEQ ID NO: 72198 - protein, 349 aa, unidentified
  source 1..349: note = Sphingobacterium alimentarium
  REGION 1..349: note = tr|A0A4R3VS47|A0A4R3VS47_9SPHI S-adenosylmethionine:tRNA ribosyltransferase-isomerase; OS = Sphingobacterium alimentarium OX=797292 GN=queA PE=3; SV = 1
MKLSQFKFNLPESLLANEPSEHRDEARLMVLHKDTGKIEHKIFKDVLDYFDDKDVMILNNTKVFPARMYGNKEKTGATIEVFLLRELNKELRLWDVLVDPARKIRVGNKLYFGDDDLLVAEVVDNTTSRGRTIRFLFDGTDEEFRRNIEILGETPLPKYIKRKATPEDKFRYQTIYAKNEGAVAAPTAGLHFSRELMKRLELKGIDFAEITLHVGLGTFRTVEVEDLTKHKMDSEQFIITDEAARTVNKAIENKRRVCAVGTTSMRAIESSVSADRRLKPASDWTSKFIYPPYDFSIANSMITNFHTPESTLLVMIAAFAGYENVMNAYEEAVKEKYKFYSYGDAMLII

SEQ ID NO: 72199 - protein, 349 aa, unidentified
  source 1..349: note = Sphingobacterium alkalisoli
  REGION 1..349: note = tr|A0A4U0H961|A0A4U0H961_9SPHI S-adenosylmethionine:tRNA ribosyltransferase-isomerase; OS = Sphingobacterium alkalisoli OX=1874115 GN=queA PE=3 SV=1
MKLSQFKFNLPESLLASEPSEHRDESRLMVLHRDTGKIEHKIFKDVLDYFDDKDVMILNNTKVFPARMYGNKEKTGATIEVFLLRELNRELRLWDVLVDPARKIRVGNKLYFGEEDLLVAEVVDNTTSRGRTIRFLFDGTDEEFRRNIEILGETPLPKYIKRKATPEDKFRYQTIYAKNEGAVAAPTAGLHFSRELMKRLELKGVDFAEVTLHVGLGTFRTVEVEDLTKHKMDSEQFIITDEAAKTVNKGIDNKRRICAVGTTSMRAIESSVSADRHLKPAADWTSKFIYPPYDFSIANSMITNFHTPESTLLVMIAAFAGYENIMNAYDVAVKEKYRFYSYGDAMLII

SEQ ID NO: 72200 - protein, 349 aa, unidentified
  source 1..349: note = Sphingobacterium cellulitidis
  REGION 1..349: note = tr|A0A235E8N3|A0A235E8N3_9SPHI S-adenosylmethionine:tRNA ribosyltransferase-isomerase; OS = Sphingobacterium cellulitidis OX=1768011 GN=queA PE=3; SV = 1
MKLSQFNFNLPESLLASEPSEQRDESRLMVLHRDSGKIEHKIFKDVLDYFDDKDVMILNNTKVFPARMYGNKEKTGATIEVFLLRELNKELRLWDVLVDPARKIRVGNKLYFGDDDLLVAEVVDNTTSRGRTIRFLFDGTDEEFRKNIEILGETPLPKYIKRKATPEDKFRYQTIYAKNEGAVAAPTAGLHFSRELMKRLELKGVDFAEVTLHVGLGTFRTVEVEDLTKHKMDSEQYIISEEAARIVNKGIDDKRKICAVGTTSMRAIESSVSADKHLKAANDWTSKFIYPPYDFSIANSMITNFHTPQSTLLVMIAAFAGYENVMNAYEVAVKEKYRFYSYGDAMLII

SEQ ID NO: 72201 - protein, 349 aa, Sphingobacterium daejeonense
  REGION 1..349: note = tr|A0A4U9JVI1|A0A4U9JVI1_9SPHI S-adenosylmethionine:tRNA ribosyltransferase-isomerase; OS = Sphingobacterium daejeonense OX=371142 GN=queA PE=3 SV=1
MKLSQFNFNLPESLLASEPSEQRDESRLMVLHRDSGKIEHKIFKDVLDYFDDKDVMILNNTKVFPARMYGNKEKTGATIEVFLLRELNKELRLWDVLVDPARKIRVGNKLYFGDDDLLVAEVVDNTTSRGRTIRFLFDGTDEEFRKNIEILGETPLPKYIKRKATPEDKFRYQTIYAKNEGAVAAPTAGLHFSRELMKRLELKGVDFAEVTLHVGLGTFRTVEVEDLTKHKMDSEQFIISEEAARIVNKGIDNKRKICAVGTTSMRAIESSVSADHHLKAANDWTSKFIYPPYDFSIANSMITNFHTPQSTLLVMIAAFAGYENVMNAYEVAVKEKYRFYSYGDAMLII

SEQ ID NO: 72202 - protein, 349 aa, unidentified
  source 1..349: note = Sphingobacterium deserti
  REGION 1..349: note = tr|A0A0B8T5W4|A0A0B8T5W4_9SPHI S-adenosylmethionine:tRNA ribosyltransferase-isomerase; OS = Sphingobacterium deserti OX=1229276 GN=queA PE=3 SV=1
MKLSQFKFNLPESLLASEPSEQRDESRLMVLHRDSGKIEHKIFKDVLDYFDDKDVMILNNTKVFPARMYGNKEKTGATIEVFLLRELNKELRLWDVLVDPARKIRVGNKLYFGDDDLLVAEVVDNTTSRGRTIRFLFEGTDEEFRRNIEILGETPLPKYIKRKATPEDKFRYQTIYAKNEGAVAAPTAGLHFSRELMKRLELKGVDFAEVTLHVGLGTFRTVEVEDLTKHKMDSEQFIISDEAARVVNKGIDAKRRVCAVGTTSMRAIESSVSADKHLKAANDWTSKFIYPPYDFSIANSMITNFHTPESTLLVMIAAFAGYENTMNAYEVAVKEKYRFYSYGDAMLIV

SEQ ID NO: 72203 - protein, 349 aa, unidentified
  source 1..349: note = Sphingobacterium detergens
  REGION 1..349: note = tr|A0A420BJ67|A0A420BJ67_9SPHI S-adenosylmethionine:tRNA ribosyltransferase-isomerase; OS = Sphingobacterium detergens OX=1145106 GN=queA PE=3 SV=1
MKLSQFKFNLPESLLASEPSENRDESRLMVLHKDTGKIEHKIFKDVLDYFDDKDVMILNNTKVFPARLYGNKEKTGATIEVFLLRELNNELRLWDVLVDPARKIRVGNKLYFGDDDLLVAEVVDNTTSRGRTIRFLFDGTDEEFRRNIEILGETPLPKYIKRKATPEDKFRYQTIYAKNEGAVAAPTAGLHFSRELMKRLELKGVDFAEVTLHVGLGTFRTVEVEDLTKHKMDSEQFIITDEAAKVVNRAIDNKRRVCAVGTTSMRAIESSVSADHHLKAASDWTSKFIYPPYDFSIANSMVTNFHTPESTLLVMIAAFAGYENVMNAYEVAVKEKYRFYSYGDAMLII

SEQ ID NO: 72204 - protein, 349 aa, Sphingobacterium faecium
  REGION 1..349: note = tr|A0A2T5YAW3|A0A2T5YAW3_9SPHI S-adenosylmethionine:tRNA ribosyltransferase-isomerase; OS = Sphingobacterium faecium OX=34087 GN=queA PE=3 SV=1
MKLSQFKFNLPESLLASEPTENRDESRLMVLHRDTGKIEHKIFKDVLDYFDDKDVMILNNTKVFPARLYGNKEKTGATIEVFLLRELNKELRLWDVLVDPARKIRVGNKLYFGDDDLLVAEVVDNTTSRGRTIRFLFDGTDEEFRRNIEILGETPLPKYITRKATPEDKFRYQTIYAKNEGAVAAPTAGLHFSRELMKRLELKGVDFAEVTLHVGLGTFRTVEVEDLTKHKMDSEQFIITDEAAKTVNKAIDLKRRVCAVGTTSMRAIESAVSADRHLKPANDWTSKFIYPPYDFSIANSMITNFHTPESTLLVMIAAFGGYEHVMNAYEQAVKEKYRFYSYGDAMLII

SEQ ID NO: 72205 - protein, 349 aa, unidentified
  source 1..349: note = Sphingobacterium gobiense
  REGION 1..349: note = tr|A0A2S9JRD6|A0A2S9JRD6_9SPHI S-adenosylmethionine:tRNA ribosyltransferase-isomerase; OS = Sphingobacterium gobiense OX=1382456 GN=queA PE=3 SV=1
MKLSQFKFNLPESLLASEPSEQRDESRLMVLHRDSGKIEHKIFKDVLNYFDENDVMILNNTKVFPARMYGNKEKTGATIEVFLLRELNKELRLWDVLVDPARKIRVGNKLYFGEEDLLVAEVVDNTTSRGRTIRFLFDGTDEEFRRNIEILGETPLPKYIKRKATPEDKFRYQTIYAKNEGAVAAPTAGLHFSRELMKRLELKGVEFAEVTLHVGLGTFRTVEVEDLTKHKMDSEQFIISEEAARTVNKGIDDKRRICSVGTTSMRAIESSVSADKHLKPANDWTSKFIYPPYDFSIANSMITNFHTPESTLLVMIAAFGGYENVMNAYEVAVKEKYRFYSYGDAMLII

SEQ ID NO: 72206 - protein, 349 aa, unidentified
  source 1..349: note = Sphingobacterium haloxyli
  REGION 1..349: note = tr|A0A2S9J1E4|A0A2S9J1E4_9SPHI S-adenosylmethionine:tRNA ribosyltransferase-isomerase; OS = Sphingobacterium haloxyli OX=2100533 GN=queA PE=3 SV=1
MKLSQFKFNLPESLLASEPSEQRDESRLMVLHRDSGKIEHKIFKDVLDYFDDKDVMILNNTKVFPARMYGNKEKTGATIEVFLLRELNKELRLWDVLVDPARKIRVGNKLYFGEEDLLVAEVVDNTTSRGRTIRFLFEGTDEEFRRNIEILGETPLPKYIKRKATPEDKFRYQTIYAKNEGAVAAPTAGLHFSRELMKRLELKGVEFAEVTLHVGLGTFRTVEVEDLTKHKMDSEQFIISEEAARTVNKGIDDKRRICSVGTTSMRAIESSVSADKHLKPANDWTSKFIYPPYDFSIANSMITNFHTPESTLLVMIAAFGGYENVMNAYEVAVKEKYRFYSYGDAMLII

SEQ ID NO: 72207 - protein, 349 aa, unidentified
  source 1..349: note = Sphingobacterium lactis
  REGION 1..349: note = tr|A0A1H5XKY1|A0A1H5XKY1_9SPHI S-adenosylmethionine:tRNA ribosyltransferase-isomerase; OS = Sphingobacterium lactis OX=797291 GN=queA PE=3 SV=1
MKLSQFNFNLPESLLASEPSEQRDESRLMVLHRDSGKIEHKIFKDVLNYFDDKDVMILNNTKVFPARMYGNKEKTGATIEVFLLRELNKELRLWDVLVDPARKIRVGNKLYFGDDDLLVAEVVDNTTSRGRTIRFLFDGTDEEFRKNIEILGETPLPKYIKRKATPEDKFRYQTIYAKNEGAVAAPTAGLHFSRELMKRLELKGVEFAEVTLHVGLGTFRQVEVEDLTKHKMDSEQFIISEEAARLVNKGIDDKRKICAVGTTSMRAIESSVSADHHLKAANDWTSKFIYPPYDFSIANSMITNFHTPQSTLLVMIAAFAGYENVMNAYEVAVKEKYRFYSYGDAMLII

SEQ ID NO: 72208 - protein, 349 aa, Sphingobacterium mizutaii
  REGION 1..349: note = tr|A0A239XQB8|A0A239XQB8_9SPHI S-adenosylmethionine:tRNA ribosyltransferase-isomerase; OS = Sphingobacterium mizutaii OX=1010 GN=queA PE=3 SV=1
MKLSQFNFNLPESLLASEPSEQRDESRLMVLHRDSGKIEHKIFKDVLDYFDDKDVMILNNTKVFPARMYGNKEKTGATIEVFLLRELNKELRLWDVLVDPARKIRVGNKLYFGDDDLLVAEVVDNTTSRGRTIRFLFDGTDEEFRKNIEILGETPLPKYIKRKATPEDKFRYQTIYAKNEGAVAAPTAGLHFSRELMKRLELKGVDFAEVTLHVGLGTFRTVEVEDLTKHKMDSEQFIISEEAARIVNTGIDNKRKICAVGTTSMRAIESSVSADKHLKAANDWTSKFIYPPYDFSIANSMITNFHTPQSTLLVMIAAFAGYENVMNAYEVAVKEKYRFYSYGDAMLII

SEQ ID NO: 72209 - protein, 349 aa, Sphingobacterium multivorum
  REGION 1..349: note = tr|A0A2X2JFF0|A0A2X2JFF0_SPHMU S-adenosylmethionine:tRNA ribosyltransferase-isomerase; OS = Sphingobacterium multivorum OX=28454 GN=queA PE=3 SV=1
MKLSQFKFNLPESLLASEPSENRDESRLMVLHRDTGKIEHKIFKDVLDYFDDKDVMILNNTKVFPARLYGNKEKTGATIEVFLLRELNNELRLWDVLVDPARKIRVGNKLYFGDDDLLVAEVVDNTTSRGRTIRFLFDGTDEEFRRNIEILGETPLPKYIKRKATPEDKFRYQTIYAKNEGAVAAPTAGLHFSRELMKRLELKGVDFAEVTLHVGLGTFRTVEVEDLTKHKMDSEQFIITDEAARVVNKAIDNKRRVCAVGTTSMRAIESSVSADHHLKAASDWTSKFIYPPYDFSIANSMITNFHTPESTLLVMIAAFAGYENVMNAYEVAVKEKYRFYSYGDAMLII

SEQ ID NO: 72210 - protein, 349 aa, unidentified
  source 1..349: note = Sphingobacterium nematocida
  REGION 1..349: note = tr|A0A1T5EIK0|A0A1T5EIK0_9SPHI S-adenosylmethionine:tRNA ribosyltransferase-isomerase; OS = Sphingobacterium nematocida OX=1513896 GN=queA PE=3 SV=1
MKLSQFKFNLPESLLASEPSEQRDESRLMVLHKDTGKIEHKIFKDVLDYFDDKDVMILNDTKVFPARMYGNKEKTGATIEVFLLRELNKELRLWDVLVDPARKIRVGNKLYFGDDDLLVAEVVDNTTSRGRTIRFLFEGTDEEFRRNIEILGETPLPKYIKRKATPEDKFRYQTIYAKNEGAVAAPTAGLHFSRELMKRLELKGVDFAEITLHVGLGTFRTVEVEDLTKHKMDSEQFIITEEAAKTVNRAIDNKRRICSVGTTSMRAIESSVSADKHLKAGTDWTSKFIYPPYEFSIANSMITNFHTPESTLLVMIAAFGGYENVMNAYEIAVKEKYRFYSYGDAMLII

SEQ ID NO: 72211 - protein, 349 aa, unidentified; identical to SEQ ID NO: 72202
  source 1..349: note = Sphingobacterium paludis
  REGION 1..349: note = tr|A0A4R7DB25|A0A4R7DB25_9SPHI S-adenosylmethionine:tRNA ribosyltransferase-isomerase; OS = Sphingobacterium paludis OX=1476465 GN=queA PE=3 SV=1

SEQ ID NO: 72212 - protein, 349 aa, unidentified
  source 1..349: note = Sphingobacterium paucimobilis
  REGION 1..349: note = tr|U2J7X5|U2J7X5_9SPHI S-adenosylmethionine:tRNA ribosyltransferase-isomerase OS=Sphingobacterium paucimobilis HER1398 OX=1346330 GN=queA PE=3 SV=1
MKLSQFKFNLPESLLASEPSEQRDESRLMVLHKDTGKIEHKIFKDVLDYFDDKDVMILNDTKVFPARMYGNKEKTGATIEVFLLRELNRELRLWDVLVDPARKIRVGNKLYFGDDDLLVAEVVDNTTSRGRTIRFLFEGTDEEFRRNIEILGETPLPKYIKRKATPEDKFRYQTIYAKNEGAVAAPTAGLHFSRELMKRLELKGVDFAEITLHIGLGTFRTVEVEDLTKHKMDSEQFIITDDAAKTVNRAIDDKRRICAVGTTSMRAIESSVSADRHLKPGSDWTSKFIYPPYEFSIANSMITNFHTPESTLLVMIAAFGGYENVMNAYEVAVKEKYRFYSYGDAMLII

SEQ ID NO: 72213 - protein, 349 aa, unidentified
  source 1..349: note = Sphingobacterium psychroaquaticum
  REGION 1..349: note = tr|A0A1X7I538|A0A1X7I538_9SPHI S-adenosylmethionine:tRNA ribosyltransferase-isomerase; OS = Sphingobacterium psychroaquaticum OX=561061 GN=queA; PE = 3 SV=1
MKLSQFKFNLPESLLASEPSEQRDEARLMVLHRDSGKIEHKIFKDVLDYFDDQDVMILNNTKVFPARMYGNKEKTGATIEVFLLRELNKELRLWDVLVDPARKIRVGNKLYFGDDDLLVAEVVDNTTSRGRTIRFLFDGTDEEFRRNIEILGETPLPKYIKRKATPEDKFRYQTIYAKNEGAVAAPTAGLHFSRELMKRLELKGINFAEVTLHVGLGTFRTVEVEDLTKHKMDSEQFIITDEAAKIVNKGIDSKRRVCAVGTTSMRAIESAVSADRHLKASSDWTSKFIYPPYDFSIANSMITNFHTPESTLLVMIAAFAGYENTMNAYEVAVKEKYRFYSYGDAMLII

SEQ ID NO: 72214 - protein, 349 aa, Sphingobacterium siyangense
  REGION 1..349: note = tr|A0A420GAR4|A0A420GAR4_9SPHI S-adenosylmethionine:tRNA ribosyltransferase-isomerase; OS = Sphingobacterium siyangense OX=459529 GN=queA PE=3 SV=1
MKLSQFKFNLPESLLASEPSENRDESRLMVLHRDTGKIEHKIFKDVLDYFDDKDVMILNNTKVFPARLYGNKEKTGATIEVFLLRELNNELRLWDVLVDPARKIRVGNKLYFGDDDLLVAEVVDNTTSRGRTIRFLFDGTDEEFRRNIEILGETPLPKYIKRKATPEDKFRYQTIYAKNEGAVAAPTAGLHFSRELMKRLELKGVDFAEVTLHVGLGTFRTVEVEDLTKHKMDSEQFIITDEAARVVNRAIDNKRRVCAVGTTSMRAIESSVSADHHLKAASDWTSKFIYPPYDFSIANSMITNFHTPESTLLVMIAAFAGYENVMNAYEVAVKEKYRFYSYGDAMLIV

SEQ ID NO: 72215 - protein, 349 aa, Sphingobacterium sp.
  REGION 1..349: note = tr|A0A4P7DTH1|A0A4P7DTH1_9SPHI S-adenosylmethionine:tRNA ribosyltransferase-isomerase; OS = Sphingobacterium sp. CZ-2 OX=2557994 GN=queA PE=3 SV=1
MKLSQFNFNLPESLLASEPSEQRDESRLMVLHRDSGKIEHKIFKDVLDYFDDKDVMILNNTKVFPARMYGNKEKTGATIEVFLLRELNKELRLWDVLVDPARKIRVGNKLYFGDDDLLVAEVVDNTTSRGRTIRFLFDGTDEEFRKNIEILGETPLPKYIKRKATPEDKFRYQTIYAKNEGAVAAPTAGLHFSRELMKRLELKGVDFAEVTLHVGLGTFRTVEVEDLTKHKMDSEQFIISEEAARVVNKGIDAKRRICAVGTTSMRAIESSVSADKHLKAANDWTSKFIYPPYDFSIANSMITNFHTPQSTLLVMIAAFAGYENVMNAYEVAVKEKYRFYSYGDAMLII

SEQ ID NO: 72216 - protein, 349 aa, Sphingobacterium sp.
  REGION 1..349: note = tr|A0A4R3ACZ5|A0A4R3ACZ5_9SPHI S-adenosylmethionine:tRNA ribosyltransferase-isomerase; OS = Sphingobacterium sp. JUb78 OX=2485111 GN=queA PE=3 SV=1
MKLSQFKFNLPESLLASEPTENRDESRLMVLHRDTGKIEHKIFKDVLDYFDDKDVMILNNTKVFPARLYGNKEKTGATIEVFLLRELNKELRLWDVLVDPARKIRVGNKLYFGDDDLLVAEVVDNTTSRGRTIRFLFDGTDEEFRRNIEILGETPLPKYITRKATPEDKFRYQTIYAKNEGAVAAPTAGLHFSRELMKRLELKGVDFAEVTLHVGLGTFRTVEVEDLTKHKMDSEQFIITEEAAKTVNKAIDLKRRVCAVGTTSMRAIESAVSADRHLKPANDWTSKFIYPPYDFSIANSMITNFHTPESTLLVMIAAFGGYEHVMNAYEQAVKEKYRFYSYGDAMLII

SEQ ID NO: 72217 - protein, 349 aa, Sphingobacterium spiritivorum
  REGION 1..349: note = tr|C2FW72|C2FW72_9SPHI S-adenosylmethionine:tRNA ribosyltransferase-isomerase OS=Sphingobacterium spiritivorum ATCC 33300 OX=525372 GN=queA PE=3 SV=1
MKLSQFKFNLPESLLASEPSEQRDEARLMVLHRDSGKIEHKIFKDVLDYFDDKDVMILNNTKVFPARMYGNKEKTGATIEVFLLRELNKELRLWDVLVDPARKIRVGNKLYFGDDDLLVAEVVDNTTSRGRTIRFLFDGTDEEFRRNIEILGETPLPKYIKRKATPEDKYRYQTIYAKNEGAVAAPTAGLHFSRELMKRLELKGVDFAEVTLHVGLGTFRTVEVEDLTKHKMDSEQFIITEEAARIVNKGIDNKRRVCAVGTTSMRAIESSVSADRHLKAASDWTSKFIYPPYDFSIANSMITNFHTPESTLLVMIAAFAGYENVMNAYEVAVKEKYRFYSYGDAMLII

SEQ ID NO: 72218 - protein, 349 aa, Sphingobacterium spiritivorum; identical to SEQ ID NO: 72217
  REGION 1..349: note = tr|A0A380BGY0|A0A380BGY0_9SPHI S-adenosylmethionine:tRNA ribosyltransferase-isomerase; OS = Sphingobacterium spiritivorum OX=258 GN=queA PE=3 SV=1

SEQ ID NO: 72219 - protein, 349 aa, Sphingobacterium thalpophilum
  REGION 1..349: note = tr|A0A4U9W640|A0A4U9W640_9SPHI S-adenosylmethionine:tRNA ribosyltransferase-isomerase; OS = Sphingobacterium thalpophilum OX=259 GN=queA PE=3 SV=1
MKLSQFKFNLPESLLASEPSENRDESRLMVLHKDTGKIEHKIFKDVLDYFDDKDVMILNNTKVFPARLYGNKEKTGATIEVFLLRELNNELRLWDVLVDPARKIRVGNKLYFGDDDLLVAEVVDNTTSRGRTIRFLFDGTDEEFRRNIEILGETPLPKYIKRKATPEDKFRYQTIYAKNEGAVAAPTAGLHFSRELMKRLELKGVDFAEVTLHVGLGTFRTVEVEDLTKHKMDSEQFIITEEAARIVNKAIDNKRRVCAVGTTSMRAIESSVSADHHLKPASDWTSKFIYPPYDFSIANSMITNFHTPESTLLVMIAAFAGYENVMNAYEVAVKEKYRFYSYGDAMLII

SEQ ID NO: 72220 - protein, 349 aa, Sphingobacterium wenxiniae
  REGION 1..349: note = tr|A0A1I6SS41|A0A1I6SS41_9SPHI S-adenosylmethionine:tRNA ribosyltransferase-isomerase; OS = Sphingobacterium wenxiniae OX=683125 GN=queA PE=3 SV=1
MKLSQFKFNLPESLLASEPSEHRDESRLMVLHRDTGKIEHKIFKDVLDYFDDQDVMILNNTKVFPARMYGNKEKTGATIEVFLLRELNKELRLWDVLVDPARKIRVGNKLYFGDDDLLVAEVVDNTTSRGRTIRFLFDGTDEEFRRNIEILGETPLPKYIKRKATPEDKFRYQTIYAKNEGAVAAPTAGLHFSRELMKRLELKGINFAEVTLHVGLGTFRTVEVEDLTKHKMDSEQFIITDQAAKVVNKGIDEKRRVCAVGTTSMRAIESSVSADKHLKAANDWTSKFIYPPYDFSIANSMITNFHTPESTLLVMIAAFGGYENVMNAYEVAVKEKYRFYSYGDAMLII

SEQ ID NO: 72221 - protein, 368 aa, unidentified
  source 1..368: note = Sphingobacterium yanglingense
  REGION 1..368: note = tr|A0A4R6W8I0|A0A4R6W8I0_9SPHI S-adenosylmethionine:tRNA ribosyltransferase-isomerase; OS = Sphingobacterium yanglingense OX=1437280 GN=queA PE=3; SV = 1
MCAFLALLRTVKTHKYCLHMKLSQFKFNLPESLLASEPSEQRDESRLMVLHKDTGKIEHKIFKDVLDYFDDKDVMILNDTKVFPARMYGNKEKTGATIEVFLLRELNRELRLWDVLVDPARKIRVGNKLYFGDDDLLVAEVVDNTTSRGRTIRFLFEGTDEEFRRNIEILGETPLPKYIKRKATPEDKFRYQTIYAKNEGAVAAPTAGLHFSRELMKRLELKGVDFAEITLHIGLGTFRTVEVEDLTKHKMDSEQFIITDEAANRVNRAIDDKRRICAVGTTSMRAIESSVSADRHLKPGTDWTSKFIYPPYEFSIANSMITNFHTPESTLLVMIAAFGGYENVMNAYEVAVKEKYRFYSYGDAMLII

SEQ ID NO: 72222 - protein, 342 aa, unidentified
  source 1..342: note = Sphingobium algicola
  REGION 1..342: note = tr|A0A5J5H5I7|A0A5J5H5I7_9SPHN tRNA preQ1(34) S-adenosylmethionine ribosyltransferase-isomerase QueA; OS = Sphingobium algicola OX=2048546 GN=queA PE=4 SV=1
MRVDLFDFDLPPENIALRPASPRDSARMLLVPGDGAMQDRIVRDLPSMLRAGDVLVFNDTKVIPAQLEGMRGEARIGATLHKRQGPRQWQAFLRNAKRVRAGDRIDFGAGVTAIAGPRDEDGGVTLDFEGDEPVEVLLERAGRMPLPPYIASKRPTDERDRSDYQTMFAREDGAVAAPTAALHFTPALMAAIADAGIATETLTLHVGAGTFLPVKADDTDDHRMHAEWGRIDAATADRLNAARAAGGRLIAVGTTSLRLLESAAGEDDVIRPFADETRIFITPGYRFRAVDGLMTNFHLPKSTLFMLVSALMGTERMRAVYGHAIETGYRFYSYGDSSLLLP

SEQ ID NO: 72223 - protein, 342 aa, unidentified
  source 1..342: note = Sphingobium algorifonticola
  REGION 1..342: note = tr|A0A437J9Q6|A0A437J9Q6_9SPHN S-adenosylmethionine:tRNA ribosyltransferase-isomerase; OS = Sphingobium algorifonticola OX=2008318 GN=queA PE=3 SV=1
MRVDLFDFDLPPERIALRPAVPRDAARMLVAEGPTGLSDRIVSDLPQILRPGDCLVFNDTRVIPAQLEGTRGQARIGATLHKRLGLRSWQAFVRNGKRVRAGDRIDFGGGVTAIAGPKDADGAIALDFEGDEPVELLLERAGQMPLPPYIAAKRPTDARDAQDYQTMFAREDGAVAAPTAALHFTPALVDALAVRGVLTQTLTLHVGAGTFLPVKAQDTQDHHMHAEWGRIEPQAADRLNAVRAAGGRIIAVGTTSLRLLESATGEDGIIRPFADETRIFITPGYRFRAIDGLMTNFHLPRSTLFMLVSALMGRERMQAAYAHAIAQGYRFYSYGDSSLLLP

SEQ ID NO: 72224 - protein, 342 aa, Sphingobium amiense
  REGION 1..342: note = tr|A0A494W2U5|A0A494W2U5_9SPHN S-adenosylmethionine:tRNA ribosyltransferase-isomerase; OS = Sphingobium amiense OX=135719 GN=queA PE=3 SV=1
MRVDLFDFDLPQDNIALRPASPRDSARLLLVPGDGAMQDHIVRNLPSLLRSGDVLVFNDTKVIPAQLEGKRGEARIGATLHRRLGLRQWQAFLRNARRVRAGDRIDFGAGVTAIAGPRDEDGGVTLDFEGEEPVEILLERAGRMPLPPYIASKRPTDERDRSDYQTMFAREDGAVAAPTAALHFTPALMTAIAQAGVLTETLTLHVGAGTFLPVKADDTDDHRMHAEWGRIDAATAERLNAARAAGGRLIAVGTTSLRLLESACGEDGVIRPFADETRIFITPGYRFRAVDGLMTNFHLPKSTLFMLVSALMGRERMQSAYAHAIATGYRFYSYGDSSLLLP
